United States Patent Application Publication US 2008/0256663 A1 - sequence listing, part 3

SEQ ID NO: 10697 - DNA, 580 bp, Zea mays
  unsure (1)..(580): unsure at all n locations; Clone ID: LIB3061-099-Q1-K6-F6
taaacagcaagcaacatagnaaagtagatccattagcaacaatagagcaacaatggcgaccagagaattttccctccttatgctccttgctctttctacatgtgttgctaacgcgacaattttccctcaatgctcacaagctcctatagcttcccttcttcccccataccttccatcaggggggggtggagtatgtgaaaacccagctcttcaaccatataggcttcaacaagcaatcgcagcaagcaacatacctttatcgcccttgttgtttcaacaatcaccagccctatctttggtgcagtcattggtacaaaccatcagggcacaacagctgcagcaactcgtgctacctgtgatcaaccaagtagctctggcaaacctttctccctactctcagcaacaacaatttcttccattcaaccaactgtctacactgaaccctgctgcttatttgcagcaacaactattaccatttagccagctagctactgcctactctcagcaacaacaacttcttccatttaaccaattggccgcactgaaccccgctgcttatttgcagcagcaaatactactg

SEQ ID NO: 10698 - DNA, 379 bp, Zea mays
  unsure (1)..(379): unsure at all n locations; Clone ID: LIB3061-099-Q1-K6-F7
gtataaatctgcttttgtggtgccggggctctgtgttcagagagagaagaaatccagaaggattttccgagctggtgtggtgaatgccagcgcngaaaagagggaaaggcagagtcagtgtgttaaagcaacgaagatggcctttctcaggggttctggaggtgcagcgatttaatttggggggggtgatttatgttatatactgttttgcgtcatactgaacttcatcgtttaggacttgacaggggcattgtatcgatggccagctttgtgctagtgcgtttattggtgcgatcccagttgtatgtaaatgtaaacattgaccaaatgcagccgaaagaaatgtaatagcgggtcataaactgctatgaatttggat

SEQ ID NO: 10699 - DNA, 578 bp, Zea mays
  unsure (1)..(578): unsure at all n locations; Clone ID: LIB3061-099-Q1-K6-F9
cttcttcccccataccttccatcaattatgagcgggcaatatgtgaaaaacccagctcttcaaccatataggcttcaacaagcaatcgcagcaagcaacatacctttatcgcccttgttgtttcaacaatcgccagccctatctttggtgcagtcattggtacaaaccatcanggcacaacggggggggcgactcgtgctacctctgatcaaccaagtagctctggcaaacctttctccctactctcagcaacaacaatttcttccattcaaccaactgtctacactgaaccctgctgcttatttgcagcaacaactattaccatttagccagctagctactgcctactctcagcaacaacaacttcttccatttaaccaattggccgcactgaaccccgctgcttatttgcagcagcaaatactactaccatttagccagctagctgcagcaaaccgtgcttccttcttgacacagcaacagttgctgcctttctaccagcagtttgcggctaaccccgcaaccctcttacaactacaacaattgttgccctttgtccaacttgctttgacagaccc

SEQ ID NO: 10700 - DNA, 568 bp, Zea mays
  unsure (1)..(568): unsure at all n locations; Clone ID: LIB3061-099-Q1-K6-G10
acaatatgtaccaaagggggggggaaaatttttgcttccttatgctccttggtctttctgcaagtgctgctaccgcaaccattttcccacaatgctcacaagctcctatagcttcctttcttcccccatacctctcaccagcggtgtcttcagtatgtgaaaacggggttgcttggaccctacangatccaacaggcaatcgcagcaggcatcttacctttatcacccttgttcctccaacaaccgtcagccctattacagcagttacctttggtgcatttgttggcacaaaacatcaaggcacaacaactacaacaacttgtgctaggaaaccttgctgcctactctcagcaacagcagtttcttccattcaaccaactggctgcattgaactctgctgcttatttgcaacaacaactaccattcagtcagctagctgctgcctacccccagcaatttcttccattcaaccaactggcagcattgaactctgctgcttatttacaacagcaacagctaccaccattcagccagctagctgatgtgagccctgttgccttcttgacac

SEQ ID NO: 10701 - DNA, 551 bp, Zea mays
  unsure (1)..(551): unsure at all n locations; Clone ID: LIB3061-099-Q1-K6-G12
gccgcgcgcgggggggtgacactgcaattattgatttccgcttaatctattgccgtgccgtagaagcggaagctactggacgaggggctggagcggaagcgggaggcggaactcaatgagctttacgatgccatgaaagattgggtcagcgaactcgggggggggggcggaactcaacgagaagctggtggagaagcaggatgagctcgagaaggcccgtcaggaattccttgaagatattcgtacaagggacgctgaaattctgaagctgaagcagctcttagatgagaaggctgaaaaaaacaattctgcagctactgggtttccttgcctagcgcctgaagctgtcctagaaaattcaactccattgtcacctaaaagaaagacaccattttcccacggcaagcagctagaatgctccagaagacatacacgcatctcagggaataggacaacagagattcggagtgctcatatgctttctttgctgcttcaatctttagttcgcatgaagatctcggtaaatgatggaacanaaatattttcggttt

SEQ ID NO: 10702 - DNA, 135 bp, Zea mays
  Clone ID: LIB3061-099-Q1-K6-G3
ttttgagacccctagcaacatagaaacagatagggtaccaacaatggcagccaaaatattttgcttccttatgctccttggtctttctgcaagtgttgctaccgcaaccattttcccacaatgctcacaagctcc

SEQ ID NO: 10703 - DNA, 572 bp, Zea mays
  unsure (1)..(572): unsure at all n locations; Clone ID: LIB3061-099-Q1-K6-G4
ctagnacgcgagcggtcgcccttttttggggggtttttttttttctttaagtcatagaatcacttatgtcatagaactaattctcacgaagaatcagaataagatagaacttaccaaaccgacccttacatacactggtgctgacacatacaaacagacacacgcacatactggggggggggggggggggacacacacatacgaccataagtatataggagggatacacactaaaacgaacacatgacatacaggaaattaaactaagtttaaattgcttattttccacgagacgaaacacgagcacgngaaaatggcaagacaagagagcgacaccaccaaacatgcatgcatgggtatgctagttcacatgacactgcacgagggcccgccgccctgcctgggttggtggtggtggcggccatgctgctgctgctgcgcgcgctggcagtcggcgtcggcgtcgtcctcggtgccgatggaacagccaggctcgcactggtcgccaccagcgtcggcgtaggcggtagcatcggcttcatcatcagcgtacgcgggggcggcggcccggt

SEQ ID NO: 10704 - DNA, 573 bp, Zea mays
  Clone ID: LIB3061-099-Q1-K6-G5
ggaaaaacccgacgacacctgggggggtggggcggtgccctcactactcctggctctcgctgcgagcgccacctccacgcatacaagcggcggctgcggctgccagccaccgccgccggttcatctaccgccgccggtgcatctgccacctccggttcacctgccacctcctgggcggctgccggcggcggtccacctgccgccgccggtccacctgccaccgacggtccatgtgccgccgccggttcatctgccgccgccaccatgccactaccctactcaaccgccccggcctcagcctcatccccagccacacccatgcccgtgccaacagccgcatccaagcccgtgccagctgcagggaacctgcggcgttggcagcaccccgatcctgggccagtgcgtcgagtttctgaggcatcagtgcagcccgacggcgacgccctactgctcgcctcagtgccagtcgttgcggcagcagtgttgccagcagctcaggcaggtggagccgcagcaccggtaccaggcgatcttcggcttggtcctccagtccatcctgcagcagcagccgca

SEQ ID NO: 10705 - DNA, 581 bp, Zea mays
  Clone ID: LIB3061-099-Q1-K6-G6
attttgagcattcagaacacacctagcgaggcgcactagcaacgacctaacaacaatggctaccaagatattatccctctttgcgcttcttgccctttttgtgagcgcaacaaatgcgttcattattccacaatgctcacttgctcctagtgccattattccacagttcctccctgcaggggggtgaatgggcttcgaacacccagctgtgcaagcctacaggctacaacaagcgcttgcggcgagcgtcttacaacaaccaattgcccaattacaacaacaatccttggcacatctaaccatacaaaccatcgcaacgcaacagcaacaacaatttctaccagcactgagccaactagctgtggtgaaccctgtcgcctacttgcaacagcagttgcttgcatccaacccacttgctctggcaaacatagttgcataccaacaacaacaacaattgcaacagtttctaccagcgctcagtcaactagccatggtgaaccctgccgcctacctacaacagcaacaactgatttcatctagccctctcgctgtggttaatgcacctacatacctgcaacaac

SEQ ID NO: 10706 - DNA, 581 bp, Zea mays
  Clone ID: LIB3061-099-Q1-K6-G7
gcaaaccatggccatggctttggcgtgggggggctgccctccgccatggaaatgccaccgccgccgagcagccaattccaaagcgtgacaaagccgctgcaaatgattcaacatacctcaatcctcaagctcatgatagtgttcttggaatcattctgggaggtggtgctgggactagggggggcggcttgacaaagaagcgtgccaagcctgcagtgccattgggtgccaactatagactgattgatattcctgtcagcaattgtctcaacagcaacatatccaagatctatgtgctaacgcaatttaactctgcttccctcaaccgtcacctctcaagagcctacgggagcaacattggagggtacaagaatgaagggtttgttgaagtcttagctgcacagcagagcccagataatccaaactggtttcagggtactgcagatgctgtaaggcagtacttgtggttgtttgaggagcataatgtgatggaatttctaattcttgctggcgatcacctgtaccggatggactatgaaaagttcattcaggcacacagagaaacaaatgctgatattacc

SEQ ID NO: 10707 - DNA, 587 bp, Zea mays
  unsure (1)..(587): unsure at all n locations; Clone ID: LIB3061-099-Q1-K6-G8
tcgacccagcgtcttttactccgcgcatctctcagggggggggggggacgtaagcacacttgcctccggcggatccaagaacaacaacgggtacaacctaacgatacgtgccgacggggacacagtgaaaatctcgtccgcatctgccagcgccgccacggtgaccaagacgctgctcgacaaggcgggtntgccntgtacctcatcgacgcggtgctcctgccaaggcagcagtctaacgacgaccagggacacactgcgcccgcccctgcgccggcctcctcgcctgcacatgcacctacacctgcccttgcgccggtctcgccgtcgcctgcccctgtaccggtctcgccgtcgccgtcgcctgcacatgcacccacacccccacttgcccctgctccggtgactgcacctgcgcccaggagtcgcccagcgccatcgccagagcacactaccccagctccttcgccggacgcggacggccaaccgcctgcagatcagaagaacaacgcagcaagggacactgcatcttggactatcggcgcggtgctggcgatcgtgtgcctcttgtcgtgaagggtttaagc

SEQ ID NO: 10708 - DNA, 594 bp, Zea mays
  unsure (1)..(594): unsure at all n locations; Clone ID: LIB3061-099-Q1-K6-G9
gcaaanaaggcagtgagcaaagtcactaggtacttttattccaaagtccgagagtgactttgcggaatacgcggagcttattgcaaacaaactacgcccctatgagnaaaagctttcactacatggctctgcttaagaatgtcatgagactttccatgacatcgttgaaaggtgcggaggccgaggatatatcttcttccgtgacggcaattgctaacgagaagatcaaggctgagaaggaggctgcagcaggcaaaaagaaacaaggagcgaaaaagaagcaactccacatcgagaaaggagacgacgacttcatccccggccggggtggtggctacgatgaccccgatgagtacgacttcatgtgatctggctgggagggatagtaggtttctgttatgtatacctttggcgggcagagaatatatcactagagtttgcggcatactattgcatggaacatgcgttatctattcgagaatgatttttgactctgcaggataagaagagcacttgtgatctggatgcatgggtgttttcttatttatccttgaatctttgtgttattttttttttcaacattgcattttttgc

SEQ ID NO: 10709 - DNA, 519 bp, Zea mays
  unsure (1)..(519): unsure at all n locations; Clone ID: LIB3061-099-Q1-K6-H1
tgtctctctcgatgatccccctgtggtgcgcgggggccgtctttccaccgcctcctgcaaccgcttcacgtgcccctcgcaggtcccctttccgccccaaatggagccgaagaagtcctccgnccagcgccagccccacgccatggagcccaacaagtcctctctatgcggcgccgggggtggggggggcaccgccgaagccgantccccgttgtgcagcttgttctacccgccggcgccgaccgcggtcaaatgggtaaagatttggacttgtacagcattctttacaaagggcagagcgggagcgcacaagctggcgtcacagatggtaaaccgcaatgggctccttcttccagaagtcgtgccgcgaatgcaaaggatggtaaacattcaccgccttatgattcagttgatacgtcgtgttttggatcgtctgtggattatggtggtcgagattatttctacgggagctctacacccaagaaagtgacagaatcctccactgactacaaagggaac

SEQ ID NO: 10710 - DNA, 582 bp, Zea mays
  Clone ID: LIB3061-099-Q1-K6-H12
gtcgacccagcgttcgttctggtgattggtttaacaaggttggtggggggtatgaaacaaacaattggggtgttgggcttccaccaagagaaaagaacgaagggagctggcctttgatgaagccaagattggagaacccgtcgttcaaacctgcaaaacatgacattattgctgccttagacaaatttattgatgggcgcaggatcagatactcatcacctctctttcgcctaactacagcaagtgatattgtgcaaagggttcactttcacaacacagggccctccttggttccaggagttattgtcatgagcatcgaagatgcacgaaatgataggcatgatatggcccagatagatgaaacattctcttgtgtcgttacagtcttcaatgtatgtccgtacgaagtgtctatagaaatccctgatcttgcatcactgcggcttcagttgcatccagtgcaggtgaattcatcggatgcgttagccaggcagtctgcgtacgaccccgccacaggtcgattcaccgtgccgaaaaggacagcagcagtgttcgtggaacccaggtgctgatggatgcctt

SEQ ID NO: 10711 - DNA, 536 bp, Zea mays
  unsure (1)..(536): unsure at all n locations; Clone ID: LIB3061-099-Q1-K6-H2
atcattacataaaaaatagtataggcgccaaatcaaatctgcaacatcaattatctaactccaaaaaccatgaagctggtgcttgtggttcttgctttcattgctttagtatcaagtgtttcttgtacacanacagggggggtttgctngggggaacaacaaanccatnaccancaacatcatccacaacaacatcatccacaaaaacaacaacatcaaccaccaccacaacatcaccagcancatcaacaccaacaacaacaagttcacatgcaaccacaaaaacatcatcaacaacaagaagttcatgttcaacaacaacaacaacaaccgcagcaccaccaccaacaacaacaacaacagcaccaacaacaacatcaatgtgaaggccaacaacaacatcaccaacaatcacaaggccatgtgcaacaacacgaacagagccatgagcaacaccaaggacagagccatgagcaacaacatcaacaacaattccagggtcatgacaagcagcaacaaccacaacagcctcagca

SEQ ID NO: 10712 - DNA, 583 bp, Zea mays
  Clone ID: LIB3061-099-Q1-K6-H7
attgagaaccaatagcaacataggaaagcacaatagtgtaccaacaatggcagccaaaatttttgcctccttatgctccttggtctttctgcaagtgctgctacggcgaccattttcccacaatgctcacaagctcctatagcttcccttcttcccccgtacctctcaccagcggtgtcttgggggtgtgaaaacccaattcttcaaccctataggatccaacaggcaatcgcagctggcatcttacctttatcacccttgttcctccaacaatcatcagccctattacagcagttacctttggtgcatttattggcacaaaacatcagggcacaacaactacaacaacttgtgctagcaaaccttgctgcctactctcagcaacaacagtttcttccattcaaccaactagctgcattgaactctgcttcttatttgcaacaacaacaactaccattcagccagctatctgctgcctacccccagcaatttcttccattcaaccaactgacagctttgaactctcctgcttatttacagcagcaacaactactaccattcagccagctagctggtgtgagcc

SEQ ID NO: 10713 - DNA, 582 bp, Zea mays
  unsure (1)..(582): unsure at all n locations; Clone ID: LIB3061-099-Q1-K6-H8
caactagcaacatagnaaagcacaatggggggccaacaatggcagccaaaatttttgcctccttatgctccttggtctttctgcaagtgctgctacggcgaccattttcccgcaatgctcgcaagctcctatagcttcccttcttcccccgtacctctcaccagnncggtgtcttcggtgggggggggaacccaattcttcaaccctacaggatccaacaggcaatcacagctggcatcttacctttatcacccttgttcctccaacaatcatcagccctattacatcagttacctttggtgcatttattggcacaaaacatcagggcacaacaactacaacaacttgtgctagcaaaccttgctgcctactctcagcaacagcagtttcttccattcaaccaactagctgcattgaactctgcttcttatttgcaacaacaacaactaccattcagccagctacctgctgcctacccccagcaatttcttccattcaaccaactggcagcattgaactctcctgcttatttacagcagcaacaactactaccattcagccagctagctggtgtgagccctg

SEQ ID NO: 10714 - DNA, 578 bp, Zea mays
  unsure (1)..(578): unsure at all n locations; Clone ID: LIB3061-099-Q1-K6-H9
caacagcacatanaagtggaatccagtggcaacaatagagcaacaatggcgaccaagatttttccctccttatgctccttgctctttctacatgtgttgctaacgcgacaattttccctcaatgctcacaagctcctatagcttcccttcttcccccataccttccatcaattatagggggaatatgtgaaaacccagctcttcaaccatataggcttcaacaagcaatcgcagcaagcaacatacctttatcgcccttgttgtttcaacaatcgccagccctatctttggtgcagtcattggtacaaaccatcagggcacaacagctgcagcaactcgtgctacctctgatcaaccaagtagctctggcaaacctttctccctactctcagcaacaacaatttcttccattcaaccaactgtctacactgaaccctgctgcttatttgcagcaacaactattaccatttagccagctagctactgcctactctcagcaacaacaacttcttccatttaaccaattggccgcactgaaccccgctgcttatttgcagcagcaaatactactaccattt

SEQ ID NO: 10715 - DNA, 568 bp, Zea mays
  Clone ID: LIB3061-100-Q1-K6-A1
ctcacttgctcctagtgccattattccacagttcctcccaccattacttcaatgggcttcgaacacctagctgtgcaagccaacatgcaacaacaagcgcttgcggcgagcgtcttacaacaaccaattgcccaattgcaacaacaatccttgccacatctaacaatacaagccatcacaacgcaacagcaacaacagttcctaccagcactgagccacctagccatggtgaaccctgccgcctacttgccagagcagctgcttgcatccaacccacttgctctggcgaacgtagttgcaaaccagcaacaacaacagctacaacagtttctgccaacgctcagtcaactagccatggtgaaccctgccgtctacgtacaacaacaacaactgctttcatctagcccgctcgctgtgggcaatgcacctacatacctgcaacaacaattgttgcaacagattgtaccagctctgactcaactagctgtggcaaaccctgttgcctacttgcaacagctgcttccattcaaccaactgactctgtcgaactctgctgcgtacctacaac

SEQ ID NO: 10716 - DNA, 274 bp, Zea mays
  unsure (1)..(274): unsure at all n locations; Clone ID: LIB3061-100-Q1-K6-A10
ggcnncgaacanccagccgngcaagccnacaggcnacaacnagcgcnngcggcgagcgccnnacaacaaccaanngcccaanngcaacaacaanccnnggcacancnaacccnacaaaccanngcaacgcaacaacaacaacaacagnnncngccancacngagccaccnagccgnggngaacccngncaccnacttgcaacagcagcngcnngcanccaacccacnngctcnggcgaacgnagcngcanaccagcaacaacaacagcngcaac

SEQ ID NO: 10717 - DNA, 576 bp, Zea mays
  unsure (1)..(576): unsure at all n locations; Clone ID: LIB3061-100-Q1-K6-A11
ggagctgaagcaagaanagttggccgagcctgaataccacaggcgtcttccagcacagacaaaactgctgcaagcaaacctgataaaaatgagcagaatgacacaactgcagtaaactatgaggaggcagcacttgtatcatcatctagtgattacaggatgcctttggtatggattgacttggaaatgaccggtttggatataacaaaagatcggattttggagattgcttgtatcataacggatggcaaacttacaaaacaaatagagggtcctgacttagttataagccagagcaaagattgtttagataatatggatgaatggtgcaaaactcatcatgcagctagtggtttgacggaaagagtactgcagagtgaactttctgagcatgatgcagaggcaaaagttttagactttgttaggaagcacataaattcaggcactccattattagctgggaattctgtttatgtggattttctatttctgaagaagtacatgccacagcttgcagccgtcttctctcatgtaattgtcgatgtgagtagtataatggctttatgcatacgatgg

SEQ ID NO: 10718 - DNA, 601 bp, Zea mays
  Clone ID: LIB3061-100-Q1-K6-A12
gccgccgcctccgacatcgtcccttcgtgcgccgagcaaccgataatccgccggcgttgagatgttggtttatcaggatctcctatctggcgacgagctcctgtcggattcattcacctacaaggagctcgagaacggcgtcctgtgggaggtcgagggaaagtgggtcacccaggggggggggatgtggacattggtgccaatccatccgccgagggtggtgaggacgaaagcgttgatgacacagctgtgaaggtggttgatattgttgacacattccgtctacaggagcaacctccttttgacaagaaatcatttgtgtcttacatcaaaaaatacatcaagaatctcactgctgtgttggagccagagaaagcggatgagttcaaaaagggtgtcgagggtgcaaccaagtttctccttagcaagctgaaggacctccaattttttgttggtgagtccatgaaggatgatgcgtctgtggtattcgcctattacaaggatggtgccactaatccgacattcctctatttctctcatggtcttaaggagatcaagtgctaggcgtgcggcgaaattagttacccatgttgggtactat

SEQ ID NO: 10719 - DNA, 589 bp, Zea mays
  Clone ID: LIB3061-100-Q1-K6-A2
gcattcagaaacacaccaagcgaagcgcgctagcaacgacctaacaacaatggctaccaagatattagccctccttgcgcttcttgccctttttgtgagcgcaacaaatgcgttcattattccacaatgctcacttgctcctagtgccattattccacagttcctcccaccagttacgtgggggtgggcttcgaacacctagctgtgcaagccaacatgcaacaacaagcgcttgcggcgagcgtcttacaacaaccaattgcccaattgcaacaacaatccttgccacatctaacaatacaagccatcacaacgcaacagcaacaacagttcctaccagcactgagccacctagccatggtgaaccctgccgcctacttgcaagagcagctgcttgcatccaacccacttgctctggcgaacgtagttgcaaaccagcaacaacaacagctacaacagtttctgccaacgctcagtcaactagccatggtgaaccctgccgcctacgtacaacaacaacaactgctttcatctagcccgctcgctgtgggcaatgcacctacatacctgcaacaacaattgttgcaac

SEQ ID NO: 10720 - DNA, 590 bp, Zea mays
  unsure (1)..(590): unsure at all n locations; Clone ID: LIB3061-100-Q1-K6-A3
gcgtttctcacaagcaacatagnaaagtggatggggggggcgagaaatagagcaacaatggcggccaaggaattttccatccttatgctccttgctctttctgcatgtgttgctaacgcgaccatttttcctcaatactcacaagctcctatagctgcccttcttcccccataccttccatcagggaggggggggggtgtgaaaacccagcccttcaaccctacaggatccagcaagcaatcgcaacaagcaacttacctttatcacacctgttctttcaacaatcgccagccctatctttggtgcagtcattggtccaaaccatcagggcagaacagttgcagcaactcgtgctaccagtgatcagccaagtagctttggcaaacctttccccctactctcagcaacaacaatttcttccattcaaccaactgtctatactgaaccctgctgcttatttgcagcaacaacaactactaccattcagccagctagctactgcctactctcagcagcaacaatttcttccatttaaccaattggccgcactgaacccctctgcttatttccagcagcaaatactactacca

SEQ ID NO: 10721 - DNA, 287 bp, Zea mays
  unsure (1)..(287): unsure at all n locations; Clone ID: LIB3061-100-Q1-K6-A7
acaacggngngnnngaggngccggccaaccaaggngacacccancnnggaggngaggaccccgaccagaggaccaaggagnaccccancaaggngaccaagaagaagnacagcaaggacancagcaaggacaaccgngcccngggaaagccgaggagggaagccgagcgcgccaagagagcccncagcaaccagcaccaggnccgggnngagaacgagncccncnnngacgggaccgannncncggagccgcggacccgggccaggnnngaggagcggaacaacgac

SEQ ID NO: 10722 - DNA, 569 bp, Zea mays
  unsure (1)..(569): unsure at all n locations; Clone ID: LIB3061-100-Q1-K6-B1
tancgggtggngattctttcatacggggtgggctttgactcatattgatgagaagctgtgctatcagattctgcacgagtacaaaattcacaatgctgaggtgttattccgtgaagatgctctgggtgatctcattgacgttatcgaaggaaccggaagtcataaagtgcgggggcgggtataacaagatcgatgttgttggtatcgatgacgttgataatcttgctcggcaaccaaattcactagtgatcagctgcaatttgaagctgaacttggacagactacttgcgagaatgtgggaggagatgggcctagtgagggtgtatacaaagccacagggccagcagcctgatttcacagacccagttgttctttccaccgacagaggtggctgcacggtggaggacttctgcaatcatatccatagaagtttgctcaaggacgtgaagtatgtgctcgtatggggaaccagcgcaaggcactatccacagcattgcgggcttggccatggccttaacgacgaggatgtcgtccagatagtaaagaagaaggaaaaggaggaggtgggc

SEQ ID NO: 10723 - DNA, 600 bp, Zea mays
  unsure (1)..(600): unsure at all n locations; Clone ID: LIB3061-100-Q1-K6-B10
tgcanaagagttcttcagatacaggggggggatgatgccaaatgttgacttgacatttcggctgaattgggccagtgctggtgaaaagcgcgatgatactcctgaatatactatttttgttggggatttggctgcagatgttacagattacttgttacaagagacattcagggtgcatggtgggctctgtcaagggtgcaaaagttgtgactgataaattgacaatgcgcacaaagggttatggatttgtgaaatttggtgatcctacagagcaagctcgtgcaatgactgaaatgaatggaatgccttgttcttccaggcctatgcgtattggtcctgcagcaagtaggaaaaatacaggaggtgttgttcaagagagagtaccaaattctcaaggagctcagtctgagaatgatcctaacaataccactatatttgttggtgggcttgaccccaatgtcactgaagataccctaaaacaagttttttctccttacggtgaagtcgtccatgttaagatccctgttgggaagagatgtggttttgttcagttcgttaccagaccttctgctgaacaagcgctgctaatgctgcaagggc

SEQ ID NO: 10724 - DNA, 493 bp, Zea mays
  unsure (1)..(493): unsure at all n locations; Clone ID: LIB3061-100-Q1-K6-B11
cacacccgagcccgtgccaacagccgcatccaagcccgtgccagctgccagggaacctgcggcgttggcagcaccccgatcctgggccagtgcgtcgagtttctgaggcatcaatgcanccctacgggtagtcgggactgctcncctcantgccagtccttgcggcaacaaaaaaaccaacaactcaggcaggtggagccccagcaccggtaccaggcgatcttcggcttggtcctccagtccatcctgcagcagcagccgcaaagcggccagctcgccgggctgttggcggcgcagatagcgcancaactgaccgcgatgtgcggcctgcagcagccgactccatgcccctacgctgctgccggcggtgtcccccactgaagaaactatctgctgcagtatagccgctggctagctagctagttgagtcatttacccgccatgattgagtaataatgtgtcacgcatcaccatgggtggcagtgtcagtgtg

SEQ ID NO: 10725 - DNA, 536 bp, Zea mays
  unsure (1)..(536): unsure at all n locations; Clone ID: LIB3061-100-Q1-K6-B12
ttttcttgnnccctnggtttntttttttttggggggggggggaaaaaaaaaaaaaaaaaaaggagggaaaaaaaaaaaaaaaaaaaaaaaaaaaaaaaaaaaaaaaaaaaaaaaaaaaaaaaaaaaaaaaaaaaaaaaaaaaaaaaaaaaaaaaaaaatttttttttcccccttnanancccctttttttttttgtacnnggggnccncccccnncccncccccccccttttttcccaacaaaaaaaaaaaaaaatccccccccctttccaaccttnnnccctnnaaaaccctttccttccccaattttattccctttccaccacttccctttttccccctttccccttttccctaaaaccccccacccnntcccctttccaaacttttctccccccttattnccaatttcccccccccctttncccccctttaaaccccccannttttntttttcccccccttttncccctttccttttccatcccccttacccccccctccttccttttctttcctttttttttcccccctttt

SEQ ID NO: 10726 - DNA, 217 bp, Zea mays
  unsure (1)..(217): unsure at all n locations; Clone ID: LIB3061-100-Q1-K6-B2
tgctccttggtctttctgcaagtgctgctacggcgaccattttcccgcaatgctcgcaagctcctatagcttcccttcttcccccgtacctctcaccancttttttttgggggggggggggggcanttcttcancccttctttatccaacattcatttacaattttctttttatctttttttcccttttttctttttctttttttatttctttttct

SEQ ID NO: 10727 - DNA, 343 bp, Zea mays
  unsure (1)..(343): unsure at all n locations; Clone ID: LIB3061-100-Q1-K6-B4
cacgctcattctgcgngaggcgttttggctgttcgggtcccttttcctagggaggtctccgacgagnagggggtgaaatcgtcgttcaacatgatgtctcatcatncntnnnnanntnnatatgtgtttcgcnagcgcganantttnanaangtgcanttcttgaaaaaagtcaaatagcattgcgaattctgtttccgtggtggacgatctttcgttattgagaggagtgatagtttgaagttttgtttcctttatcatgaactgtttgtcttgtatattggtcatatttttttgtgcctaatacattggatgcaattggcatcttgaattnnnaaaaanaa

SEQ ID NO: 10728 - DNA, 529 bp, Zea mays
  unsure (1)..(529): unsure at all n locations; Clone ID: LIB3061-100-Q1-K6-B5
ggggccaacaataaaaactaaaattgttgcctccttatgctccttggtctttctgcaagtgctgctacggcgaccattttcccacaatgctcacaagctcctatagcttcccttcttcccccgtacctctcaccatcttgtgtggttgtnggggggganaaacccaattcttcaaccctacangatccaacaagcaatcacagctggcatcttacctttatcacccttgttcctccaacaatcatcagccctattacagcagttacctttggtgcatttattggcacaaaacatcagggcacaacaactacaacaacttgtgctagcaaaccttgctgcctactctcagcaacagcagtttcttccattcaaccaactagctgcattgaactctgcttcttatttgcaacaacaacaactaccattcagccagctatctgctgcctacccccagcaatttcttccattcaaccaactgacagcattgaactctcctgctcatttacagcagcaacaactactaccattc

SEQ ID NO: 10729 - DNA, 447 bp, Zea mays
  unsure (1)..(447): unsure at all n locations; Clone ID: LIB3061-100-Q1-K6-B6
acaatgccattgtctgcaacattggccactttgacaatgaaattgatatgctcggccttgagacctaccctggcttcaagcgcatcaccatcaacccctgttttgccctgggtnttccccgagaccaacactgncatcattgtccttactaagggtcgcctgatgaaccttgggtgtgctactggccatcctagctttgtcatgtcctgctcattcactaaccaggtcattgcccaacttgaactgtggaaggagaagagctctggcaagtatgagaagaaagtgtatgtgctccccaagcaccttgatgagaaggttgctgctctccacttgggcaagcttggtgccaagctgaccaagctcaccaagtcttcagccgactacatcagcgtgcccatcgagggtccctacaagcctgcccactaccggtactaggcaaccagcaca

SEQ ID NO: 10730 - DNA, 501 bp, Zea mays
  unsure (1)..(501): unsure at all n locations; Clone ID: LIB3061-100-Q1-K6-B9
actaaatcatgtgtgggcaaccaccaacgaacagaactgtgctcttccaaaactcatcaaaggatctgcatgccctatattcttgttggtctgantgggtacaantnnncantttgttggtgttgctgaaatgactggcgccgttgattttgagaaaaccctagagtattggcaacaggacaagtggaacggctccttctctgttaagtggcacattgtcaaggacgtgcccaacaatattctcaagcacatcatcctggagaacaatgagaacaagcctgtcacaaacagccgtgacactcaggagatacgcctcgaacaaggccttcagatgctcaagatattcaaggatcatgtcagcaaaacttccatcctcgacgactttgccttctatgagagccgccagaagttgatgcaggataagaggtccaaacagcagcagctccaaaagcaggtctgggacactaggacccccgtttctgtcaccggggaacgaccaca

SEQ ID NO: 10731 - DNA, 215 bp, Zea mays
  unsure (1)..(215): unsure at all n locations; Clone ID: LIB3061-100-Q1-K6-C1
taacaactacaacaaagtaactgttgntgatagggggtgatgattgttgaaccaacaatggggggcaaaatttttgcctgcttatgctccttggtctttctgcaagtgctgctacggggaccattttcccgcaatgctcgcaagctcctatagcttcccttcttcccccttacgtggggggggggggggcttctntttntnaaaaccnatttttt

SEQ ID NO: 10732 - DNA, 536 bp, Zea mays
  unsure (1)..(536): unsure at all n locations; Clone ID: LIB3061-100-Q1-K6-C10
ttgccaataaagcaccaaagtgactggggggagggggcacaacaactacaacaacttgtgctagcaaaccttgctgcctactctcagcaacagcagtttcttccattcaaccaactaggttcattgaactctgcttcttatttgcaacaacaacaactaccattcanccagctacggtctgccggcccccagcaatttcttccattcaaccaactagcagcattgaactctcctgcttatttacagcagcaacaactactaccattcagccagctagctggtgtgagccctgctaccttcttgacacaaccacagttgttgccgttctaccagcacgttgcgcctaacgctggcaccctcttacaactgcaacaattgctgccattcaaccaacttgctttgacaaacccagcagtgttctaccaacaacccatcattggtggtgccctcttttagatttcttatgagttatagttcaataataaagttttttatctgatgtttgtggcttcccagaaataagaaagtacatttct

SEQ ID NO: 10733 - DNA, 566 bp, Zea mays
  unsure (1)..(566): unsure at all n locations; Clone ID: LIB3061-100-Q1-K6-C11
agcagcggctcatctttgctgggaagcagcttgaggacgggcgcacgcttgccgactacaacatccagaaggagagcaccctccacttggtgctgcgcctcaggggaggcatgcagatcttcgtgaagaccctgaccgggggnacgatggcccttgaggtggagtcttcagacaccatcgacaacgtcaaggccaagatccaggacaaggagggcatcccaccggaccagcagcgtttgatcttcgctggcaagcagctggaggatggccgcacccttgcggattacaacatccagaaggagagcaccctccacctggtgctccgtctcaggggtggcatgcagatctttgtgaagacactcactggcaagacaatcacccttgaggtggagtcttcggataccattgacaatgtcaaggccaagatccaggacaaggagggcatcccaccggaccagcagcgcctcatcttcgccggcaagcagctggaggatggccgcaccctggcggattacaacatccagaaggagagcactctccacctggtgctccgcctcaggggtggc

SEQ ID NO: 10734 - DNA, 615 bp, Zea mays
  Clone ID: LIB3061-100-Q1-K6-C12
ttatcatcattcattcttatagtataggggcgcgatcaaatctgcaacatcaattatctaactccaaaaaccatgaagctggtgcttgtggttcttgctttcattgctttagtatcaagtgtttcttgtacacagacaggcggctgcagctgtggtcaacaacaaagccatgagcggggacagcatgggcaacaacatcatccacaaaaacaacaacatcaaccaccaccacaacatcaccagcagcagcaacaccaacaacaacaagttcacatgcaaccacaaaaacatcagcaacaacaagaagttcatgttcaacaacaacaacaacaaccgcagcaccaccaccaacaacaacaacaacagcaccaacaacaacatcaatgtgaaggccaacaacaacatcaccaacaatcacaaggccatgtgcaacaacacgaacagagccatgagcaacaccaaggacagagccatgagcaacaacatcaacaacaattccagggtcatgacaagcagcaacaaccacaacagcctcagcaatatcagcagggccaggaaaaatcacaacagcaacaatgtcattgccaggagcagcaacagactacaaggtgcagc

SEQ ID NO: 10735 - DNA, 623 bp, Zea mays
  unsure (1)..(623): unsure at all n locations; Clone ID: LIB3061-100-Q1-K6-C2
ccggaccggaaatcccggttagcaacatagnaaagtacaatagtgtaccaacaatggcagcgaaagattgggcctccttatagctccttggtctttctgcaagtgctgctacggcgaccattttcccgcaatgctcgcaagctcctatagcttcccttcttcccccgtacctctcaccagcggtgtcttcggtatgtgaaaacccaattgggggggggggcgggatccaacaggcaatcgcagctggcatcttacctttatcacccttgttcctccaacaatcatcagccctattacaacagttacctttggtgcatttattggcacaaaacatgagggcacaacaactacaacaacttgtgctagcaaaccttgctgcctactctgagcaacagcagtttttttcattcaaccaactaggttcattgaactctgcttcttatttgcaacaacaacaactaccattcagccagctacctgctgcctacccccagcaatttcttccattcaaccaactagcagcattgaactctcctgcttatttacagcagcaacaactactaccattcagccagctagctggtgtgagccctgctaccttcttgacacaaccacagttgttg

SEQ ID NO: 10736 - DNA, 601 bp, Zea mays
  unsure (1)..(601): unsure at all n locations; Clone ID: LIB3061-100-Q1-K6-C4
ccggtcgaccccgcgtctgggggcggtacatgggcctactcgcgtcggggcggggaccaccccaaacaacccccgcatgggggggctccgcgccccgtctgccgccgtggccgaacaggagaagtaccttgccgaactgctcgcggagaggcagaagcttggcccgttcgttccattgatcccncatatttttggggggtgtgggggggaaattttacntntttccacactattnnaaaacacatacataataaatcaaatttnccttnaacattttattccactaacaacatnattattatattcaaatnnaccatctacttacatnaatntntnnacatcancatttcaaccantaaattcaccancttatatctnncttntatgatcccannncanctcctcttnacttattgtcaacaaaacaattaatgtccatttcccantanacaaatatccaacattcaattttcttggccgcatccttggtccaagaggaaattccttgaagcgggtggaggcaaataccgactgccgtgtgctaataagaggtcggggcagcatcaaagatcccccacgggaggaaatgatgcgagggaag

SEQ ID NO: 10737 - DNA, 571 bp, Zea mays
  unsure (1)..(571): unsure at all n locations; Clone ID: LIB3061-100-Q1-K6-C6
cagtgcgtagagtgggtgggggggcagaacacataaaaaggtcatcggtctcgtcgtgtgcctggctctgtcagctgccagcgcctctgcaatgcagatgccctgcccctgcgcggggctgcagggcttgtacggcgctggcgccggcctgaccactattatggggtccgtcggggtgtacccctacncnnantacctnnagcanccncaatgcaacccgctggcggcggcgccctactacgccgggtgtgggcagccgagcgccatgttccagccgctccggcaacagtgctgccagcagcagatgaggatgatggacgtgcagtccgtcgcgcagcagctgcagatgatgatgcagcttgagcgtgccgctgccgccagcagcagcctgtacgagccagctctgatgcagcagcagcagcagctgctggcagcccagggtctcaaccccatggccatgatgatggcgcagaacatgccggccatgggtggactctaccagtaccagctgcccagctaccgcaccaacccctgtggcgtctccgctgccattccgccctactactgattc

SEQ ID NO: 10738 - DNA, 517 bp, Zea mays
  unsure (1)..(517): unsure at all n locations; Clone ID: LIB3061-100-Q1-K6-C7
gggggggccaacaatgacaaacaaaaatggggcgggccttagctccttggtctttctgcaagtgttgctaccgcaaccattttcccacaatgctcacaagctcctatagcttccccccttcccccatacctctcaccancggtgtctgggatgggtnggaccccaattgttcaaccctaccagatccaacaggcaatcgcaacaggcatcttaccattatcacccttgttcctccaacaaccgtcagccctattacagcagttacctttggtccatttggtggcacaaaacatcagggcacaacaactacaacaacttgtgctagcaaaccttgctgcatactctcagcaacatcagtttcttccattcaaccaactggctgcattgaactctgctgcttatttgcaacaacaattaccattcagccagctagttgctgcctacccccagcaatttcttccattcaaccaactagcagcattggaactctgctgctttatttacagcagcaacaact

SEQ ID NO: 10739 - DNA, 100 bp, Zea mays
  unsure (1)..(100): unsure at all n locations; Clone ID: LIB3061-100-Q1-K6-C8
ttgatccagctgtaatgggtattggtcctgccgttgcaatccctgcagcagtgagagctgctggccttcagatggttgattttttttttttcnaaatcaa

SEQ ID NO: 10740 - DNA, 275 bp, Zea mays
  unsure (1)..(275): unsure at all n locations; Clone ID: LIB3061-100-Q1-K6-D1
gcggcgcgggcggccaagnacagggggggggggagttgtgccaaccacatgggtatctcgcgtgactcgatgcacaagcgccgagccaccggtnggaaagcagaaggcctggaggaagaagcgaaagttgagcttggtcgccagccagccaacaccaagttgtcaagcaataagaggggggggagggtccgtgttcgtggaggtaatgtgaaatggagggctnttngncttgatactggtaactacttatggggaagtgaagctgttacccgcaa

SEQ ID NO: 10741 - DNA, 603 bp, Zea mays
  Clone ID: LIB3061-100-Q1-K6-D11
gcgttctgctagggtaaagtgagggaccctggtgcagtaaacgatggcctcggtgctgctcgtgaagcagatgccctattggttcaggatgagtctaccaggagccagcaagagggtcaacagaatggaatttctgagccagctgccaacaatgctctccagtatcaagagcaaaaccctcaggggtcggggaagtacccctgcaggctcaggctccctcaacccatttgggtcccttttgctgtggttgctgggaggcggtgcttctgatggcatagtttctttcttctctatgttcagagatgttcgtgatcatggtcaagattacaccgatccacctcgaaatggaaatgatcaggtgacatagaatcatggggatgaaagtgggccaatgactgaactcgagtgcttgggcggcagcagtctctttctaatatgatataatgccagcacctcccttcaaaaggataatgacgaatattggtggcaactatacagactggtgtcgctggagatgccatgttagtattatctgtttctcacttttttagttagtaggtaagggtgaaggttgtatctatattcattacatgtgcacattcc

SEQ ID NO: 10742 - DNA, 528 bp, Zea mays
  unsure (1)..(528): unsure at all n locations; Clone ID: LIB3061-100-Q1-K6-D3
tattttgcctaacataatgctccttggtgcttntctgcaagtgcttgctaccggcgacccattttcccgcaatgctcgcaagctcctatagcttcccttcttcccccgtacctctcaccagcggtgtcttcggtatgtgaaaaccggggggggcgggggtacannatccaacaggcaatcacagctggcatcttacctttatcacccttgttcctccaacaatcatcagccctattacatcagttacctttggtgcatttattggcacaaaacatcagggcacaacaactacaacaacttgtgctagcaaaccttgctgcctactctcagcaacagcagtttcttccatttaaccaactagctgcattgaactctgcttcttatttgcaacaacaacaactaccattcagccagctacctgctgcctacccccagcaatttcttccattcaaccaactggcagcattgaactcttctgcttatttacagcagcaacaactactaccattcaaccagctaactggtgtg

SEQ ID NO: 10743 - DNA, 586 bp, Zea mays
  unsure (1)..(586): unsure at all n locations; Clone ID: LIB3061-100-Q1-K6-D4
gcgttctgttctcacgatttgacaaatgagtgggtggagaaggtgcaatagattaccagggtgagtcacctgatgagcaggctttagtaattgcagcgtctgcttatgggtatacccttgttngaaagaacaactggacacattgttatagatgttctaggcgagaggttaaggttggatgtgggggggggggatgaattcnatagtgtgagaaaaagaatgtctgttattgtaaggtttccggacaacaatgtgaaggttcttgtgaaaggtgctgacacatcaatgttaaacattttgaaagtagaaattgatgatgaactttatgattcgttgcatgttaaaattagagaagctacagaaaatcatttgtcagcctattcatcagagggtttacggaccttagtcattggttcaaaaaatctgacagatgcagaatttagtgaatggcaggaaatgtacgaagaagctagtacctccatgcatgagagatcagcaaagctccgtcaagcagcaggtctggtagaatgcaatctaacccttcttggtgcaactggaattgaagataaattgcaggatggtgttc

SEQ ID NO: 10744 - DNA, 595 bp, Zea mays
  unsure (1)..(595): unsure at all n locations; Clone ID: LIB3061-100-Q1-K6-D5
cccggtcgacccagcgttttagcacatanaagcacatattgggggggggtggcagccaaaaattttgcctgattgtgctccttggtctttctgcaagtgctgctacggcgagcattttcccgcaatgctcacaagctcctatagcttcccttcttcccccatacctctcaccagcgatgtcttcattttggtaagatgggttcttctaccctacaggatccaacaggcaatcgcagcaggcatcttacctttatcacccttgttcctccaacaatcatcagccctattacagcagttacctttggtgcatttattggcacaaaacatcagggcacaacaactacaacaactcgtgctagcaaaccttgctgcctactctcagcaacagcagttacctttggtgcatttgttggcacaaaacatcagggcacaacaactacaacaactcgtgctagcaaaccttgctgcctactctcagcaacaacagtttctgccattcaaccaactagctgcattgaactctgctgcttatttgcagcaacaacaactactaccattcagccagctagctgctgcctacccccggcaatttctt

SEQ ID NO: 10745 - DNA, 283 bp, Zea mays
  unsure (1)..(283): unsure at all n locations; Clone ID: LIB3061-100-Q1-K6-D6
cgtttttgccattttacccacagttgtgggtggggggggcgccttcttgcaacagcaacagttgctaccattctacccacaggatgtggcaaacaatgtcgccttcttacaacaacaacaattgctgccatttaaccaacttgctttgacgaatcctaccaccttattgcancanccctcgggtttggggggcatcttctanatttttttatgctttatactgtaataataaagttctcatactgatatgtgcaacttctcagtaataaaagattagagatct

SEQ ID NO: 10746 - DNA, 586 bp, Zea mays
  unsure (1)..(586): unsure at all n locations; Clone ID: LIB3061-100-Q1-K6-D7
gcgttctcgnaagacgnagggaaagcgagggggggggggtggtattttctgtcaaaacaagggcgatactcctcctactccagcgcacacgcagatcagcgtcgaaatccgtcgcatcgtgcccgcctcgctgtctccgctgggcgctggtggtcatggcccgcaggcgctggagctcgggggttgtctggtcgcgctggcggcgctggcggccgtggcggccggaggggacatcgtgcaccaggacgacgaggcgcccaagatccccggctgctccaacgacttcgtgctggtaaaagtgcagacctggatcaacaaaaaagataaagatgagtttgttggtgttggtgctcgatttggccccaagatagagtcaaaggaaaagcatgccaactggacaaacttgctgttagcagacccttctgattgctgcacccctccaagagagaaggttgctggagatattttgttagtggagaggggaaactgtaagttcactacaaaagctaaggtggctgaatctgctggtgcttctgcgattataattatcaatgataagcacgagttatacaagatggtatgtgag

SEQ ID NO: 10747 - DNA, 560 bp, Zea mays
  unsure (1)..(560): unsure at all n locations; Clone ID: LIB3061-100-Q1-K6-D8
agtgaccagtactctgcatttggaggggggtgatgatgtgataatatatggagaaagggcatacgattttgctgatgtggcggcgattcttgtgcagatgttgataagacatcctgcagtaggttctgaagcatttcgaagacgatatatgattgatgtanatagtgagtgctgtgggacgttnggacaaanctctctgttcacttgttcaatggagacacaagccaggcagctttccgcatattgtctgactacaggaaaggcaaatttggatgggtggcgctggagagacctccaacatgaacaagcgggatatcatagatctttagataaaagacatgtgcttgttcatgtagtatcacacaatttagtgtcgttcattgcaccactctcgacagttttcactggacctgcacctatacgaggaattaattcagaatagctgtccatctgataatctaaagacaaaacttaagaaatgcccccctgttcttagacagtccagagcaaacgagctgatttgtatgatctattgaatgagctcaactatgtttctatgt

SEQ ID NO: 10748 - DNA, 162 bp, Zea mays
  Clone ID: LIB3061-100-Q1-K6-E1
gaggttctccggggttcggtggggggggggggcggatcgaaaggcggcgtcggatgttgagtaccgctgcttcgtcggtgggctcgtctgggccacggacgaccactccctgcacaacgccttcagcacctacggcgaggtccttgtatccaatatcatcct

SEQ ID NO: 10749 - DNA, 624 bp, Zea mays
  unsure (1)..(624): unsure at all n locations; Clone ID: LIB3061-100-Q1-K6-E10
cccagcgttcttgtgccccagttcctaactccggtgggggggcgtggccagcgccaaacagatcaaaacgggcgctcagcctcccgcgctccagtccacacgggagcgggtggtgtcgtctgaagcggcgcgatcaaggagtcttcgggcgctccggacgtaacttgctggcggttgcttatctccggggttagatgggagcgnaaatgttctccttgttctatggcctgtggaagtatgtgttcgccaaggacgagttccgtgttctgattcttggtgttgacagagctggcaagacgactttgctggagaagttgaaatcgatatatctcaagggggaaggacttccgcctgaccgtgtcgttccaacagttgggctcaacattggccgcatcgaagacgcaaaggcaaaacttgttttctgggatctaggtggtcaggttagcctacgaacaatctgggagaaatactatgaagaggcccatgccataatgtacgttattgacgctgccacagcatcgtcatttgaagattccaaatctgctctggagaaggttattcgccatgaacatctgagaggagcaccactcttgatagttgcaaacaaacaggatttacctggaa

SEQ ID NO: 10750 - DNA, 95 bp, Zea mays
  Clone ID: LIB3061-100-Q1-K6-E11
gccgcccttttttttttttttgtttgggggtttttttaaaaaaatttttttttgttttttttttttttttttttttttttttttttttttttttt

SEQ ID NO: 10751 - DNA, 67 bp, Zea mays
  Clone ID: LIB3061-100-Q1-K6-E12
ccgggttcgacccacgccgttttttaaaaaaaaaaaaaaaaaaaaaaatgtgtgggagagggaaaaa

SEQ ID NO: 10752 - DNA, 233 bp, Zea mays
  unsure (1)..(233): unsure at all n locations; Clone ID: LIB3061-100-Q1-K6-E2
gtgatggcaggactgttttgttnagcgtaaatccaacaaacaactgatctaaaatccagcaagcaccgcctccctgctagtacaagggtgatatgtttttatctgtgtgatgttctnctgtgttctatctttttttgtaggccgtnagctatctgttatggtaatgttggggggggggggaccttntaattgnntantctgttgttttccttcaaaaaaaaaaaaaaatatta

SEQ ID NO: 10753 - DNA, 162 bp, Zea mays
  unsure (1)..(162): unsure at all n locations; Clone ID: LIB3061-100-Q1-K6-E3
tgtccttcaagttgtagggtaggaggggcaaaaagaanaaaaaaaacttgggtgaggcgtttattgctccgatgatctccaacagactgatctgcagatcacgcatgtaaccaggtgctgatcattgtcgaatgtcgttacttttatcttcntctcccacct

SEQ ID NO: 10754 - DNA, 578 bp, Zea mays
  unsure (1)..(578): unsure at all n locations; Clone ID: LIB3061-100-Q1-K6-E4
gcctaaaaaaacctatcgtttgggggggggagggtccttctaatattcccgcagcccggtttgccgaccaggttccaccgttccagagtagccaagcgaatcccgtgtctggttcgcgcgatggcggaggagcagtccaacccccagcaccagcaagcggaggagatttagggggttgtnggggancancagccnnagagggccccnaagctgaggtacctggacttcgtccaggtggcggctgcccaggccgcggtgtgcctcgctgggctctacggcctcgccaaggaccacgccggcccgctccgccccagcgttgacgccgtcgagtctgccgtcaagggcgtcgttagccccgtctacgaccgcttcggcggcctgccgctcgacgtcctcgccttcgtcgaccgcaaggtggacgacacggtgcacgaggtggacaagcacctcccgggcgcgctgaaggcggcgtcggcgcatgtctacgcggtggttcggggcgtgccnngagtggcgcgcgagctggcggccgaggcgcaacggtcgggcgtgaggggcgcagcccgtgcggcgctcgc

SEQ ID NO: 10755 - DNA, 589 bp, Zea mays
  Clone ID: LIB3061-100-Q1-K6-E5
acacaccaagcgaacgcactagtctggggcgggacaacaatggctacacaaaatttatccctccttgcgcttcttgcgctttttgcgagcgcaacaaatgcgtccattattccacaatgctcacttgctcctagttccattattccacagttcctcccaccagttacttcaatggggcttgaacgggcactgtgcaagcctataggctacaacaagcgattgcggcgagcgtcttacaacaaccaattgcccaattgcaacaacaatccttggcacatctaacaatacaaaccatcgcaacgcaacagcaacaacagttcctaccagcactgagccacctagccatggtgaaccctgtcgcctacttgcaacagcagctgcttgcatccaacccacttgctctagcaaacgtagttgcaaaccagcaacaacaacaactgcaacagtttctgccagcgcttagtcaactagccatggtgaaccctgccgcctacctacaacagcaacaactgctttcatctagcccgctcgctgtggccaatgcacctacatacctgcaacaagaattgttgcaacagattgtaccagc

SEQ ID NO: 10756 - DNA, 591 bp, Zea mays
  unsure (1)..(591): unsure at all n locations; Clone ID: LIB3061-100-Q1-K6-E7
cccggtcgacccagcgttctttggtcgatctgctaacacaaacaggggggaggtgctcctcactagctagccttctctatttttgctactgagagtgtccaagtctgcgacgacgtccgagatgtcgacggtgagccgtgcatcccttgaccagaagcttgccctcgccaagcgctgctcccgaggtacgaggaacagggtgtgggtgcagacactcgccgatcgacattcaggcagccaataagccgcgcggccttaattaattaaagctcgaaatgactaacgctatgtatgtatgtgtgtgtgtgtgtgtctgcagaggcgactcttgccggagctaaggcggcagcagtggcgactatcgcctccgcgattcccaccctcgcgagcgtgcggatgctgccgtgggccaaggccaacatcaaccccaccggccaggcgctcatcgtctccacggtggccgggatggcctacttcatcgccgccgacaagaagatcctgtcgctggcgaggcgccactcgttcgaggaagctccggagcacctcaagaacacctccttccagggcaccggacgcccncacccggctttt

SEQ ID NO: 10757 - DNA, 499 bp, Zea mays
  unsure (1)..(499): unsure at all n locations; Clone ID: LIB3061-100-Q1-K6-E9
agcgtcttttctggtatgcagctacaacagctgtgggggggtgccatgctaaacaatagcctggggaaccctgccgtctacctacaactactttcatctagcccgctcgcggtgggcaatgcacctacgtacctacaacaacagttgctgcaacaaattgtaccagctctnactcagtggtctgtnngggaaccctnctncctacttacaacagttgcttccattcaaccaactggctgtgtcaaactctgctgcgtacctacaacagcgacaacagttacttaatccattggcagtggctaacccattggtcgctaccttcctgcagcagcaacaacaattgctgccatacaaccagttctctttgatgaaccctgccttgcagcaacccatcgttggaggtgccatcttttagattacatatgagatgtactcgacaatggtgccctcataccgacatgtgtttcctagaaataatcaatatattgattgagattta

SEQ ID NO: 10758 - DNA, 550 bp, Zea mays
  unsure (1)..(550): unsure at all n locations; Clone ID: LIB3061-100-Q1-K6-F1
tcatcaatcatcattcatcttagnattagtttcgcgcaatcaaatcagcaacatcaattatctaactccaaaaaccatgaagctggtgcttgtggttcttgctttcattgctttagtatcaagtgtttcttgtacacagacaggcggctgcagctgtggtcaacaacaaatccgtggggggggggggcgtccacaacaacatcatccacaaaaacaacaacatcaaccaccaccacaacatcaccagcagcagcaacaccaacaacaacaagttcacatgcaaccacaaaaacatcagcaacaacaagaagttcatgttcaacaacaacaacaacaaccgcggcaccaccaccaacatcaacaacaactgcaccaacatcaacatcaatgtgaaggccaacaacaacatcaccaacaatcacaagggcatgtgcaacaacacgaacagagccttaagcaacaccaagggacagagccgtgagcaacaacatcaacaacaatttcagggtcatgacaagcagcaacaaccacaacagcctcagcaatatca

SEQ ID NO: 10759 - DNA, 594 bp, Zea mays
  Clone ID: LIB3061-100-Q1-K6-F11
cacctagcgtaacgcactagcaacgacctaacacagtggctaccaagatattatccctctttgcgcttcttgccctttttgtgagcgcaacaaatgcgttcattattccacaatgctcacttgctcctagtgccattattccacagttcctccctccagttacttcaatgggcttcgaacacccaggggggggagcctacaggctacaacaagcgcttgcggcgagcgtcttacaacaaccaattgcccaattacaacaacaatccttggcacatctaaccatacaaaccatcgcaacgcaacagcaacaacaatttctaccagcactgagccaactagctgtggtgaaccctgtcgcctacttgcaacagcagttgcttgcatccaacccacttgctctggcaaacatagttgcataccaacaacaacaacaattgcaacagtttctaccagcgctcagtcaactagccatggtgaaccctgccgcctacctacaacagcaacaactgatttcatctagccctctcgctgtggttaatgcacctacatacctgcaacaacagttgctgcaacagattgtaccagctctgactc

SEQ ID NO: 10760 - DNA, 578 bp, Zea mays
  unsure (1)..(578): unsure at all n locations; Clone ID: LIB3061-100-Q1-K6-F12
ccatcaatcatcattggggtgaggggggtaggcaccaaatcaaatctgcggcatcaattatctaactccaaaaaccatgaagctggtgcttgtggttcttgctttcattgctttagtatcaagtgtttcttgtacacagacaggctgctgcanctntnnntcagcggctaagctctgggcancaacatcatccacaacaacatcatccacaaaaacaacaacatcaaccaccaccacaacatcaccagcagcancaacaccaacaacaacaagttcacatgcaaccacaaaaacatcancaacaacaagaagttcatgttcaacaacaacaacaacaaccgcagcaccaccaccaacaacaacaacaacagcaccaacaacaacatcaatgtgaaggccaacaacaacatcaccaacaatcacaaggccatgtgcaacaacacgaacagagccatgagcaacaccaaggacagagccatgagcaacaacatcaacaacaattccagggtcatgacaagcagcaacaaccacaacagcctcagcaatatcagcagggccaggaaaaatcacaacaccaa

SEQ ID NO: 10761 - DNA, 227 bp, Zea mays
  unsure (1)..(227): unsure at all n locations; Clone ID: LIB3061-100-Q1-K6-F2
agctcatcgactccatttgttggggggggggggtaannaactnatcnntgcgggggctctcctggcgctcgctgcgagcgccgcctccagtacaagcggcggctgtggctgcgcgacaccaccgtttcatctaccgccttcgttctatatnccncctccnttctgtgggggggggggggggcanccncancnctnncaataccccactcaaccaccaaaaataaacc

SEQ ID NO: 10762 - DNA, 567 bp, Zea mays
  unsure (1)..(567): unsure at all n locations; Clone ID: LIB3061-100-Q1-K6-F3
aacacaccaatcgtttgttgggggagggaacaacctaaacaacaatggctaccaagatattatccctccttgcgcttcttgcgctttttgcgagcgcaacaaatgcgtccattattccacaatgctcacttgctcctagttccattattccacagttcctcccaccagttgggtgagggggcttcnaacacccanctntncaagcctatangctacaacaagcaattgcngcnagcgtcttacaacaaccaattgcccaattgcaacaacaatccttggcacatctaacaatacaaaccatcgcaacgcaacagcaacaacagttcctaccagcactgagccacctagccatggtgaaccctgtcgcctacttgcaacagcagctgcttgcatccaacccacttgctctagcaaacgtagttgcaaaccagcaacaacaacaactgcaacagtttctgccagcgcttagtcaactagccatggtgaaccctgccccctacctacaacagcaacaactgctttcatctaacccgctcgctgtggccaatgcacctacatacctgcaac

SEQ ID NO: 10763 - DNA, 152 bp, Zea mays
  Clone ID: LIB3061-100-Q1-K6-F4
cctttggtggggtggggggcacaaaacaaaaaaacacaacaactacaacaacttgtgctagcaaaccttgctgcctactctcagcaacagcagtttcttccattcaaccaactagctgcattgaactctgcttcttatttgcaacaacaaca

SEQ ID NO: 10764 - DNA, 594 bp, Zea mays
  unsure (1)..(594): unsure at all n locations; Clone ID: LIB3061-100-Q1-K6-F6
cgtccttaatggnatacagtagcaaaataggggggcgtgggggccaaaaataatccatccttatgctccttgctctttctgcatgtgttgctaacgcgaccatttttcctcaatactcacaagctcctatagctgcccttcttcccccataccttccatcaatgaccgctttagtatgtgggaagcaggccttcaaccctacaggatccagcaagcaatcgcaacaagcaacttacctttatcacacctgttctttcaacaatcgccagccctatctttggtgcagtcattggtacaaaccatcagggcagaacagttgcagcaactcgtgctaccagtgatcagccaagtagctctggcaaacctttccccctactctcagcaacaacaatttcttccattcaaccaactgtctatactgaaccctgctgcttatttgcagcaacaacaactactaccattcagccagctagctactgcctactctcagcagcaacaatttcttccatttaaccaattggccgcactgaacccctctgcttatttccagcagcaaatactactaccatttggccagctagctacaacaagccc

SEQ ID NO: 10765 - DNA, 614 bp, Zea mays
  unsure (1)..(614): unsure at all n locations; Clone ID: LIB3061-100-Q1-K6-F8
ccccggtcgacccagcgtccttcatcgcctccgctccgattcgccgggggcggggctggcgggcgaaagaggatctcgacggaggagactccgaccatcgctccaggaggccgcggactctgaatccgtcatctccaccttcacctgtccgcactgtcagcgggaggttccatcttcaaacattgcattgcacaggggtcgcnggctcggaaccttcagaatgcgaacattgcggagattggttgccaggaagcttatggatgaacactacgatgaaaaccatgctccgatgaattgctcactttgcaaacacacagtagaacgcgagctatgggatcttcatacaggcatacaatgcccacaaaggatgctcgcgtgccaatactgtcagtttgaactgcctgcagttgatctttttgaacatcaggatctgtgtggaaatcggacagaatattgtcaaagttgcaggaagtatatcagacttcgtgaatggattggacatgaactccagttccatacgattttgaatgctgcatcagaactttcaagtgacaggactcgagcagcagcagagcagccagtaccaaagccagcccgacctgctactggttcgc

SEQ ID NO: 10766 - DNA, 122 bp, Zea mays
  unsure (1)..(122): unsure at all n locations; Clone ID: LIB3061-100-Q1-K6-G1
ctctnctggcgctcgctgcgagcgccgnctncagtacaagcggggggtgtggctgggcgacaccaccgtttnatttaccggcttcgttctatatgccnnctnctttttgtgggggggggggg

SEQ ID NO: 10767 - DNA, 608 bp, Zea mays
  Clone ID: LIB3061-100-Q1-K6-G10
ccggccactagcacatataaagccatattgtaccaataatggcagccaaaatttttgcctcattatgctccttggtctttctgcaagtgctgctacggcgagcattttcccgcaatgctcacaagctcctatagcttcccttcttcccccatacctctcaccagcgatgtcttcagtatgtgaaaatccaattctggtgaccctacaggatccaacaggcaatcgcagcaggcatcttacctttatcacccttgttcctccaacaatcatcagccctattacagcagttacctttggtgcatttattggcacaaaacatcagggcacaacaactacaacaactcgtgctagcaaaccttgctgcctactctcagcaacagcagttacctttggtgcatttgttggcacaaaacatcagggcacaacaactacaacaactcgtgctagcaaaccttgctgcctactctcagcaacaacagtttctgccattcaaccaactagctgcattgaactctgctgcttatttgcagcaacaacaactactaccattcagccagctagctgctgcctacccccggcaatttcttccattcaaccaactggcagca

SEQ ID NO: 10768 - DNA, 122 bp, Zea mays
  Clone ID: LIB3061-100-Q1-K6-G11
ctgccattcaaccatcttgctttggcaaacccagcagcgttctaccaacaacccatcattggtggtgccctcttttagatttcttatgagttatagttcaataataaagttttttgtctgag

SEQ ID NO: 10769 - DNA, 519 bp, Zea mays
  unsure (1)..(519): unsure at all n locations; Clone ID: LIB3061-100-Q1-K6-G2
atattttgcctgcttatgctccttggtctttctgcaagtgctgctacggcgaccattttcccgcaatgctcgcaagctcctatagcttcccttcttcccccgtacctctcaccancnntttctggggggggtggggggggcaattcttcaaccctacangatccaacangcaatcacaactgacatcttacctttatcacccttnttcctccaacaatcatcanccctattacaacanttacctttnntncatttattggnncaaaacattaggggacaacaactacaacatctggggctagcaaaccttgctggctacttttagcaacaggaggttgttccattcaaccaactaggttcattgaactgtggttgttattttgaacaacaacaactaccattcaggcagctgcctggtggctacccccaggcattttcttccattcaaccaactagcaggattgaactgtcctggttatttaccaggaggacaactactaccattcaaccagctagctg

SEQ ID NO: 10770 - DNA, 541 bp, Zea mays
  unsure (1)..(541): unsure at all n locations; Clone ID: LIB3061-100-Q1-K6-G4
actcaaatctgtcttttgtggggggtggctaaaaaaaaacagcgcgccgggggtctcggcggccccactggtgactctcgggctatcactcctctgcgctgtcgccggcccggccgccgcgcagaactgcggctgtccatccaaacctatcctncatcttgggttttgactngggggacnaccnacnantacttcnncnacnnatacaaaaaaaaaaccataccnctcnnncnncnncnncancantnncnncnntngttctaacctngctagcgtcgtcaccggctccttcttcaacggcatcaagagccaggccgggagcgggtgcgagggcaagaacttctacacccggagctcgttcctgagcgccgtcaaggcgtacccaggcttcgcccatggcgggtcgcaggtgcagggcaagcgcgagatcgccgcctttttcgcgcacgccacgcacgagaccgggcatttctgctacatcagcgagatcaacaagagcaacgcctactgcgacccgaccaaaaagcagtggcccgtgccc

SEQ ID NO: 10771 - DNA, 382 bp, Zea mays
  unsure (1)..(382): unsure at all n locations; Clone ID: LIB3061-100-Q1-K6-G5
gcgaccannnnncccacaagcgcacaagccccnanagcnncccnncngcccccgnaccccncaccaacgnnncngcggggggggggggcccaanncnncaacccnacanganccaacaggcaaacaaaaaaagcaccccacccnnancacccngggnccnccaacaagcancagcccgangacagcagnnacccccggggcagggangggcacaaaacancagggcacaacaacgacaacaaccggggccagcaaaccgngcggccgacgcccagcaacagcaggnncggccagncaaccaaccagccgcagggaaccccgcggccnangggcaacaacaacaaccaccaggcagccagccancggccgcccacccccagca

SEQ ID NO: 10772 - DNA, 589 bp, Zea mays
  unsure (1)..(589): unsure at all n locations; Clone ID: LIB3061-100-Q1-K6-G6
tctttttccatacatgacttgggttggggggagacattgccaataagaagacttcagagcgccagatctatgagctgtatgctgtgagcaatcattatggcaacatggcaagtggacattatactgcacacattaagcttgtggntgagaatcggggtcaacttcntgatagggggggggggccattgatgaagatgaggtgaagactgctgcagcttatgtgctattctatagaagggtcagagaacaagacatagcaaggggaactagtaatggatctcagttatatgcaaaaagaagtcacggatatagccataggtaggctgatgattactgtggttcggtgcaagggggattctggaaatgacacccgcacgcctttagtcattgccaggagtatatggcttgctggaaaaaatgctcatcacgtgcagtcaatgcaccgttgtccagttgtcacagaagatatttcgtgcagtgctggtacaagatgggaattttgtatgaggtgagttgaaggagtaattgactctttatgataactgggtagcttcaacaggaacgccggggcttggtggcattttgttcg

SEQ ID NO: 10773 - DNA, 596 bp, Zea mays
  unsure (1)..(596): unsure at all n locations; Clone ID: LIB3061-100-Q1-K6-G7
gcgacccagcgtccngacaaagcgttcattttccaagtgctcattgctcctatgccattattcacagtcccccacagtcttcatgggcttcgaacatccagccgtgcaagcctacaggctacaactagcgcttgcggcgagcgccttacaacaaccaattgcccaattgcaacaacaatcctgggcgcgatgtaaccctacaaaccattgcaacgcaacaacaacaacaacaacagtttctgccatcactgagccacctagccgtggtgaaccctgtcacctacttgcaacagcagctgcttgcatccaacccacttgctctggcgaacgtagctgcataccagcaacaacaacagctgcaacagtttatgccagtgctcagtcaactagccatggtgaaccctgccgtctacctacaactactttcatctagcccgctcgcggtgggcaatgcacctacgtacctacaacaacagttgctgcaacaaattgtaccagctctgactcagctagctgtggcaaaccctgctgcctacttacaacagttgcttccattcaaccaactggctgtgtcaaactctgctgcgtacctacaa

SEQ ID NO: 10774 - DNA, 601 bp, Zea mays
  unsure (1)..(601): unsure at all n locations; Clone ID: LIB3061-100-Q1-K6-G8
caaaatacccacggnaaaatccaatgcggggaaaaaaccatttccctttcttctgaagtcgtcctcttcttcccgtcgcttcgccgtgccgcacctgcgaggagaggagacttcgccgcgaagctcaccatgatctcgccggagaggagctcgtcacagagccagcggtcggcggcggggggggcgccgttcctgtcgatctccgtcacggatcccgtaaagatgggtaccggcgtgcagtcctacatctcctaccgcgtcatcaccaagaccaacctccctgaatttgagggaccagagaaaattgttattcggcgctatagtgattttgaatggttgcatgatcggcttgctgagaggtacaaaggcatttttataccccctcttccggagaagaatgctgttgagaaattccggtttagcaaggagttcattgaattgcggcgtcaagctctggatttattcgttaacaggatagcttcacaccctgaactcaagcaaagtgatgtcttgaggacatttttgcaagcagatgaagagataatggatagggcaagatcttatgagactggtatttttaagaaaccggcagatttcatac

SEQ ID NO: 10775 - DNA, 345 bp, Zea mays
  unsure (1)..(345): unsure at all n locations; Clone ID: LIB3061-100-Q1-K6-G9
ccagcgccncnngcaagcagaagcccngccccngcgcggggcngcagggcnngnacggcgccggcgcccgcccgaccaccagatgggcgggggggggggnaccccnacncggagnacccgaggcagccaaaaagcaacccgccggcggcggcgcccaacnacgccgggngngggcagccgagcgccanggnccagccgcnccggcaacagngcngccagcagcagaagaggaagaaggacgngcagnccggcgcgcagcagcnngcagagaagaagcagcnngagcgngccgcngccgccagcagcagcccggacgagccagcnccngagcagcagcagcagcag

SEQ ID NO: 10776 - DNA, 617 bp, Zea mays
  unsure (1)..(617): unsure at all n locations; Clone ID: LIB3061-100-Q1-K6-H11
gcgttcttaaacttgtagataatctttttatggtgggggtgtaaaatttcatgaccataggtgtagtagtttaggagttatgatttttccaagtccagtctcagaatctgtccaaattctgtacaggtttcgaaaattggattgcttggctaagctaaactgagaatcagcccttantaattatgggggagtggtagtacttttcttaagctttccaacaaattttggagcaccctttttggtggtctagatatcaagttacagctgtttgaactatagagtctgaatttgtccaaatttggacagcgaagtctgtttgtagtaactgactttgatatgtattgaattaacctgagatgtttataaatgaattgtagacaattctattaactttctaaaaagtctaggatcacctgatttggatttcggaaactccagttctggacttttgaagtaagtagtcgaattctgtccaaatctggacataatttatgtttagcgctgtttgacctttgtaaaggtcgaattttgttgtgatggtaatacaaaagttatagaggactttataagctttccaaaaagttctagtttactattattggatacatattttatga

SEQ ID NO: 10777 - DNA, 577 bp, Zea mays
  unsure (1)..(577): unsure at all n locations; Clone ID: LIB3061-100-Q1-K6-H12
caaggcgagnatctatgccttgtgggaggcgcgtcttgctgaaagtgcattggcacatccgcagcacctacggtcctccctgcgcactactttgaaaccgtggatcaccgcactggcgcatcccgtagcttcaacgttatcgacgggggcctcgccgcaaacaatccgatcgtttgganncaggagnacaaggagttccccgagaccaagcccctggactaccacaggtacctggtagtgtcactaggcacaggccttccagagcaggacatcaagttcgacgcgtgccgtgtcgccaagtggggcatcttcggatggctcggccgggagaacaccgtgcccttgctgcagatgttcatgcacgcgagctcagacatgacggacagctacgtcgccgaccttttcaaagcgatcgggtgctcggaccaactgctgcgtgttcaggaccgcaacatacccatagcggctgtggcagctgacctctcgacggagaagaatctgcgagggctggttaagattgcagagaaccttctgcataagccactaggcgacgacgattataagaccgacgactgcg

SEQ ID NO: 10778 - DNA, 577 bp, Zea mays
  Clone ID: LIB3061-100-Q1-K6-H2
tatacactagcaccatattatcggttggggggcggggatccagcaattcttgcccttctggctctttcagcatagcgctggtacctaacatattattccacaatgctcacaacattactctgctttccgagtgacagcacgcggacagttcaatacccacctatacaataactacatgtggggaggggggggtgcaaacaaccatattacggaccttagccttaaccctagaacaaccatatgctctattgcaacatccatacttaatgcatttgcatatccaaagaacaaggcacaacaactacaacaacacatagtaccaacaatcaattaagtaatctaagcaaaccttactgtttaccttacatcaacaacagattttttcatttaataaactatctgtggtgaaccctgatatctacttgcaggcccaacacatactacacatttaaccaacttgtctgaagcactaatgccttcttactgtaacaacatcttttcaacatcccatattgaatctatgtcaaacattggtgtttgctagagacaacaacattccgttgacattctacccaca

SEQ ID NO: 10779 - DNA, 509 bp, Zea mays
  unsure (1)..(509): unsure at all n locations; Clone ID: LIB3061-100-Q1-K6-H6
tttcagcttgtattcccactctgtgggggggggggcccgtcaaaaaaaanacctagaagaaaggagctctctcgcaagctcttcacggccgtcctcctcgtcatgctgctgctgctgtccgcagaggtcgggccggtggcggtggcggaggcgcggacgtgccattcgcggtaccgacagggccggggcccctgcctccgccggtccaactgcgccaacgtctgcaggaccgaggggttccccggcggcaggtgccgcggcttccgccgccgctgcttctgcaccacgcactgccactgattcgctcgctcgcccagcggccggctggcgtcgccgtcgatcgcgtcgcgaccagtccatggctccatgcatgaataacaagggtgtgcgcggtttgtgatgccaaattgtatcctcctcgtgtgttgaagcgttcgatcgtctgtctagtagtgtgcctttgagcagcggcgtgctgttgtacgtacgtctgcctcttttccatgttt

SEQ ID NO: 10780 - DNA, 505 bp, Zea mays
  unsure (1)..(505): unsure at all n locations; Clone ID: LIB3061-100-Q1-K6-H7
ggggcaaaaaaaaaaacaaaccatcgggcacancanctgcagcaactcgtgctacctgtgatcaacccaatagctctggcaaacctttctccctactctcagcaacaacaatttcttccattcaaccaactntctactctgttccgcnncgggttatttncancaacaactattaccattcaaccaaaaaaaaactgcctactctcancaacaacaacttcttccatttaaccaattgnccccactnaaccccnctncttatttgcancaccaaatactactaccatttanccanctacctncancaaaccgtgcttccttcttgacacatcaacagttgctgcctttctaccagcagtttgcggctaaccccgcaaccctcttacaactacaacaattgttgccctttgtccaactttctttgacagaccgagcggcctcctaccaacaacacatcattggtggtgccctcttttacattgctcatcacttgtaattcaataat

SEQ ID NO: 10781 - DNA, 516 bp, Zea mays
  unsure (1)..(516): unsure at all n locations; Clone ID: LIB3061-100-Q1-K6-H8
ccccctccggttcnnttcgttgtggggagggtctccaaaaaaaaaattcgtgggtgagcggatcgagaggcggcgtcggatgttgagtaccgctgcttcgtcggcggcctcgcctgggccacggacgaccactccctccacaacgccttcagcacctaccccnatttccgggatgccgagacatcctcnatcnnnaaacncannagtcccncanattacacttcatcaccttctccacnngagaagcgatgcggaacgccatcgagggcatgaacggcaaggagctggacggccgcaacatcaccgtcaacgaggcccagtcccgcggcggccgtggaggcggcggcggcggcgggtactgtggtggccgtggaggcggcggctacggcggtggcgggcgccgtgatggcggcggcggctactgcggtggcggcggctaccgtggtggccgcggcggctaccgtggtggtggcggcggctaccgcggtggcaaccgtggccgcggctaccgcaact

SEQ ID NO: 10782 - DNA, 325 bp, Zea mays
  unsure (1)..(325): unsure at all n locations; Clone ID: LIB3061-100-Q1-K6-H9
cccaaaaaaaaaacatnnaggtgttgctcgttgccctcnctctcctggctctcgctgcgagcgccccctccacgcatacaagcggcggctgcggctgccagccaccttcttctttttctctaccnccccctttttttttttttgttncggggcacctnccccctccnntncatctcccaccaaaaaaaaaaaaacccccccctttcctcctnccaccnncnntccatttnccnccccccnttcatcttccnccnccacccttccactaccctacttaacccccccnncctcancctcatccccanccacacccattcccctccca

SEQ ID NO: 10783 - DNA, 433 bp, Zea mays
  unsure (1)..(433): unsure at all n locations; Clone ID: LIB3061-101-Q1-K6-A11
ctccttnctctttctgcttgtgttgcttacgcgaccatttttcctcaatactcgcatgctcctatagctgcccttctttcttttaccttccatcaacccctttttttttttgtaaaacgcanccctncaaccctacannctccaacaaccaataaaaacaaacaacttacctttatcacccctnttctttcaacaatcnccanccctatctttnttccantcattnntccaaaccatcannncacaacancttcttcatcttttcctacctntggtcagcctagtagctctggcatttttttcttcctactntcagcaacaacaatttcttccattcaaccaactgtctacactgaaccctgctgcttatttaccaccccaacatctactacctttcagcccgctagctactggctactcttcacaacaacaa

SEQ ID NO: 10784 - DNA, 392 bp, Zea mays
  Clone ID: LIB3061-101-Q1-K6-A2
ctccgcaacaattaccattcagccagctagttgctgcctacccccagcaatttcttccattcaaccaactagcagcattgaactctgctgcttatttacagcagcaacaactactaccattcagccagctagctgatgtgagccctgctgccttcttgacacaacaacagttgttgccgttctacctgcacgctatgcctaacgctggcaccctcttacaactgcaacaattgctgccattcaaccaacttgctttgacaaacccaacagtgttctaccaacaacccatcattggtggtgccctcttttagattgcttatgagttatagttcaataatgaagttttttggatgatgtttgtggcgtcccagaaataagaaagtacatttcta

SEQ ID NO: 10785 - DNA, 259 bp, Zea mays
  unsure (1)..(259): unsure at all n locations; Clone ID: LIB3061-101-Q1-K6-A5
tttgcggctaactgtggggggggggacactacaacaattgttgccctgggtccaacttgctttgacagacccagcggcctcctaccaacaacacatcattggtggtgccctcttttagattgcttattagttgtaattcaataataaagttttttntttgtggggaaagaaagggggaaaaaaaaaaaaaaaaaaaaaaaaaaaaaaaaaaaaaaaaaaaaaaaaaaaaaaaaaaaaaaaaaaaaaaaaaaaataaaaa

SEQ ID NO: 10786 - DNA, 533 bp, Zea mays
  unsure (1)..(533): unsure at all n locations; Clone ID: LIB3061-101-Q1-K6-A7
tggcaaaaaaaaattttggcggcttatgctccttggtctttctgcaagtgctgctacggcgaccattttcccgcaatgctcgcaagctcctatagcttcccttcttccccctttcctctcaccancntntctttgttttggaaaggccattcttcaaccctacanatccaacangcaatcacagctggcatcttacctttatcacccttgttcctccaacaatcatcanccctattacatcanttacctttggtgcatttattggcacaaaacatcagggcacaacaactacaacaacttgtgctagcaaaccttgctgccttctctcagcaacagcagtttcttccattcaaccaactagctgcattgaactctgcttcttatttgcaacaacaacaactaccattcagccagctacctgctgcctacccccagcaatttcttccattcaaccaactggcagcattgaactctcctgcttatttacagcagcaaccactactaccattcaacccgcttgctggtgtgagccc

SEQ ID NO: 10787 - DNA, 319 bp, Zea mays
  Clone ID: LIB3061-101-Q1-K6-B1
ggcagccaaaatattttgcctccttatgctccttggtatttctgcaagtgctgctacggcgaccattttcccgcaatgctcacaagctcctatagcttcccttcttcccccgtacctctcaccagcggtgtcttcggtatgtgaaaacccaattcttcaaccctacaggatccaacaggcggtcgcagctggcatcttacctttatcacccttggtcctccaacaatcatcagccctattacagcagttacctttggtgcatttattggcacaaaacatgagggcacaacaacttcaacaacttgtgctagcaagcctt

SEQ ID NO: 10788 - DNA, 601 bp, Zea mays
  unsure (1)..(601): unsure at all n locations; Clone ID: LIB3061-101-Q1-K6-B10
gtcgacccagcgtcctttgagaccaactgcaacatangggggcggtggtgtaccaacaatggcagccaaaatttttgcttccttatgctccttggtctttctgcagtgctgctaccgaaccattttcccacatgctcacaagctctatactcctttttccccatccttaccacggtggtgggggtgtgaaaacccaattcttcaaccctacaggatccaacaggcaatcgcagcaggcatcttacctttatcacccttgttcctccaacaaccgtcagccctattacagcagttacctttggtgcatttgttggcacaaaacatcaaggcacaacaactacaacaacttgtgctaggaaaccttgctgcctactctcagcaacagcagtttcttccattcaaccaactggctgcattgaactctgctgcttatttgcaacaacaactaccattcagtcagctagctgctgcctacccccagcaatttcttccattcaaccaactggcagcattgaactctgctgcttatttacaacagcaacagctaccaccattcagccagctagctgatgtgagccctgttgccttcttgacacaacaa

SEQ ID NO: 10789 - DNA, 600 bp, Zea mays
  unsure (1)..(600): unsure at all n locations; Clone ID: LIB3061-101-Q1-K6-B11
aactagcaacatagnaaagcgcgggggggggccaacaatggcagccaaaaattgggcgtccttatgctccttggtctttctgcaagtgctgctacggcgaccattttcccgcaatgctcgcaagctcctatagcttcccttcttcccccgtacctctcaccancggtgtcggtggttgtttgggaaacccaattcttcaaccctacaggatccaacaggcaatcgcagctggcatcttacctttatcacccttgttcctccaacaatcatcagccctattacaacagttacctttggtgcatttattggcacaaaacatcagggcacaacaactacaacaacttgtgctagcaaaccttgctgcctactctcagcaacagcagtttcttccattcaaccaactaggttcattgaactctgcttcttatttgcaacaacaacaactaccattcagccagctacctgctgcctacccccagcaatttcttccattcaaccaactagcagcattgaactctcctgcttatttacagcagcaacaactactaccattcagccagctagctggtgtgagccctgctaccttcttgacacaaccac

SEQ ID NO: 10790 - DNA, 468 bp, Zea mays
  unsure (1)..(468): unsure at all n locations; Clone ID: LIB3061-101-Q1-K6-B12
cccaacctgtggtctgctgcctgcctgcctgcctgcctgcaaaaagagtttgtcatggcgtctaagcgcatcctcaaggagctgaaggacctgcatatagacccccccacatcatccattgctgtttctgctagggggnacatntttcattnncaaccaacaattatgggaccacctaacantccctatgctggtggtgttttcttagtgaacattcatttcccgccagattaccccttcaaacctccaaaggtttctttcaagacaaaggtcttccatcctaatatcaacagcaatggaagtatatgccttgacattctcaaagagcagtggagccctgctttgacaatttctaaggtcctgctctccatctgctccctgctgaccgaccccaacccggacgaccctcttgtcccggagattgcccacatgtacaagacggaccggccgaattaccagtcgacggcc

SEQ ID NO: 10791 - DNA, 574 bp, Zea mays
  unsure (1)..(574): unsure at all n locations; Clone ID: LIB3061-101-Q1-K6-B4
tcttcataccatcaacatgtggaggggggagtataagcaccaaatcaaatgtgcaacatcaattatctaactccaaaaaccatgaagctggtgcttgtggttcttgctttcattgctttagtatcaagtgtttcttgtacacagacaggcngctncancttttttggggatcgaagggggnancancaacatcatccacaacaacatcatccacaaaaacaacaacatcaaccaccaccacaacatcaccagcagcagcaacaccaacaacaacaagttcacatgcaaccacaaaaacatcagcaacaacaagaagttcatgttcaacaacaacaacaacaaccgcagcaccaccaccaacaacaacaacaacagcaccaacaacaacatcaatgtgaaggccaacaacaacatcaccaacaatcacaaggccatgtgcaacaacacgaacagagccatgagcaacaccaaggacagagccatgagcaacaacatcaacaacaattccagggtcatgacaagcagcaacaaccacaacaacctcagcaatatcagcagggccaggaaaaatcac

SEQ ID NO: 10792 - DNA, 531 bp, Zea mays
  unsure (1)..(531): unsure at all n locations; Clone ID: LIB3061-101-Q1-K6-B5
aacatgagcaggctgactctgatgatgccaggagacgcaagcataggtccagaagggctcagactcaagtgatgagagcaaccgtgaatatgaaagcgggtctgaagaagaacgtacaaagaagggggttgcgggcgggaanaaagcatcacagacactcttcaatgtcagactctgaagacaacagtgatgaggatgagcggagatctgccaaggaccattctcagccccgcagacgccaccatcagtcttctgatgatggctcggacaaggtcaggttgagacatgggaagcgtctgagatcaagtgacgagaatgctcggccagattccaacagccataagcatctcaggagccaatccttggaggagtcatcagatgatagagatgatgatggaccagagaagataagaaatggcaaaaggtatcacaagaatcatcaccgtcaccaccaccatcatcgtcaccatcggcaccaccatgaaagacataataactcagcagaacctaatgacaggaggcaagtactga

SEQ ID NO: 10793 - DNA, 589 bp, Zea mays
  Clone ID: LIB3061-101-Q1-K6-B6
gcgttctgcgattgcagtaaggcgtgtgcgcagggggggagggcgacatgttgccaaagccactggtgcaactatggtgtctacttttgcggacatggaaggtgaagaaacattcgattcatcattccttggccatgctgatgaagttgtggaggaaagaattgctgacgatgatgttattgggttgagggcgcaaagaacaccagcgcggtctctataatacttaggggcgcaaatgactacatgcttgatgagattgaacggtccttgcatgatgccctgtgcattgtgaagagaaccctggaatcaaatatggttgttgctgggggtggtgcagttgaagctgcgctgtcagtttatctggagaaccttgcaacaaccctgggttctcgggaacaattggcaattgctgaatttgctgagtctttgttaatcataccaaaggtactatctgttaatgctgcaaaagatgcaactgagcttgtagcaaagcttagggcatatcatcatactgctcaaacaaaggccgacaagcaacattattcaagtatgggccttgacctctctaagggtatcattcgcaacaacc

SEQ ID NO: 10794 - DNA, 442 bp, Zea mays
  unsure (1)..(442): unsure at all n locations; Clone ID: LIB3061-101-Q1-K6-B7
ggggggggggggcacaaaaaacaaccaggggggagcctangattgatgatgaaacggctgatgctgtaaaggcttctgcttcggctgtttctgctattgccaaaacaaaccaacaactgctttcttcaanagatnaanaaaatatggttctttgtacntngggcacaanctctanattcccaacccaannanttaaaatcctagacccattcaatcnntcataccanngaacccataaatattaccanngatnatangttttctcaataccccccactggaagaccatgcccctactgttataaggaatggggcaattaacagttcatggagagcctctcatcaaactaacatgtatggtgcgtcaaatggcgactttggtcccgtgaggtcttcatttgccccagcacctgctgaacctacagctggatcattttcaacat

SEQ ID NO: 10795 - DNA, 327 bp, Zea mays
  unsure (1)..(327): unsure at all n locations; Clone ID: LIB3061-101-Q1-K6-B9
acacccancngngcaagccnanaggcgacaacaagcaanngcggcgagcgncnnacaacaaccaannncccaggngcaacaacaanccnnggcacancnaacaanacaaaccancgcaacgcaacagcaacaacaannccnaccagcacggagccaccnagccanggggaacccngccgccnacccgcaacagcaggngcnngcancaaacccacnngcncnggcaaacgnagnngcaaaccagccacaacaacagcngcaacagnnncngccagcgcncagncaacnagccaaggngaacccngccgccnaccnacaacagcaaca

SEQ ID NO: 10796 - DNA, 542 bp, Zea mays
  Clone ID: LIB3061-101-Q1-K6-C1
caaaccatcagggcacagcagctgcagcaactcgtgctacctgtgatcaaccaagtagctctggcaaacctttctccctactctcagcaacaacaatttcttccattcaaccaactgtctacactgaaccctgctgcttatttgcagcaacaactattaccattcagccagctagctactggctactctcagcaacaacaacttcttccatttaaccaattggccgcactgaaccccgctgcttatttgcagcagcaaatactactaccatttagccagctagctgcagcaaaccgtgcttccttcttgacacagcaacagttgctgcctttctaccagcagtttgcggctaaccccgcaaccctcttacaactacaacaattgttgccctttgtccaacttgctttgacagaccgagcgggctcctaccaacaacacatcattggtggtgccctcttttagattgcttattagttgtaattcaataataaagttttttgggatgatgtatgtggccaacccggataaaaaacatccaccct

SEQ ID NO: 10797 - DNA, 589 bp, Zea mays
  unsure (1)..(589): unsure at all n locations; Clone ID: LIB3061-101-Q1-K6-C10
cgtccggcaacataggaagtcggaggaggggaccaacaaaaacaccaaattgttgcctccttagctccttggtctttctgcaatgctgctacggcgaccattttccccatgctcaaactcctatactcccttcttcccctaccctcaccacgtgtgttggtgggtgaaaacccaattcttcaaccctatangatccaacaggcaatcgcagctggcatcttacctttatcacccttgtntcctccaacaatcatcagccctattacagcagntacctttggtgcatttattggcacaaaacatcagggcacaacaactacaacaacttgtgctagcaaaccttgctgcctactctcagcaacaacagtttcttccattcaaccaactagctgcattgaactctgcttcttatttgcaacaacaacaactaccattcagccagctatctgctgcctacccccagcaatttcttccattcaaccaactgacagctttgaactctcctgcttatttacagcagcaacaactactaccattcagccagctagctgggtgtgagccctgctacctttcttgacacaaccacaaa

SEQ ID NO: 10798 - DNA, 291 bp, Zea mays
  unsure (1)..(291): unsure at all n locations; Clone ID: LIB3061-101-Q1-K6-C11
gcgaacggcttttttttttttttttttatgaattttttttgggtgggggaattttttaaaataagtttgggggttcccanaataagaaatacatttctagattcttaaaaaaaaaaaaaaaaaaaaaaaaaaaaaaaaaaaaaaaaaaaaaaaaaaaaaaattttttaaaaaaaaaaaaaaaaaatttttgtttttgaaaagggaaaaaanaaaaaaaaaaaaaaaaaaaannnnnaaaaaaaaaaaaaaacaccccaccaaccccccccacccncccacnccccccacac

SEQ ID NO: 10799 - DNA, 619 bp, Zea mays
  unsure (1)..(619): unsure at all n locations; Clone ID: LIB3061-101-Q1-K6-C12
tgactatcttactaacatatatgtgcgtttgaaccgcaaacggttcaaagggcgtactggagaagaagactgcagaatttctctttcaacactctaccatgttcttgtaacaacttgcgtggtgatggctccatttacaccattctttactgaagttctttatcaaaatttgcggaaggtgtcaagtaattctgaggagagcatccacttttgcaagttcccttccacaactggcgagagagatgagcgtgttgagcaaagtgtaaagaggatggtgaccataattgatcttgcacgtaatattcgtgagcggcataacaaagctctcaaaacaccactcaaggaaatggtggttgtgcatccagacaatgacttccttgaagacatcactggcaaactaaaggagtatgtcatggaggaaatcaatgttaagaatgtcactccatgtaatgaccccttgatgtatgcttctctgcgagccgagcctaatttcagcgtgctaggaaaaagacttggaaaagacatgggaaaagtatcaaatgtggtgaagaagatgactcangagcagatcttagcatttgaaaaaagtggagaggtttcattcttcggccattgcttg

SEQ ID NO: 10800 - DNA, 594 bp, Zea mays
  unsure (1)..(594): unsure at all n locations; Clone ID: LIB3061-101-Q1-K6-C2
cgtggnagcaataccggcggcctcggcgacgtcctcggcggcctgccgccggccatggccgcgaacgggcaccgtgtcatggtcgtctctccccgctacgaccagtacaaggacgcctgggacaccagcgtcgtgtccgagatcaagatgggagacgggtacgagacggtcaggttcttccactgctacaagcgcggagtggaccgcgtgttcgttgaccacccactgttcctggagagggtttggggaaagaccgaggagaagatctacgggcctgtcgctggaacggactacagggacaaccagctgcggttcagcctgctatgccaggcagcacttgaagctccaaggatcctgagcctcaacaacaacccatacttctccggaccatacggggaggacgtcgtgttcgtctgcaacgactggcacaccggccctttcttgtgctacctcaagagcaactaccagtcccacggaatttacagggaacgcaaagaccggtttctgcatccacaacatctccctaccagggccgggttcgcctttctccgactacccggaactgaacctcccggagagattcaagtcgtcctt

SEQ ID NO: 10801 - DNA, 573 bp, Zea mays
  unsure (1)..(573): unsure at all n locations; Clone ID: LIB3061-101-Q1-K6-C3
tgcaagaccaacaatgcaacaagcaaggcgcttttgcggcgnnagcgtcttacaacaacccaattgcgccaattgcgaacaaccatatccttgccacattctaacaatacaangccattcacaacgcaacatgcaacaaccagttcctaccagcagctggggggggcgtaggccatgnngtgaacccttgccgccttactttgcaaggagcagcgttgcttgcattccaaacccactttggcgtctgtgcgaacgtatgttgctaaaccagtcaacaacaacatgctacaacagtttcntgccaacgctcagtgcaactagccatgggtgaaccctgctcggctacgtacaacaacaacaactggtttgatgtagcccgctcgctgtgggctatgcacctacatacctgcaacaacaatggttgcagcagattgtaccagttttgactcaactaggtgtggcaaaccctgttggctacttgcaacagttgtttccattcaaccaactgactctttcgaactctgctgcgtacctacaacagggacaacagttacttaatccattggtagtggc

SEQ ID NO: 10802 - DNA, 592 bp, Zea mays
  unsure (1)..(592): unsure at all n locations; Clone ID: LIB3061-101-Q1-K6-C5
tttaaacgggtacgcaggagaccagcggaaggcggcgccaccaacgtcatatccagcgggcttgaagccggagatcggccctgacggcctcgctcgagattctcccgtaatcgcctacaccgagaaggtcattttggaggagcagctgcagctgaagaaatacattcagggggggctgtgggggattcntnatntanaaaaggagttagagagtcttactttagaaatgaaactgacatctggaccaaagaaagcagcactagagcatctgaggaagaagattgaaatatcaacagagaaaatacgtttagctaaggtgaaagaggaacatgcaaaaaagacttgggaagttgctgcacaagttgttaaagacgaagaggatgctaagcagaaattatgtgatgacctaaaccatctagtccaggagagtgctgcttcccaatatgcaagattggaggagctgaagaaacgtttagaatctctaaatcccataagggattctgttaatgtgtcaggtgtttatactgcacagcatgctactctgaattcagtacctcagcaaccaactgcacaaaatcctgcagatgtaact

SEQ ID NO: 10803 - DNA, 358 bp, Zea mays
  unsure (1)..(358): unsure at all n locations; Clone ID: LIB3061-101-Q1-K6-C8
tctgtcgtcagcagcttctgcttgctctgggggggaaggagacacaaagagcgagagagatctagtggagaggctagctaggtggtcctcgaacgaagatgttggcggtgttcagcgggcaggtggtggaggtgccggcggagctggtggcggcgggcagccggacgccgtcttccaggggggggcgtggcanctggtgaggcgcttcctggccgcctccgagccggccgtgtccgtgcagctcgtcgaccacggtcacctcgcctactcccacaccaaccaggcgcttcttcgtgccaggtcgttgggcggagaatgactaagtgttctgcctgtccatgggggtgctggacaacct

SEQ ID NO: 10804 - DNA, 431 bp, Zea mays
  unsure (1)..(431): unsure at all n locations; Clone ID: LIB3061-101-Q1-K6-C9
cagtacaacatagnacaacatggcgaccaagaattttccctccttatgctccttgctctttctcatgtgttgctaacgcgacaattttccctcaatgctcacaagctcctatagcttcccttcttcccccataccttccatcaatgatagcttcagtatgtgaaaacccaggggtgggagccctatagctccaacaagcaatcgccgcaagcaacatacctttatcacccttgtttcaacaatcgccagccctatctttggtgcagtcattggtacaaaaccatcaaggcgcatcaggtgcagcaactattgctacctgtgacaaacccaatagctcttggcaaaccgttgtccctactatccaaaacaacaataactgggatttcaaccgacttttttgcactggaacgctgctgcgtttatatggcagt

SEQ ID NO: 10805 - DNA, 262 bp, Zea mays
  Clone ID: LIB3061-101-Q1-K6-D1
ctgagtaccagaatcaagtctactgtgtgacttactttggtcagatccaggaaaagagttcaagggtggggcatgaatgatagaggggtctcatatacctttggtgctgacaaggtttcagaattcctgcaaaggcatgatcttgatcttatttgtcgtgctcatcaagttgtcgagggtgggtatgaattctttgctgacagacagcttgtcaccatattctcggctcccaattattgtggtgaatttgataatgctggcg

SEQ ID NO: 10806 - DNA, 604 bp, Zea mays
  unsure (1)..(604): unsure at all n locations; Clone ID: LIB3061-101-Q1-K6-D11
ccaacagcaaatanaaagtggatacagtggcaacaatagagcaacaatggcggccaagatattttccatccttatgctccttgctctttctgcatgtgttgctaacgcgaccatttttcctcaatactcacaagctcctatagctgcccttcttcccccataccttccatcaatggccggggcagtttgtgaaaacccagcccttcaaccctacaggctccaacaagcaatcgcaacaagcaacttacctttatcacccctgttctttcaacaatcgccagccctatctttggtgcagtcattggtacaaaccatcagggcacaacagctgcaacaactcgtgctaccagtgatcagccaagtagctctggcaaacctttctccctactctcagcaacaacaatttcttccattcaaccaactgtctacactgaaccctgctgcttatttacaacaacaacaactactaccattcagccagctagctactgcctactctcagcagcaacaatttcttccatttaaccaattggccgcactgaacccctctgcttatttccagcagcaaatactactaccatttggccagctagctacaacaagc

SEQ ID NO: 10807 - DNA, 176 bp, Zea mays
  Clone ID: LIB3061-101-Q1-K6-D2
ttcagcaaacggcagtgcgtagtgggggtcgtcgaacagaacacatgaattggtcatcgttctcgtcgtgtgcctggctctgacagctgccagcgcctctgcaatgcagatgccctgcccctgcgcggggctgcagggcttgtacggcgctggcaccagcctggcggcgatgatgg

SEQ ID NO: 10808 - DNA, 450 bp, Zea mays
  unsure (1)..(450): unsure at all n locations; Clone ID: LIB3061-101-Q1-K6-D3
ggtaaatgatctaattcatgnactttatcctgaggctgtaaccattggtgaagagttagtggaatgcctacatttgcccttcctgttcacgatggtggggtaggttttgactatcggatgcatatggctgtggctgacaaatggattgaccttctcaagcaaagtgatgaaacttggaagatgggtgatattgtgcacacactgacaaataggaggtggttagagaagtgtgtaacttatgctgaaagtcatgatcaagcattagtcggcgacaagactattgcgttttggttgatggacaaggatatgtatgatttcatggccctcgatagaccttcaactcctaccattgatcgtgggatagcattacataaggagattagacttatcacaatgggttttaggagggagagggctatcttaatttaatgggaaatgagtttggaacat

SEQ ID NO: 10809 - DNA, 605 bp, Zea mays
  Clone ID: LIB3061-101-Q1-K6-D5
ctggccgtcagcctagcaattagctcatcgactccagatggggaactcgacaccatgaagtgctgatcgttgcccttgctctcctggcgctcgctgcgagcgccgcctccagtacaagcggcggctgtggctgccagacaccaccgtttcatctaccgcctccgttctatatgccgcctccgttctatctgccgcgcgcagcagcagccgcagccatggcaataccccactcaaccaccgcagctaagcccgtgccagcagttcggatcctgcggcgtcggcagcgtcggcagcccgttcctgggccagtgcgtcgagttcctgaggcaccagtgcagcccggcggcgacgccctacggctcgccacagtgccaggcgctgcagcagcagtgctgccaccagatcaggcaggtggagccgctgcaccggtaccaggcgacatacggtgtggtcctgcagtccttcctgcagcagcagccgcagggcgagctcgcggcgctgatggcggcccaggtagcgcagcagctgacggcgatgtgcggcctgcagctgcagcagccaggtccctgcccttgcaacgcagctgccggcggtgtctactactg

SEQ ID NO: 10810 - DNA, 586 bp, Zea mays
  unsure (1)..(586): unsure at all n locations; Clone ID: LIB3061-101-Q1-K6-D6
cccagcgtccggcgatttcgatctcgcagccaccttttttttgttctgttgtgtatctagtagttggaggagatatgcagtttgcacttgcattggacacgaactcaggtcctcaccagataagatcttgtgagggtgatgggattgacaggttgngaaaaattaagtattgggggcagaaagcaggagaaagctttgagaaataggtgctttggtggtagagttgctgcaactacacaatgtattcttacctcagatgcttgtcctgaaactcttcattctcaaacacagtcctctaggaaaaattatgctgatgcaaaccgtgtatctgctatcattttgggcggaggcactggatctcagctctttcctctgacaagcacaagagctacgcctgctgtacctgttggaggatgttacaggcttattgatatccctatgagtaactgcttcaacagtggtataaataagatatttgtgatgagtcagttcaattctacttcgcttaaccgccatattcatcgtacataccttgaaggcgggatcaactttgctgatggatctgtacaggtattagcggctacac

SEQ ID NO: 10811 - DNA, 499 bp, Zea mays
  Clone ID: LIB3061-101-Q1-K6-D7
caacaactacaacaacttgtgctagcaaaccttgctgcctactctcagcaacagcagtttcttccattcaaccaactagctgcattgaactctgcttcttatttgcaacaacaacaactaccattcagccagctacctgctgcctacccccagcaatttcttccattcaaccaactggcagcattgaactctcctgcttatttacagcagcaacaactactaccattcagccagctagctggtgtgagccctgctaccttcttgatacaaccacagttgttgccgttctaccagcacgctgcgcctaacgctggcaccctcttacaactgcaacaattgctgccattcaaccaacttgctttgacaaacccagcagcgttctaccaacaacccatcattggtggtgccctcttttagatttcttatgagttatagttcaataataaagttttttgtctgatgtttgtggcttcccagaaataagaaagtacatttctag

SEQ ID NO: 10812 - DNA, 271 bp, Zea mays
  Clone ID: LIB3061-101-Q1-K6-D8
tccggcaagtcgtgcttccttcttggcacagcgacagttgctgcctttctacaagcagtttgcggctaaccccgcaaccctcttacaactacaacaattgttgccctttgtccaacttgctttgacaaacccagcagcctcctaccaacaacacatcattggtggtgccctcttttagagggaggggggggtgtaattcaataataaagttttttggatgatgtatgtggccaaccagaaataagaagttacatttccagattctaatgtg

SEQ ID NO: 10813 - DNA, 570 bp, Zea mays
  unsure (1)..(570): unsure at all n locations; Clone ID: LIB3061-101-Q1-K6-D9
gtggaccgcgtgttcgttgaccacccactgttcnctggaagggtttggggaaagaccgaggagaagatctacgggcctgtcgctggaacggactacagggacaaccagctgcggttcagcctgctatgccaggcagcacttgaagctccaaggatcctgagcctcaacaacaacccatactggtgcggaccatacggggaggacgtcgtgttcgtctgcaacgactggcacaccggccctctctcgtgctacctcaagagcaactaccagtcccacggcatctacagggacgcaaagaccgctttctgcatccacaacatctcctaccagggccggttcgccttctccgactacccggagctgaacctcccggagagattcaagtcgtccttcgatttcatcgacggctacgagaagcccgtggaaggccggaagatcaactggatgaaggccgggatcctcaaggccgacagggtcctcaccgtcagcccctactacgccgaagagctcatctccggtatacccaggggctgcgagctcaacaacatatgcgcctcaccggcatcaccg

SEQ ID NO: 10814 - DNA, 451 bp, Zea mays
  Clone ID: LIB3061-101-Q1-K6-E1
cttccgttctcaaaccaacctaggcaattcgccgcagcctctcaccctcgcgagtcccgacctcccgcagccgccgcacagatggcacccaaggcggagaagaagccggcggccaagaagcccgcggaggaggagcccgcgacagagaaggtggagaaggctccggcggggaagaagcccaaggccgagaagcgcctcccggcgggcaagtccaaggagggcggcgagggcaagaaggggaaaaagaaggcgaagaagtccgtggagacctacaagatctacatcttcaaggtgctcgaagcaggtgcaccccttcatcggcatctcttccaaggccatttccatcatcaactgcttcatcaacgacattttcgttaagctggcgggcgagtgcgtcaagctggctcgcttcaacaagtaacccaccgtctcctgccgccgagatccagta

SEQ ID NO: 10815 - DNA, 512 bp, Zea mays
  unsure (1)..(512): unsure at all n locations; Clone ID: LIB3061-101-Q1-K6-E10
agcgaaccagnanatcatcagagtggcgatggccccgagcgcgtcgatgctgttcctgagctaccaccagctccacaggccgacggaggtggggacgccgccgccgccgccgcgcagggaggcggctgcccccggcggcttctggaggaggatgagcgtgagcagcgtgctctcacccgctttgttgcagtggcggccggagggggaggcgacactgcacgagcgcgacgccggcgaggagatcaagtcatcggcgccggccgacgctgataaggagctggaaagcaagttcgaggaggcgttgcgcctcagctgctggtcttcatgagcatccatccatcatggggaacggagagacgcgagcgtgccgccgaatcgaagcgacctctcctctaaacagccgtcctgtatatcttctccgtgtatcaaaatccacccttttgctttagatttttgtacatttgtaatcgtcacatccgctcaaatatgttatatatattttagtttggagc

SEQ ID NO: 10816 - DNA, 593 bp, Zea mays
  unsure (1)..(593): unsure at all n locations; Clone ID: LIB3061-101-Q1-K6-E2
attgcggcattttataatgcaaacttggggaataaccaanaagccaataccagatttcagcttctatgaccgttttgctccaatttatacacaacctcgacacctgccaccttcaaaggttcttgatgctgatgtgacagacagtgttattggtgaaggatgtgttattaaaaactgcgagagaaaccattctgtagttggactccgatcttgcatatctgaaggtgctatcatagaggacagtttactaatgggtgcggactactatgagacagaagctgataaaaaactccttgccgaaaaaggtggcattcctattggtattgggaaaaattatgcatcaggagagcaatcattgacaagaatgctcgaattggagacaatgttaagatactcaatgctgacaatgttcaagaagctgcaatggagacagacgggtacttcatcaaaggtggaattgtcacagtgatcaaggatgctttactccctagtggaacagttatatgaagtgaacgtgcgacatgcagctgtgtgtctcgacattcgacaatgatcagcacctggttacatgcgtgatctgcagatcagtctgt

SEQ ID NO: 10817 - DNA, 610 bp, Zea mays
  Clone ID: LIB3061-101-Q1-K6-E4
cactagcaacgacctaacaacaatggctaccaagatattatccctctttgcgcttcttgccctttttgtgagcgcaacaaatgcgttcattattccacaatgctcacttgctcctagtgccattattccacagttcctccctccagttacttcaatgggcttcgaacacccagctgtgcaagcctacaggctgcagcgagcgcttgcggcgagcgtcttacaacaaccaattgcccaattacaacaacaatccttggcacatctaaccatacaaaccatcgcaacgcaacagcaacaacaatttctaccagcactgagccaactagctgtggtgaaccctgtcgcctacttgcaacagcagttgcttgcatccaacccacttgctctggcaaacatagttgcataccaacaacaacaacaattgcaacagtttctaccagcgctcagtcaactagccatggtgaaccctgccgcctacctacaacagcaacaactgatttcatctagccctctcgctgtggttaatgcacctacatacctgcaacaacagttgctgcaacagattgtaccagctctgactcagctagctgtggcaaaccctgctggctac

SEQ ID NO: 10818 - DNA, 506 bp, Zea mays
  Clone ID: LIB3061-101-Q1-K6-E5
tggctggggtgttgctgtgctggtgggtgtgccacataaggacgctgagttcaagacccacccgatgaacttcctgaacgaaggaccctgaaggggaccttctttggcaactacaagccacgcactgatctgccaaagtggtggagctgtgacatgaaaaaggagctggaggtggaggaagggatcacgcacagcgtcccgttcgccgagatcaacaaggcgttcgacctgatggccaagggggagggcatccgctgcatcatccgcatggagaactagatttcgctgtctattttttgatctggcctgggcttggggttaataaaagaggcaatgctagcctgccctttcgatgaggaggtacatacacgctggcgatggaccgcgcttgtgtgtcgcgttcagtttggcttttgccaagcagagaggtagcttcccgtgttcgtaattatatgggatgaaccatcaccttttggctctacaatggtatgaacgtaagatacaaa

SEQ ID NO: 10819 - DNA, 129 bp, Zea mays
  Clone ID: LIB3061-101-Q1-K6-E6
cagctaccgcaccaacccctgtggcgtctccgctgccattccgccctactactgattcatgatgatggcgcagaacatgccggccatgggtggactctaccagtaccagctgcccagctaccgcaccaa

SEQ ID NO: 10820 - DNA, 454 bp, Zea mays
  unsure (1)..(454): unsure at all n locations; Clone ID: LIB3061-101-Q1-K6-E7
tagacaacatagnaggtagaatccattagcgacaatagagcaacaattgcgaccaagatattttccctccttatgctccttgctctttctacatgtgttgctaacgcgacaattttccctcaatgctcacaagctcctatagcttcccttcttcccccataccttccatcaattataggtggggggtgtgaaaacccagctcttcaaccatataggcttcaacaagcaatcgcagcaagcaacatacctttatcgcccttgttgtttcaacaatcaccagccctatctttggtgcagtcattggtacaaaccatcagggcacaacagctgcagcaactcgtgctacctgtgatcaaccaagtagctctggcaaacctttctccctactctcagcaacaacaatttcttccattcaaccaactgtctacactgaaccctgctgcttatttgcagc

SEQ ID NO: 10821 - DNA, 378 bp, Zea mays
  unsure (1)..(378): unsure at all n locations; Clone ID: LIB3061-101-Q1-K6-E8
tccgctactgcctactctcagcaacaacaacttgttgcatttaaccaattggccgcactgaaccccgctgcttatttgcagcagcaaatactactaccatttagccagctagctgcagcaaaccgtgcttccttcttgacacagcaacagttgctgcctttctaccagcagtttgcggggggccgcngggccctcttacaactacaacaattggtgccctttgtccaacttgctttgacagacccagcggcctcctaccaacaacacatcattggtggtgccctcttttagattgcttattagttgtaattcaataataaagttttttggatgatgtatgtggccaaccagaaataagaagttacatttccagattct

SEQ ID NO: 10822 - DNA, 596 bp, Zea mays
  Clone ID: LIB3061-101-Q1-K6-F10
gcccattagctttatctactccagacgcagaagacccgatcgacaccatgagggtgttgctcgttgccctcgctctcctggctctcgctgcgagcgccacctccacgcatacaagcggcggctgcggctgccagccaccgccgccggttcatctaccgccgccggtgcatctgccacctgcggttcacctgccacctccggtgcatctcccaccgccggtccacctgccgccgccggtccacctgccaccgccggtccatgtgccgccgccggttcatctgccgccgccaccatgccactaccctactcaaccgccccggcctcagcctcatccccagccacacccatgcccgtgccaacagccgcatccaagcccgtgccagctgcagggaacctgcggcgttggcagcaccccgatcctgggccagtgcgtcgagttcctgaggcatcagtgcagcccgacggcgacgccctactgctcgcctcagtgccagtcgttgcggcagcagtgttgccagcagctcaggcaggtggagccgcagcaccggtaccaggcgatcttcggcttggtcctccagtccatcctgcagcagcag

SEQ ID NO: 10823 - DNA, 571 bp, Zea mays
  unsure (1)..(571): unsure at all n locations; Clone ID: LIB3061-101-Q1-K6-F11
gtgngtgtgagtacgaccagnaagaatccatggatttctacaaggaaaggagatcccttcgaaaccagctgtgacaggcgtcttagtgttcgtttccactccagatccaattggcaacaagtactatcttggccctgctcctttgcaggatatggcaaggcaaattgctacagccaatggccctactggctataatagggattacctgttctcaatggagaaggcattagccagcattagccacgaagatgattcgatcatagagcttgcaaacgaggtgaggaaggtgctcaacagaacaaaggagaccaagatcactggtgccaatgcttccctgaaatcacatgcccctcttgtgcacctgtccgcgcttccagaaggcaccgttgtggactcgagatagcgagagccttggacgttggacctctactcggaatctacttccagctcttgcatgtttgtggccatcatgtactgattttcccttttcaacagttgtcgtgaggctgtatcttctggagttaaaaaaatgctaaaagccggcactaataatgatattaacttgaaaaat

SEQ ID NO: 10824 - DNA, 286 bp, Zea mays
  unsure (1)..(286): unsure at all n locations; Clone ID: LIB3061-101-Q1-K6-F2
accggtaacggccttcccgggtgcgacccagcgtttctgnagccacctaccatggtgaaccctggggctattgcaagagcaatgcttgcatccaacccacttgctctggcgaacgtagttgcaaaccagcaacaacaacagctacaacagtttctgccaacgctcagtcaactagccatggtgaaccctgccgcctacgtacaacagcggggggggggggggatctagcccgctcgctgtgggcaatgcacctacatacctgcaacaacgattggtgcaacagatt

SEQ ID NO: 10825 - DNA, 535 bp, Zea mays
  unsure (1)..(535): unsure at all n locations; Clone ID: LIB3061-101-Q1-K6-F3
acaatagtgttccggcggtgggagccaaaatattaaagcctccttgatgctccttggtctttctgcaagtgctgctacggcgaccattttcccgcaatgctcgcaagctcctatagcttcccttcttcccccgtacctctcaccagcggtgtcttcggtttgtgtgggccgggggggcaaccctacaggatccaacaggcaatcacagctggcatcttacctttatcacccttgttcctccaacaatcatcagccctattacatcagttacctttggtgcattttttggcgcaaaacattaggggacaacaactacaacaacttgtgctggcgaaccttgctgcctactctnagcaacaggggtttgttgcattcaaccaactagctgcgttgaactctgcttgttatttgcgacagcaacaactaccattcaggcaggtacctgctgtctacccccagcatttctttcattcaaccaactggcagcattgaactttcctggttatttacagcggctacaactactacctttcag

SEQ ID NO: 10826 - DNA, 481 bp, Zea mays
  unsure (1)..(481): unsure at all n locations; Clone ID: LIB3061-101-Q1-K6-F5
tccggcacatactagtgaagtcactagcgggtgttagcaccaaggcagccaanattttgccatccttgccctccttgctctttcagcaagcgttgctaccgcgactattattccacaatgctcacaacaatacctctctccggtgacagccgcgagatttgaatacccaactatacgggggggcaggctacaagaggccatcgcagcaagcatcttacggtcgttagcattgaccgtccaacaaccatatgccctattgcaacaaccatccttaatgaatctatatctccaaagaatcgcagcacaacaactacaacaacagttgcttccaacaatcaatcaagtagttgcagcgaaccttgctgcttacctccagcaacaacaatttcttccattcaatcaactagctggggtgaaccctgctgcttacttgcaggcacaacagctactaccattcaaccaacttgtcaggagccctgct

SEQ ID NO: 10827 - DNA, 596 bp, Zea mays
  Clone ID: LIB3061-101-Q1-K6-F6
tctagatcgcgacggccgccctttttttttttttttccaaatccagacattcgaatccttccctttagataatcagaagtcagaaccagatatgatactacacaagtcgtgccttatatacctggaattatttactacatacacatacacatacactacagtgaagcagcatgtacacatgagctgattcaccgtctccaacacacgctggggcgacagacaagtacgtacctatgccccccttattaaccacttacacgaccccacaatacaattttcaagctagtagtcctctggcgcgagcggctggtgcgcgtggggcacggcggcgtcggcggacgggataaccaggtactcgtacaccagccctgcaagcccggcgccgaggaaagggcccagccagtacacccagtggtgcctccaccgccacccgacgagcgccgggccgaagacccgcgccgggttcatccctgcgccgtcgaagggccctcccgccagcacgttggcgccgagcaggaagcccacggccagcggcgcgatggtgcccacgtgcccccgcttcgggtcgatcaccgtggcgtagtaggcgtacatga

SEQ ID NO: 10828 - DNA, 310 bp, Zea mays
  unsure (1)..(310): unsure at all n locations; Clone ID: LIB3061-101-Q1-K6-F7
tcgacccagcgttttttgctttcttctanactagctcttggggggggggggtttgtggaccaaggctatttaatctccaactgcatccccagatattcaccaaattctgtgagactgggaactccgggattggtttggataaggtgttctgggaatggggaaccaatgcccaaacgggaccctttttttgtggggggggggggcctccccccttccatcttcgcttatggttgcctaagaagacgatcgctactctgacttgaagaagttggacaagccatggcctgaggtgaactcgcgtaaacccact

SEQ ID NO: 10829 - DNA, 587 bp, Zea mays
  unsure (1)..(587): unsure at all n locations; Clone ID: LIB3061-101-Q1-K6-G1
taancaacatagaaagtggaatccagtagcaacaatagagcaacaatggcgaccaagatattttccctccttatgctccttgctctttctacatgtgttgctaacgcgacaattttccctcaatgctcacaagctcctatagcttcccttcttcccccataccttccatcaattatagctgcaatatgtgaaaacccagctcttcaaccatataggcttcaacaagcaatcgcagcaagcaacatacctttatcgcccttgttgtttcaacaatcgccagccctatctttggtgcagtcattggtacaaaccatcagggcacaacagctgcagcaactcgtgctacctctgatcaaccaagtagctctggcaaacctttctccctactctcagcaacaacaatttcttccattcaaccaactgtctacactgaaccctgctgcttatttgcagcaacaactattaccatttagccagctagctactgcctactctcagcaacaacaacttcttccatttaaccaattggccgcactgaaccccgctgcttatttgcagcagcaaatactactaccatttagccagct

SEQ ID NO: 10830 - DNA, 610 bp, Zea mays
  Clone ID: LIB3061-101-Q1-K6-G10
ctttttgtgagcgcaacaaatgcgttcattattccacaatgctcacttgctcctagtgccattataccacagttcctccgaccagttacttcaatgggcttcgaacacctagctgtgcaagcctacaagctacaacaagcgcttgcggcgagcgtcttacaacaaccaattaaccaattgcaacaacaatccttggcgcatctaaccatacaaaccatcgcaacacaacagcaacaacagttcctaccagcactgagccaactagatgtggtgaaccctgtcgcctacttgcaacagcaggtgcttgcatccaacccacttgctctggcaaacgtagctgcataccaacaacaacaacaattgcaacagtttctgccagcgctcagtcaactagccatggtgaaccctgccgcctacctacaacagcaacaactgctttcatctagccctctcgttgtgggtaatgcacctacatacctgcaacaacaattgctgcaacagattgtaccagctctgactcagctagctggggcaaaccctgctgcctacttgcaacagctgctttcattcaaccaactgactgtgtcgaactctgctgcgtacctacaac

SEQ ID NO: 10831 - DNA, 545 bp, Zea mays
  Clone ID: LIB3061-101-Q1-K6-G11
ctcggcggtgctctgggctccatggcctaccaaggatccctcgccttcctcaattaccctgcacagatcatgttcaagtcaaccaaggttctaccggtgatggtgatgggagccttcatccctggtctgaggcgcaagtacgcgttccaagagtacgtgtcggccgtgatgctgggggtgggcctcatactcttcacgctcgcggacgcgcagacgtcgcccaacttcagcatggccggcgtggccatggtgtccggggcgctcgtcatggatgctttccttggcaacctgcaagaagcaatcttcaagatgaacccggacacgactcagatggagatgctgttctgctccactgtcgttggccttccgttcctagcggtgcccatggtgttaacaggagagctcgtgacggcttggacttcctgctcccagcatctgtacgtgtacgcggtgctggtgttggaggcgatggccacgttcgtcggccaggtctccgtgctcttcctcatcgcgcttttcggtgcagcaaccacatccatggtgac

SEQ ID NO: 10832 - DNA, 842 bp, Zea mays
  unsure (1)..(842): unsure at all n locations; Clone ID: LIB3061-101-Q1-K6-G12
aaaaacccccccccccccncccncccccccccacccccncccacccccccccccccccccccccgggggggggggcccgccgcccacaaaaacacagccccgccccccccccccccccgccccccccccccccccccgccccccccccccccccccgcagcagcccccccccccccccccgccgcccccccccgcccgccccgccccccccgccccccgcccccacccccnncccccccnnccccccccccacaccccgcgcccccgccccgcgggggncncnnnccccccnncccccccacccccccccccccccaagcaccacacccacaaaaagaacccacccccacccaccccgcccccacccccccgacccccccacgcggcccccccgccccccgccccgcccccccccccccccccccccccccccccgcacccccgcccgccggcgccccccccgccccccncgccccgnccgcccccncagcccccgccgcccccacgcccccaccccccccccccccacccccccaccccgcgccacccgccccccccccaccccccccgccccccccaccccccccaccccccccacccccacaccccgcacgaccccccacccccccccaaaccccccacgcccccccgaccccccacaccgcacccccccgcaaagaaccccccccccccacccccccccccccacccccaccgccccccccccccccgcccccccccccgccccccccccccaccgcccccacccccccccccccccaccccgcccccacacccccccgcacccccccccccccccccacccccccccaccccccccc

SEQ ID NO: 10833 - DNA, 508 bp, Zea mays
  unsure (1)..(508): unsure at all n locations; Clone ID: LIB3061-101-Q1-K6-G4
ctcttgcaacacatttgttgttggggggccattaaaaaaaaaaactagctgcataccaacaacaacaacaattgcaacagtttctgccatcgctcagtcaactagccatggtgaaccctgccggctacctacaacatcttctactgntttcatntancccttttgggttgggggggggaccttcttncctncnncaacaattacttcaacaaataaaaccatctctcactcacctanctttttcaaacccttcttcctactttcaacanctnnttccattttttttactgactgtgtcgaactctgctgcgtgcctacaacagcgacaacagttacttaatccactagcagtgcctaacccattgatcactgtcttcctacagcatcaacaattgctaccatacatccatttctctttgatgaacccttccttgtcgtggcagcaacccatcttttgaatgtgccatcttttagattacatatgagatttaatttataatggtgccct

SEQ ID NO: 10834 - DNA, 489 bp, Zea mays
  unsure (1)..(489): unsure at all n locations; Clone ID: LIB3061-101-Q1-K6-G5
tgccatcactgnanccacctggggggggggaaccctgtcacctattgcaacacagctgcttgcatccaacccacttgctctggcgaacgtagctgcataccagcaacaacaacagctgcaacagtttatgccagtgctcagtcaactagccatggtgaacccttccgtgggggggggggggactttcatctancccnctcncnntgggcaatgcacctacatacctacaacaacagttgctgcaacaaattgtaccagctctgactcagctagctgtggcaaacccttctgcctacttacaacagttgcttccattcaaccaactggctgtgtcaaactctgctgcgtacctacaacagcgacaacagttacttaatccattggcagtggctaacccattggtcgctaccttcctgcagcagcaacaacaattgctgccatacaaccagttctctttgatgaaccctgccttgcaacaacccatcgttg

SEQ ID NO: 10835 - DNA, 592 bp, Zea mays
  Clone ID: LIB3061-101-Q1-K6-G6
agcgtccgtagaaacacaatatgtaccaacgtggcagccaaaatttttgcctccttatgctccttggtctttctgcaagtgctgctacggcgaccattttcccgcaatgctcgcaagctcctatagcttcccttcttcccccgtacctctcaccagcggtgtcttcggtatgtgaaaaacccaatgcttcaaccctacaggatccaacaggcaatcacagctggcatcttacctttatcacccttgttcctccaacaatcatcagccctattacatcagttacctttggtgcatttattggcacaaaacatcagggcacaacaactacaacaacttgtgctagcaaaccttgctgcctactctcagcaacagcagtttcttccattcaaccaactagctgcattgaactctgcttcttatttgcaacaacaacaactaccattcagccagctacctgctgcctacccccagcaatttcttccattcaaccaactggcagcattgaactctcctgcttatttacagcagcaacaactactaccattcagccagctagctggtgtgagccctgctaccttcttgatacaaccac

SEQ ID NO: 10836 - DNA, 579 bp, Zea mays
  Clone ID: LIB3061-101-Q1-K6-G7
cataccatagtgaatacactagcaacatgttagcaccaatggcagccaagatttttgcgctccttgccctccttgctctttcagcaagtgttgctaccgcgactattattccacaatgctcacaacaatacctctctccagtgatagccgcgagatttgaatacccatctatacaaggggacaggctacaagaggccatcacagcaagcatcttacggtcgttagcattgaccgtccaacaaccatatgccctattgcaacaaccatccttagtgaatctgtatctccaaagaatcacagcacaacaactacaacaacggttgcttccaacaattaatcaagtagttgcagcgaaccttgctgcttaccttcagcaacaacaatttcttccattcaatcaactagctggggtgaaccctgctgcttacttgcaggcacaacagctactaccattcaaccaacttgtcgggagccctgctgccatcttattgcagcaacagttgctgccattccgtctacaagttgttgcaaacattgctgctttcttgcaacaacaacaattgctgccattttacccac

SEQ ID NO: 10837 - DNA, 156 bp, Zea mays
  unsure (1)..(156): unsure at all n locations; Clone ID: LIB3061-101-Q1-K6-G9
tccggngggggtgatggtttagtaaatgattgggtatctgcttccactgcctcagatacgatgaagacatggaagatgggcgggatctggtagtaggatcttctgatgatttcaaaaagtctcgaatgggttatctttcttcatatgatgattttg

SEQ ID NO: 10838 - DNA, 314 bp, Zea mays
  Clone ID: LIB3061-101-Q1-K6-H1
cccgggtcgaccagcgtgcgggttcatctgccgccgccaccatgccactaccctactcaaccgccccggcctcagcctcatccccagccacacccatgcccgtgccaacagccgcatccaagcccgtgccagctgcaggggaacctgcggcgttggcagcaccccgatcctgggccagtgcgtcgaggtcctgagggggggggggagcccgacggcgacgccctactggtcgcctcagtgccaggcgttgcggcagcagtgttgccagcagctcaggcagggggagccggagcaccgggaccaggcgatcttcg

SEQ ID NO: 10839 - DNA, 615 bp, Zea mays
  unsure (1)..(615): unsure at all n locations; Clone ID: LIB3061-101-Q1-K6-H11
ngactcctatagcttcccttcttgcgggggcgggccatcaattatagcttcagtatgtggaaaacccagctcttcaaccatataggcttcaacaagcaatcgcagcaagcaacatacctttatcgcccttgttgtttcaacaatcaccagccctatctttggtgcagtcattggtgcggagcgggggggcacaacagctgcagcaactcgtgctacctgtgatcaaccaagtagctctggcaaacctttctccctactctcagcaacaacaatttcttccattcaaccaactgtctacactgaaccctgctgcttatttgcagcaacaactattaccatttagccagctagctactgcctactctcagcaacaacaacttcttccatttaaccaattggccgcactgaaccccgctgcttatttgcagcagcaaatactactgccatttagcgagctagctgcagcaagtcgtgcttccttcttgacacagcaacagttgctgcctttctacaagcagtttgcggctaaccccgcaaccctcttacaactacaacaattgttgccctttgtccaacttgctttgacaaacccagcagcctcctaccaacaacaca

SEQ ID NO: 10840 - DNA, 531 bp, Zea mays
  unsure (1)..(531): unsure at all n locations; Clone ID: LIB3061-101-Q1-K6-H3
gtgnaccaatagcaacatagnaaagccgatagtgtgccaacaatggcagccaaaatattttgcttccttatgctccttggtctttctgcaagtgctgctaccgcaaccattttcccacaatgctcacaagctcctatagcttcctttcttcccccatacctctcaccagcggtgtcttcgaggggggaaaacccaattcttcaaccctacaggatccaacaggcaatcgcagcaggcatcttacctttatcaccctggttcctgcaacaaccgtgagccctattacagcaggtacctttggggcatttgttggcacaaaacatcaaggcccaacaccttcaacaaccggggctatgaaaccttgcttcctactctcagcaacatgagtttcttccattcaaccaactggctgcattgaactctactgcttattcggcacaacaactaccattccagcacctagttgctgcctactccccagcaattctttgcattcaaccaactgggaagcttcgaacctctgctgcctta

SEQ ID NO: 10841 - DNA, 623 bp, Zea mays
  Clone ID: LIB3061-101-Q1-K6-H4
ccggtcgacccagcgtctcgcagctcctatagcttcccttcttgggggggggcgcgttccatcaatgatagcttcagtatgtggaaaacccaattcttcaaccctataggatccaacaggcaatcgcagctggcatcttacctttatcacccttgttcctccaacaatcatcagccctattacagcagttacctttggggggggggggggcacaaaacatcagggcacatcaactacaacaacttgtgctagcaaaccttgctgcctactctcagcaacaacagtttcttccattcaaccaactagctgcattgatactctgcttcttatttgcaacaacaacaactaccattcagccagctatctgctgcctacccccagcaatttcttccattcaaccaactgacagctttgaactctcctgcttatttacagcagcaacaactactaccattcagccagctagctggtgtgagccctgctaccttcttgacacaaccacaattggttgccgttctaccagcaacgctgcgcctaacggctggcacccttttacaactgcaacaattggctgtcattcaaccaacttgctttgacaaacccaacagctttctaccaacaac

SEQ ID NO: 10842 - DNA, 515 bp, Zea mays
  unsure (1)..(515): unsure at all n locations; Clone ID: LIB3061-101-Q1-K6-H6
tccttactatactattcttctatggggggggggtgggaggttgccttcgaataacaccaaaagcccaaagctccaaagaagctacagtaataatgattcgcggtcagcaaagagtcgtttacgcatccctgttaagggtcgcatacagctggtggtaagcaacccanagaagactggggtgtggtgctttcttctgcaactatgacttgagtgacatgcctcctggaaccaagactttcgtgcggcaaaaggtcactctctccccctctgccttgccttctaatccagtggaagaaggaagcaagacttgtgatgttaattctggtcacaaatcttctcagtcagtttcatgtggaaatgaacctagcgaacggggagctcgttctgaatgctgcaacggtggacagaactgcaactcaaatgatgaatcagaaaaaggagatctgaaaacaagatgtcgatcattggatagtgattctaatgaatcaaataagtctagttctccaggaaataag

SEQ ID NO: 10843 - DNA, 607 bp, Zea mays
  Clone ID: LIB3061-101-Q1-K6-H7
gcgttcggggctttcttctagacgagctcttgtgggggcttaagtttgtgggccgtggctatttaatctccaactgcatccccagatattcaccaaattctgtgagactgggaactccgggattggtttggataaggtgttctgggaatggggaaccaatgcccaaacgggacccttggggtttagtactggaaccgccccgcttccaggttcgctgatggttgccttgaggacgatcgctactctgacttgaagaagtttgacaagccatggcctgaggtgaactcgtttaagcccactgctgttggtattttgaagaggggattggatccaacgtcaatcactgtccttgaaaggaagacggccgacgtaagggaacattatatcatcggtcggaggcttggtcaaggccagtttggcacaacattcctctgcaccgagatcagtacagggtgtgagtatgcatgcaagacaatcccaaagcgaaagctcatcaccaaggaggatgttgaggatgtgcgccgtgagatccagataatgcaccatttgtcaggccacaagaatgttgtttccatcaaggatgtatacgaggatgggcaggcggtgt

SEQ ID NO: 10844 - DNA, 100 bp, Zea mays
  unsure (1)..(100): unsure at all n locations; Clone ID: LIB3061-101-Q1-K6-H8
gggcangcgacgncanagcnncgcgagaggggcacccaaanncaanncacnggccgncgnnnaacaacgncgggacggggaaaaccccggcggnacccaa

SEQ ID NO: 10845 - DNA, 650 bp, Zea mays
  unsure (1)..(650): unsure at all n locations; Clone ID: LIB3061-114-Q6-K6-A10
tgttgtcgcgtggggcatctgcagttcttgtcaatgaaactcgcaactgttaaccccgagcttggctttgacattgagcagatcatatccaaacaagatcaagcggccttactggcccatttaaccaaggaatcatgcagccataattgatgtgcaccattgccaatcccgttgatgttttgcatggagctattcacgaggcgtcaacaatgaaccattattgatttgtccactgttatgttcgttgctggtgcaatcatgggatacattatgttcactgaatctacactcccagttcacactgaacttacccctaaatcttgtggcttccaagattgcagtctagactacggtgatgaatccaataaccaaatatccttggacttttattgtagctttttgtgtgcatttgttccgatacttaacaattaacattatatgacaccatagtttctctaatcacatgtaactccatctagccatctaggtttgtcctaagtcaaacatatcttttaattttgattagaaatatctataaaaaaaattgtcttaaataagcagagttatttggttttagtaatgaatttagcaatgccaatgctatttttatcgttctatataaattntagatattcatggtcaaacttaac

SEQ ID NO: 10846 - DNA, 650 bp, Zea mays
  unsure (1)..(650): unsure at all n locations; Clone ID: LIB3061-114-Q6-K6-A11
tttcagcgtccngatgagaacaactagcaacataggaagcacaatagtgtaccaacaatggcagccaaaaattttgcttccttatgctccttggtctttctgcaagtgttgctaccgagaccattttcccacaatgctcacaagctcctatagcttcccttcttcccccatacctctcaccagcggtgtcttcaatgtgtgaaaccccaattgttcaaccctacaggatccaacaggcaatcgcaacaggcatcttaccattatcacccttgttcctccaacaaccgtcagccctattacagcagttacctttggtccatttggtggcacaaaacatcagggcacaacaactacaacaacttgtgctagcaaaccttgctgcatactctcagcaacatcagtttcttccattcaaccaactggctgcattgaactctgctgcttatttgcaacaacaattaccattcagccagctagttgctgcctacccccagcaatttcttccattcaaccaactagcagcattgaactctgctgcttatttacagcagcaacaactactaccattcagccagctagctgatgtgagccctgctgccttcttgacacaacaacagttgttgccgttctacctgcacgctatgcctaac

SEQ ID NO: 10847 - DNA, 617 bp, Zea mays
  Clone ID: LIB3061-114-Q6-K6-A4
ttgtcgctcatcccacacagtagtcgaccaagcacaagcagcagagccggccggaattgtggacgatcaggaaggtggcgacgccgcaggtggccgtcctcctgctgctcctcatcgtcgttgcgcaggaggcggcgccgttggcggaggcgcgcgtgtgccggcgccggagcgcgggcttcaagggggtctgcatgtccgaccacaactgcgcgcaggtgtgcttgcaggagggctacggcggcggcaactgcgacggcatcatgcgccagtgcaagtgcatcagggagtgctagctagctaggctctaggatctagcaagctagctatatcggcctttaattaaattaataaggatcgacgtcgtggccggtcgctaaatatgtactactatacgtctacactacatgcaataatgcaccacatgtacgcgtacgcgcgccgagctgtgtggacgccgcagctagcatgcacggccatcgttcctatacgtcgtcgtctgtcgttcgagttctcatgagctgtgtcgtcgacgtccacccatgcatccggccgccacgctttgatgatggtcatgacatcttgacaataaacacgtgcatgcagtattatataca

SEQ ID NO: 10848 - DNA, 654 bp, Zea mays
  Clone ID: LIB3061-114-Q6-K6-A5
ttagtgaatacactagcaacatcttagcaccaatgggagccaagatttttgccctccttgccctccttgctctttcagcaagcgctgctacctcgacttttattccacaatgctcacaacaatacctctctccggtgacagccgcgggatttcaatacccaactatacaatcctacatggtacaagaggccatccaagcaagcatcttacggtcattagcattaaccctccaacaaccatatgctctattgcaacagccatccttagtgcatctgtatctccaaagaatcgcggcacaacaactacaacaacagttgctaccaacaatcaatcaagtagttgcagcgaaccttgctgcttacctccagcaacaacagtttcttccattcaatcaactagctggggtgaaccctgctatctacttgcaggcacaacagctactaccatttaaccaacttgtcgggagcccttatgccttcttactgcaacaacagcttctgccattccatctgcaagctgtggcaaacattgttgctttcttgagacaacaacatttgttgccattttacccacaagttgtgggaaacattaatgccttcttgcaacagcaacaattgctaccattctacccacaaatgtggcaaacattgttgc

SEQ ID NO: 10849 - DNA, 234 bp, Zea mays
  Clone ID: LIB3061-114-Q6-K6-A6
gtaacactgttgttgtcgttctacctgcacgctatgcctaacgctggcaccctcttacaactgcaacaattgctgccattcaaccaacttgctttgacaaactcaacagtgttctaccaacaacccatcattggtggtgccctcttttagattgcttatgagttatagttcaataatgaagttttttggatgatgtttgtggcgtcccagaaataagaaagtacatttctagat

SEQ ID NO: 10850 - DNA, 649 bp, Zea mays
  unsure (1)..(649): unsure at all n locations; Clone ID: LIB3061-114-Q6-K6-A7
ttctagctcctatagcttcctttcttcccccatacctctcaccagcggtgtcttcnagtatgtgaaaacccaattcttcaaccctacaggatccaacaggcaatcgcagcaggcatcttacctttatcacccttgttcctccaacaaccgtcagccctattacagcagttacctttggtgcatttgttggcacaaaacatcaaggcacaacaactacaacaacttgtgctaggaaaccttgctgcctactctcagcaacagcagtttcttccattcaaccaactggctgcattgaactctgctgcttatttgcaacaacaactaccattcagtcagctagctgctgcctacccccagcaatttcttccattcaaccaactggcagcattgaactctgctgcttatttacaacagcaacagctaccaccattcagccagctagctgatgtgagccctgttgccttcttgacacaacaacagttgttgccgttctacctgcacgctgcgcctaacgctggcaccctcttacaactgcaacaattgctgccattcaaccaacttgctttgacaaacccaacagcgttctaccaacaacccatcattggtggtgccctcttttagattgcttatgagttatacttcaataatg

SEQ ID NO: 10851 - DNA, 647 bp, Zea mays
  Clone ID: LIB3061-114-Q6-K6-A8
tttttgtgaccatccgactcctggcccctcccctccacgagttccttccagaagggaacatcgaggacattgtaagtgaattatgtgctgagacgggagccaaccaggaggatgccctcgcgcgaattgaaaagctttcagaagtaaacccgatgcttggcttccgtgggtgcaggcttggtatatcgtaccctgaattgacagagatgcaagcccgggccatttttgaagctgctatagcaatgaccaaccagggtgttcaagtgttcccagagataatggttcctcttgttggaacaccacaggaactggggcatcaagtgactcttatccgccaagttgctgagaaagtgttcgccaatgtgggcaagactatcgggtacaaagttggaacaatgattgagatccccagggcagctctggtggctgatgagatagcggagcaggctgaattcttctccttcggaacgaacgacctgacgcagatgacctttgggtacagcagggatgatgtggggaagttcattcccgtctatcttgctcagggcatcctccaacatgaccccttcgaggtcctggaccagaggggagtgggcgagctggtgaagtttgctacagagaggggccgcaaagctaggcctaacttg

SEQ ID NO: 10852 - DNA, 327 bp, Zea mays
  Clone ID: LIB3061-114-Q6-K6-A9
tatgcattgactctgctgcttatttacagcagcaacaactactaccattcagccagctagctgatgtgagccctgctgccttcttgacacaacaacagttgttgccgttctacctgcacgctatgcctaacgctggcaccctcttacaactgcaacaattgctgccattcaaccaacttgctttgacaaactcaacagtgttctaccaacaacccatcattggtggtgccctcttttagattgcttatgagttatagttcaataatgaagttttttggatgatgtttgtggcgtcccagaaataagaaagtacatttctagattctt

SEQ ID NO: 10853 - DNA, 653 bp, Zea mays
  Clone ID: LIB3061-114-Q6-K6-B10
ttttataacaagccatgagcagcaacatcatccacaacaacatcatccacaaaaacaacaacatcaaccaccaccacaacatcaccagcagcagcaacaccaacaacaacaagttcacatgcaaccacaaaaacatcagcaacaacaagaagttcatgttcaacaacaacaacaacaaccgcagcaccaccaccaatattaacaacaacagcaccaacaacaacatcaatgtgaaggccaacaacaacatcaccaacaatcacaaggccatgtgcaacaacacgaacagagccatgagcaacaccaaggacagagccatgagcaacaacatcaacaacaattccagggtcatgacaagcagcaacaaccacaacagcctcagcaatatcagcagggccaggaaaaatacaacagcaacaatgtcattgccaggagcagcaacagactacaaggtgcagctataactactatagcagtagctcaaatctaaaaaattgtcatgaattcctaaggcagcagtgcagccctttggtaatgccttttctccaatcacgtttgatacaaccaagtagctgccaggtattgcagcaacaatgttgtcatgatcttaggcagattgagccacaatacattcaccaagcaatctacaacat

SEQ ID NO: 10854 - DNA, 651 bp, Zea mays
  unsure (1)..(651): unsure at all n locations; Clone ID: LIB3061-114-Q6-K6-B11
ttttaccaatagcaacatagnaagcacaatagtgtaccaacaatggcagctaaaatattttgcctccttatgctccttggtctttctgcaagtgctgctacggcgaccattttcccacaatgctcacaagctcctatagcttcccttcttcccccgtacctctcaccaacggtgtcttcggtatgtgaaaacccaattcttcaaccctacaggatccaacaggcaatcgcagctggcatcttacctttatcacccttgttcctccaacaatcatcagccctattacagcagttacctttggtgcatttattggcacaaaacatcagggcacaacaactacaacaacttgtgctagcaaaccttgctgcctactctcagcaacagcagtttcttccattcaaccaactagctgcattgaactctgcttcttatttgcaacaacaacaactaccattcagccagctatctgctgcctacccccagcaatttcttccattcaaccaactgacagcattgaactctcctgcttatttacagcagcaacaactactaccattcagccagctagctggtgtgagccctgctaccttcttgacacaaccacagttgttgccgttctaccagcacgctgcgcctaacgctggcaccctc

SEQ ID NO: 10855 - DNA, 631 bp, Zea mays
  Clone ID: LIB3061-114-Q6-K6-B12
ttcattattccacagtgctcacttgctcctagtgccattattccacagttcctcccaccagttacttcaatgggcttcgaacatccagccgtgcaagcctacaggctacaactagcgcttgcggcgagcgccttacaacaaccaattgcccaattgcaacaacaatccttggcgcaggtaaccctactaaccattgcaacgcaacaacaacaacaacaacagtttctgccatcactgagccacctagccgtggtgaaccctgtcacctacttgcaacagcagctgcttgcatccaacccacttgctctggcgaacgtagctgcataccagcaacaacaacagctgcaacagtttatgccagtgctcagtcaactagccatggtgaaccctgccgtctacctacaactactttcatctagcccgctcgcggtgggcaatgcacctacgtacctacaacaacagttgctgcaacaaattgtaccagctctgactcagctagctgtggcaaaccctgctgcctacttacaacagttgcttccattcaaccaactggctgtgtcaaactctgctgcgtacctacaacagcgacaacagttacttaatccattggcagtggctaacccattggtcg

SEQ ID NO: 10856 - DNA, 548 bp, Zea mays
  unsure (1)..(548): unsure at all n locations; Clone ID: LIB3061-114-Q6-K6-B2
gtgtggaanaggcngaccgaggcggcgatgggtttcatcatggacttcgcggagaatctgatcctccgtctgatggaggacccggacaagcgcgaccaggttcggcgggagcatgtctacaagatgaaggagcggtgcgagcgcactaaggcggcgtggagcctccctctgcgcccctacggcttctggaccttcgaccgcttcaactcgcagctctcctgggatccccagatcagccaggccgccggccgncgggacccctacgacgacctcatcgcccgccactctggctcgccgncgnctncctgaacacccgnnccgatcttggcccagaaggtctacttgggcatcaataagaaactctttcccctcaaactgattgtggttccatcctcttctgtctggaaaatgttgtcaccaaactaccctatttcctgttccagtttggcatggaagtataagttgtgtacttctattctcaagttgttgtctttgtattatgaaatgtttccaataatcagcagtttttgatgtatggtcgtggatcc

SEQ ID NO: 10857 - DNA, 83 bp, Zea mays
  Clone ID: LIB3061-114-Q6-K6-B3
cccggtgtcgcccacgcgtccgtttataatgaattttttggatgatgtttgtggcgtcccagaaataagaaagtcatttctag

SEQ ID NO: 10858 - DNA, 507 bp, Zea mays
  unsure (1)..(507): unsure at all n locations; Clone ID: LIB3061-114-Q6-K6-B4
tcccgggtcctccttccagtaggttcctaccccaattccctcagggcatcgagnagaacaactccacctcgccggcggtggactggggtgacgactccgcgggggagatggactctgaggacgcagcgccttcctcctccatgggcatcagcatcgccattggcagcatgatggaggtcgacgccgacgaccgccaacccagtccgcctcccgacgccgacttcttcaacgccttccccgacgacttcgacgaccaagacctcgactgattgccgccgccgcttctttgctcgcccggaccccttccgccagttgggagtcgtatacgaacctacctacttccaaggaagcaccagtcatccatcaccttgtacatgtttttatgttgcagcactagtggtgtttaattgtcagctgcgatcatgtgagaacctgacctggtacattatgtatataagaagaataagaacctgttaacttatatggtatagtatgtaagttcatggc

SEQ ID NO: 10859 - DNA, 658 bp, Zea mays
  unsure (1)..(658): unsure at all n locations; Clone ID: LIB3061-114-Q6-K6-B5
ctatacaagtagcgacaggctcgcaaagatttgtgagagtgatccggcgctgagaagagaggctaagatcgccgcagccgccgcggcggcggcggcgctgtgcttcgcggccctggtggccgtggccgtctgccaaggcgaggtcgagcggcagaggctcagggacctgcagtgctggcaggaggtccaggagagcccgctcgacgcgtgccgccaggtcctcgaccggcagctaaccggcggcggcgtcggcggcccgttccggtggggcaccgggctccggatgcggtgctgccagcagctccaggacgtgagccgcgagtgccgctgcgccgccatccggagcatggtcaggggctacgaggaggccatgccgcctctggagaaaggctggtggccatgggggcggcagcagcagccgccgccgcagggaggaggaggaggacaggggggctactactacccctgcagccgggcaggagagggataccaaacgcagatgtatccaccgtgtcgtcccggcaccaccgggccaaggatcggccgcgtgaggcttacgaaggcccgggagtacgccgcggngttgccgatgatgtgccggctgtcggagccccaggagtgcagcatcttctccggcggcgaccagtactagctacca

SEQ ID NO: 10860 - DNA, 642 bp, Zea mays
  unsure (1)..(642): unsure at all n locations; Clone ID: LIB3061-114-Q6-K6-B6
tttctagcaacatagnaagcacaatagtgtaccaacaatggcagccaaaaattttgcctccttatgctccttggtctttctgcaagtgctgctacggcgaccattttcccgcaatgctcgcaagctcctatagcttcccttcttcccccgtacctctcaccagcggtgtcttcggtatgtgaaaacccaattcttcaaccctacaggatccaacaggcaatcgcagctggcatcttacctttatcacccttgttcctccaacaatcatcagccctattacaacagttacctttggtgcatttattggcacaaaacatcagggcacaacaactacaacaacttgtgctagcaaaccttgctgcctactctcagcaacagcagtttcttccattcaaccaactaggttcattgaactctgcttcttatttgcaacaacaacaactaccattcagccagctacctgctgcctacccccagcaatttcttccattcaaccaactagcagcattgaactctcctgcttatttacagcagcaacaactactaccattcagccagctagctggtgtgagccctgctaccttcttgacacaaccacagttgttgccgttctaccagcacgttgcgcctaacgctggcacc

SEQ ID NO: 10861 - DNA, 181 bp, Zea mays
  unsure (1)..(181): unsure at all n locations; Clone ID: LIB3061-114-Q6-K6-B8
ggggaatttttttttattctnccngaggatctngnagagtgggtggaagcaataggtggngcaatttacgtggacagggggaacgataaagaggttgtttggagtggatnaggtgggtactggaatgtgttgtcagcgacgggaccatgtagactgatgtggtgtggggattgatggaatt

SEQ ID NO: 10862 - DNA, 632 bp, Zea mays
  Clone ID: LIB3061-114-Q6-K6-B9
cccgcaatgctcgcaagctcctatagcttcccttcttcccccgtacctctcaccagcggtgtcttcggtatggtgaaaacccaattcttcaaccctacaggatccaacaggcaatcgcagctggcatcttacctttatcacccttgttcctccaacaatcatcagccctattacaacagttacctttggtgcatttattggcacaaaacatcagggcacaacaactacaacaacttgtgctagcaaaccttgctgcctactctcagcaacagcagtttcttccattcaaccaactaggttcattgaactctgcttcttatttgcaacaacaacaactaccattcagccagctacctgctgcctacccccagcaatttcttccattcaaccaactagcagcattgaactctcctgcttatttacagcagcaacaactactaccattcagccagctagctggtgtgagccctgctaccttcttgacacaaccacagttgttgccgttctaccagcacgttgcgcctaacgctggcaccctcttacaactgcaacaattgctgccattcaaccaacttgctttgacaaacccagcagtgttctaccaacaacccatcattggtggtgccctcttt

SEQ ID NO: 10863 - DNA, 434 bp, Zea mays
  unsure (1)..(434): unsure at all n locations; Clone ID: LIB3061-114-Q6-K6-C1
gggggggggggggggggggngggggggggggggggnnggggggggggggggggggggggggggggggnnngggggngggggggnggggggggngggggggggggggggggggggggggggggggggggggggggggggnnnnngggggggggggnggnnngnggggggggngggggggggggggggngggggggggnggggggnnggggggggggggggggnnggggtttttgttttgtgcggggggttgggggggggngnngggggggggggggggggggggggggggggggggggggggggggggggggggggggggggggggggggggggggggggggggggggggggggggggggggggggggggggggggggggggggggggggnggggggggggggggggggggnggggggggggggggggggggggg

SEQ ID NO: 10864 - DNA, 613 bp, Zea mays
  unsure (1)..(613): unsure at all n locations; Clone ID: LIB3061-114-Q6-K6-C10
tttgcaacatagnaagcacaatattgtaccaataatggcagccaaaaattttgcctcattatgctccttggtctttctgcaagtgctgctacggcgagcattttcccgcaatgctcacaagctcctatagcttcccttcttcccccatacctctcaccagcgatgtcttcagtatgtgaaaatccaattcttctaccctacaggatccaacaggcaatcgcagcaggcatcttacctttatcacccttgttcctccaacaatcatcagccctattacagcagttacctttggtgcatttattggcacaaaacatcagggcacaacaactacaacaactcgtgctagcaaaccttgctgcctactctcagcaacagcagttacctttggtgcatttgttggcacaaaacatcagggcacaacaactacaacaactcgtgctagcaaaccttgctgcctactctcagcaacaacagtttctgccattcaaccaactagctgcattgaactctgctgcttatttgcagnaacaacaactactaccattcagccagctagctgntgcctacccccggcaatttcttncattcaaccaactggcagcattgaactctc

SEQ ID NO: 10865 - DNA, 634 bp, Zea mays
  unsure (1)..(634): unsure at all n locations; Clone ID: LIB3061-114-Q6-K6-C11
tttatgagaccaatagcaacataggaagcacaatagtgtaccaacaatggcagccaaaaattttgcctccttatgctccttggtctttctgcaagtgctgctacggcgaccattttcccgcaatgctcgcaagctcctatagcttcccttcttcccccgtacctctcaccagcggggtgttgggtatgtgaaaacccaattcttcaaccctacaggatccaacaggcaatcgcagctggcatcttacctttatcacccttgttcctccaacaatcatcagccctattacaacagttacctttggtgcatttattggcacaaaacatcagggcacaacaactacaacaacttgtgctagcaaaccttgctgcctactctcagcaacagcagtttcttccattcaaccaactaggttcattgaactctgcttcttatttgcaacaacaacaactaccattcagccagctacctgctgcctacccccagcaatttcttncattcaaccaactagcagcattgaactctcctgcttatttacagcagnaacaactactaccattcagccagctagctggtgtgagccctgctaccttnttgacacaaccacagttgttgccgttctaccagcacgttg

SEQ ID NO: 10866 - DNA, 646 bp, Zea mays
  unsure (1)..(646): unsure at all n locations; Clone ID: LIB3061-114-Q6-K6-C12
ctgnaaacacaccaagcgaacgcactagcagcgacctgacaacaatggctaccaagatattagccctccttgcgcttcttgccctttttgtgagcgcaacaaatgcgttcattattccacaatgctcacttgctcctagtgccattattccacagttcctcccaccagttacttcaatgggcttcgaacacctatctgtgcaagccaacatgcaacaacaagcgcttgcggcgagcgtcttacaacaaccaattgcccaattgcaacaacaatccttgccacatctaacaatacaagccatcacaacgcaacagcaacaacagttcctaccagcactgagccacctagccatggtgaaccctgccgcctacttgcaagagcagctgcttgcatccaacccacttgctctggcgaacgtagttgcaaaccagcaacaacaacagctacaacagtttctgccaacgctcagtcaactagccatggtgaaccctgccgcctacgtacaacaacaacaactgctttcatctagcccgctcgctgtgggcaatgcacctacatacctgcaacaacaattgttgcaacagattgtaccagctctgactcaactagctgtggcaaaccctgttgcctacttgcaacagctgct

SEQ ID NO: 10867 - DNA, 590 bp, Zea mays
  unsure (1)..(590): unsure at all n locations; Clone ID: LIB3061-114-Q6-K6-C3
cccggtntcgcccacgcgtccgctcggcagggcggcgtgccgcggcgcaggcgcaacagcagctccctccgcgctccgccctccctgctcgcaataccagcagcagcagcaccgcgccaacgaggcttccctccggtgtgtgtgcgcgcgcgctcgtgatggcagcagccccggcggcgtcgtcgtccacgtcggggtcgccggccgccggcgggccgcggtcgcggttcggcgacacgacgctgacgaaggtgttcgtgggcgggctggcgtgggagacgccctcggaggggctccggcagcacttcgagcggtacggcgacatcctggaggccgtcgtcatcacggaccgcctcactggccgctccaagggctacggattcgtgacgttccgagagccggaggcggcgcggcgcgcggtgcatgacccgaacccgacgatcgccgggcggngcgccaactgcaacattgcgtcgttggggccgncgngccccgcccagcctggagttgcaggcaggggtggtccctacaccgtgggaccctaccaattgtaggtgctgtagttcgtttccagggtgtcgggcttttct

SEQ ID NO: 10868 - DNA, 660 bp, Zea mays
  Clone ID: LIB3061-114-Q6-K6-C4
ccggaccggccattcccggctaatctttctgtggggtttatgcactgttaatttttccctgtcattttaggtctaatttgtattcgacactctcatcgtagtaactgcctcataggttttgtgccctctgtatacatctctatcggctccatgtccaaggcactgcaccacccttttgttatcaggttttaaaccggcttttggaattgtacacatggatcaatttgtgggagtggaaattagagcagatttctgtgcttttttttttccagcacatctgccagactagtatcatcagcaattgtccatcgcagcatagatctctttctcatcgtcaatggaggtgggtatagtaccagacaacatggcaacgacagacatgccaagctccggcatcctgctgacgcctgctggggccatcagcctgttctcgtcgggtcctccgctccagatgccgcttcacttggcctccatggacagggaggccagggtgctgaggtacagggagaagaagaagagcaggaagtttgagaagaccatacggtatgcaacgaggaagacgtacgcagaagcacggccgaggatcaagggacgcttcgcgaaaagacgtctgatatggatgtcgaagtggatcagatgttctcagctgcggctctgtcg

SEQ ID NO: 10869 - DNA, 576 bp, Zea mays
  Clone ID: LIB3061-114-Q6-K6-C5
taaaaaaaaaaaaaaaaaaaaaaaaaaaaaaaaaaaaaaaaaaaaagaaaagacaataataaaggaaaaaagattacgtaacacgaagcatgcaatgtaataggctcttatatagtggaaacctaaatggggtgttactggcacggggttttacaactgaagtgcactgtggaaaacaatgaaagtggggggggggggggggccttgtaattaaattccactgttcgtgggtttggcgaaataagggaagagggaagaaccgtggtgtactcacaaatagtggcggtggctgaatggcgattgggacgcgctgtgtgggggtgaattaagcgtggcgggtgtggcgtttacacgtgggggggaggttatattggaaagggaagtagcttttgttggtttctttatgttggcttcctttgtggtttagtaggggggttttccttgtaatggtgttatttggagggtcgtttttgtgttttttgttagtttttttgtggggtggggtggtggttttattggttgggttttggttttggggttggttgtggggttgggtgtggggttttggggttttgt

SEQ ID NO: 10870 - DNA, 638 bp, Zea mays
  unsure (1)..(638): unsure at all n locations; Clone ID: LIB3061-114-Q6-K6-C8
tgccgnatcgacgagtctctccgggttccaggggggcccaactgccngaaccatcgatcgccgccacctcttcgagcagaatagttgagaatggctgacgaggatatccagcctatcgtatgtgacaatggcactggaatggtcaaggccggtttcgctggtgatgatgcgccaagagctgtgttccccagcattgtgggaagaccacgccacaccggtgtcatggtcggcatgggccaaaaggatgcctacgtaggtgatgaggctcaggccaagagaggcatcctgacactgaagtacccgattgagcatggcattgtcaacaactgggatgacatggagaaaatctggcatcacaccttctacaacgagctccgtgtttcgcctgaagatcaccctgtgctgctgaccgaggcccctctcaaccccaaggccaacagagagaaaatgacgcagattatgtttgaaaccttcgaatgcccagcaatgtatgttgctatccaggctgttctttcgttgtacgctagtgggcgaacaactggtattgtgatggattccggtgatggtgtgagccacacggttccaatctatgaaggatacacacttnctcatgctattctccgtttggatcttgcggg

SEQ ID NO: 10871 - DNA, 638 bp, Zea mays
  Clone ID: LIB3061-114-Q6-K6-C9
ttttcccattcttcaaccctacaggatccaacaggcaatcgcagctggcatcttacctttatcacccttgttcctccaacaatcatcagccctattacagcagttacctttggtgcatttattggcacaaaacatcagggcacaacaactacaacaacttgtgctagcaaaccttgctgcctactctcagcaacagcagtttcttccattcaaccaactagctgcattgaactctgcttcttatttgcaacaacaacaactaccattcagccagctatctgctgcctacccccagcaatttcttccattcaaccaactgacagcattgaactctcctgcttatttacagcagcaacaactactaccattcagccagctagctggtgtgagccctgctaccttcttgacacaaccacagttgttgccgttctaccagcacgctgcgcctaacgctggcaccctcttacaactgcaacaattgctgccattcaaccaacttgctttgacaaacccaacagcattctaccaacaacccatcattggtggtgccctcttttagatttcttatgagttatagttcaataataaagttttttgtctgatgtttgtggcttcccagaaataagaaagtcatttct

SEQ ID NO: 10872 - DNA, 557 bp, Zea mays
  unsure (1)..(557): unsure at all n locations; Clone ID: LIB3061-114-Q6-K6-D1
cccggtgtcgcccacgcgtccgtttaattgctctccctccagtgccgcgcagtgcgcacagggttttaggaagggggcgacaccggtatcgccattcgccagccatggaatccgcaacggcggccgtccgcagcgcgtcgctagcccgggcccggcccgcgccgctcgtccacgggcgcgcgcgcggggcgggtcgcgtcgtgggcgctggcctcgccgcgcgcgcccggcggagggcgctcgtcgccgtagcctcccaccaggagcaccacgagccgntcccgccgcgcgcgcaggagggcggngccgtggctgtggngacgcaggctgacgaggcggaggtccatgcgaatgacgctccggnggttgctgntgaaacctngtntncctaactggatgntggaaagacagtgcgtgttcgatttgtgctgaaaaggcagtgcacgttngggcagagcgtttgtcttgtnggngacgaccctgngcttggactttgggatctgtngaacgcgtttcctttgaagtgggcggaaagtcatgactggaccttagagaaa

SEQ ID NO: 10873 - DNA, 645 bp, Zea mays
  Clone ID: LIB3061-114-Q6-K6-D10
ttttccggttggccatccatgtccagcacctctccagtgttccaagcatgatcgcagactccgtggcgtcttcaatgtcagaatggcgcgagtcccaggacaacgacccagggtacatcgaggcaatccagtggaagaactactcgtgcgtctgcacctccgccatcaagtacaacccggagtggcacaagagagcccccggcggagtgtttatcgtcactggcgcccagctcgtctcgaagggggcctgggccaagaaggtcctccatctgcgcctcctctacacccacatccccaactgcaccatccagaggaccgagtggaggaacgctccggcggcgtctcagaaggggagcttcctgacgacgatcagcacgacactgagctcccctttcacgcagcgtgctgacacccaccaggcgaaacatgagccggcggtgcagctgaactcaggtgtctaccccgacggaccgccggtcccgctccggtccaggaagctcctcaagttcgtcgacatctcggaggtggtaaaagggccacacgacgtcccgggccactggctggtgatcgcggcgaagcttgtgaaggagggagggaagatcgggatccatgtgaagtttgcactgctgggctatgaagggcagt

SEQ ID NO: 10874 - DNA, 325 bp, Zea mays
  Clone ID: LIB3061-114-Q6-K6-D11
tttaaaacgtctctgtgtttgacaaagaagctccgcttcgcacaaaagtatgctagccgctttctttgtcaaacacagatcagcaaagagaaaacgtctctgtgcgttgatcaactgcaagccaagcctgtagtttgctccagccaaaccgacgtggaagtgttaagggcatgagatgtatacatgtttgtatatggtatttgggtcttgtatgctagtgctctagagataaacctttacggatgcgctttcaatctagagtctttggcatcttgctcatgaccttaatgtaatgatttatatggatatatattactagttttat

SEQ ID NO: 10875 - DNA, 641 bp, Zea mays
  unsure (1)..(641): unsure at all n locations; Clone ID: LIB3061-114-Q6-K6-D12
tttggagttcggcaagnacggcgacacccacctgctcggcganaccccagtggctcggcttcggcggcaggtaccaggacctcatcggcaacaagggtctggagaccgtcaccatgggccgcgccgaaatgaccagggccgtcaacgacctggcgaagaagaagaagatggcgacactggaggaggaggaggtgcagatgcagatgcagatgccggaggccgctgatctggcggcggcggcagcggctgacccacaggccgacacgaagagcaagctggtgaagctggtggtcatggtgtgcgaggggctgcggttcaacaccgtgtcccgcacggtggacgcggggttcaacagccagcacggggtgaccttgaccgtgacgcaggggaagcaggtgcagaagtgggacaggatctccaaggcggccttcgagtgggctgaccaccccaccgctgtgatccccgacatgcagaagcttggcatcaaggataagaacgaagcagcgaggatcgttgcgctcgttaagaatcaaactactgccgctgccgctactgctgccagtgctgacaacgacgacgacgaggcctgatcaatgcaacgacacatcatgatctgctgctgcacttaattactatgtttc

SEQ ID NO: 10876 - DNA, 657 bp, Zea mays
  unsure (1)..(657): unsure at all n locations; Clone ID: LIB3061-114-Q6-K6-D2
ttaccaactagcaacatagnaagcacaatagtgtaccaacaatggcagccaaaaattttgcttccttatgctccttggtctttctgcaagtgttgctaccganaccattttcccacaatgctcacaagctcctatagcttcccttcttcccccatacctctcaccagcggtgtcttcaatgtgtgaaaccccaattgttcaaccctacaggatccaacaggcaatcgcaacaggcatcttaccattatcacccttgttcctccaacaaccgtcagccctattacagcagttacctttggtccatttggtggcacaaaacatcagggcacaacaactacaacaacttgtgctagcaaaccttgctgcatactctcagcaacatcagtttcttccattcaaccaactggctgcattgaactctgctgcttatttgcaacaacaattaccattcagccagctagttgctgcctacccccagcaatttcttccattcaaccaactagcagcattgaactctgctgcttatttacagcagcaacaactactaccattcagccagctagctgatgtgagccctgctgccttcttgacacaacaacagttgttgccgttctacctgcacgctatgcctaacgctggcaccctnttacaactgca

SEQ ID NO: 10877 - DNA, 646 bp, Zea mays
  unsure (1)..(646): unsure at all n locations; Clone ID: LIB3061-114-Q6-K6-D3
catctagcaacatagnaagcacaatagtgtaccaacaatggcagccaaaatattttgcctccttatgctccttggtctttctgcaagtgctgctacggcgaccattttcccgcaatgctcgcaagctcctatagcttcccttcttcccccgtacctctcaccagcggtgtcttcggtatgtgaaaacccaattcttcaaccctacaggatccaacaggcaatcacagctggcatcttacctttatcacccttgttcctccaacaatcatcagccctattacatcagttacctttggtgcatttattggcacaaaacatcagggcacaacaactacaacaacttgtgctagcaaaccttgctgcctactctcagcaacagcagtttcttccattcaaccaactagctgcattgaactctgcttcttatttgcaacaacaacaactaccattcagccagctacctgctgcctacccccagcaatttcttccattcaaccaactggcagcattgaactctcctgcttatttacagcagcaacaactactaccattcagccagctagctggtgtgagccctgctaccttcttgatacaaccacagttgttgccgttctaccagcacgctgcgcctaacgctggcaccctt

SEQ ID NO: 10878 - DNA, 259 bp, Zea mays
  unsure (1)..(259): unsure at all n locations; Clone ID: LIB3061-114-Q6-K6-D4
tgaattgataaagagtaatgtgatgtaggaagagggtggtctttttttaagggtgttagagggggggggggggtgtatttttttttttatgagagatgggattgtgtagaaagtaaagttggagaaggttgtggttgggtactttgatcagatgaatntagaaattaagttgtggtggtgttgaggttgatgtacatatgtggtatatataataaattagtagattgttgggaggagtattgttaatgttggtggtgag

SEQ ID NO: 10879 - DNA, 670 bp, Zea mays
  unsure (1)..(670): unsure at all n locations; Clone ID: LIB3061-114-Q6-K6-D5
tattganaccaatagcaacatagnaagcacaatagtgtaccaacaatggcagccaaaatattttgcttccttatgctccttggtctttctgcaagtgttgctaccganaccattttcccacaatgctcacaagctcctatagcttcccttcttcccccatacctctcaccagcggtgtcttcaatgtgtgaaaccccaattgttcaaccctacaggatccaacaggcaatcgcaacaggcatcttaccattatcacccttgttcctccaacaaccgtcagccctattacagcagttacctttggtccatttggtggcacaaaacatcagggcacaacaactacaacaacttgtgctagcaaaccttgctgcatactctcagcaacatcagtttcttccattcaaccaactggctgcattgaactctgctgcttatttgcaacaacaattaccattcagccagctagttgctgcctacccccagcaatttcttccattcaaccaactagcagcattgaactctgctgcttatttacagcagcaacaactactaccattcagccagctagctgatgtgagccctgctgccttcttgacacaacaacagttgttgccgttctacctgcacgctatgcctaacgctngcaccctcttacactgcaacattgctg

SEQ ID NO: 10880 - DNA, 607 bp, Zea mays
  unsure (1)..(607): unsure at all n locations; Clone ID: LIB3061-114-Q6-K6-D6
ttttgcgngacgccnatcgaggcatgaacggcaagnagctggacggccgcaacatcaccgtcaacgaggcccagtcccgcggcggccgtggaggcggcggcggcggcgggtacggtggtggccgtggaggcggcggctacggcggtggcgggcgccgtgatggcggcggcggctacggcggtggcggcggttactgtggtggcggcggcggctacggtggtggtggcggcggctacggcggtggcaaccgtggcggcggctacggcaactccgacgggaactggaggaactgagcggtggggcccgcgcggccaagttatcctgttcgctaccgtgttgtttaccctagtccagagtgtttatcttcgttcgtctcgtgtttgttgttgcccatctgtgtttttgattgaaggtcgctctgtgtcagttgttagtgctgtgttcatcctcggctccagcagacccatgcatcaaccagcatggactgcggatcgatgggtgctgntacccccgtcaggctttattctaagttaaatcctaaggaaaaaaatggtgcttcaaaaaaaaaaaanaatgagagaataaanaaaaaaaaagggggttcgtt

SEQ ID NO: 10881 - DNA, 658 bp, Zea mays
  unsure (1)..(658): unsure at all n locations; Clone ID: LIB3061-114-Q6-K6-D7
gcgttctgtgcattcagnaaacacaccaagcgaacgcactagcaacgacctaacaacaatggctaccaagatattagccctccttgcgcttcttgccctttttgtgagcgcaacaaatgcgttcattattccacaatgctcacttgctcctagtgccattattccacagttcctcccaccagttacttcaatgggcttcgaacacctagctgtgcaagccaacatgcaacaacaagcgcttgcggcgagcgtcttacaacaaccaattgcccaattgcaacaacaatccttgccacatctaacaatacaagccatcacaacgcaacagcaacaacagttcctaccagcactgagccacctagccatggtgaaccctgccgcctacttgcaagagcagctgcttgcatccaacccacttgctctggcgaacgtagttgcaaaccagcaacaacaacagctacaacagtttctgccaacgctcagtcaactagccatggtgaaccctgccgcctacgtacaacaacaacaactgctttcatctagcccgctcgctgtgggcaatgcacctacatacctgcaacaacaattgttgcaacagattgtaccagctctgactcaactagctgtggcaaaccctgttgcctacttgcaacagctg

SEQ ID NO: 10882 - DNA, 663 bp, Zea mays
  unsure (1)..(663): unsure at all n locations; Clone ID: LIB3061-114-Q6-K6-D9
ttttcatagnaagcacaatagtgtaccaacaatggcagccaaaaattttgcttccttatgctccttggtctttctgcaagtgctgctaccgcnaccattttcccacaatgctcacaagctcctatagcttcctttcttcccccatacctctcaccagcggtgtcttcagtatgtgaaaacccaattcttcaaccctacaggatccaacaggcaatcgcagcaggcatcttacctttatcacccttgttcctccaacaaccgtcagccctattacagcagttacctttggtgcatttgttggcacaaaacatcaaggcacaacaactacaacaacttgtgctaggaaaccttgctgcctactctcagcaacagcagtttcttccattcaaccaactggctgcattgaactctgctgcttatttgcaacaacaactaccattcagtcagctagctgctgcctacccccagcaatttcttccattcaaccaactggcagcattgaactctgctgcttatttacaacagcaacagctaccaccattcagccagctagctgatgtgagccctgttgccttcttgacacaacaacagttgttgccgttctacctgcacgctgcgcctaacgctggcaccctcttacactgcaacaattgctgccattca

SEQ ID NO: 10883 - DNA, 659 bp, Zea mays
  unsure (1)..(659): unsure at all n locations; Clone ID: LIB3061-114-Q6-K6-E10
ttacatggcggccaanatttttccatccttatgctccttgctctttctgcatgtgttgctaacgcgaccatttttcctcaatactcacaagctcctatagctgcccttcttcccccataccttccatcaatgaccgctttagtatgtgaaaacccagcccttcaaccctacaggatccagcaagcaatcgcaacaagcaacttacctttatcacacctgttctttcaacaatcgccagccctatctttggtgcagtcattggtacaaaccatcagggcagaacagttgcagcaactcgtgctaccagtgatcagccaagtagctctggcaaacctttccccctactctcagcaacaacaatttcttccattcaaccaactgtctatactgaaccctgctgcttatttgcagcaacaacaactactaccattcagccagctagctactgcctactctcagcagcaacaatttcttccatttaaccaattggccgcactgaacccctctgcttatttccagcagcaaatactactaccatttggccagctagctacaacaagccccgcttccttcttgacacaacaacaagtgcttccgttctaccagcagtttgtggctaaccccgcaaccctcttacaactgcaacagttgctgccctt

SEQ ID NO: 10884 - DNA, 628 bp, Zea mays
  Clone ID: LIB3061-114-Q6-K6-E11
ttacatctaaccatacaaaccatcgcagcgcagcagcaacaagcactgagccacctagccgtggtgaaccctatcgcctacttgcaacaacagctgcttgcatccaacccacttgctttggcaaacgtagctgcataccaacaacaacaacagttgcaacagtttctaccagcgctcagggggctagccatggtgaaccctatcgcctacctacaacagcaacaacttctttcatctagcccgctcgctatgggcaatgcacctacatacctgcaacaacagttgttgcaacaacagttgctgcaacaaattgtaccagctcttactcagctagctgtggcaaaccctgctgcctacttgcaacaactacttccattcaaccaactgactgtgtcgaactctgctgcgtacctacaacagcgacaacagttacttaatccactagcggtggctaacccattggtcgctgccttcctacagcagcaacaattgctgccatacaaccagttctctttgatgaaccctgccttgtcgtggcagcaacccatcgttggtggtgccatcttttagattacatatgagatgtactcgataatggtgccctcatagcggcatgtgtttcctaaaa

SEQ ID NO: 10885 - DNA, 57 bp, Zea mays
  unsure (1)..(57): unsure at all n locations; Clone ID: LIB3061-114-Q6-K6-E12
ttttctcttttagaattattattgaactataactcataagaaatctaaaanagggca

SEQ ID NO: 10886 - DNA, 325 bp, Zea mays
  unsure (1)..(325): unsure at all n locations; Clone ID: LIB3061-114-Q6-K6-E2
ggggggggggggggggnngnngngnnggggggggggggnnngnngngnnngngngggggnggngggggnngggggggggggggggggggggggggggggggggggggggggggggggggggnggttttttttttttnnnnnnntgggggggggggggggggtnnnnnnnttnnnnnnnnngnnnnnngttnnggggggggtttttttggggttngggggggggggggggnnggggggggggggggggggggggggggggnggnnggggnnnggggnnnngggggggggggggggggggggngggggggggggggggggggggggg

SEQ ID NO: 10887 - DNA, 672 bp, Zea mays
  unsure (1)..(672): unsure at all n locations; Clone ID: LIB3061-114-Q6-K6-E3
cccggttcgacccagcgtcctgtcggnccagnanaagaggaagactatgaccagtatggcgaggagggcttgaagcagttccaaggcgggggaggcggtggcggtggaatgaacattcaggacatctttaggaacttttttggtggtggtggtggtgggatggaagaggaggaagaacaaattttgaaaggtgatgaggtgattgttgaactcgatgcttcattagaggacttgtacatgggcggttcagtaaaggtttggagagagaaaaacgtcataaagccagcaccaggaaagaggcgctgcaactgtaggaacgaagtttaccatcgacaaataggtcctggaatgtatcaacagatgactgagcaggtctgtgaccaatgtccaaatgtgaaattcgtacgagaaggtgaattcttgactgttgatattgagaagggaatgaaagatgcacaggaggttttgtttttcgaggaaggagagcctaagattgatggtgaacctggcgatttgaagttcaggatccgaacagcaccacacgaccgcttcaggcgagatggcaatgacctgcatgcaacagttacaataaccctgctgcaagctctggttggtttcgagaagaccttaaccatcttgataaccatctggtagaaattggcaccaaaggca

SEQ ID NO: 10888 - DNA, 653 bp, Zea mays
  Clone ID: LIB3061-114-Q6-K6-E4
ttttatattctgatgagggtggcaagcagctagtatgagaggaagatctgcaaatgtaaggaagaaagcagtcgcaggaaaccggctcttatgaaattaatggttgatcattttgaaggtagtcatacaggttctgtgtataggactggtttacaacctcaaacaaaaggagacaaagaagattctgtaagtgctcctagccagctttcatttggaagttttttgaaaaccgacaagttgaatggggattccagcattgctgaagataagacgtgcaatggtagcgctaaccaagaacaacggacaaagctaacaggaattaacaggccaaccagtatcgcttccaaattcatatcatacaaagatgtggctgtttcgccccctggcacagtattgaaacccattttggagaagaaggaagcaaaggagaaagatagtggacgtgatattgacctagcactgtcatccgaggaagaagataaaaagtttacagaaaaagagaaagaaaagccaagtgaggacagtagcaaagagattctttcaattcagcgagatttagagagtcatgcagaaatacctcctgacagcaacagtgatgaaggcccatctgcagctagtaaagcgtctggaagcaaatgtcagcttcagctcct

SEQ ID NO: 10889 - DNA, 398 bp, Zea mays
  unsure (1)..(398): unsure at all n locations; Clone ID: LIB3061-114-Q6-K6-E5
ggtggattatgtgtgttgttttgtgtgttgttggatatgagtgtttntatgtttggtgtgggaatatataattgagtgatttttttttttaatnttaaaggggtatganngggggattanananaantttttttttttttttttttgttgtagggnaaaaaggaggggggaggggggggaaagtgagaatgtatgaatnnnnaaagggagnnggggggtatgggagagggtggggggggnggaggtttaggggggggaggagagagggagatagaaggaaagggggaggagaaggtttgtgaatttgttagagtgtacatgaggatgtttggtggattatggttttgtaatggttttgttttatttattttaaatgggatgatttttttgtttgtatt

SEQ ID NO: 10890 - DNA, 214 bp, Zea mays
  Clone ID: LIB3061-114-Q6-K6-E6
ttattaacgccttcttgcaacaacaacaattgctgccattctacccacaggatgtggcaaacattgtcgccttcttacaacaacagcaattgctgccatttagccaactcgctttgacgaatcctaccaccttattgcatcagcccaccattggtggtaccatcttctagattttttatgctttatactgtaataataaatttctcatactgat

SEQ ID NO: 10891 - DNA, 613 bp, Zea mays
  Clone ID: LIB3061-114-Q6-K6-E7
tgttcaggcaatcgcagctggcatcttacctttatcacccttgttcctccaacaatcatcagccctattacaacagttacctttggtgcatttattggcacaaaacatcagggcacaacaactacaacaacttgtgctagcaaaccttgctgcctactctcagcaacagcagtttcttccattcaaccaactaggttcattgaactctgcttcttatttgcaacaacaacaactaccattcagccagctacctgctgcctacccccagcaatttcttccattcaaccaactagcagcattgaactctcctgcttatttacagcagcaacaactactaccattcagccagctagctggtgtgagccctgctaccttcttgacacaaccacagttgttgccgttctaccagcacgttgcgcctaacgctggcaccctcttacaactgcaacaattgctgccattcaaccaacttgctttgacaaacccagcagtgttctaccaacaacccatcattggtggtgccctcttttagatttcttatgagttatagttcaataataaagttttttatctgatgtttgtggcttcccagaaataagaaagtcatttctag

SEQ ID NO: 10892 - DNA, 643 bp, Zea mays
  Clone ID: LIB3061-114-Q6-K6-E8
gcgttctttgtaacctccgagctcctagtgactcccaggctccggccatgtcggcgcagttcacaagaataaccttcagcaacctgtttgtccgtcgggctggcccaggcagcacggagctgaccgtggagggaaggccatccgaccagctgggcaggagaaacctcactgacagccccgtatttgacggccgtggccctgacgccagcctcgtggctcgcgtacagggagtcgctacccagatgggcgacgtgcgccagttgtacaccgtcgtgttccaggagaggccgctcaagggctccacgctcgtcaccgaaggcgcgatgacagaagggtcagacgagtgggcgatctacggtggaactggagtgttcgcgatggcgagaggcgtcataaggagaacgtttcttgccgacacgagcggcgggaactccgacgagcttgccgtggaggttctctgcccggtgttccgcccggcggcgtttggctcatcgtcgtcacagccagcagcaaaggacatcagctccaccgtcgtcgtcaccaaggtcggagtgtggggtggagagggagggtcggcgcaggacatcgcgacgacggagccgccgaggcgtctgcagagcctgaccgtccgcgccggcgttgc

SEQ ID NO: 10893 - DNA, 631 bp, Zea mays
  Clone ID: LIB3061-114-Q6-K6-E9
tttctaatgctcgcaagctcctatagcttcccttcttcccccgtacctctcaccagcggtgtcttcggtatgtgaaaacccaattcttcaaccctacaggatccaacaggcaatcgcagctggcatcttacctttatcacccttgttcctccaacaatcatcagccctattacaacagttacctttggtgcatttattggcacaaaacatcagggcacaacaactacaacaacttgtgctagcaaaccttgctgcctactctcagcaacagcagtttcttccattcaaccaactaggttcattgaactctgcttcttatttgcaacaacaacaactaccattcagccagctacctgctgcctacccccagcaatttcttccattcaaccaactagcagcattgaactctcctgcttatttacagcagcaacaactactaccattcagccagctagctggtgtgagccctgctaccttcttgacacaaccacagttgttgccgttctaccagcacgttgcgcctaacgctggcaccctcttacaactgcaacaattgctgccattcaaccaacttgctttgacaaacccagcagtgttctaccaacaacccatcattggtggtgccctcttt

SEQ ID NO: 10894 - DNA, 653 bp, Zea mays
  unsure (1)..(653): unsure at all n locations; Clone ID: LIB3061-114-Q6-K6-F1
gtgtcaggcgattgcggtttcaagggatcacaaacctgatcagacagatgagaggcaaagaattgaggatgcagggggctttgttatgtgggctgggacatggagagtgggtggcgttctcgctgtctctcgagcatttggtgataaactcttgaagccgtatgttgttgctgaccctgaaatcaaggaggaggtggtcgacagctccctcgaattcctcatccttgctagcgacggactctgggatgttgtcactaatgaggaagctgttgccatggtcaagcctatccaggacccccaggaagcagcaaacaagcttctcgaagaagcttcccgaaggggaagctccgataacatcacagttatcatcgtccgcttcatagacggaactaccggtgagaaatcaggcgacgacaaagagaccaccaacgaccaacactcctagctgtctcgtgtagggatccatcgtgctgtgtgttcttctggctgttgtacctgatgctcagagtagacgctggctgctgctccgcaaggaaactgactcccccgaccgccgttcatgctcctggctggctggctcgctggccgnctcgacgggaacgctgccgtagaatgacgactggggctggtgttgttgttacagtatggtcctt

SEQ ID NO: 10895 - DNA, 639 bp, Zea mays
  unsure (1)..(639): unsure at all n locations; Clone ID: LIB3061-114-Q6-K6-F11
ttttgnaatccagtagcaacaatagagcaacaatggcgaccaagatctttccctccttatgctccttgctctttctgcatgtgttgctaacgcgacaattttccctcaatgctcacaagctcctatagcttcccttcttcccccataccttccatcaatgatagcttcagtatgtgaaaacccagctcttcaaccctataggctccaacaagcaatcgcagcaagcaacatacctttatcacccttgtttcaacaatcgccagccctatctttggtgcagtcattggtacaaaccatcaaggcacagcagctgcagcaactcgtgctacctgtgatcaaccaagtagctctggcaaacctttctccctactatcagcaacaacaatttcttccattcaaccaactatctacactgaaccctgctgcttatttgcagcaacaactattaccattcagccagctagctactgcctactctcatcaacaacaacttcttccatttaaccaattggccgcactgaacctcgctgcttatttgcagcagcaaatattactaccatttagccagctagctgcagcaagccgtgcttccttcttgacacagcaacagttgctgcctttctaccagcagtttgcggc

SEQ ID NO: 10896 - DNA, 660 bp, Zea mays
  unsure (1)..(660): unsure at all n locations; Clone ID: LIB3061-114-Q6-K6-F12
gtttacatanaagcacaatagtgtaccaacaatgggagccaaaaattttgcctccttatgctccttggtctttctgcaagtgctgctacggcgaccattttcccgcaatgctcgcaagctcctatagcttcccttcttcccccgtacctctcaccagcggtgtcttcggtatgtgaaaacccaattcttcaaccctacaggatccaacaggcaatcacagctggcatcttacctttatcacccttgttcctccaacaatcatcagccctattacatcagttacctttggtgcatttattggcacaaaacatcagggcacaacaactacaacaacttgtgctagcaaaccttgctgcctactctcagcaacagcagtttcttccattcaaccaactagctgcattgaactctgcttcttatttgcaacaacaacaactaccattcagccagctacctgctgcctacccccagcaatttcttccattcaaccaactggcagcattgaactctcctgcttatttacagcagcaacaactactaccattcagccagctagctggtgtgagccctgctaccttcttgatacaaccacagttgttgccgttctaccagcacgctgcgcctaacgctggcaccctcttacaactgcaacaattgctg

SEQ ID NO: 10897 - DNA, 649 bp, Zea mays
  Clone ID: LIB3061-114-Q6-K6-F2
gttctacacttcaaactgcccatcattcttcactctgcgctgattaccaacctctattttatatcccaggtacacacctcatttctaatgctgcagtaagttatatcttctgtatgtgtgtgtgtaagtgctaatgtattttactgctatcacagcttctctacaggaagtacagtggaaacttccttgttaaccttcttgggaagtggaaggagtctgaatactctggccattctattcctgttggtggtcttgcttactatgtaactgccccatcaaggtgaaaatctagttccttcagtggggactggggaggccttctcgccatgatcatttttgttgtttttgttattcaataattaggtattcttttgactaacaatagcacattggaaaccacacagtttggctgatgtccttgcaaatccattccatgcactgttttatgtggtcttcatgctgtcagcctgtgctctgttctcaaagacatggattgaagtttctggttcatcagcaaaggatgttgctaagcagctcaaggaacaacaaatggtgatgccaggccatcgtgagtcgaacttgcagaaggaacttaaccgatacatccccactgccgctgcatttggtggtgtatgcattggcgcattga

SEQ ID NO: 10898 - DNA, 655 bp, Zea mays
  unsure (1)..(655): unsure at all n locations; Clone ID: LIB3061-114-Q6-K6-F4
tcactagcaacatagnaagcacaatagtgtaccaacaatggcagccaaaatattttgcttccttatgctccttggtctttctgcaagtgctgctaccgcaaccattttcccacaatgctcacaagctcctatagcttcctttcttcccccatacctctcaccagcggtgtcttcagtatgtgaaaacccaattcttcaaccctacaggatccaacaggcaatcgcagcaggcatcttacctttatcacccttgttcctccaacaaccgtcagccctattacagcagttacctttggtgcatttgttggcacaaaacatcaaggcacaacaactacaacaacttgtgctaggaaaccttgctgcctactctcagcaacagcagtttcttccattcaaccaactggctgcattgaactctgctgcttatttgcaacaacaactaccattcagtcagctagctgctgcctacccccagcaatttcttccattcaaccaactggcagcattgaactctgctgcttatttacaacagcaacagctaccaccattcagccagctagctgatgtgagccctgttgccttcttgacacaacaacagttgttgccgttctacctgcacgctgcgcctaacgctggcaccctcttacactgcaac

SEQ ID NO: 10899 - DNA, 150 bp, Zea mays
  Clone ID: LIB3061-114-Q6-K6-F6
ttttgcaccatgtggtatagaagttttagaagatctgactccataggtagataaggctagctgcggattcagtaagtgttgtagtgattcacatgcttgagaacttgtaaacactgtgtacttattaatgctggttatttagttctcctt

SEQ ID NO: 10900 - DNA, 650 bp, Zea mays
  unsure (1)..(650): unsure at all n locations; Clone ID: LIB3061-114-Q6-K6-F7
gttaacatanaaagtggaaccagtagcaacaatagagcaacaatggcgaccaagatactttccctccttatgctccttgctctttctgcatgtgttgctaacgcgacaattttccctcaatgctcacaagctcctatagcttcccttcttcccccataccttccatcaatgatagcttcagtatgtgaaaacccagctcttcaaccctataggctccaacaagcaatcgcagcaagcaacatacctttatcacccttgtttcaacaatcgccagccctatctttggtgcagtcattggtacaaaccatcaaggcacagcagctgcagcaactcgtgctacctgtgatcaaccaagtagctctggcaaacctttctccctactatcagcaacaacaatttcttccattcaaccaactatctacactgaaccctgctgcttatttgcagcaacaactattaccattcagccagctagctactgcctactctcatcaacaacaacttcttccatttaaccaattggccgcactgaacctcgctgcttatttgcagcagcaaatattactaccatttagccagctagctgcagcaagccgtgcttccttcttgacacagcaacagttgctgcctttctaccagcagtttgcggc

SEQ ID NO: 10901 - DNA, 634 bp, Zea mays
  Clone ID: LIB3061-114-Q6-K6-F8
tgttcaatccttggcacatctaaccatacaaaccatcgcaacgcaacagcaacaacaatttctaccagcactgagccaactagctgtggtgaaccctgtcgcctacttgcaacagcagttgcttgcatccaacccacttgctctggcaaacatagttgcataccaacaacaacaacaattgcaacagtttctaccagcgctcagtcaactagccatggtgaaccctgccgcctacctacaacagcaacaactgatttcatctagccctctcgctgtggttaatgcacctacatacctgcaacaacagttgctgcaacagattgtaccagctctgactcagctagctgtggcaaaccctgctgcctacttgcaacagctgcttccattcaaccaactgactgtgtcgaactctgctgcgtacctacaacagcgacaacagttacttaatccactagcggtggctaacccattggtcgctgccttcctacagcagcaacaattgctgccatacaaccagttctctttgatgaaccctgccttgttgtggcagcaacccatcgttggaggtgccatcttttagattacatatgagatgtactcgataatggtgccctcatagcggcatgtgtttcct

SEQ ID NO: 10902 - DNA, 379 bp, Zea mays
  unsure (1)..(379): unsure at all n locations; Clone ID: LIB3061-114-Q6-K6-F9
ggggggggggggaanaaaacacacgggggggggggnacanggcnccacannncngctgctntcgnnccctcngnggggngaagagnggctggggggcatgaagngcagcaagcactgcagctgtttttatttatatnacaaaaggggcttagtatggggctttttttttttttattatannctcttcttccaagggttttgtcgattcgaggaacagattagtcaaattttgtggtgtttagacttgtgacctccgtttgtgcatagctcagcttcatccaaaactatgtgctgtcacctaaccgagagttctggtctgtgatgtatgacatgtttatacattttttttaggaatgaatcgtctgtgctttcggctttg

SEQ ID NO: 10903 - DNA, 601 bp, Zea mays
  unsure (1)..(601): unsure at all n locations; Clone ID: LIB3061-114-Q6-K6-G10
tgttttcacatagnaagcacaatagtgtaccaacaatggcagccaaaaattttgcctccttatgctccttggtctttctgcaagtgctgctacggcgaccattttcccacaatgctcacaagctcctatagcttcccttcttcccccgtacctctcaccagcggtgtcttcggtatgtgaaaacccaattcttcaaccctataggatccaacaggcaatcgcagctggcatcttacctttatcacccttgttcctccaacaatcatcagccctattacagcagttacctttggtgcatttattggcacaaaacatcagggcacaacaactacaacaacttgtgctagcaaaccttgctgcctactctcagcaacaacagtttcttccattcaaccaactagctgcattgaactctgcttcttatttgcaacaacaacaactaccattcagccagctatctgctgcctacccccagcaatttcttccattcaaccaacttgctttgacaaacccaacagcattctaccaacaacccatcattggtggtgccctcttttagatttcttatgagttatagttcaataataaagttttttgtctg

SEQ ID NO: 10904 - DNA, 654 bp, Zea mays
  Clone ID: LIB3061-114-Q6-K6-G11
ttttagcctagcaattagctcatcgactccaggatggagaactcgacaccatgaaggtgctgatcgttgcccttgctctcctggcgctcgctgcgagcgccgcctccagtacaagcggcggctgtggctgccagacaccaccgtttcatctaccgcctccgttctatatgccgcctccgttctatctgccgccgcagcagcagccgcagccatggcaataccccactcaaccaccgcagctaagcccgtgccagcagttcggatcctgcggcgtcggcagcgtcggcagcccgttcctgggccagtgcgtcgagttcctgaggcaccagtgcagcccggcggcgacgccctacggctcgccacagtgccaggcgctgcagcagcagtgctgccaccagatcaggcaggtggagccgctgcaccggtaccaggcgacatacggtgtggtcctgcagtccttcctgcagcagcagccgcagggcgagctcgcggcgctgatggcggcccaggtagcgcagcagctgacggcgatgtgcggtctgcagctgcagcagccaggtccctgcccttgcaacgcagctgccggcggtgtctactactgaggaaacttgtactgtagtaataatgtaatggagccgctgactagctacctat

SEQ ID NO: 10905 - DNA, 377 bp, Zea mays
  unsure (1)..(377): unsure at all n locations; Clone ID: LIB3061-114-Q6-K6-G2
aaaaaaaactaaatacaaaaaaaacaaaagatgacatacaaacaaaagtgggtggtgatccttgagttgccgggttagcaacccatcgttggaggtgccatctttttttttttttttgcctagtactagttgggggggcggtgataaccaccgggggggcggagaaacccgggggggacccaaagagaaacanctggatgaaaataaattttttttttttttttttgttggtgtagaggacccaagnggacggacgcgnccaagggacggccaagcgggggggnagggggaccgcgcccggaggcgcggcacgaggcccgacggcggggggcgtgacaaaaccgtggcgctgcccacttgaaacgcctttagcacca

SEQ ID NO: 10906 - DNA, 290 bp, Zea mays
  Clone ID: LIB3061-114-Q6-K6-G3
gtttggtcctccagtccatcctgcagcagcagccgcaaagcggccaggtcgcggggctgttggcggcgcagatagcgcagcaactgacggcgatgtgcggcctgcagcagccgactccatgcccctacgctgctgccggcggtgtcccccactgaagaaatatgtgctgtagtataggcggtggctagctagctagttgagtcatttagcggcgatgattgagtaataatgtgtcacgcatcaccatgggtggcagtgtcagtgtgagcaatgacctgaatgaacaattg

SEQ ID NO: 10907 - DNA, 653 bp, Zea mays
  unsure (1)..(653): unsure at all n locations; Clone ID: LIB3061-114-Q6-K6-G6
tttgcggnggcggctcgctacggcttcactgcagtggaccgtccgngagggtacctggtcctggcggtggcctctctggngagaagagatcgaggaagtcaccggaacaccaggggcagaggaggcacgagtcctggaagagaagaaggtgggcgtgaaaggcgtcgggaggaagacgaccgacgagtcggagcacttcagctggagggacggcgtcaaggtcccctgcggcaagctggtgccgtcggcgaacaaggacggcccgctcgagtacaacgagtacgccgtgtacgaccccaagcaggtgagcatctgcttcctggtcggggtgaagtacgaggagcagaacatggaggtggtgccgccggacgaccagtgaaggagtcgtctcgtggagtgtcctagggcagggcagggcaggccaggccaggaggtggtgggacccattttggttagtggagccggtagcggcgacgcgttggccgtcgggtggaatggaaacgtgaggggtgccagaacatcctgngctgcctgccgcctcctggttttgtgtcaattgccgtgtctgtggctgtgtgtactacttggtagttggtagcgtactttattagtagcgaaggtgctagtgaccctggctaggtacaagcccttgg

SEQ ID NO: 10908 - DNA, 657 bp, Zea mays
  unsure (1)..(657): unsure at all n locations; Clone ID: LIB3061-114-Q6-K6-G7
tttttagnacaacaccgaccgcggtgtgatgattgccgatggcaagtcgcggttttcaatcaatgggaagcctatctaccactttgttgggacttccaccttcagcgagtacaccgtcatgcatgtgggttgtgttgcaaagatcaaccctcaggctccccttgataaagtttgcgtccttagctgtggtatttctaccggtcttggtgcatcaattaatgttgcaaaacctccgaagggttcgacagtggctgttttcggtttaggagccgttggtcttgccgctgcagaaggtgcaaggattgctggagcgtcaaggatcattggtgtcgacctgaaccccagcagattcgaagaagctaggaagttcggttgcactgaatttgtgaacccaaaagaccacaacaagccagtgcaggaggtacttgctgagatgaccaacggaggggtcgaccgcagtgtggaatgcactggcaacattaatgctatgatccaagctttcgaatgtgttcatgatggctggggtgttgctgtgctggtgggtgtgccacataaggacgctgagttcaagacccacccgatgaacttcctgaacgaaaggaccctgaaggggaccttctttggcactataagccagcactgatctgccaaatgtgt

SEQ ID NO: 10909 - DNA, 660 bp, Zea mays
  unsure (1)..(660): unsure at all n locations; Clone ID: LIB3061-114-Q6-K6-G8
ttttccaactagcaacatagnaagcacaatagtgtaccaacaatggcagccaaaaattttgcctccttatgctccttggtctttctgcaagtgctgctacggcgaccattttcccacaatgctcacaagctcctatagcttcccttcttcccccgtacctctcaccagcggtgtcttcggtatgtgaaaacccaattcttcaaccctataggatccaacaggcaatcgcagctggcatcttacctttatcacccttgttcctccaacaatcatcagccctattacagcagttacctttggtgcatttattggcacaaaacatcagggcacaacaactacaacaacttgtgctagcaaaccttgctgcctactctcagcaacaacagtttcttccattcaaccaactagctgcattgaactctgcttcttatttgcaacaacaacaactaccattcagccagctatctgctgcctacccccagcaatttcttccattcaaccaactgacagctttgaactctcctgcttatttacagcagcaacaactactaccattcagccagctagctggtgtgagccctgctaccttcttgacacaaccacaattgttgccgttctaccagcacgctgcgcctaacgctggcaccctcttacaactgc

SEQ ID NO: 10910 - DNA, 653 bp, Zea mays
  Clone ID: LIB3061-114-Q6-K6-G9
gttgaacgcactagcaacgacctaacaacaatggcttccaagacttatccctccttgcgcttcttgccctttttgtgagtgcaacaaatgcgttcattattccacaatgctcacttgctccgagtgccattattccacagttcctccctccagttacttcaatgggcttcgaacacccagctgtgcaagcctataggctacaacaagcgcttgcggcgagcgtcttagaacaaccaattgcccaattacaacaacaatccttggcacatctaaccatacaaaccatcgcaacgcagcagcaacaagcactgagccacctagccgtggtgaaccctatcgcctacttgcaacaacagctgcttgcatccaacccacttgctttggcaaacgtagctgcataccaacaacaacaacagttgcaacagtttctaccagcgctcagtcaactagccatggtgaaccctatcgcctacctacaacagcaacaacttctttcatctagcccgctcgctatgggcaatgcacctacatacctgcaacaacagttgttgcaacaacagttgctgcaacaaattgtaccagctcttactcagctagctgtggcaaaccctgctgcctacttgcaacaactacttccattcaaccaactgact

SEQ ID NO: 10911 - DNA, 242 bp, Zea mays
  Clone ID: LIB3061-114-Q6-K6-H1
gcgacaacagttacttaatccactagcggtggctaacccattggtcgttgccttcctacagcagcaacaattgctgccatacaaccagttctctttgatgaaccctgccttgttgtggcagcaacccatcgttggaggtgccatcttttagattacatatgagatgtactcgataatggtgccctcatagcggcatgtgtttcctagaaataatcaatatattgattgagatttatctcgat

SEQ ID NO: 10912 - DNA, 632 bp, Zea mays
  unsure (1)..(632): unsure at all n locations; Clone ID: LIB3061-114-Q6-K6-H10
gtgtctgtccaccctcgnatgcttacgcgtgacgcggagccgccgccgcctacatccgctcaaccccgtgcccgcctcaaccacgccgccaccgaccacgcataatcctgcctccccttcgcgcgggttcgaggctcgtttcctttgggatcgttcgtctgcccagaccgcgtgggcgctgcttcttcgggatcttgttggaccgagcggcccagggctagggattcaggcccatggcgtggcggcgcgtcctcacccagattgcaaggcatcgaccagcaaaagcaatctacaatgaactagttgcttcctcccctttgggtgttcttcgaagtgacatcacttcaggtgccaggattagacatttacaagagaggaaccagtcaagttacattggtagccttgcacgccgggtccgagacttagaatcaccaagcggaacttctctgcttaaagagatttatagaagtgacccagagcgtgtcatacaaatatttgaaagccaaccttcattacattctaatcctgcagcactttcggagtatgtaaaagctcttgtaagggttgataggctggatgaaagtgccttgcttaaaaactgcagagaggtgttgcttcctcgacaggggcga

SEQ ID NO: 10913 - DNA, 486 bp, Zea mays
  Clone ID: LIB3061-114-Q6-K6-H3
gggctaggaaaccttgctggctactcatgaaagcagcggcttattacattcaaccaactagctgcattgagctctgctagttatttgtgacaacaacaactaccattgagccagctacctgctggctacccgcagaaattgcttacattcagccaactggcagcattgtactctactgcttatttacagcaacaacaactactaccattcagccagctagctgaagtgagccctgctacctagttgatacaaccacagctggtggcgttataccagcacgctgagcgtaacgctgggaccctcttacaactgcaacagttgctgccattcaaacaactggctttgacaaacacaggagaggaataccaacaacccatgattgagaggagcacctcttttagatttcttatgagttataggtcaataataaaggattcaggctgatgtacgcgggttcccaaaaataagaaagtacattagtagatt

SEQ ID NO: 10914 - DNA, 417 bp, Zea mays
  unsure (1)..(417): unsure at all n locations; Clone ID: LIB3061-114-Q6-K6-H6
gtggcctacccccaacagtagctggctngatggtagttgttgttgttgcaaataagaagcagagttcaatgcagctagttggttgaatggaagaaactgctgttgctgagagtaggcagcaaggtttgctagcacaagttgttgtagttgttgtgccctgatgttttgtgccaatggatgcgccaaaggtaactgctgtaatagggctgatgattgttggaggaacaagggtgataaaggtaagatgccagctgcgattgcctacccccaacaatttcttccattcaaccaactggcagcattgaactctcctgcttatttacagcagcaacaactactaccattcaggcagctagctggtgtgagccctgctaccttctcgtcacaacgccgggggtttggcgttgtagcaagacg

SEQ ID NO: 10915 - DNA, 362 bp, Zea mays
  Clone ID: LIB3061-114-Q6-K6-H7
actgagttgctgattagttgcacatttcttccatcaaccaatagcagcattgaactctgctgcttatttcagcagcaacaactactaccattcagccagctagctgatgtgagccctgctgccttcttgacacaacaacagttgttgccgttctacctgcacgctatgcctaacgctggcaccctcttacaactgcaacaattgctgccattcaaccaacttgctttgacaaacccaacagtgttctaccaacaacccatcattggtggtgccctcttttagattgcttatgagttatagttcaataatgaagttttttggatgatgtttgtggcgtcccagaaataagaaagtacatttct

SEQ ID NO: 10916 - DNA, 600 bp, Zea mays
  Clone ID: LIB3061-114-Q6-K6-H8
agcaaacggcagtgcgtagggagggtcgtcgaacagaacagcatgaagatggtcatcgttctcgtcgtgtgcctggctctgtcagctgccagcgcctctgcaatgcagatgccctgcccctgcgcggggctgcagggcttgtacggcgctggcgccggcctgacgacgatgatgggctcctgttggctgtacccctacgcggagtacctgaggcagccgcagtgcagcccgctggcggcggcgccctactacgccgggtgtgggcagacgagcgccatgtaccagccgctccggcaacagtgctgccagcagcagatgaggatgatggacgtgcagtccgtcgcgcagcagctgcagatgatgatgcagcttgagcgtgccgctgccgccagcagcagcctgtacgagccagctctgatgcagcagcagcagcagctgctggcagcccagggtctcaaccccatggccatgatgatggcgcagaacatgccggccatgggtggactctaccagtaccagtaccagctgcccagctaccgcaccaacccctgtggcgtctccgctgccattccgccctactactgattcatgatatttggg

SEQ ID NO: 10917 - DNA, 651 bp, Zea mays
  Clone ID: LIB3061-115-Q6-K6-A11
tgtagcttcaaaacacaccaagcggagggcagtagcgacgacctaacaccaatggctaccaagatattagccctccttgcgcttcttgcccttttagtgagcgcaacaaatgcgttcattattccacagtgctcacttgctcctagtgccagtattccacagttcctcccaccagggactgcaatgggcttttaacatccagccgtgcaagcctacaggctacaactagcgcttgcggcgagcgccttacaacaaccaattgcccaattgcaacaacaatccttggcacatctaaccctacaaaccattgcaacgcaacaacaacaacaacagtttctgccatcactgagccacctagccgtggtgaaccctgtcacctacttgcaacagcagctgcttgcatccaacccacttgctctggcgaacgtagctgcataccagcaacaacaacagctgcaacagtttatgccagtgctcagtcaactagccatggtgaaccctgccgtctacctacaactactttcatctagcccgctcgcggtgggcaatgcacctacgtacctacaacaacagttgctgcaacaaattgtaccagctctgactcagctagctgtggcaaaccctgctgcctacttacaacaggtgcttccc

SEQ ID NO: 10918 - DNA, 646 bp, Zea mays
  Clone ID: LIB3061-115-Q6-K6-A12
agcaacataggaagcgcgggggggggcgaacaatggcagccaaaaattttgcttccttatgctccttggtctttctgcaagtgttgctaccgcaaccattttcccacaatgctcacaagctcctatagcttcccttcttcccccatacctctcaccagcgggggggggggggggtgaaatttttttgttcaaccctacaggatccaacaggcaatcgcaacaggcatcttaccattatcacccttgttcctccaacaaccgtcagccctattacagcagttacctttggtccatttggtggcacaaaacatcagggcacaacaactacaacaacttgtgctagcaaaccttgctgcatactctcagcaacatcagtttcttccattcaaccaactggctgcattgaactctgctgcttatttgcaacaacaattaccattcagccagctagttgctgcctacccccagcaatttcttccattcaaccaactagcagcattgaactctgctgcttatttacagcagcaacaactactaccattcagccagctagctgatgtgagccctgctgccttcttgacacaacaacagttgttgccgttctacctgcacgctatgcctaacgctggcaccctcttacaactgc

SEQ ID NO: 10919 - DNA, 646 bp, Zea mays
  unsure (1)..(646): unsure at all n locations; Clone ID: LIB3061-115-Q6-K6-A3
gctgtagnnaggtccgctcaccgcgccgcccncagctgaaattccnaggccaccggctgaacgcatccctctcaccgcgcccttggcggtggtacgttcacctcgccggttccccgacagccgtcccctccgtgatttaagagaggcccatgagctcgctgctcttgtgcccgcggtgctactgacggttgctctagatccgttcatcctggtggttttgtgaggtcgaaagcggcgagcgaattagaagatgctggacaagctgtgggacgacgtggtggccgggcctcgcccggagacgggcctcgagaagctccgcaaggccaccaccgcccgtccgctcgtcatcaacaaagacgcggacggcggcagctacaagcgggcgcagtcgatgccgtcgaccccgacgacgccggtgacgccgtcgtcgtcgtcgtcgtcgacgacgccgcgcggcgccggcaacgtgtggcgcagcgtcttccacccggggagcaacctggccaccaagggcatggggcgccaacctcttcgaccggccgcagtccaactcccccaccgtctacgactggctctacagcgacgagaccagtagcaaccaccgctagatcgggcgagatggatggacagtgaagaggccatgttt

SEQ ID NO: 10920 - DNA, 663 bp, Zea mays
  unsure (1)..(663): unsure at all n locations; Clone ID: LIB3061-115-Q6-K6-A4
tgttctagcaacatagnaagcacaatagtgtaccaacaatggcagccaaaaattttgcctccttatgctccttggtctttctgcaagtgctgctacggcgaccattttcccgcaatgctcgcaagctcctatagcttcccttcttcccccgtacctctcaccagcggtgtcttcggtatgtgaaaacccaattcttcaaccctacaggatccaacaggcaatcacagctggcatcttacctttatcacccttgttcctccaacaatcatcagccctattacatcagttacctttggtgcatttattggcacaaaacatcagggcacaacaactacaacaacttgtgctagcaaaccttgctgcctactctcagcaacagcagtttcttccattcaaccaactagctgcattgaactctgcttcttatttgcaacaacaacaactaccattcagccagctacctgctgcctacccccagcaatttcttccattcaaccaactggcagcattgaactctcctgcttatttacagcagcaacaactactaccattcagccagctagctggtgtgagccctgctaccttcttgatacaaccacagttgttgccgttctaccagcacgctgcgcctaacgctggcaccctcttacaactgcacattgc

SEQ ID NO: 10921 - DNA, 639 bp, Zea mays
  Clone ID: LIB3061-115-Q6-K6-A5
tttttcatcattcatcttagtagtataggcaccaaatcaaatctgcaacatcaattatctaactccaaaaccatgaagctggtgcttgtggttcttgctttcattgctttagtatcaagtgtttcttgtacacagacaggcggctgcagctgtggtcaacaacaaagccatgagcagcaacatcatccacaacaacatcatccacaaaaacaacaacatcaaccaccaccacaacatcaccagcagcagcaacaccaacaacaacaagttcacatgcaaccacaaaaacatcagcaacaacaagaagttcatgttcaacaacaacaacaacaaccgcagcaccaacaacaacaacaacaacaacagcaccaacaacaacatcaatgtgaaggccaacaacaacatcaccaacaatcacaaggccatgtgcaacaacacgaacagagccatgagcaacaccaaggacagagccatgagcaacaacatcaacaacaattccagggtcatgacaagcagcaacaaccacaacagcctcagcaatatcagcagggccaggaaaaacacaacagcaacaatgtcattgccaggagcagcaacagactacaaggtgcagctataactactatagcagtagctcaa

SEQ ID NO: 10922 - DNA, 667 bp, Zea mays
  unsure (1)..(667): unsure at all n locations; Clone ID: LIB3061-115-Q6-K6-A6
tttttcacatagnaagcacaatagtgccccaacaatggcagctaaaaaattttgcctccttatgctccttggtctttctgcaagtgctgctacggcgaccattttcccacaatgctcacaagctcctatagcttcccttcttcccccgtacctctcaccaacggtgtcttcggtatgtgaaaacccaattcttcaaccctacaggatccaacaggcaatcgcagctggcatcttacctttatcacccttgttcctccaacaatcatcagccctattacagcagttacctttggtgcatttattggcacaaaacatcagggcacaacaactacaacaacttgtgctagcaaaccttgctgcctactctcagcaacagcagtttcttccattcaaccaactagctgcattgaactctgcttcttatttgcaacaacaacaactaccattcagccagctatctgctgcctacccccagcaatttcttccattcaaccaactgacagcattgaactctcctgcttatttacagcagcaacaactactaccattcagccagctagctggtgtgagccctgctaccttcttgacacaaccacagttgttgccgttctaccagcacgctgcgcctaacgctggcaccctcttacaactgcaacaattgctgcca

SEQ ID NO: 10923 - DNA, 663 bp, Zea mays
  unsure (1)..(663): unsure at all n locations; Clone ID: LIB3061-115-Q6-K6-A7
ttttgtanaccaatagcaacatagcaagcacaatagtgtaccaacaatggcagccaaaaattttgcttccttatgctccttggtctttctgcaagtgttgctaccganaccattttcccacaatgctcacaagctcctatagcttcccttcttcccccatacctctcaccagcggtgtcttcaatgtgtgaaaacccaattgttcaaccctacaggatccaacaggcaatcgcaacaggcatcttaccattatcacccttgttcctccaacaaccgtcagccctattacagcagttacctttggtccatttggtggcacaaaacatcagggcacaacaactacaacaacttgtgctagcaaaccttgctgcatactctcagcaacatcagtttcttccattcaaccaactggctgcattgaactctgctgcttatttgcaacaacaattaccattcagccagctagttgctgcctacccccagcaatttcttccattcaaccaactagcagcattgaactctgctgcttatttacagcagcaacaactactaccattcagccagctagctgatgtgagccctgctgccttcttgacacaacaacagttgttgccgttctacctgcacgctatgcctaacgctggcaccctcttacactgcaac

SEQ ID NO: 10924 - DNA, 651 bp, Zea mays
  unsure (1)..(651): unsure at all n locations; Clone ID: LIB3061-115-Q6-K6-A8
tttcacatanaagcacaatagtgccaccaaccaatggcagccaaaaattttgcttccttatgctccttggtctttctgcaagtgttgctaccgcaaccattttcccacaatgctcacaagctcctatagcttcccttcttcccccatacctctcaccagcggtgtcttcaatgtgtgaaaccccaattgttcaaccctacaggatccaacaggcaatcgcaacaggcatcttaccattatcacccttgttcctccaacaaccgtcagccctattacagcagttacctttggtccatttggtggcacaaaacatcagggcacaacaactacaacaacttgtgctagcaaaccttgctgcatactctcagcaacatcagtttcttccattcaaccaactggctgcattgaactctgctgcttatttgcaacaacaattaccattcagccagctagttgctgcctacccccagcaatttcttccattcaaccaactagcagcattgaactctgctgcttatttacagcagcaacaactactaccattcagccagctagctgatgtgagccctgctgccttcttgacacaacaacagttgttgccgttctaacctgcacgctatgcctaacgctgcaccctcttacaactgcaac

SEQ ID NO: 10925 - DNA, 667 bp, Zea mays
  unsure (1)..(667): unsure at all n locations; Clone ID: LIB3061-115-Q6-K6-A9
ttttctcactagcaacatagnaagcaccatattgtaccaataatggcagccaaaaattttgcctcattatgctccttggtctttctgcaagtgctgctacggcgagcattttcccgcaatgctcacaagctcctatagcttcccttcttcccccatacctctcaccagcgatgtcttcagtatgtgaaaatccaattcttctaccctacaggatccaacaggcaatcgcagcaggcatcttacctttatcacccttgttcctccaacaatcatcagccctattacagcagttacctttggtgcatttattggcacaaaacatcagggcacaacaactacaacaactcgtgctagcaaaccttgctgcctactctcagcaacagcagttacctttggtgcatttgttggcacaaaacatcagggcacaacaactacaacaactcgtgctagcaaaccttgctgcctactctcagcaacaacagtttctgccattcaaccaactagctgcattgaactctgctgcttatttgcagcaacaacaactactaccattcagccagctagctgctgcctacccccggcaatttcttccattcaaccaactggcagcattgaactctcatgcttatgtacaacaacaacaactactaccattcagccagctagc

SEQ ID NO: 10926 - DNA, 599 bp, Zea mays
  Clone ID: LIB3061-115-Q6-K6-B1
ctctcatatctactatactatactctaggaagcaaggacaccaccgccatggcagccaagatgcttgcattgttcgctctcctagctctttgtgcaagcgccactagtgcgacccatattccagggcacttgccaccagtcatgccattgggtaccatgaacccatgcatgcagtactgcatgatgcaacaggggcttgccagcttgatggcgtgtccgtccctgatgctgcagcaactgttggccttaccgcttcagacgatgccagtgatgatgccacagatgatgacgcctaacatgatgtcaccattgatgatgccgagcatgatgtcaccaatggtcttgccgagcatgatgtcgcaaatgatgatgccacaatgtcactgcgacgccgtctcgcagattatgctgcaacagcagttaccattcatgttcaacccaatggccatgacgattccacccatgttcttacagcaaccctttgttggtgctgcattctagatagaaatatttgtgttgtatcgaataatgagttgacatgccatcgcgtgtgactcattattaacaataaaacaagtttcctcttattatctttttat

SEQ ID NO: 10927 - DNA, 629 bp, Zea mays
  unsure (1)..(629): unsure at all n locations; Clone ID: LIB3061-115-Q6-K6-B10
tctttgctatatcacagtgacagnaacgatggtgagcgccagnattgttgtcctcctcgccaccctcctatgcgctgccgccgcagtcgcgtcgtcctgggaggacgacaaccaccaccaccacgggggccacaagtccgggcaatgcgtgcggcggtgcgaggaccggccctggcaccagcgcccccggtgcctggagcagtgcagggaggaggagcgggagaagcggcaagagcggagcaggcacgaggccgacgaccgcagcggcgagggctcgtcggaggatgagcgagagcaggagaaggagaaacagaaggaccggcggccgtacgtgttcgaccggcgcagctttcgtcgcgtggtccggagcgagcaggggtccctgagggtgctccggcccttcgacgaggtgtccaggctcctccgcggcatccgggactaccgcgtggcggtcctggaggcgaacccgcgctcgttcgtggtgcccagccacaccgacgcgcactgcatctgctacgtggcggaaggcgagggagtggtgacgacgatcgagaacggcgagaggcggtcatacaccatcaagcaaggccacgtcttcgtggcgccggccggggcggtcacctacctgg

SEQ ID NO: 10928 - DNA, 645 bp, Zea mays
  unsure (1)..(645): unsure at all n locations; Clone ID: LIB3061-115-Q6-K6-B11
tcgtgagttagcactagnacatatgcacgctgaggcccgcaagattaggggcaataaagcaaaggtgaattttccctaatgaaccaccaaacatggtgagcaatgcaccaaaactaattgttactgcagtgactacaatggctatcccagcagacaagttgaatgccaatgaattgatgtgccataaaaactactcaaatgaggattttttctcaatgttgaactttagtggaaacaatggtaactttatttctactgcggcctttggcttacaatgtatcaaaaagcctcgtgttccttatgacatcccaaggatgggtgagtgttcaaatcaaaacagaatgacatatggtttaagtaatggattgggcaatgaagctagtaggaacctgaatggatgctctttcttaccacaagctggcatgccaattttcattcaacctacttttgatggtccttcaaggatgataggaagaaatgatggcgtgattgttcctactttgactaatgcaacacccatggctggtgttgatgctgcgaaaaagagaatcaacaacctattttccaagagatggaaagtgaagatattccttctattttgcaaggtgatgtcagtgaggacgtggcagctgagattagtatgtg

SEQ ID NO: 10929 - DNA, 601 bp, Zea mays
  unsure (1)..(601): unsure at all n locations; Clone ID: LIB3061-115-Q6-K6-B12
ctgaaagccagcagctaaggcgggggcagggaagnacactaacggtgttcccaatggtactgctcacagtaacagtggaactgtaccccttgcgtcgagccaacaaaattcatcactgacgcctgatggaacttatagggcgcccttgctaggtggagttccttctgctgggggcgtggacactttttatgggtatgacagcacaggggcacacttcgcatggtatgatggctctgcttatgcaaatggacaacaaagaacagctacaactaaccattttccatcctcaacatttggtaatggttccccagcaagatatcagaacaagagcaccaccacaccgcagatgggtatgcagaatagaagacctacaactacatcaccagctcctacttatcccaataggatgtaccctagctcccgaccgtacacccagtatgggaattcaataaaaactggccttccctacgggagcaacggttatgattccaggatatatgggcgatggggtcttggtatggataacaggtacaggcctaggggccgtaatggatattatggttatggcaacgagagtcaggatggaacaatcgagttaaac

SEQ ID NO: 10930 - DNA, 658 bp, Zea mays
  Clone ID: LIB3061-115-Q6-K6-B2
cccgtttcgacccagcgtccttcgcgacattttccctcatgctcacagctcctatagcttcccttcttcccccatccttccatcaatgatagcttcagtatgtgaaaacccagctcttcagccctataggctccaacaagcaatcgcagcaagcaacatacctttatcacccttgttgtttcaacaatcgccagccctatctttggtgcagtcattggtacaaaccatcagggcacagcagctgcagcaactcgtgctacctgtgatcaaccaagtagctctggcaaacctttctccctactctcagcaacaacaatttcttccattcaaccaactgtctacactgaaccctgctgcttatttgcagcaacaactattaccattcagccagctagctactgcctactctcagcaacaacaacttcttccatttaaccaattggccgcactgaaccccgctgcttatttgcagcagcaaatactactaccatttagccagctagctgcagcaaaccgtgcttccttcttgacacagcaacagttgctgcctttctaccagcagtttgcggttaaccccgcaacccttttacaactacaacaattgttgccctttgttcaacttgctttgacagaccgagcgggcttctaccaacaacac

SEQ ID NO: 10931 - DNA, 632 bp, Zea mays
  Clone ID: LIB3061-115-Q6-K6-B3
tttctcagcagcaaagccatcagctccaccgtcgtcgtcaccaaggtcggagtgtggggtggagagggagggtcggcgcaggacatcgcgacgacggagccgccgaggcgtctgcagagcctgaccgtccgcgccggcgttgccgtggactccatcgagttcacctacagtaccgacacaggtggtcagacgcgcaccgctgggcgatggggtggacttggcggcaacgtccggaagctcgatcttggcgacgctgaatacgtcaaggaagtttctggaacgtacggcgcattcgaaggtgcgactacccttacctcgttcaggattgtcaccagcaccgccagagcttgggggccatggggcatcgagagcggcacacgtttctgcatcaccgcgcccatcggcagcagcatcgtgggattctatggacgcgcgacgaccaggctcgtcgctgcgatcggtgtctacctgcgccaactttagtctggtttcagcagcaggacgggtactacagatatgctagataaaggtcttatatatgtcatatgacctatcatggtcttatatgttcgatcgtcgtcgtgtctgtatgtacatacatggttgtcaaataaagctctttgcattttgat

SEQ ID NO: 10932 - DNA, 651 bp, Zea mays
  Clone ID: LIB3061-115-Q6-K6-B4
ttaaagcgttcattattccacagtgctcacttgctcctagtgccattattccacagttcctcccaccagttacttcaatgggcttcgaacatccagccgtgcaagcctacaggctacaactagcgcttgcggcgagcgccttacaacaaccaattgcccaattgcaacaacaatccttggcacatctaaccctacaaaccattgcaacgcaacaacaacaacaacaacagtttctgccatcactgagccacctagccgtggtgaaccctgtcacctacttgcaacagcagctgcttgcatccaacccacttgctctggcgaacgtagctgcataccagcaacaacaacagctgcaacagtttatgccagtgctcagtcaactagccatggtgaaccctgccgtctacctacaactactttcatctagcccgctcgcggtgggcaatgcacctacgtacctacaacaacagttgctgcaacaaattgtaccagctctgactcagctagctgtggcaaaccctgctgcctacttacaacagttgcttccattcaaccaactggctgtgtcaaactctgctgcgtacctacaacagcgacaacagttacttaatccattggcagtggctaacccattggtcgctaccttcctgc

SEQ ID NO: 10933 - DNA, 648 bp, Zea mays
  unsure (1)..(648): unsure at all n locations; Clone ID: LIB3061-115-Q6-K6-B5
ttactagcaacatagnaagcacaatagtgtaccaaccaatggcagccaaaaattttgcctccttatgctccttggtctttctgcaagtgctgctacggcgaccattttcccgcaatgctcgcaagctcctatagcttcccttcttcccccgtacctctcaccagcggtgtcttcggtatgtgaaaacccaattcttcaaccctacaggatccaacaggcaatcgcagctggcatcttacctttatcacccttgttcctccaacaatcatcagccctattacaacagttacctttggtgcatttattggcacaaaacatcagggcacaacaactacaacaacttgtgctagcaaaccttgctgcctactctcagcaacagcagtttcttccattcaaccaactaggttcattgaactctgcttcttatttgcaacaacaacaactaccattcagccagctacctgctgcctacccccagcaatttcttccattcaaccaactagcagcattgaactctcctgcttatttacagcagcaacaactactaccattcagccagctagctggtgtgagccctgctaccttcttgacacaaccacagttgttgccgttctaccagcacgttgcgcctaaacgctgcaccctctt

SEQ ID NO: 10934 - DNA, 635 bp, Zea mays
  unsure (1)..(635): unsure at all n locations; Clone ID: LIB3061-115-Q6-K6-B6
tttctggnaaggggtaattccggctcttatcatggttagcaatcccgcaattcagttcatgctatatgagactcttctgaagaaattgaagaagagacgagcctctaattttaagggagctgatggattgactgctcttgaaatttttcttcttggtgctgttgcgaaacttggtgcaaccgtcgttacgtatccccttctagttgttaaggcaagacttcaggcaaagcacatgattaacgatgacaagaggcatcgctacaaaggtacacttgatgcgttcacaaagatggtacgatatgagggtctgtcagggatgtacaaaggaatgggcacaaaaattgtgcaaagtgtttttgcttctgctttgctttttatgattaaggaggagctggtgaagggtgctcgactattggtaactggtaacactagtctggttaagaaactaccatcaaagtcatcaagatgaactacgggcatcgcaagcgttagtatatcatcctaaaaagccatttattatccgcataaaccgtaaacaaggtcgacaagctatagagctcgcctctgctttggatatgtcaactgtaggttacacaatagccagtatgattcacgtagggaccaaagactatgtt

SEQ ID NO: 10935 - DNA, 641 bp, Zea mays
  unsure (1)..(641): unsure at all n locations; Clone ID: LIB3061-115-Q6-K6-B7
ttttcanactgtgcaaaaagctggtgcatggcttgtggttgacaatacctatgagtactttatgtatgatggaatggagcactactgcttagaagatgctcatattgtcaacctcttctcgttctcaaaggcttatggaatgatggggtggcgtgtaggatacattgcatttccaaatgaagctgatggcttccatgatcagctcctcaaggtgcaagacaacataccgatctgcgcctccatcatcgggcagcgcctggcgctctactcgctggaggccggccccgagtggatcaaagaacgggtgaaagacctggtgaaaaaccgggcgctgctggtggaggcactgtccccgctcggcgaggacaacgtcaagggcggggagggcgccatctacctctgggcaaagctaccggacagctgctcggacgacttcgaggctgtcaggtggctcgcgaacaagcacggagtcgccgtgatccccgggagcgccagcggaggacccgggtacatccgcgtctccttcggagggctcaaggaagaggacaccaggctggccgctgagaggctcaggcgcggcctgcaggagctggtgaccgatggaatggtacagtgacggctccatgggtgtaagtaaaact

SEQ ID NO: 10936 - DNA, 119 bp, Zea mays
  unsure (1)..(119): unsure at all n locations; Clone ID: LIB3061-115-Q6-K6-B9
ttgntatttacctataatctgtttcatttgttctaaatataaatagatgtaatttctgaaatcgaaattaaacaaatgaaaggacaggtgcagcagataatgaaacatgtttttcccct

SEQ ID NO: 10937 - DNA, 650 bp, Zea mays
  Clone ID: LIB3061-115-Q6-K6-C1
cccgggtcgccccgcgtccggcaatctcttgtaaactgcgctcgcctttgcgtgttcgtggtccttttgcgctttctcgtccctctttctctcaatctctccttattcttctccttcccggcgaagccggcggctggtatggatcccaatggcctcaaaactggaggccttttgctcccgaccatcgagaggcggtgcacgtcgcctccatccgtcattgtcatcggcggtggcatctcgggcgttgcagctgcccgtgccctctccaattcttcatttaaggtgactgttttggaatcgagagatcgtattggcgggcgcattcatactgataactcgtttggatgcccaattgatatgggagcctcatggctacacggcgtgtgcaatgagaatccactggcaccattgataagctatcttgggctgaggttataccgcacaagcgatgataactcagttctgtatgatcatgatttagaaagctatgctctctttgataaggatggtaatcaggtcccaaaggagacagtcgataaagttggagaaacattcgagagaattcttgaagagacggtgaaagtgcgcgatgagcaggaacacgacatgccactgctacaggcaatttctattgtgtttgagaagcaccc

SEQ ID NO: 10938 - DNA, 460 bp, Zea mays
  Clone ID: LIB3061-115-Q6-K6-C10
ttttctacaacaactcgtgctagcaaacttgctgcctactctcagcaacaacagtttctgccattcaaccaactagctgcattgaactctgctgcttatttgcagcaacaacaactactaccattcagccagctagctgctgcctacccccggcaatttcttccattcaaccaactggcagcattgaactctcatgcttatgtacaacaacaacaactactaccattcagccagctagctgctgtgagccctgctgccttcttgacacagcaacatttgttgccgttctacctgcacactgcgcctaacgttggcaccctcttacaactgcaacaattgctgccattcgaccaacttgctttgacaaacccagcagtgttctaccaacaacccatcattggtggtgccctcttttagattgcttatgagttatagttcaataataaagttttttttgctg

SEQ ID NO: 10939 - DNA, 666 bp, Zea mays
  unsure (1)..(666): unsure at all n locations; Clone ID: LIB3061-115-Q6-K6-C11
natcgagcatgatgttttattttatgtcaaattccacagtgagcgcctgggcgatgattgtctcacaaattatcagaggttcttgacttctctgggcatgttgctccagcggagaagtatcctggcagtttactagaaggtttctctggtgttcaagttagcacacttgctgtgaatgagggtttggtggtagctggcgggtttcaaggagaactaattggcaaagatgtggaaggctgtagtgtaaaattctgtatgaggacaactttgagtgacaatgccataacaaatgccatagatatacacagatcgataagtggaagcctgcacattacagtatctaacaacgattgtggtgttcgtgaatatgatatggagagatatcagctcgtgaaccactaccgatataactggccggttaatcacacatccgtgagcccagataagaaacttttggctgtggttggagatgatcgagatgctcttcttgtggattcacgaaatggaaaggtaacctctaccctagttggccatctggactactcatttgctacggcatggcacccggacagccggacattcgcgaccgggaaccaggacanaacctgccgcatctgggacacccgcaacttgtcgacctcacttgcagtactgcggggcaacatc

SEQ ID NO: 10940 - DNA, 515 bp, Zea mays
  Clone ID: LIB3061-115-Q6-K6-C12
ggggggagctaaaatattttgcctccttatgctccttggtctttctgcaagtgctgctacggcgaccattttcccacaatgctcacaagctcctatagcttcccttcttcccccgtacctctcaccaacggtgtcttcggggggggggggcccttttctcatttttacaggatccaacaggcaatcgcagctggcatcttacctttatcacccttgttcctccaacaatcatcagccctattacagcagttacctttggtgcatttattggcacaaaacatcagggcacaacaactacaacaacttgtgctagcaaaccttgctgcctactctcagcaacagcagtttcttccattcaaccaacttgctttgacaaacccagcagcattctaccaacaacccatcattggtggggccctcttttagatttcttatgagttatagttcaataataaagttttttgtctgatgtttgtggcttcccagaaataagaaagtacatttctagattctta

SEQ ID NO: 10941 - DNA, 330 bp, Zea mays
  unsure (1)..(330): unsure at all n locations; Clone ID: LIB3061-115-Q6-K6-C2
cgtccggtgtctcctccccctcttatcaacccctcctcgggttagggttccttagggttttgtggaggggcgatggcggcggctgatgtggagtaccgttgcttcgtcggcggacttgcctgggccaccagcaacgagtcgctggagaatgccttttttttttatggtgagatcctcgacgtgcggggggtgaccgaccgggagacggggaggtcccgggggttggggtggggtaccttctnctccgagaactccatgctcgacgctatngagaacatgaacggnaaggagctnganggncgnaacatgancggtaaccaggcccagttc

SEQ ID NO: 10942 - DNA, 497 bp, Zea mays
  unsure (1)..(497): unsure at all n locations; Clone ID: LIB3061-115-Q6-K6-C3
tttacactacaacaacttgtgctagcaaaccttgctgcctactctcagcaacagcagtttcttccattcaaccaactagctgcattgaactctgcttcttatttgcaacaacaacaactaccattcagccagctatctgctgcctacccccagcaatttcttccattcaaccaactgacaggattgaactctcctgcttatttacagcagcaacaactactaccattcagccagctagctggtgtgagccctgctaccttcttgacacaaccacagttgttgccgttctaccagcacgctgcgcctaacgctggcaccctcttacaactgcaacaattgctgccattcaaccaacttgctttgacaaacccagcagcattctaccaacaacccatcattggtggtgccctcttttagatttcttatgagttatagntcaataataaagttttttgtctgatgtttgtggcttcccagaaataagaaagtacatttct

SEQ ID NO: 10943 - DNA, 646 bp, Zea mays
  Clone ID: LIB3061-115-Q6-K6-C4
tttcgctctcctggctctcgctgcgagcgccacctccacgcatacaagcggcggctgcggctgccagccaccgccgccggttcatctaccgccgccggtgcatctgccacctccggttcacctgccacctccggtgcatctcccaccgccggtccacctgccgccgccggtccacctgccaccgccggtccatgtgccgccgccggttcatctgccgccgccaccatgccactaccctactcaaccgccccggcctcagcctcatccccagccacacccatgcccgtgccaacagccgcatccaagcccgtgccagctgcagggaacctgcggcgttggcagcaccccgatcctgggccagtgcgtcgagttcctgaggcatcagtgcagcccgacggcgacgccctactgctcgcctcagtgccagtcgttgcggcagcagtgttgccagcagctcaggcaggtggagccgcagcaccggtaccaggcgatcttcggcttggtcctccagtccatcctgcagcagcagccgcaaagcggccaggtcgcggggctgttggcggcgcagatagcgcagcaactgacggcgatgtgcggcctgcagcagccgactccatgcccctacgctgctgccggcggtgtcccc

SEQ ID NO: 10944 - DNA, 672 bp, Zea mays
  Clone ID: LIB3061-115-Q6-K6-C5
cccgggttcgcccacgcgtccgtcgtcaacccgtcgccactcaacataaacgtcttgacctctctgctcgccgccggcgaggagacagtagcccgccgctgcacgcacgcgccgcgaggaggtctggagcggctagctcgtctagagctaagtcagcgaatctcccggaccgtcccttctcagttctcatggccgtccgccgcaggcccgcggctgctgctgccggggacctgcctccgcaggcgccaccggcagatgcagcgccgacgccggcgccagacgaactggtcctccggccgccaaacctccgcgtggccgctgtggcggcggtgctcttcctcgcgcccttctcttatctctcgttcgtgcgctaccgcttgggcgccgatctgcagcgatccatcttaaaatgcggcgccatgagcctcattgggttctgcgtcgcgctcaagctcatccctgtcgcggccagctaccacctccgccgccggatgttcggctacgacatcaacaagaaaggcttgcccacgggccaaattaaagtgcctgaagcactaggtcttgttgtggggattatctacttggtcattgctattatatttcagcagtttcactatgccccagactccatttggcttgttgaatataatgcagcgttggcatcagtctgtt

SEQ ID NO: 10945 - DNA, 647 bp, Zea mays
  Clone ID: LIB3061-115-Q6-K6-C6
cattaaacacaccaagcgaactacctagcaacgacttaacaacaatggctaccaagatattagccctccttgcgcttcttgccctttttgtgagcgcaacaaatgcgttcattattccacaatgctcacttgctcctagtgccattataccacagttcctccgaccagttacttcaatgggcttcgaacacctagctgtgcaagcctacaggctacaacaagcgcttgcggcgagcgtcttacaacaaccaattaaccaattgcaacaacaatccttggcacatctaaccatacaaaccatcgcaacacaacagcaacaacagttcctaccagcactgagccaactagatgtggtgaaccctgtcgcctacttgcaacagcaggtgcttgcatccaacccacttgctctggcaaacgtagctgcataccaacaacaacaacaattgcaacagtttctgccagcgctcagtcaactagccatggtgaaccctgccgcctacctacaacagcaacaactgctttcatctagccctctcgttgtgggtaatgcacctacatacctgcaacaacaattgctgcaacagattgtaccagctctgactcagctagctgtggcaaaccctgctgcctacttgcaacagctgctt

SEQ ID NO: 10946 - DNA, 648 bp, Zea mays
  unsure (1)..(648): unsure at all n locations; Clone ID: LIB3061-115-Q6-K6-C8
tttacatagnaagcacatagtgtaccaacaatggcagctaaaaattttgcctccttatgctccttggtctttctgcaagtgctgctacggcgaccattttcccacaatgctcacaagctcctatagcttcccttcttcccccgtacctctcaccaacggtgtcttcggtatgtgaaaacccaattcttcaaccctacaggatccaacaggcaatcgcagctggcatcttacctttatcacccttgttcctccaacaatcatcagccctattacagcagttacctttggtgcatttattggcacaaaacatcagggcacaacaactacaacaacttgtgctagcaaaccttgctgcctactctcagcaacagcagtttcttccattcaaccaactagctgcattgaactctgcttcttatttgcaacaacaacaactaccattcagccagctatctgctgcctacccccagcaatttcttccattcaaccaactgacagcattgaactctcctgcttatttacagcagcaacaactactaccattcagccagctagctggtgtgagccctgctaccttcttgacacaaccacagttgttgccgttctaccagcacgctgcgcctaacgctggcaccctcttacaactgc

SEQ ID NO: 10947 - DNA, 580 bp, Zea mays
  Clone ID: LIB3061-115-Q6-K6-D1
cgtcctgttcagtagtaagttcaccttagtgagctcaagtagtttgtatacatgtttgatcaatgttgatgtctacttctcttgctaaatcgattcccctcctatttgtccatatatttatgcatgcagattaactgaaaaatattccatcattgaagatgagttccattgttttgggtgctactagtagggagaataagacatcatggcctgaggtggtgggcatgtccatcaaggaggcaagagagatcattcttaaagacttgcccaacgctaacattcaagttctaccggttggctcagttgtgacccaggattttcgccctgaccgtgttcgcatcttcgttgatattgttgcccaggctccaacagttggctgacaaggagattccttatctataggccaaataaacaaagcctacttttatgtatcatggctaataaaacctacatttcttggttatccttgattggtttagcttattagctatatcaccatcaaaaggaggaccgagaaattccatgtatgtctatcatacaaatatcatcctgatggaatatataataaataagtaatgat

SEQ ID NO: 10948 - DNA, 646 bp, Zea mays
  Clone ID: LIB3061-115-Q6-K6-D10
cccagcgttcgtgtgcctcagctcacaaacaccttcttcagtccatcaacatcattcatcttagtagtataggcaccaaacaaactgcacatcaattatctaactccaaaaccatgaagctggtgcttgtggttcttgctttcattgctttagtatcaagtgtttcttgtacacagacaggcggctgcagttgtggtcaacaacaaagccatgagcagcaacatcatccacaacaacatcatccacaaaaacaacaacatcaaccaccaccacaacatcaccagcagcagcaacaccaacaacaacaagttcacatgcaaccacaaaaacatcagcaacaacaagaagttcatgttcaacaacaacaacaacaaccgcagcaccaacaacaacaacaacaacaacagcaccaacaacaacatcaatgtgaaggccaacaacaacatcaccaacaatcacaaggccatgtgcaacaacacgaacagagccatgagcaacaccaaggacagagccatgagcaacaacatcaacaacaattccagggtcatgacaagcagcaacaaccacaacagcctcagcaatatcagcagggccaggaaaaacacaacagcaacaatgtcattgccaggagcagcaacagactaca

SEQ ID NO: 10949 - DNA, 635 bp, Zea mays
  unsure (1)..(635): unsure at all n locations; Clone ID: LIB3061-115-Q6-K6-D11
ttttacatagnaagcacaatagtgtaccaacaatggcagccaaaaattttgcctccttatgctccttggtctttctgcaagtgctgctacggcgaccattttcccgcaatgctcgcaagctcctatagcttcccttcttcccccgtacctctcaccagcggtgtcttcggtatgtgaaaacccaattcttcaaccctacaggatccaacaggcaatcacagctggcatcttacctttatcacccttgttcctccaacaatcatcagccctattacatcagttacctttggtgcatttattggcacaaaacatcagggcacaacaactacaacaacttgtgctagcaaaccttgctgcctactctcagcaacagcagtttcttccattcaaccaactagctgcattgaactctgcttcttatttgcaacaacaacaactaccattcagccagctacctgctgcctacccccagcaatttcttccattcaaccaactggcagcattgaactctcctgcttatttacagcagcaacaactactaccattcagccagctagctggtgtgagccctgctaccttcttgatacaaccacagttgttgccgttctaccagcacgctgcgcctaacgctggca

SEQ ID NO: 10950 - DNA, 548 bp, Zea mays
  unsure (1)..(548): unsure at all n locations; Clone ID: LIB3061-115-Q6-K6-D12
ctcatgatctctgcgcctctgggggggcgggggccgaagctgccgccgggggttcgttcctgctcggcgcgtcctccgtcgagtccaatcccaatcccaagctcaagcccagcagggtccgctgcgccgccgccgccgccgccacgctgtacgaggtccttggcctgcgggcgggggcgagttttttttttatcaagccgcgtaccggcgcctggcgcgggagcggcacccggacgtggcgcacgcgcccggggccgccgccgagttcgcccgcctgcacgacgcctacgccacgctctccgacccggacagccgcgcgcgctacgacggcggcggcgccgcgcccgcggcggcggtggcgaggcgcccctggagcggcgccgtctacggccggccccgacgccgcacatgggagacggaccagtgctggtngtagagagtagagaggcacagccaaaagccccacgcgcttcttgtcttgctgtataatatttagacctcctgcccccagccatgcgggcatggccgggtcaccttggacttttttt

SEQ ID NO: 10951 - DNA, 388 bp, Zea mays
  unsure (1)..(388): unsure at all n locations; Clone ID: LIB3061-115-Q6-K6-D2
gggggggggggggggggnngnntggtggtggggtgtggtgtttgtggtgtgtgtggttgttggtgtgtggtgtggtgtgtttgttggggtgtttngggggctgggctggggnggngntgttttttttttttttgttnnnnttgttggggggggggggagggttttttttttttngnngnggtgngnggggggggggtggttggtttttgtgttttttgtgtggtggggggggtggngtgggggttggtgtgtgtgtggggttggtgtggtttgtgtttgttgtgtggggtgtgtgttggtttggggtgttggggttggtgtggtgggngttggttttttttgtttggggtgggggggggggggggggggggggggggggggggggggg

SEQ ID NO: 10952 - DNA, 563 bp, Zea mays
  unsure (1)..(563): unsure at all n locations; Clone ID: LIB3061-115-Q6-K6-D4
tcccggtgtcgcccagcgtcctgttgtgagccctgctaccttcttgccacaaccacagttgttgccgttctaccagcacgttgcgcctaacgctggcaccctcttacaactgcaacaattgctgccattcaaccaacttgctttgacaaacccagcagtgttctaccaacaacccatcattggtggtgccctcttttagatttcttatgagttatagttcaataataaagttttttatctgatgtttgtggcttcccagaaataagaaagtacatttctagattaaaaaaaaaaaaaaaaaaaaaaaaaaaaaaaaaaaaaaaaaaaaaaaaaaaaaaaaaaaaaaaaaaaaaaaaaaaaaaaaaaaaaaaaaaaaaaaaaaaaaaaaaaaaaaaaaaaaaanaaaaaaaaaaaaaaaaaaaaaaaaaaaaaaaatnnaaaaaaaaaaaaaaaaaaaaagggggggcggttttaaaaaaaacaaaattttaaaccgggggtttgaaaaaaaaaatttttttttttggggcccaaaaaaaaaaaaatgggggcgggtttttaaa

SEQ ID NO: 10953 - DNA, 111 bp, Zea mays
  Clone ID: LIB3061-115-Q6-K6-D5
tcgtaaaaaaaaaaaaaaaaaaaaaaaaaaaaaaaaaaaaaaaaaaaaaaaaaaaaaaaaaaaaaaaaaaaaaaaaaaaaaaaaaaaaaaaaggggcgggccgttttaaga

SEQ ID NO: 10954 - DNA, 670 bp, Zea mays
  unsure (1)..(670): unsure at all n locations; Clone ID: LIB3061-115-Q6-K6-D6
tattaaacggcagtgcgtagaaaggatcgtcgaacagaacagcatgaagatggtcatcgttctcgtcgtgtgcctggctctgtcagctgccagcgcctctgcaatgcagatgccctgcccctgcgcggggctgcagggcttgtacggcgctggcgccggcctgacgacgatgatgggcgccggcgggctgtacccctacgcggagtacctgaggcagccgcagtgcagcccgctggcggcggcgccctactacgccgggtgtgggcagccgagcgccatgttccagccgctccggcaacagtgctgccagcagcagatgaggatgatggacgtgcagtccgtcgcgcagcagctgcagatgatgatgcagcttgagcgtgccgctgccgccagcagcagcctgtacgagccagctctgatgcagcagcagcagcagctgctggcagcccagggtctcaaccccatggccatgatgatggcgcagaacatgccggccatgggtggactctaccagtaccagctgcccagctaccgcaccaacccctgtggcgtctccgctgccattccgccctactactgattcatgatatttgggaaatctcctctatccatctctctctatctatatatgnaataatgcagtaagacgacacacattatcatgtgtggg

SEQ ID NO: 10955 - DNA, 613 bp, Zea mays
  unsure (1)..(613): unsure at all n locations; Clone ID: LIB3061-115-Q6-K6-D7
tttctcaacgcaaatgcaccaagnaaaccatcgagaggccgtcgacaggggaattaatggcgtcgtcgtctagcagcagccaccgccgcctcatcctcgcagccgccgtcctgctctccgtgctcgcggctgccagcgccagcgccgggacctcctgcgtgccggggtgggccatcccgcacaacccgctcccgagctgccgctggtacgtgaccagccggacctgcggcatcgggccgcgcctcccgtggccggagctgaagaggagatgctgccgggagctggcggacatcccggcgtactgccggtgcacggcgctgagcatcctcatggacggcgcgatcccgccgggcccggacgcgcagctggagggccgcctagaggacctgccgggctgcccgcgggaggtgcagaggggattcgccgccaccctcgtcacggaggccgagtgcaacctggccaccatcagcggcgtcgccgaatgcccctggattctcggcggcggaacgatgccctccaagtaactgcgaagagcatagtgcatgaggaatgagcttgtagctagctcatatgtctgaataataagcacagcaagaagatgaatgcatttctc

SEQ ID NO: 10956 - DNA, 332 bp, Zea mays
  unsure (1)..(332): unsure at all n locations; Clone ID: LIB3061-115-Q6-K6-D8
gggggggggggcgggcgaaaacaaggggggggggggggctgggcaaggaggagggagcaaggggggcccgggaccgaagggggattgangggagggggcaggccaagtaggggcaaaaaaagaagnangaaaaaaccnaaccccggggtannagaacgggtgatttttttttttctacaagaaaaggggncgaaggaaggaggggagcatggggaggggaagctgntcccgctgggcagagtgatgtggtgctgtggacgctgacgctgacggcctccttggtgtggctgaccgtggttacgttggtgttgctgatatttatacccggctgg

SEQ ID NO: 10957 - DNA, 637 bp, Zea mays
  unsure (1)..(637): unsure at all n locations; Clone ID: LIB3061-115-Q6-K6-E10
ttttgttgcatttgcgcagcgcaaanaanatagaaagcgatgttgcaggcacagttttctcagatgcgccctgctgtaccaatgacacccactctagccccgcgccttccaatgtaccctcctatggctcctcagcaactcttctatggacaagcgccacctgctatgataccccctcagccaggatttggtttccagcaacaacttgttccaggcatgaggcctgggggtcctcatatgccaaattattttgttccagttgtccaacaccaacagggccaacagggtccacgcccaggtattaggcgtggagctggagcccagggtcagcaacctgtgccaccatttcagcagcagattgttccaagaggacggatgtaccgttacccaactggtcgcaacatgcctgaagctccggcgatgccaggggttgctggaggtatgatgcaggcatacgatatgggcggcttccctgtgagggatgctgccttatccccggctgcccaaattgggactctgacttctgcccttgcaaatgctaatcctgaacagcaaagaacgatccttggtgaaaacctatacccactggttgagcaactggaaccaaaccaagcggcaaagtcactggaatgctttt

SEQ ID NO: 10958 - DNA, 466 bp, Zea mays
  Clone ID: LIB3061-115-Q6-K6-E11
ttttatttcttccattcaaccaactgtctacactgaaccctgctgcttatttgcagcaacaactattaccattcagccagctagctactgcctactctcagcaacaacaacttcttccatttaaccaattggccgcactgaaccccgctgcttatttgcagcagcaaatactactaccatttagccagctagctgcagcaaaccgtgcttccttcttgacacagcaacagttgctgcctttctaccagcagtttgcggctaaccccgcaaccctcttacaactacaacaattgttgccctttgtccaacttgctttgacagaccgagcggcctcctaccaacaacacatcattggtggtgccctcttttagattgcttattagttgtaattcaataataaagttttttggatgatgtatgtggccaaccagaaataagaagttacatttccagattttaatgtgat

SEQ ID NO: 10959 - DNA, 603 bp, Zea mays
  unsure (1)..(603): unsure at all n locations; Clone ID: LIB3061-115-Q6-K6-E2
cccgtttcgacccagcgtccgtttacaagcaccacacgaggatgcgcagatgataataaaaggtcgatttccagttccaagactagttgtctgtgaccaacatggctcacaggcaaggtttttgttggctaagctgaatccatcggccacatataactcagctcatgatgttgctccaggttccgacatcattttcaccgatgatgttagcttcctggtcttctgtgagcacctacaaaggctggctgttcagtcttaaggacctgtatgcaatagttgtacaccctattggatagttgctgataattcattaggctcttaggttggacttgttagaaaatctcccttttttgttcctctttgcccacagttttctgaggccagactatttttcgggaaacagtcctaaaggaaggtgtaaattgccccggaggtctggtatctgcatactatttatgttgacatcgcccagcttttcttgtggaaagtcatttgggcagcttaggcaattatcctttcaggcacgtgagtttgtaaatgtgacatngtggacacttgacatgctcttcgacatttgattttacagctaacttattcagaggg

SEQ ID NO: 10960 - DNA, 609 bp, Zea mays
  unsure (1)..(609): unsure at all n locations; Clone ID: LIB3061-115-Q6-K6-E4
ttttctccagccgtttgctggctgngaaaccgcggcaagatccctgcgacatgctgtcccgngacaccacttacgccgcctacatggtgttcaagatgtccgacgaatcctatgggctggactatccgctccaggaggctgaagttagcatcggggcaaccaggtccactcgtcaggtctgcctagggtacgtcgacgacgacgaggacggggaagaggtgcctcagaactaccggtcgttcggggcggtgggaaatgtatttagaccaaggatcgggaggcggaaccgtcgccagcctcctggagtgcacgtcctgcaccctcagacaagagccggcggctggatggagatggagatgggtgagttcaggaacgaggaaggtgaagatggcgaggtgtccgtcagcctcatggagaccaggggcggcaactggaagagaggtcttactgtgcagggcattgagatcagggtgaagaagtaaggatgtgaaggttgtggggatcgggctttgcgcatcaaaacaaataaaaggatcttagttagatttgtagtgcgtgttctactgcactgcagcacttgcgtatgtgtgtgtcttgcctatgcccagc

SEQ ID NO: 10961 - DNA, 591 bp, Zea mays
  Clone ID: LIB3061-115-Q6-K6-E5
ttgttctttcaacaatcgccagccctatctttggtgcagtcattggtacaaaccatcagggcagaacagttgcagcaactcgtgctaccagtgatcagccaagtagctctggcaaacctttccccctactctcagcaacaacaatttcttccattcaaccaactgtctatactgaaccctgctgcttatttgcagcaacaacaactactaccattcagccagctagctactgcctactctcagcagcaacaatttcttccatttaaccaattggccgcactgaacccctctgcttatttccagcagcaaatactactaccatttggccagctagctacaacaagccccgcttccttcttgacacaacaacaagtgcttccgttctaccagcagtttgtggctaaccccgcaaccctcttacaactgcaacagttgctgccctttgtccaacttgctttgacaaacccagcagccttctaccaacaacacatcattggcggtgccctcttttagattgcttattagttgtaattcaataatgaagttttttggctgatgtatgtggcctcctagaataagaattatatttcc

SEQ ID NO: 10962 - DNA, 623 bp, Zea mays
  Clone ID: LIB3061-115-Q6-K6-E6
gtttcttggtctttctgcaagtgctgctacggcgaccattttcccacaatgctcacaagctcctatagcttcccttcttcccccgtacctctcaccaacggtgtcttcggtatgtgaaaacccaattcttcaaccctacaggatccaacaggcaatcgcagctggcatcttacctttatcacccttgttcctccaacaatcatcagccctattacagcagttacctttggtgcatttattggcacaaaacatcagggcacaacaactacaacaacttgtgctagcaaaccttgctgcctactctcagcaacagcagtttcttccattcaaccaactagctgcattgaactctgcttcttatttgcaacaacaacaactaccattcagccagctatctgctgcctacccccagcaatttcttccattcaaccaactgacagcattgaactctcctgcttatttacagcagcaacaactactaccattcagccagctagctggtgtgagccctgctaccttcttgacacaaccacagttgttgccgttctaccagcacgctgcgcctaacgctggcaccctcttacaactgcaacaattgctgccattcaaccaacttgctttga

SEQ ID NO: 10963 - DNA, 432 bp, Zea mays
  unsure (1)..(432): unsure at all n locations; Clone ID: LIB3061-115-Q6-K6-E7
tttacnaacaactgctttcatctagcccgctcgctgtggccaatgcacctacatacctgcaacaagaattgttgcaacagattgtaccagctctaactcagctagctgtggcaaaccctgttgcctacttgcaacagctgcttccattcaaccaactaactatgtcgaactctgttgcgtacctacaacagcgacaacagttacttaatccattggcagtggctaacccattggtcgctgccttcctacagcagcaacaattgctgccatacaaccggttctctttgatgaatcctgtcttgtcgaggcagcaacccatcgttggaggtgccatcttttagattacatatgagatgtactcgataatggtgccctcataccggcatgtgtttcctagaaataatcaatatattggttgagatttatctcgat

SEQ ID NO: 10964 - DNA, 641 bp, Zea mays
  Clone ID: LIB3061-115-Q6-K6-E9
ttcctacaggaccacaggcaatcgcaacaggcatcttaccattatcacccttgttcctccaacaaccgtcagccctattacagcagttacctttggtccatttggtggcacaaaacatcagggcacaacaactacaacaacttgtgctagcaaaccttgctgcatactctcagcaacatcagtttcttccattcaaccaactggctgcattgaactctgctgcttatttgcaacaacaattaccattcagccagctagttgctgcctacccccagcaatttcttccattcaaccaactagcagcattgaactctgctgcttatttacagcagcaacaactactaccattcagccagctagctgatgtgagccctgctgccttcttgacacaacaacagttgttgccgttctacctgcacgctatgcctaacgctggcaccctcttacaactgcaacaattgctgccattcaaccaacttgctttgacaaacccaacagtgttctaccaacaacccatcattggtggtgccctcttttagattgcttatgagttatagttcaataatgaagttttttggatgatgtttgtggcgtcccagaaataagaagtacatttctaaaaaaaaaaaaaaggcggccgc

SEQ ID NO: 10965 - DNA, 397 bp, Zea mays
  Clone ID: LIB3061-115-Q6-K6-F1
gtttgatggacgtgcagtccgtcgcgcagcagctgcagatgatgatgcagcttgagcgtgccgctgccgccagcagcagcctgtacgagccagctctgatgcagcagcagcagcagctgctggcagcccagggtctcaaccccatggccatgatgatggcgcagaacatgccggccatgggtggactctaccagtaccagctgcccagctaccgcaccaacccctgtggcgtctccgctgccattccgccctactactgattcatgatatttgggaaatctcctctatccatctctctctatctatatatgtaataatgcagtaagacgacacacattatcatgtgtggtatgaccaataatatatgcatggtcataataaagttttggttttaatg

SEQ ID NO: 10966 - DNA, 642 bp, Zea mays
  Clone ID: LIB3061-115-Q6-K6-F10
tagcaacatagcaaagcacaatagtgtaccaacaatggcagccaaaaattttgcctccttatgctccttggtctttctgcaagtgctgctacggcgaccattttcccgcaatgctcgcaagctcctatagcttcccttcttcccccgtacctctcaccagcggtgtcttcggtatgtgaaaaacccaattcttcaaccctacaggatccaacaggcaatcacagctggcatcttacctttatcacccttgttcctccaacaatcatcagccctattacatcagttacctttggtgcatttattggcacaaaacatcagggcacaacaactacaacaacttgtgctagcaaaccttgctgcctactctcagcaacagcagtttcttccattcaaccaactagctgcattgaactctgcttcttatttgcaacaacaacaactaccattcagccagctacctgctgcctacccccagcaatttcttccattcaaccaactggcagcattgaactctcctgcttatttacagcagcaacaactactaccattcagccagctagctggtgtgagccctgctaccttcttgatacaaccacagttgttgccgttctaccagcacgctgcgcctaacgctggcaccct

SEQ ID NO: 10967 - DNA, 135 bp, Zea mays
  unsure (1)..(135): unsure at all n locations; Clone ID: LIB3061-115-Q6-K6-F11
gtggtttggctgatgaaaaagccgggggggggggggggggggaaaaaanaaaggggggagagangagaaaagaagggagggcaaaggggggaagagagagtgaggtaaagagataagagggggaaggagggaaca

SEQ ID NO: 10968 - DNA, 656 bp, Zea mays
  Clone ID: LIB3061-115-Q6-K6-F2
ttttcgcaagctcctatagcttcccttcttcccccgtacctctcaccagcggtgtcttcggtatgtgaaaacccaattcttcaaccctacaggatccaacaggcaatcgcagctggcatcttacctttatcacccttgttcctccaacaatcattagccctattacaacagttacctttggtgcatttattggcacaaaacatcagggcacaacaactacaacaacttgtgctagcaaaccttgctgcctactctcagcaacagcagtttcttccattcaaccaactaggttcattgaactctgcttcttatttgcaacaacaacaactaccattcagccagctacctgctgcctacccccagcaatttcttccattcaaccaactagcagcattgaactctcctgcttatttacagcagcaacaactactaccattcagccagctagctggtgtgagccctgctaccttcttgacacaaccacagttgttgccgttctaccagcacgttgcgcctaacgctggcaccctcttacaactgcaacaattgctgccattcaaccaacttgctttgacaaacccagcagtgttctaccaacaacccatcattggtggtgccctcttttagatttcttatgagttatagttcaataataa

SEQ ID NO: 10969 - DNA, 209 bp, Zea mays
  Clone ID: LIB3061-115-Q6-K6-F3
agcgtcctgtgacaataatgcatcgcgtctgtcagacagcggaatgcatgagtagctactgtagtaaaaaaaaaaaaaaaaaaaaaaaaaaaaaaaaaaaaaaaaaaaaaaaaaaaaaaaaaaaaaaaaaaaaaaaaaaaaaaaaaaaaaaaaaaaaaaagggcggtttttttttaaagaacccaagtttaacggcggggggcaggcaa

SEQ ID NO: 10970 - DNA, 214 bp, Zea mays
  unsure (1)..(214): unsure at all n locations; Clone ID: LIB3061-115-Q6-K6-F4
gtcctcttttagnatgcttatgagttatagttcaataatgaagttttttttaagaatctagaagagtactttcttatttctgggacgccacaagcatcatccaaaaaacaaaattgttgaaccgttactcatgagccaatcttaacgagggcatgcctgcgtaggtcagacctgggggtgtggggggcgggactttcttttgtttggggcgttc

SEQ ID NO: 10971 - DNA, 648 bp, Zea mays
  unsure (1)..(648): unsure at all n locations; Clone ID: LIB3061-115-Q6-K6-F5
tttcttcntgagtcgtcctcttcttcccgtcgcttcgccgtgccgcacctgcgaggagaggagacttcgccgcgaagctcgccatgatctcgccggagaggagctcgtcacagagccagcggtcgccggcggcgggggcgccgttcctctcgatctccgtcacggatcccgtaaagatgggtaccggcgtgcagtcctacatctcctaccgcgtcatcaccaagaccaacctccctgaatttgagggaccagagaaaattgttattcggcgctatagtgattttgaatggttgcatgatcggcttgctgggaggtacaaaggcatttttataccccctcttccggagaagaatgctgttgagaaattccggtttagcaaggagttcattgaattgcggcgtcaagctctggatttattcgttaacaggatagcttcacaccctgaactcaagcaaagtgatgtcttgaggacatttttgcaagcagatgaagagataatggatagggcaagatcttatgagactggtatttttaagaaaccggcagatttcatacagatgtttaaggatgtgcagtcaaaagtcagtgatgttgttcttggaaaagaaaacctgtgngaggaatctactcctgatatgagaagcttaa

SEQ ID NO: 10972 - DNA, 639 bp, Zea mays
  Clone ID: LIB3061-115-Q6-K6-F6
tgtttaagcctaattgcaattcatgtccaatgagagctgaatgtaagcactttgctagtgcatttgcaagtgctaggcttgctcttcctgcacctgaagaaaaagtttggttacattggaagatccaaatgttgtagagttttctcaccaaacatacataaactcagggagtgttggccaacttgagtggagtgcaaattatcctaaacatgctgtttctggtaatcatcagccaatcatcgaggaaccactgagcccagaatgtgaaactgaaaatatagaggcacatgagggtgcaattgaggatttcttttgtgaagaatctgatgaaattcctaccattaatcttaatatcgaggagttcacacaaaacttgaaggactatatgcaagcaaacaatgttgagattgaatatgctgacatgtcaaaggcattggttgccatcacgcctgatgctgcttccattccaactccaaagctcaagaatgtcaatcgtctgaggacagaacaccaagtttatgaactgccagattcacaccctcttctggaaggattcgaacagagagaaccagatgatccctgtccatatcttctttccatatggaccccaggtgaactgcacaatcgatcgatgccccc

SEQ ID NO: 10973 - DNA, 660 bp, Zea mays
  Clone ID: LIB3061-115-Q6-K6-F7
tttcgacaccatgagggtgttgctcgttgccctcgctctcctggctctcgctgcgagcgccacctccacgcatacaagcggcggctgcggctgccagccaccgccgccggttcatctaccgccgccggtgcatctgccacctccggttcacctgccacctccggtgcatctcccaccgccggtccacctgccgccgccggtccacctgccaccgccggtccatgtgccgccgccggttcatctgccgccgccaccatgccactaccctactcaaccgccccggcctcagcctcatccccagccacacccatgcccgtgccaacagccgcatccaagcccgtgccagctgcagggaacctgcggcgttggcagcaccccgatcctgggccagtgcgtcgagtttctgaggcatcagtgcagcccgacggcgacgccctactgctcgcctcagtgccagtcgttgcggcagcagtgttgccagcagctcaggcaggtggagccgcagcaccggtaccaggcgatcttcggcttggtcctccagtccatcctgcagcagcagccgcaaagcggccaggtcgcggggctgttggcggcgcagatagcgcagcaactgacggcgatgtgcggcctgcagcagccgactccatgcccctacgctgc

SEQ ID NO: 10974 - DNA, 656 bp, Zea mays
  Clone ID: LIB3061-115-Q6-K6-F9
tgttctaacggcagtgcgtagagaggacgtcgaacagaacagcatgaagatggtcatcgttctcgtcgtgtgcctggctctgtcagctgccagcgcctctgcaatgcagatgccctgcccctgcgcggggctgcagggcttgtacggcgctggcgccggcctgacgacgatgatgggcgccggcgggctgtacccctacgcggagtacctgaggcagccgcagtgcagcccgctggcggcggcgccctactacgccgggtgtgggcagccgagcgccatgttccagccgctccggcaacagtgctgccagcagcagatgaggatgatggacgtgcagtccgtcgcgcagcagctgcagatgatgatgcagcttgagcgtgccgctgccgccagcagcagcctgtacgagccagctctgatgcagcagcagcagcagctgctggcagcccagggtctcaaccccatggccatgatgatggcgcagaacatgccggccatgggtggactctaccagtaccagctgcccagctaccgcaccaacccctgtggcgtctccgctgccattccgccctactactgattcatgatatttgggaaatctcctctatccatctctctctatctatatatggaataatgcagtaagacgacacaca

SEQ ID NO: 10975 - DNA, 642 bp, Zea mays
  unsure (1)..(642): unsure at all n locations; Clone ID: LIB3061-115-Q6-K6-G10
ttttacactctctctaccgtccgataccccaagcaccagcgcggcggcggcgaccatgggnctgtcggaaagaacaagaggatctccanagggaaagaagggtggcaagaaaaagacgtcgaccctttctctaagaaggattggtatgacatcaaggcaccgtcggtgttcagtgtgcgcaacatcgggaagactctcgtatccaggacacagggtaccaggattgcttctgagggtctgaagcacagagtctttgaggtttgcctagctgatcttcagggcgacgaggatcaagcttacaggaaaatcaggctccgtgctgaagatgtgcagggcaggaatgtgctcacaaacttttggggtatgaattttaccactgataaactgagatccctagtgaagaagtggcagacattaatcgaagcccatgttgatgtcaagacaaccgacaactacatgttgcgtttgttctgcatcggcttcacgaagaggcgcccaaaccaggtcaagagaacctgctatgctcaggcatcccagatccgtcagatccgccgtaagatggttgagattatgatcaaccaggcttctacatgtgacctgaaagacttgtttcgaagttattccagaattattggtaaggag

SEQ ID NO: 10976 - DNA, 643 bp, Zea mays
  unsure (1)..(643): unsure at all n locations; Clone ID: LIB3061-115-Q6-K6-G11
tttcacaccaagcgaacgcactagcaacggcctagcgagcatggctaccaagnaattagccctccttgcgcttcttgccctttttgtgagcgcaacaaatgcgttcattattccacaatgctcacttgctcctagtgccattattccacagttcctcccaccagttacttcaatgggctgggaacacctagctgtgcaagccaacatgcaacaacaagcgcttgcggcgagcgtcttacaacaaccaattgcccaattgcaacaacaatccttgccacatctaacaatacaagccatcacaacgcaacagcaacaacagttcctaccagcactgagccacctagccatggtgaaccctgccgcctacttgcaagagcagctgcttgcatccaacccacttgctctggcgaacgtagttgcaaaccagcaacaacaacagctacaacagtttctgccaacgctcagtcaactagccatggtgaaccctgccgcctacgtacaacaacaacaactgctttcatctagcccgctcgctgtgggcaatgcacctacatacctgcaacaacaattgttgcaacagattgtaccagctctgactcaactagctgtggcaaaccctgttgcctacttgcaacagctgctt

SEQ ID NO: 10977 - DNA, 650 bp, Zea mays
  unsure (1)..(650): unsure at all n locations; Clone ID: LIB3061-115-Q6-K6-G12
ctactcggttaagnattcaacctcgccggggtggagggggtggcagctgcctcagaaagggaatatccatactggatgccgagacattacaagtttgtagaactcctttgcagggccacgtacagattattcagtcagtatgttgggatgccgcgggcaactatctggcgtctgtcagggaagagtctgtcatgttgtggtcatttacctcagggaactacatcgaatgcatacatgagctgatctgcagcgggaacaagttccattcgtgtgtttttcacccaaattacccgaatttgcttataatcggttgttatgagtccctagagctttgggacattagggagaagaacacggtgacaatcagcaacgctcatgacggcatggttgctgccctagccgcgtcaagtgcatcggggctggttgcatcagtgagtcatgatcagctcgttaagctctggaggtgacactgaagacagcaacgcttgtctgtgtgtcattctcatttccagtgtcgtggcaaaagcgaaagggcagctgatctgatctcctagattgatttgcgactgtggcatgcgcaaactattcaaatagttgtcagtaatgtgcttcccttatttctttgtttgtttatccatgcccggtgatac

SEQ ID NO: 10978 - DNA, 660 bp, Zea mays
  unsure (1)..(660): unsure at all n locations; Clone ID: LIB3061-115-Q6-K6-G2
cccgtttcgacccagcgtccttattgagnacaactagcaacatagtaagcacaatagtgtaccaacaatggcagccaaaaattttgcctccttatgctccttggtctttctgcaagtgctgctacggcgaccattttcccgcaatgctcgcaagctcctatagcttcccttcttcccccgtacctctcaccagcggtgtcttcggtatgtgaaaacccaattcttcaaccctacaggatccaacaggcaatcacagctggcatcttacctttatcacccttgttcctccaacaatcatcagccctattacatcagttacctttggtgcatttattggcacaaaacatcagggcacaacaactacaacaacttgtgctagcaaaccttgctgcctactctcagcaacagcagtttcttccattcaaccaactagctgcattgaactctgcttcttatttgcaacaacaacaactaccattcagccagctacctgctgcctacccccagcaatttcttccattcaaccaactggcagcattgaactctcctgcttatttacagcagcaacaactactaccattcagccagctagctggtgtgagccctgctaccttcttgatacaaccacagttgttgccgttctaccagaacgctgcgcct

SEQ ID NO: 10979 - DNA, 666 bp, Zea mays
  unsure (1)..(666): unsure at all n locations; Clone ID: LIB3061-115-Q6-K6-G3
cttttagcaacatagnaagcacaatattgtaccaataatggcagnccaaaaattttgcctcattatgctccttggtctttctgcaagtgctgctacggcgagcattttcccgcaatgctcacaagctcctatagcttcccttcttcccccatacctctcaccagcgatgtcttcagtatgtgaaaatccaattcttctaccctacaggatccaacaggcaatcgcagcaggcatcttacctttatcacccttgttcctccaacaatcatcagccctattacagcagttacctttggtgcatttattggcacaaaacatcagggcacaacaactacaacaactcgtgctagcaaaccttgctgcctactctcagcaacagcagttacctttggtgcatttgttggcacaaaacatcagggcacaacaactacaacaactcgtgctagcaaaccttgctgcctactctcagcaacaacagtttctgccattcaaccaactagctgcattgaactctgctgcttatttgcagcaacaacaactactaccattcagccagctagctgctgcctacccccggcaatttcttccattcaaccaactggcagcattgaactctcatgcttatgtacaacaacaacaactactaccattcagccagctagctgc

SEQ ID NO: 10980 - DNA, 595 bp, Zea mays
  Clone ID: LIB3061-115-Q6-K6-G4
cccgggctcgcctcagtgccagtttttgcggcagcagtgttgccagcagctcaggcaggtggagccgcagcaccggtaccaggcgatcttcggcttggtcctccagtccatcctgcagcagcagccgcaaagcggccaggtcgcggggctgttggcggcgcagatagcgcagcaactgacggcgatgtgcggcctgcagcagccgactccatgcccctacgctgctgccggcggtgtcccccactgaagaaactatgtgctgtagtatagccgctggctagctagctagttgagtcatttagcggcgatgattgagtaataatgtgtcacgcatcaccatgggtggcagtgtcagtgtgagcaatgacctgaatgaacaattgaaatgaaaagaaaaaaatactccaaaaaaaaaaaaaaaaaaaaaaaaaaaaaaaaaaaaaaaaaaaaaattaaaaaaaaaaaaaaaaaaaaaaaaaaaaaaaaaaaaaaaaaaaaaaaaaaaaaaaaaaaaaaaaaaaaaaaaaaaaaagggggcgggccgttttaaaagaaccaaattttacttccccgggcttccaacgtaaaagttttt

SEQ ID NO: 10981 - DNA, 619 bp, Zea mays
  unsure (1)..(619): unsure at all n locations; Clone ID: LIB3061-115-Q6-K6-G6
tcgttctgctagtggncgagnatggtggngaagcttgcatgatgtcgcagcgagagccaggnatgccggctcgccagacgttctggttgttgccggggacgttgcgaaaccagaggattgccggaggtttgtgcaggccacagttgaacatttcggccgattggatcatcttgtgaacaacgctggtgtagcaaatgtctgctggtttgaggacgtaccggatgttgctgctttgaagcgagtcctggtagggttgaaggttcttgatgaaggttctggatgtctgaactaactagctagtcacggtggtgcttgcaggccgtgaacttctggggcgcagttcatgcgacccactgcgctcttccccatctgaagaagagcggcggtgggaaggtcttcgtcaactcctcggctgcggcggcgctggcaatgccaggaatgagcctctacaatgccagcgaggccgctgtcctcaacttcttcgagaccctgcgggtcgagctccgcgacgaggtcggcatcaccatcgcgacttccgggtggatcgagtcggagatgaccggagggaagcagctgtccaaggaagggacggnntggaggtcgcccgtgcggtgcgccg

SEQ ID NO: 10982 - DNA, 631 bp, Zea mays
  Clone ID: LIB3061-115-Q6-K6-G8
tgcggcagcgatgtgcactacctcaggggagagcgcatcgcgcacttcgtggtgaaggagccgatggtgatcgggcacgagtgcgcgggcgtggtcgaggaggtgggcgccggcgtgacgcacctgtccgtgggcgaccgcgtggcgctggagccgggcgtcagctgctggcgctgccgccactgttagggcgggcggtacaacctgtgcgaggacatgaagttcttcgccaccccgccggtgcacggctcgctggcgaaccaggtggtgcacccggccgacctgtgcttcaagctccccgacggggtgagcctggaggagggcgccatgtgcgagccgctgagcgtgggcgtgcacgcgtgccgccgcgcgggggtggggcccgagacgggcgtgctcgtggtgggcgccggccccatcggcctggtgtcgctgctggcggcgcgggccttcggcgcgccgcgcgtggtggtcgtggacgtggacgagcaccgcctggccgtggccaggtcgctgggcgcggacgcggcggtgcgggtgttcgcccgcgcggaggacctggcggacgaggtggagcgcatccgcgcggccatgggctcggacatcgacgtcagcctggactgcgccgggt

SEQ ID NO: 10983 - DNA, 651 bp, Zea mays
  Clone ID: LIB3061-115-Q6-K6-G9
gtgcgtagagggacgtcgacagaacacatgaagatggtcatcgttctcgtcgtgtgcctggctctgtcagctgccagcgcctctgcaatgcagatgccctgcccctgcgcggggctgcagggcttgtacggcgctggcgccggcctgacgacgatgatgggcgccggcgggctgtacccctacgcggagtacctgaggcagccgcagtgcagcccgctggcggcggcgccctactacgccgggtgtgggcagccgagcgccatgttccagccgctccggcaacagtgctgccagcagcagatgaggatgatggacgtgcagtccgtcgcgcagcagctgcagatgatgatgcagcttgagcgtgccgctgccgccagcagcagcctgtacgagccagctctgatgcagcagcagcagcagctgctggcagcccagggtctcaaccccatggccatgatgatggcgcagaacatgccggccatgggtggactctaccagtaccagctgcccagctaccgcaccaacccctgtggcgtctccgctgccattccgccctactactgattcatgatatttgggaaatctcctctatccatctctctctatctatatatgtaataatgcagtaagacgacacacattatcatgtgt

SEQ ID NO: 10984 - DNA, 636 bp, Zea mays
  unsure (1)..(636): unsure at all n locations; Clone ID: LIB3061-115-Q6-K6-H1
tttcagcactatgtaccctcagntacatcactttactgttgaagaatcttctgctacaccaagcctgttttcaagatatggagtccgtggtttcccagccattcttcttgtaaatgagactacgatggttcgatatcggggttcaaaagatcttaactctctggtcgatttctataaagaaactacaggtctcgatccaattgcatatattgatgttgttgaacaagagagcacaggaagcttgagctcagttatgccatgggatcgttctattcgtgaaatggccaaagatgagatgtatttgttagttgcagttctttttattatcgtgaaggttgtagcacacttcatacctgttgtcatgtctcatctgagagctttcttagttgttcgtgtccaaaacttgaacctagggatccgtaggggatcaaaccagctcctggaacgagccttgaatgttcttgatgtaaggaggctttggagcaagctgaggctgagcaataaggcaacagacttgaggaagggagcaaataatgctcgagcgtgggcttcctcatttccttctgtttcactgggtgaaccgtcattttcaagacaagcttagccatcttaagagatgttgttagggtagctgct

SEQ ID NO: 10985 - DNA, 642 bp, Zea mays
  unsure (1)..(642): unsure at all n locations; Clone ID: LIB3061-115-Q6-K6-H10
gcgtgcgtcncctatgccatattccaagggggtggcgggggggcttcaagggcttcgaacatccagccgtgcaagcctacaggctacaactagcgcttgcggcgagcgccttacaacaaccaattgcccaattgcaacaacaatccttggcacatctaaccctacaaaccattgcgacgggcgagcaacaactcttcagtttctgccatcactgagccacctagccgtggtgaaccctgtcacctacttgcaacagcagctgcttgcatccaacccacttgctctggcgaacgtagctgcataccagcaacaacaacagctgcaacagtttatgccagtgctcagtcaactagccatggtgaaccctgccgtctacctacaactactttcatctagcccgctcgcggtgggcaatgcacctacgtacctacaacaacagttgctgcaacaaattgtaccagctctgactcagctagctgtggcaaaccctgctgcctacttacaacagttgcttccattcaaccaactggctgtgtcaaactctgctgcgtacctacaacagcgacaacagttacttaatccattggcagtggctaacccattggtcgctaccttcctgcagcacaacaacattgctgccat

SEQ ID NO: 10986 - DNA, 636 bp, Zea mays
  unsure (1)..(636): unsure at all n locations; Clone ID: LIB3061-115-Q6-K6-H12
cggccctcccgggntcgcccacgcgtccgctcatnttgcaccaagnaaaccatggggggggggggggcgggnggaattaatggcgtcgtcgtctagcagcagccaccgccgcctcatcctcgcagccgccgtcctgctctccgtgctcgcggctgccagcgccagcgccgggacctcctgcgtgccggggtgggccatcccgcgcaggggggtggcgagcttttttttttacgtgaccagccggacctgcggcatcgggccgcgcctcccgtggccggagctgaagaggagatgctgccgggagctggcggacatcccggcgtactgccggtgcacggcgctgagcatcctcatggacggcgcgatcccgccgggcccggacgcgcagctggagggccgcctagaggacctgccgggctgcccgcgggaggtgcagaggggattcgccgccaccctcgtcacggaggccgagtgcaacctggccaccatcagcggcgtcgccgaatgcccctggattctcggcggcggaacgatgccctccaagtaactgcgaagagcatagtgcatgaggaatgagcttgtagctagctcatatgtctgaataataagcacagcaagaagatgaatgcatttctc

SEQ ID NO: 10987 - DNA, 654 bp, Zea mays
  unsure (1)..(654): unsure at all n locations; Clone ID: LIB3061-115-Q6-K6-H2
cgtccgtattganaccaatagcaacatagnaagcacaatagtgtaccaacaatggcagccaaaaattttgcttccttatgctccttggtctttctgcaagtgttgctaccganaccattttcccacaatgctcacaagctcctatagcttcccttcttcccccatacctctcaccagcggtgtcttcaatgtgtgaaaccccaattgttcaaccctacaggatccaacaggcaatcgcaacaggcatcttaccattatcacccttgttcctccaacaaccgtcagccctattacagcagttacctttggtccatttggtggcacaaaacatcagggcacaacaactacaacaacttgtgctagcaaaccttgctgcatactctcagcaacatcagtttcttccattcaaccaactggctgcattgaactctgctgcttatttgcaacaacaattaccattcagccagctagttgctgcctacccccagcaatttcttccattcaaccaactagcagcattgaactctgctgcttatttacagcagcaacaactactaccattcagccagctagctgatgtgagccctgctgccttcttgacacaacaacagttgttgccgttctacctgcacgctatgcctaacgctggcaccc

SEQ ID NO: 10988 - DNA, 643 bp, Zea mays
  Clone ID: LIB3061-115-Q6-K6-H3
cttagtcattccctcttcaagaggcatcatcagattgggcttattattccttattactccaggcaaggatcggagttgctctgaattgactgaaccatggcggcgacaatggcagtgacgacgatggtgaccaggagcaaggagagctggtcgtcattgcaggtcccggcggtggcattcccttggaagccacgaggcggtggcaagaccggcggcctcgagttccctcgccgggcgatgttcgccagcgtcggcctcaacgtgtgcccgggcgtcccggcggggcgcgacccgcgggagcccgatcccaaggtcgtacgggccgccgacaactgcgacatcgcgcgccagcttggcgccgccgttcccgggcagcaggccgcctgggaggcggaggaagaggcagcgaagaggaggaagcagaagggcggcggcagcaagaagcagcagcagctgggcgatctgagcctgaggaaggtcagggtcaagatcgccaacccgcacctgcggcgcctggttagcggcgccatcgccggcgccgtgtccaggacgttcgtggcgccgctggagacgatccggacgcacttgatggtcggcagcatcggcgtcgactccatggccggggtgttccagtggatcatgc

SEQ ID NO: 10989 - DNA, 628 bp, Zea mays
  unsure (1)..(628): unsure at all n locations; Clone ID: LIB3061-115-Q6-K6-H4
ttgggcttctcctccccctccgcctcgggttcgggttcgtgaggttctccggggttcggtttcgtgggtgggcggatcgagatggcggcgtcggatgttgagtaccgctgcttcgtcggcggcctcgcctgggccacggacgaccactccctccacaacgccttcagcacctacggcgaggtcctcgagtccaagatcatcctcgatcgggagacgcagaggtcccgcggcttcggcttcgtcaccttctccacggaggaggcgatgcggaacgccatcgagggcatgaacggcaaggagctggacggccgcaacatcaccgtcaacgaggcccagtcccgcggcggccgtggaggcggcggcggcggctacggtggtggccgtggaggcggcggctacggcggtggcgggcgccgtgatggcggcggcggctacggcggtggcggcggcggctacggtggcggcggtggctacggtggtggtggtggcggctacggtggtggcaaccgtggcggcggttacgngaacttcgacgggaactggaggaactgagcggtggggcccgtgcggccaagttatcctgttcgctaccgngatgtttaccctagtacagaggtttatcttcggt

SEQ ID NO: 10990 - DNA, 604 bp, Zea mays
  Clone ID: LIB3061-115-Q6-K6-H6
ttgtgcacaacaactacaacaactcgtgctagcaaaccttgctgcctactctcagcaacagcagttacctttggtgcatttgttggcacaaaacatcagggcacaacaactacaacaactcgtgctagcaaaccttgctgcctactctcagcaacaacagtttctgccattcaaccaactagctgcattgaactctgctgcttatttgcagcaacaacaactactaccattcagccagctagctgctgcctacccccggcaatttcttccattcaaccaactggcagcattgaactctcatgcttatgtacaacaacaacaactactaccattcagccagctagctgctgtgagccctgctgccttcttgacacagcaacatttgttgccgttctacctgcacactgcgcctaacgttggcaccctcttacaactgcaacaattgctgccattcgaccaacttgctttgacaaacccagcagtgttctaccaacaacccatcattggtggtgccctcttttagattgcttatgagttatagttcaataataaagttttttttgctgatatttgtggcttcccagaaataagaaagtacatttct

SEQ ID NO: 10991 - DNA, 605 bp, Zea mays
  Clone ID: LIB3061-115-Q6-K6-H9
tttatcgttcattattccaaaatgggcacgtgggcctggggccattataccacagcacctccctccagttactccaatgggcttcaaacacccagctgtgcaagcctacaagctacaacaagcgctcgcggctagcgtgttacaacaaccacattgcccaattacaacaacaatcctgggcgcaggtaaccatacaaactatcgcaacgcaacaacaacaacaatttgtaccagcactgagccaactagctactacgaaccctgtcgcctacttacaacaatagttgattgcatccaacccacttgctctgacaaacatagtagcataccaacaacaacaacaattgcaacagattctaccatcactaagccaactaagcatggcgaaccctgccgcctacctacaacagaaacaactgatttcatctagccctatcactgggggtaatgcacctacatacctgcaacaaccattgctgcaacacatagcaccacctctaactcagctagctacgagaaaccctgctgcatacttgcaacaactgctttcattcaaccaactgactgtgtcgaactctgctgagtacctacaacagcgacaacag

SEQ ID NO: 10992 - DNA, 641 bp, Zea mays
  unsure (1)..(641): unsure at all n locations; Clone ID: LIB3061-116-Q6-K6-A1
tataagacacatagtgtaccaacatggcagccaaaaattttgcctccttatgctccttggtctttctgcaagtgctgctacggcgaccattttcccacaatgctcacaagctcctatagcttcccttcttcccccgtacctctcaccagcggtgtcttcggtatgtgaaaacccaattcttcaaccctataggatccaacaggcaatcgcagctggcatcttacctttatcacccttgttcctccaacaatcatcagccctattacagcagttacctttggtgcatttattggcacaaaacatcagggcacaacaactacaacaacttgtgctagcaaaccttgctgcctactctcagcaacaacagtttcttccattcaaccaactagctgcattgaactctgcttcttatttgcaacaacaacaactaccattcagccagctatctgctgcctacccccagcaatttcttccattcaaccaactgacagctttgaactctcctgcttatttacagcagcaacaactactaccattcagccagctagctggtgtgagccctgctaccttnttgacacaaccacaattgttgccgttctaccagcacgctgcgcctaacgctggcaccctcttacaactgc

SEQ ID NO: 10993 - DNA, 649 bp, Zea mays
  Clone ID: LIB3061-116-Q6-K6-A10
tgttactagcaacatacatagtgaagtcactagcgacatcttagcaccaatggcagccaagatttttgccatccttgccctccttgctctttcagcaagcgttgctaccgcgactattattccacaatgctcacaacaatacctctctccggtgacagccgcgagatttgaatacccaactatacaatcctacaggctacaagaggccatcgcagcaagcatcttacggtcgttagcattgaccgtccaacaaccatatgccctattgcaacaaccatccttaatgaatctatatctccaaagaatcgcagcacaacaactacaacaacagttgcttccaacaatcaatcaagtagttgcagcgaaccttgctgcttacctccagcaacaacaatttcttccattcaatcaactagctggggtgaaccctgctgcttacttgcaggcacaacagctactaccattcaaccaacttgtcaggagccctgctgccttcttactgcagcaacagttgcttccattccatctacaagttgtggcaaacattgctgctttcttgcaacaacaacaacaattgctgccattttacccacaggttgtgggaaacattaacgccttcttgcaacagcaacagttgctaccattctac

SEQ ID NO: 10994 - DNA, 388 bp, Zea mays
  Clone ID: LIB3061-116-Q6-K6-A12
caacaacaactaccatccggggggggggggggtgcctacccccagcaatttcttccattcaaccaactggcagcattgaactctgctgcttatttacaacagcaacagctaccaccattcagccagctagctgatgtgagccctgttgccttcttgacacaacaacagggggggggggtcttcttcattctgcgcctaacgctggcaccctcttacaactgcaacaattgctgccattcaaccaacttgctttgacaaacccaacagcgttctaccaacaacccatcattggtggtgccctcttttagattgcttatgagttatacttcaataatgaagttttttggatgatgtttgtggcttcccagaaataagaaagtacatttct

SEQ ID NO: 10995 - DNA, 620 bp, Zea mays
  Clone ID: LIB3061-116-Q6-K6-A4
tgtgtaaaccatcgaggggccgtccgacaggggaattaatggcgtcgtcgtctagcagcagccaccgccgcctcatcctcgcagccgccgtcctgctctccgtgctcgcggctgccagcgccagcgccgggaccttctgcgtgccggggtgggccatcccgcacaacccgctcccgagctgccgctggtacgtgaccagccggacctgcggcatcgggccgcgcctcccgtggccggagctgaagaggagatgctgccgggagctggcggacatcccggcgtactgccggtgcacggcgctgagcatcctcatggacggcgcgatcccgccgggcccggacgcgcagctggagggccgcctagaggacctgccgggctgcccgcgggaggtgcagaggggattcgccgccaccctcgtcacggaggccgagtgcaacctggccaccatcagcggcgtcgccgaatgcccctggattctcggcggcggaacgatgccctccaagtaactgcgaagagcatagtgcatgaggaatgagcttgtagctagctcatatgtctgaataataagcacagcaagaagatgaatgcatttctcggatcgttcatccggaacataatta

SEQ ID NO: 10996 - DNA, 635 bp, Zea mays
  unsure (1)..(635): unsure at all n locations; Clone ID: LIB3061-116-Q6-K6-A5
ttaacatanaagtgngaaccagtagcaacaacaggagcacaatggcgaccaagatattttccctccttatgctccttgctctttctgcatgtgttgctaacgcgacaattttccctcaatgctcacaagctcctatagcttcccttcttcccccataccttccatcaatgatagcttcagtatgtgaaaacccagctcttcagccctataggctccaacaagcaatcgcagcaagcaacatacctttatcacccttgttgtttcaacaatcgccagccctatctttggtgcagtcattggtacaaaccatcagggcacagcagctgcagcaactcgtgctacctgtgatcaaccaagtagctctggcaaacctttctccctactctcagcaacaacaatttcttccattcaaccaactgtctacactgaaccctgctgcttatttgcagcaacaactattaccattcagccagctagctactgcctactctcagcaacaacaacttcttccatttaaccaattggccgcactgaaccccgctgcttatttgcagcagcaaatactactaccatttagccagctagctgcagcaaaccgtgcttccttcttgacacagcaacagttgctgcctttc

SEQ ID NO: 10997 - DNA, 656 bp, Zea mays
  Clone ID: LIB3061-116-Q6-K6-A6
ttcctcttggtcataatcgtcaaactaattttctaggggcatgaattatagaactgacatcctatatttaacaaagtgaacactagtgcatacttcagtttcagtgcaatgtctaatttgcaatgtgtttggtgcgcttaagctctgatgagtctcatgttatttttttttgcaatcgacttgcaccatcaattgatatctaacaacatgatggagtatgaacttgtactctgctttcccatagccaattcatcattgcactatgtggattatattttcttaatgattcccagggttgtgttagtttgaagtataagcatactctttgtttctcaaagaatgccttttaacattactaacaattcatttgcttggcaagatagagtcttgtccaatgaagttcttctatgaagacaagatttgatactttgagaaaattaatttcatgaagagaagatgagagacatatatactggctggtacatgagaagataaaagagagtcaagtcaatttcaagtacttttgtgactttttcaaatgttggggaacttgaagcgaacgatttttatgaagatactctttatgaggatcaccttacgtagttgtatacaagaaacttggacactagagcctgggcatcttactgctttttgca

SEQ ID NO: 10998 - DNA, 646 bp, Zea mays
  Clone ID: LIB3061-116-Q6-K6-A7
gatacgactagcaacatacatagtgaggtacactagcaacatcttagcaccaatggcagccaagatttttgccatccttgccctccttgctctttcagcaagcgttgctaccgcgactattattccacaatgctcacaacaatacctctctccggtgacagccgcgagatttgaatacccaactatacaatcctacaggctacaagaggccatcgcagcaagcatcttacggtcgttagcattgaccgtccaacaaccatatgccctattgcaacaaccatccttaatgaatctatatctccaaagaatcgcagcacaacaactacaacaacagttgcttccaacaatcaatcaagtagttgcagcgaaccttgctgcttacctccagcaacaacaatttcttccattcaatcaactagctggggtgaaccctgctgcttacttgcaggcacaacagctactaccattcaaccaacttgtcaggagccctgctgccttcttactgcagcaacagttgcttccattccatctacaagttgtggcaaacattgctgctttcttgcaacaacaacaacaattgctgccattttacccacaggttgtgggaaacattaacgccttcttgcaacagcaacagttgctaccc

SEQ ID NO: 10999 - DNA, 608 bp, Zea mays
  unsure (1)..(608): unsure at all n locations; Clone ID: LIB3061-116-Q6-K6-A8
aaaggnaagcacagctttgatcggggggggggtcttgctcactgatcgtcgagtgaagcctttgtggtccgtgacgatgtcgaggagagccgcagcgttgttgctcgcgtgcctcgtcgccgtgacagcggcggcgctggcggacggcgcgctgctcccgtggttcggggacgggcggcgcgggcttgacgaggcagcggtgaccgacgtgggcctcctggcggccgacccgttccggatcctggagcacgtccccttcggcttcgaccgggacgacgtggccatggtctccatggcgcgcgtggactggcgcgagacccccgacgcgcacgagatcgtggtcgacgtgcccgggatgcgcagggaggacctcaggatcgaggtcgaggacaacagggtgctgcgcgtcagcggcgagcggcggcgcgctgaggagcgcaagggcgaccactggcaccgcgaggagcgctcctacggcaggttctggcgccggttccgcctccccgagaacgccgacctcgactccgtcgccgccagcctcgacagcggcgtcctcaccgtgcgattcaggaagctggcgcccgagcagatcaagggcccgcgcgtcg

SEQ ID NO: 11000 - DNA, 433 bp, Zea mays
  unsure (1)..(433): unsure at all n locations; Clone ID: LIB3061-116-Q6-K6-A9
ttttctagctgcattgnaactctgcttcttgagggggggcagcaacaactaccattcagccagctatctgctgcctacccccagcaatttcttccattcaaccaactgacagcattgaactctcctgcttatttacagcagcaacaactactaccattcagccagctagctggtgtgagccctgctaccttcttgacacaaccacagttgttgccgttctaccagcacgctgcgcctaacgctggcaccctcttacaactgcaacaattgctgccattcaaccaacttgctttgacaaacccagcagcattctaccaacaacccatcattggtggtgccctcttttagatttcttatgagttatagttcaataataaagttttttgtctgatgtttgtggcttcccagaaataagaaagtacatttctagatt

SEQ ID NO: 11001 - DNA, 528 bp, Zea mays
  unsure (1)..(528): unsure at all n locations; Clone ID: LIB3061-116-Q6-K6-B1
tcgacccagcgtcctttttatcagtaccatcaatcatcattcatcttagtagtataggcaccaaatcaaatctgcaacatcaattatctaactccaaaaccatgaagctggtgcttgtggttcttgctttcattgctttagtatcaagtgtttcttgtacacagacaggtgtttgcagctgtggtcaacaacaaagccatgagcagcaacatcatccacaacaacatcatccacaaaaacaacaacattaaccaccaccacaacatcaccagcagnagnaacaccaacaacaacaagtttacatgcaaccacaaaaacattagtaacaacaagaagtttatgttcaacaacaacaacaacaaccggagtaccaacaacaacaacaacaataacagtatgaacaacaacattaatgtgaaggtcaacaacaacattatcaataattacaagggcatgtgnaacaacatgaacagagtcatgaggaaaattaaggacagaggtatgaggaataatattaaaaataatttt

SEQ ID NO: 11002 - DNA, 652 bp, Zea mays
  unsure (1)..(652): unsure at all n locations; Clone ID: LIB3061-116-Q6-K6-B10
tttcatggnaaactaaccaatctcccccttgcaagcgaccgcggagagacgaaaccggaaaggcaccctcctcaacaaaatgaagctggaacagagattggagagatttccctgaagatcttttcgaaactgtcatagcaaggcttcctgttgctgcaatttttcgattccgcactgtctgccgaaggtggtcttcccttttgggctcagacagtttctctcgtcagtactctgaagctccacatggactgccatggttctatacaatcactcatgagaattcaaacaacaatgttgcgatgtatgatcctttgctgaagaaatggcaccaccaatctgttcctctcaatcatacgaagatagttattccagtggcatccgtgggtggccttgtatgtttattggatctgagccacaggaatttttacatctgcaaccctcttacgcaatcactgaaggagatcccaccaagatcagtccatggttggtcaagagtcgttgtagggatggtgttgaatggaagaagttctagtgatggctacaaagtaatgtggttagatattgatgggacttgcgaagtttatgactctacaaagaacgtgtggtcttgccctggaacttttcctccaagcatcaaacttccacttgctct

SEQ ID NO: 11003 - DNA, 651 bp, Zea mays
  Clone ID: LIB3061-116-Q6-K6-B11
tttgtcgcgtgggtgatagcttcagtcatgggaaaacccgctcttcaaccctataggctccaacaagcaatcgcagcaagcaacatacctttatcacccttgtttcaacaatcgccagccctatctttggtgcagtcattggtacaaaccatcaaggcacagcagctgcagcaactcgggctacctgtgatcaaccaagtagctctggcaaacctttctccctactatcagcaacaacaatttcttccattcaaccaactatctacactgaaccctgctgcttatttgcagcaacaactattaccattcagccagctagctactgcctactctcatcaacaacaacttcttccatttaaccaattggccgcactgaacctcgctgcttatttgcagcagcaaatattactaccatttagccagctagctgcagcaagccgtgcttccttcttgacacagcaacagttgctgcctttctaccagcagtttgcggctaaccccgcaaccctcttacaactacaacaattgttgccctttgtccaacttgctttgacaaacccagcagcctcctaccaacaacacatcattggtggtgccctcttttagattgcttatgagttatagttcaataataaagtttttttttgctgc

SEQ ID NO: 11004 - DNA, 638 bp, Zea mays
  unsure (1)..(638): unsure at all n locations; Clone ID: LIB3061-116-Q6-K6-B12
ctanctcctatagcttcccttcttccgcgagcgggggggggaatgatagcttcagtatgtggaaaacccagctcttcagccctataggctccaacaagcaatcgcagcaagcaacatacctttatcacccttgttgtttcaacaatcgccagccctatctttggtgcagtcattggggcggggggtgagggctctatttttgcagcaactcgtgctacctgtgatcaaccaagtagctctggcaaacctttctccctactctcagcaacaacaatttcttccattcaaccaactgtctacactgaaccctgctgcttatttgcagcaacaactattaccattcagccagctagctactgcctactctcagcaacaacaacttcttccatttaaccaattggccgcactgaaccccgctgcttatttgcagcagcaaatactactaccatttagccagctagctgcagcaaaccgtgcttccttcttgacacagcaacagttgctgcctttctaccagcagtttgcggctaaccccgcaaccctcttacaactacaacaattgttgccctttgtccaacttgctttgacagaccgagcgggctcctaccaacaacacatcagtggtggtgccctctttt

SEQ ID NO: 11005 - DNA, 636 bp, Zea mays
  unsure (1)..(636): unsure at all n locations; Clone ID: LIB3061-116-Q6-K6-B3
tattcctactattaatcttaatattgaggagtttacacagaacttgaagaactatatgcaagcaaaccatgttgagattgagtatgctgacatgtcaaaggcattggttgccatcacccctgaagctgcttccattccaactccaaagctcaagaatgtcagtcgtcttaggacagaacaccaagtttatgaactgccagattcacaccctcttctggaaggatttgaacagagagaaccagatgatccctgtccatatcttctttccatatggaccccaggtgaaactgcacaatcaaccaatgcgcccaagacattctgtgattcaggggagactggtcaactatgtggaagtttaacatgctttagttgcaacagtttacgagaaatgcaggctcagaaagtcagaggaacactcttgataccatgccggacagcaatgagaggaagcttcccacttaatgggacatattttcaagttaatgaggtatttgctgaccattgttcaagccaaaatccaattgatgtcccacgaagttggatatgggacctcccaagacgaactgtttactttggaacctcagttcctacaatatttagnaggtttaacgactgaagaagaacaacaatgctttt

SEQ ID NO: 11006 - DNA, 372 bp, Zea mays
  Clone ID: LIB3061-116-Q6-K6-B6
tttttaaagaaaattttccatcttgaaaagagttccgttgttttgggtgctactggtagggagaataagacatcatggcctgaggtggtgggcatgtccatcaaggaggcaagagagatcattcttaaagacatgcccaacgctaacattcaagttctaccggttggctcgcttgtgacccaagactttcgccctgatcgtgttcgcatcttcgttgatattgttgcccagactccaacagttggctgacaaggatatgccttatctataggccaaataaacaaagcctacttttatgtatcatggctaataaatcctacatttcttggttaaaaaaaaaaaaaaaaaaaaaaaaagggaggacgataataa

SEQ ID NO: 11007 - DNA, 642 bp, Zea mays
  Clone ID: LIB3061-116-Q6-K6-B8
tgttgggctctggctggctatccaaggcaagtgtgctgcttggtgttgagagaatcaatcgccctgcctgccactcaccgattgttattgttgaagaacgaataaaagagggagggccagccggccaggggacgacgaccaagacttggttggggtcatcgccggacgcgggacacggaggaaggtcacactttgggtgaaaccagccacccaccaatccgaaatcttggagaaatggaagggcattgcaagtgaaattaatcaggattcaggagacgggttgtgtcgctggacggagatgctgctccacttccaccggccgccggcggctggttggtgagccggcgcactttagggctggttcggttattcccaatacacatggattggatgagtttgaaaaaaaataagaaaatgtttgacttgtttgtgattcaaactcatccaatcccactcaatccacatgtggattgagagctatccgaacaagcccttactgggggagggccgcgccagcgcccgtgccaaatcgggtacagtacttactccattacaaaattagttgtcgttctcgaaaaataacatgtttaactttaatcaatatttatatatttataataaataattagtattattagatag

SEQ ID NO: 11008 - DNA, 646 bp, Zea mays
  unsure (1)..(646): unsure at all n locations; Clone ID: LIB3061-116-Q6-K6-B9
ttaaagcacaatagtgtaccaacaatggcagccaaaaattttgcttccttatgctccttggtctttctgcaagtgttgctaccganaccattttcccacaatgctcacaagctcctatagcttcccttcttcccccatacctctcaccagcggtgtcttcaatgtgtgaaaacccaattgttcaaccctacaggatccaacaggcaatcgcaacaggcatcttaccattatcacccttgttcctccaacaaccgtcagccctattacagcagttacctttggtccatttggtggcacaaaacatcagggcacaacaactacaacaacttgtgctagcaaaccttgctgcatactctcagcaacatcagtttcttccattcaaccaactggctgcattgaactctgctgcttatttgcaacaacaattaccattcagccagctagttgctgcctacccccagcaatttcttccattcaaccaactagcagcattgaactctgctgcttatttacagcagcaacaactactaccattcagccagctagctgatgtgagccctgctgccttcttgacacaacaacagttgttgccgttctacctgcacgctatgccntaacgctgcaccctcttacaactgcaacaatt

SEQ ID NO: 11009 - DNA, 634 bp, Zea mays
  Clone ID: LIB3061-116-Q6-K6-C10
tgttttctccctccctagtcgctccccaaatcggatctccaggccggcagaagttgagcggactgactggtcactgtagttcgatcgaatccgagtagggctgatacagttcgattcggcgggaggcatggcgtccgaaagcacttcaagtacgtcatcctcggcggcggcgtcgcggcggggtacgcggcgcgggagttcgccaagcagggagttaagcctggggagcttgcaatcatctccaaggaggctgtggctccttacgagcgtcctgccctaagcaaaggttacctctttcctacgaatgctgcaagactcccaggattttatgtatgtgtgggaagtggtggagagaagctattgcctgagtggtactcagagaaaggcattgagctgatccttagtacagaaattgtcaaagctgatctttccaccaagactctgactagtgcagctggagcaaactttacatatgagatcttgctcattgctactggctcctcggtcataaagctcaccgattttggcacacaaggagctgattctaacaacattctatatctaagggaaattgatgatgctgacaagctggttgcagctatccaggcaaagaaggtggcaaggcagtggttgt

SEQ ID NO: 11010 - DNA, 639 bp, Zea mays
  Clone ID: LIB3061-116-Q6-K6-C11
tttgagctcatcaatcatcaacgcggtggccgaaatgcttcgattagattctcgttgacaagaagatagaaccgaacctgaccatgtcgctgatccgccgcagcaacgtgttcgatcccttctccctcgacctctgggacccctttgagggcttccccttcggctccggcagcagcggcaggctcttcccctcgttcccgcggaccagctcggagaccgcggccttcgctggcgcgcggatcgactggaaggagactccagaggcgcacgtgttcaaggcagacgtaccggggctgaagaaggaggaggtcaaggtggaggtcgaggacggcaacgtccttcagatcagcggcgagcgcaacaaggagcaggaggagaagacggacacctggcaccgcgtggagcggagcagcgggagattcctgcgcaggttccgactgcccgagaacgccaagacggagcagatcagggccgccatggagaacggcgtgcttacagtcactgtgcccaaggaggacgccaagaagcctgaagtgaagtccattcagatctccggctagacctcggtctgcggtcgtcgtacctgcgtggtttgaggaacggcagttcgcctcggtcgttctgtgaaataaaatgggt

SEQ ID NO: 11011 - DNA, 652 bp, Zea mays
  unsure (1)..(652): unsure at all n locations; Clone ID: LIB3061-116-Q6-K6-C2
ccggttcgcccacgcgtccgttttgnaccactagcaacatagtaagcacaatagtgtaccaacaatggcagccaaaaattttgcctccttatgctccttggtctttctgcaagtgctgctacggcgaccattttcccgcaatgctcgcaagctcctatagcttcccttcttcccccgtacctctcaccagcggtgtcttgggtatgtgaaaacccaattcttcaaccctacaggatccaacaggcaatcacagctggcatcttacctttatcacccttgttcctccaacaatcatcagccctattacatcagttacctttggtgcatttattggcacaaaacatcagggcacaacaactacaacaacttgtgctagcaaaccttgctgcctactctcagcaacagcagtttcttccattcaaccaactagctgcattgaactctgcttnttatttgcaacaacaacaactaccattcagccagctacctgctgcctacccgcaggaatttttttcattcaaccaactggcagtattgaactcttctgcttatttacagnaggtacaactactaccattgagccagctatctggtgtggagccctgctaccttatttgtacaaccacagttgttgccgttctaccaggacgct

SEQ ID NO: 11012 - DNA, 292 bp, Zea mays
  unsure (1)..(292): unsure at all n locations; Clone ID: LIB3061-116-Q6-K6-C3
cgcccagcgtccgtttttttttccgggcaagtgaatttctcctgctgaggcataaaataggaangtagtaaattagatggttgccggtcgcggttcagctgtccaagagcagtgagtttgttgatgggttgtattgtatttatgctgataggctgtttgtgtagtttagaaacaaaaaagatacatggggggaaagggtgtccgcctgttttatttttaaaaaaaaggggggggggggaaaaaaaaaaagagggggggggaaaaanaggnnnnggggggggggggtgggggg

SEQ ID NO: 11013 - DNA, 653 bp, Zea mays
  unsure (1)..(653): unsure at all n locations; Clone ID: LIB3061-116-Q6-K6-C4
ggccttcccgggntcgcccacgcgtccggttcgccaaatcgacccccccaaaccctagctacccggcgcaacgtccccttcccgcctctccgcggcgctgcgtgacacccggcctccgctacgaaacaccggggcgggtgtagcctagcgggcgggccatggcgtcaacggtgctggaggcgacgcgggcggcccatgaggatctggagaggctggagcggctcgcggtgagcgagctgcaacgggagcccgctaacccgcgtgaccgcctctttcagtcccaccgcgtccgccacatgctcgacctcgtcgtctccacctccggcaagctcgtggaaatttacgaggacaaggacaatgctaggaaggatgagatcaacactcatcttactgcacccacgcaaagtggactgtttagcaagtactatgaaaggctcaaagagatccgtgaatatcatcggcggaacccatctgcccgctttgttagtacaactgatgactatgaagagcttctaaaggaggaaccagttattgaattcactggcgaggaaacttttggccgttaccttgacttgcatgagctttataatgagttcataaattccaagttcggaacactgatggaatattcagcttatgttggctgtttctcc

SEQ ID NO: 11014 - DNA, 584 bp, Zea mays
  Clone ID: LIB3061-116-Q6-K6-C5
ttcacatgggttgaggacgagggggttattttaattatatggcctaatgagatcgtacattcttgatgtatagattttgcaagaggtacataaagaacgtttcaagcgtataagtattatttcataggaataacagcagtttttacatatgatgggaaatattttacctcattcatacagactatattatgcatgatgttctgcaagactttcatcaggcaatgtaatttcttggaataacaactgatttgataacatttgatcaccattttatctgcctgatacataatatgtataaggtgattgtgttcaaaaagggaaatatgctatttgagttctacttcaaatgtatcaactaatgttatgactacaccattgtatttcccaaagacttgagggggtaaaggggattgggactgaaacggtagactatttgttggatttaaaattatacttcaaccacacgtatactgactaccctattgtttgtatgatgattggggatattaattgtgggttgatacaccaacgctgaactatttggtgtatgcatcaggatccatgatagcagcgtactctttact

SEQ ID NO: 11015 - DNA, 346 bp, Zea mays
  unsure (1)..(346): unsure at all n locations; Clone ID: LIB3061-116-Q6-K6-C6
tcggtgcgttcgnttcggtngaactcacagcaaagctcaacaggtcatacatacatgctttcgccatgtctaaggcagagagacaagtaaaacagaatgtaaatcaaggaagcagacagcatacagcaccctccttttcaaagtacaacaccattgcaactgtataagtggtgtcaacaacagcgggggtgggtaaattattttatcgtgtttgcactccacaagggtacatgtacatgatggcctggagaggtggctaccctgttctgaagaagtgaccattggaacgtttacttgtgtctctgtcttaaacatggggaaagcatggattggtgaacgtgatgag

SEQ ID NO: 11016 - DNA, 639 bp, Zea mays
  unsure (1)..(639): unsure at all n locations; Clone ID: LIB3061-116-Q6-K6-C7
ttttctagcaacatagnaagcacaatagtgtaccaacaatggcagccaaaaattttgcctccttatgctccttggtctttctgcaagtgctgctacggcgaccattttcccgcaatgctcgcaagctcctatagcttcccttcttcccccgtacctctcaccagcggtgtcttcggtatgtgaaaacccaattcttcaaccctacaggatccaacaggcaatcgcagctggcatcttacctttatcacccttgttcctccaacaatcatcagccctattacaacagttacctttggtgcatttattggcacaaaacatcagggcacaacaactacaacaacttgtgctagcaaaccttgctgcctactctcagcaacagcagtttcttccattcaaccaactaggttcattgaactctgcttcttatttgcaacaacaacaactaccattcagccagctacctgctgcctacccccagcaatttcttccattcaaccaactagcagcattgaactctcctgcttatttacagcagcaacaactactaccattcagccagctagctggtgtgagccctgctaccttcttgacacaaccacagttgttgccgttctaccagcacgttgcgcctaacgctgg

SEQ ID NO: 11017 - DNA, 648 bp, Zea mays
  Clone ID: LIB3061-116-Q6-K6-C8
ttgtagtgcgtagaggaggacgtcgaacagaacagcatgaagatggtcatcgttctcgtcgtgtgcctggctctgtcagctgccagcgcctctgcaatgcagatgccctgcccctgcgcggggctgcagggcttgtacggcgctggcgccggcctgacgacgatgatgggcgccggcgggctgtacccctacgcggagtacctgaggcagccgcagtgcagcccgctggcggcggcgccctactacgccgggtgtgggcagccgagcgccatgttccagccgctccggcaacagtgctgccagcagcagatgaggatgatggacgtgcagtccgtcgcgcagcagctgcagatgatgatgcagcttgagcgtgccgctgccgccagcagcagcctgtacgagccagctctgatgcagcagcagcagcagctgctggcagcccagggtctcaaccccatggccatgatgatggcgcagaacatgccggccatgggtggactctaccagtaccagctgcccagctaccgcaccaacccctgtggcgtctccgctgccattccgccctactactgattcatgatatttgggaaatctcctctatccatctctctctatctatatatgtaataatgcagtaagacgacacac

SEQ ID NO: 11018 - DNA, 640 bp, Zea mays
  Clone ID: LIB3061-116-Q6-K6-C9
ccggctccattggactgcttgtttcctgttgaccattgggtattctcgaccatcgagccatggctgccaagctgactcgcctccacagtcttcgcgaacgccttggtgccaccttctcctcccatcccaatgaactgatagcactcttttccaggtatgttcaccagggcaagggaatgcttcagcgccatcagctgcttgcggagtttgatgccctgtttgatagtgacaaggagaagtatgcaccctttgaagacattcttcgtgctgctcaggaagcaattgtgctccccccatgggttgcacttgctatcaggccaaggcctggtgtctgggattacattcgggtgaatgtaagtgagctggctgtggaggagctgagtgtttctgagtacttggcattcaaggaacagctggtggatggacaatccaacagcaactttgtgcttgagcttgattttgagcccttcaatgcctcctttcctcgtccttccatgtcgaagtccatcggaaatggagtgcaattccttaaccgacacctgtcgtccaagttgttccaggacaaggagagtttgtaccccttgctgaacttcctcaaggctcataactacaagggcacgacgatgatgttgaatgacag

SEQ ID NO: 11019 - DNA, 144 bp, Zea mays
  Clone ID: LIB3061-116-Q6-K6-D1
taatgtttgatgattgttagatgtgtattgtattggtaaatggatgttgatggtatttgtagatatatgtatgtatggagattaaatgaggatatattggatgattgttttttttttttattggtttgggtggggggggggggg

SEQ ID NO: 11020 - DNA, 671 bp, Zea mays
  Clone ID: LIB3061-116-Q6-K6-D10
tttttattcaaaacacaccaagcgcaacgcactagcaacgacctaacaccaatggctaccaagatattagccctccttgcgcttcttgcccttttagtgagcgcaacaaatgcgttcattattccacagtgctcacttgctcctagtgccattattccacagttcctcccaccagttacttcaatgggcttcgaacatccagccgtgcaagcctacaggctacaactagcgcttgcggcgagcgccttacaacaaccaattgcccaattgcaacaacaatccttggcacatctaaccctacaaaccattgcaacgcaacaacaacaacaacaacagtttctgccatcactgagccacctagccgtggtgaaccctgtcacctacttgcaacagcagctgcttgcatccaacccacttgctctggcgaacgtagctgcataccagcaacaacaacagctgcaacagtttatgccagtgctcagtcaactagccatggtgaaccctgccgtctacctacaactactttcatctagcccgctcgcggtgggcaatgcacctacgtacctacaacaacagttgctgcaacaaattgtaccagctctgactcagctagctgtggcaaaccctgctgcctacttacaacagttgcttccattcaaccaactggctgc

SEQ ID NO: 11021 - DNA, 645 bp, Zea mays
  unsure (1)..(645): unsure at all n locations; Clone ID: LIB3061-116-Q6-K6-D11
ttctaacatgcacatggagnatggtagacgcatatacagagagaggttggaaacgagtgatcgtgatgctgacatggaacaaagacgggcatttcagaagttaatttatgtgtccaatcttgtctttggagatgcatctgtattcctacttccttggaaacgtctgtttggggtgactgattctcagattgacattgctatgagggaaaatgccaagaatttatactcggtgcagctcaagtctattggaagaggtcttgacataggcacactcattgaagtaaggagagcacaacttgcatataaactttctgatgagattgctgctgagatgttccgtgagcacgcgaagcagctagttcaagaaaacatttcatcagcattagacatcttgaagtcacgtattccggatagtctaactcaggctgtggaagaagtgaatattgtaattaaatttaatagtttgcttacaacattaagcaaacaccctgaagctgataattttgctcgtggtcttggccctatttcattagctggagaggatgatcacgataggagagctgatgatttcaagatactctataaggcctatgctacagaagtactttcagatggaattgtggatgataagaagtttcccctctg

SEQ ID NO: 11022 - DNA, 660 bp, Zea mays
  unsure (1)..(660): unsure at all n locations; Clone ID: LIB3061-116-Q6-K6-D12
ttttacttagcacatagnaagcacaatagggggccagcggtggcagccaaaaattttgcttccttatgctccttggtctttctgcaagtgttgctaccgcaaccattttcccacaatgctcacaagctcctatagcttcccttcttcccccatacctctcaccagcggtgtcttcaatgggggaaaccccaatttttcaaccctacaggatccaacaggcaatcgcaacaggcatcttaccattatcacccttgttcctccaacaaccgtcagccctattacagcagttacctttggtccatttggtggcacaaaacatcagggcacaacaactacaacaacttgtgctagcaaaccttgctgcatactctcagcaacatcagtttcttccattcaaccaactggctgcattgaactctgctgcttatttgcaacaacaattaccattcagccagctagttgctgcctacccccagcaatttcttccattcaaccaactagcagcattgaactctgctgcttatttacagcagcaacaactactaccattcagccagctagctgatgtgagccctgctgccttcttgacacaacaacagttgttgccgttctacctgcacgctatgcctaacgctggcaccctcttacaactgcaacaat

SEQ ID NO: 11023 - DNA, 679 bp, Zea mays
  unsure (1)..(679): unsure at all n locations; Clone ID: LIB3061-116-Q6-K6-D3
ccggtctagcaacgacctacttttttggctaccaagnaattagccctccttgcgcttcttgcccttttagtgagcgcaacaaatgcgttcattattccacagtgctcacttgctcctagtgccattattccacagttcctcccaccagttacttcaatgggcttcgaacatccagtcttgcaagcctacattttttttttagcgcttgcggcgagcgccttacaacaaccaattgcccaattgcaacaacaatccttggcacatctaaccctacaaaccattgcaacgcaacaacaacaacaacaacagtttctgccatcactgagccacctagccgtggtgaaccctgtcacctacttgcaacagcagctgcttgcatccaacccacttgctctggcgaacgtagctgcataccagcaacaacaacagctgcaacagtttatgccagtgctcagtcaactagccatggtgaaccctgccgtctacctacaactactttcatctagcccgctcgcggtgggcaatgcacctacgtacctacaacaacagttgctgcaacaaattgtaccagctctgactcagctagctgtggcaaaccctgctgcctacttacaacagttgctttcattcaaccaactgggtgtgtcaaactctgctgcgtacctacaacagcgacaac

SEQ ID NO: 11024 - DNA, 281 bp, Zea mays
  unsure (1)..(281): unsure at all n locations; Clone ID: LIB3061-116-Q6-K6-D4
ccggggncgcccagcgnccggctgaagacccngctacctacaagccacaaccacagggnngccgnactaccagcacgaagcgcctaacgctggcaccctctaacaacggcaacaatngctgccattcaaccaacttgctttgacaaacccagcagtgttctaccaacaacccataattggtggagccctcttttagattgcttatgagttatagttcaataataaagatttttatatgaagtatgtggcttaccagaaataagaaagtacatttctagatt

SEQ ID NO: 11025 - DNA, 634 bp, Zea mays
  Clone ID: LIB3061-116-Q6-K6-D5
tttgtcatgcttgggaggacattctttctcacaacagacatcttgcattggtctacaaacttggtgctgttaatgatctactctggaaaagctcgtctcgttcttggtctatccagtggccattttatatgctgcatttgttatttcggatatttatttctgtagctaagaccattgataaacttcaggcaacaatgttgatggccaaacttgacatttataggaaatttgcaactgcattgatcatatctgctctggtgtctgttggttggattggctatgagatttactccaaatcaacagtatgtgtttaatgaactatggcagcatgcctggattattcctgccttctggcatgtcttgtctttcttacttctttgtgtcatttgctacctgtgggcaccttcacaaaactcaatgagattttcttatgatgcaagtgaattctttgatcgaaaggataacatctcattaattaggccagcacccagtgcatccaagaatggatggaatttatcttctacaccagagcccaaagctacaaaggatgtgaataccgtagcagattttgaaggtgatgatgaggaaaacaaaaggagtagaatgtactgtcgatttgattacggagggtata

SEQ ID NO: 11026 - DNA, 541 bp, Zea mays
  Clone ID: LIB3061-116-Q6-K6-D6
ttttagttacctttggtgcatttattggcacaaacatcagggcacaacaactacaacaacttgtgctagcaaaccttgctgcctactctcagcaacagcagtttcttccattcaaccaactagctgcattgaactctgcttcttatttgcaacaacaacaactaccattcagccagctacctgctgcctacccccagcaatttcttccattcaaccaactggcagcattgaactctcctgcttatttacagcagcaacaactactaccattcagccagctagctggtgtgagccctgctaccttcttgatacaaccacagttgttgccgttctaccagcacgctgcgcctaacgctggcaccctcttacaactgcaacaattgctgccattcaaccaacttgctttgacaaacccagcagcgttctaccaacaacccatcattggtggtgccctcttttagatttcttatgagttatagttcaataataaagttttttgtctgatgtttgtggcttcccagaaataagaaagtacatttct

SEQ ID NO: 11027 - DNA, 451 bp, Zea mays
  Clone ID: LIB3061-116-Q6-K6-D7
tgtataacttgctgcctactctcagcaacacagtttcttccattcaaccaactagctgcattgaactctgcttcttatttgcaacaacaacaactaccattcagccagctatctgctgcctacccccagcaatttcttccattcaaccaactgacagctttgaactctcctgcttatttacagcagcaacaactactaccattcagccagctagctggtgtgagccctgctaccttcttgacacaaccacaattgttgccgttctaccagcacgctgcgcctaacgctggcaccctcttacaactgcaacaattgctgccattcaaccaacttgctttgacaaacccaacagcattctaccaacaacccatcattggtggtgccctcttttagatttcttatgagttatagttcaataataaagttttttgtctgatgtttgtggcttccc

SEQ ID NO: 11028 - DNA, 535 bp, Zea mays
  unsure (1)..(535): unsure at all n locations; Clone ID: LIB3061-116-Q6-K6-D8
tgtctgtngaaggcgtgttcgaggagtccaagctggcgngatacgtgtacaagcgcacgggcaagcacgcggccgtcgtcaagtccgagccggccccggcgccggagggcggcggcggcgacaaggcggccaaggaggaggagaagaaggatgcaggcggagccggaagcgaggagaagaaggacggcaaggaggatgaagagaagaaggacggcggcgagaagaatgaggagaagaaggacggcggcgacggagacggcgacaagaaggacgaggccggcgacaaggacaaggacccggccgccagcctgtacatgcactacccgcggttcccgttcgctggagggtactaccagccgccggcctacccgccgcctccggggtacccgtacgcctaccagccggcctacccgccgccgttctacgcgccgccgcaccaccacctgcaccagcagcagcccatggcgccgcagatcttcagcgacgagaaccccaacgcctgctccgtcatgtagttgtcactcaaatgtcatgt

SEQ ID NO: 11029 - DNA, 648 bp, Zea mays
  unsure (1)..(648): unsure at all n locations; Clone ID: LIB3061-116-Q6-K6-D9
cagnaaacacacctagcgaacgcactagcaacgacctaacaacaatggcttccaagacattatccctccttgcgcttcttgccctttttgtgagtgcaacaaatgcgttcattattccacaatgctcacttgctccgagtgccattattccacagttcctccctccagttacttcaatgggcttcgaacacccagctgtgcaagcctataggctacaacaagcgcttgcggcgagcgtcttagaacaaccaattgcccaattacaacaacaatccttagcacatctaaccatacaaaccatcgcaacgcagcagcaacaagcactgagccacctagccgtggtgaaccctatcgcctacttgcaacaacagctgcttgcatccaacccacttgctttggcaaacgtagctgcataccaacaacaacaacagttgcaacagtttctgccagcgctcagtcaactagccatggtgaaccctatcgcctacctacaacagcaacaacttctttcatctagcccgctcgctatgggcaatgcacctacatacctgcaacaacagttgttgcaacaacagttgctgcaacaaattgtaccagctcttactcagctagctgtggcaaaccctgctgcctacttgcaaaactact

SEQ ID NO: 11030 - DNA, 654 bp, Zea mays
  unsure (1)..(654): unsure at all n locations; Clone ID: LIB3061-116-Q6-K6-E10
ttttgagnaccagcagcaacatagnaagtagaatccattagcaacaatagagcaacaatggcgaccaagatattttccctccttatgctccttgctctttctacatgtgttgctaacgcgacaattttccctcaatgctcacaagctcctatagcttcccttcttcccccataccttccatcaattatagcttcagtatgtgaaaacccagctcttcaaccatataggcttcaacaagcaatcgcagcaagcaacatacctttatcgcccttgttgtttcaacaatcaccagccctatctttggtgcagtcattggtacaaaccatcagggcacaacagctgcagcaactcgtgctacctgtgatcaaccaagtagctctggcaaacctttctccctactctcagcaacaacaatttcttccattcaaccaactgtctacactgaaccctgctgcttatttgcagcaacaactattaccatttagccagctagctactgcctactctcagcaacaacaacttcttccatttaaccaattggccgcactgaaccccgctgcttatttgcagcagcaaatactactgccatttagcgagctagctgcagcaagtcgtgcttccttcttgacacagcaacagttgctgcctttctac

SEQ ID NO: 11031 - DNA, 512 bp, Zea mays
  unsure (1)..(512): unsure at all n locations; Clone ID: LIB3061-116-Q6-K6-E2
gtgtaacctgtgctcgccaaggtaccgctaagaccggttagctggaccgcccaaccgatgctccatagctagccgcgagcgacggtcgacgtccccaagagctcgaccgaatcgctgtacaagggaactggtgaccaaccaaggcaggctgtggaactgggcaggcatggcgccctagagcgttgcggctccatctcgtcgctgctggagagcagctggctagctgttagcgttttccctagtttctctctctctctctgtcgctgtgttccccgtttcagtttacttatagcccgaagacttttctgtagtattggaatgccagagacctttggccggacaagaggaatttgcgaaggccgtctggctgggtgtgttgcgtcgtcattggggtctagtatggccagttgtgttcgtcgttatattgagtggatccgaatgaatgtgggttagattggagctttccttttcnnanntnngtattttnttaataaaataaaaaaaaaaaataa

SEQ ID NO: 11032 - DNA, 155 bp, Zea mays
  unsure (1)..(155): unsure at all n locations; Clone ID: LIB3061-116-Q6-K6-E3
ggggggggggnnttttttgttttttttgggtgttttttttttttttgtggtttttttttttttgttttggtgggttggnggtgggggggggngttttttttttttttttttnnnnnnttttttgtgggggggggggggtttttttttttttttgt

SEQ ID NO: 11033 - DNA, 653 bp, Zea mays
  Clone ID: LIB3061-116-Q6-K6-E4
gtggcgtgcgtagagggatcgcgacagaacagcatgaagatggtcatcgttctcgtcgtgtgcctggctctgtcagctgccagcgcctctgcaatgcagatgccctgcccctgcgcggggctgcagggcttgtacggcgctggcgccggcctgacgacgatgatgggcgccggcgggctgtacccctacgcggagtacctgaggcagccgcagtgcagcccgctggcggcggcgccctactacgccgggtgtgggcagccgagcgccatgttccagccgctccggcaacagtgctgccagcagcagatgaggatgatggacgtgcagtccgtcgcgcagcagctgcagatgatgatgcagcttgagcgtgccgctgccgccagcagcagcctgtacgagccagctctgatgcagcagcagcagcagctgctggcagcccagggtctcaaccccatggccatgatgatggcgcagaacatgccggccatgggtggactctaccagtaccagctgcccagctaccgcaccaacccctgtggcgtctccgctgccattccgccctactactgattcatgatatttgggaaatctcctctatccatctctctctatctatatatgtaataatgcagtaagacgacacacattatcat

SEQ ID NO: 11034 - DNA, 674 bp, Zea mays
  Clone ID: LIB3061-116-Q6-K6-E5
tcccggtgtcgcccacgcgtccggtaaagcacatagtgtaccaacaatcggcagccaaaaattttgcctccttatgctccttggtctttctgcaagtgctgctacggcgaccattttcccgcaatgctcgcaagctcctatagcttcccttcttcccccgtacctctcaccagcggtgtcttcggtatgtgaaaacccaattcttcaaccctacaggatccaacaggcaatcgcagctggcatcttacctttatcacccttgttcctccaacaatcatcagccctattacaacagttacctttggtgcatttattggcacaaaacatcagggcacaacaactacaacaacttgtgctagcaaaccttgctgcctactctcagcaacagcagtttcttccattcaaccaactaggttcattgaactctgcttcttatttgcaacaacaacaactaccattcagccagctacctgctgcctacccccagcaatttcttccattcaaccaactagcagcattgaactctcctgcttatttacagcagcaacaactactaccattcagccagctagctggtgtgagccctgctaccttcttgacacaaccacagttgttgccgttctaccagcacgttgcgcctaacgctggcaccctcttacaactgcaacaattgc

SEQ ID NO: 11035 - DNA, 663 bp, Zea mays
  unsure (1)..(663): unsure at all n locations; Clone ID: LIB3061-116-Q6-K6-E6
ttatattttgagcattcagnaaacacaccaagcgaacgcactagcaacaacctaacaacaatggctaccaagatattatccctccttgcgcttcttgcgctttttgcgagcgcaacaaatgcgtccattattccacaatgctcacttgctcctagttccattattccacagttcctcccaccagttacttcaatggccttcgaacacccagctgtgcaagcctataggctacaacaagcgattgcggcgagcgtcttacaacaaccaattgcccaattgcaacaacaatccttggcacatctaacaatacaaaccatcgcaacgcaacagcaacaacagttcctaccagcactgagccacctagccatggtgaaccctgtcgcctacttgcaacagcagctgcttgcatccaacccacttgctctagcaaacgtagttgcaaaccagcaacaacaacaactgcaacagtttctgccagcgcttagtcaactagccatggtgaaccctgccgcctacctacaacagcaacaactgctttcatctagcccgctcgctgtggccaatgcacctacatacctgcaacaagaattgttgcaacagattgtaccagctctaactcagctagctgtggcaaaccctgttgcctacttgcaacagctgctt

SEQ ID NO: 11036 - DNA, 644 bp, Zea mays
  Clone ID: LIB3061-116-Q6-K6-E8
ttttcattgtccttactgagccaggtctcagtgtcatcatcagcgctgtcctcaccagcagatgcatcttccagaggatgaagaactacaccatctatgcagtctccatcacaatccgtatagtgcttggatttatgctcattgcattgatctggcaatacgatttctcccccttcatggtccttatcatcgccattctcaacgacggcactatcatgaccatctctaaggacagagttaagccgtctccgttgccggacagctggaagctgaaggagatctttgccacgggcatcgtgcttggaagctacctcgctctgatgactgtcattttcttctgggctatgcacaagaccgacttcttctcggacaaattcggtgtgaggtcgatcagggacagtgagcatgagatgatgtccgcgctgtacctccaagtgagtatcgtgagccaggctctgatcttcgtcacccggtcccggagctggtccttcgtggagcgccctggcctgctcctggtcaccgcgttcctgctcgcccagcttgtcgcgaccttcctcgctgtctacgccaactggggcttcgccaggatcaagggtatcggctggggctgggccggtgtggtctggctctacagcatcgtgttc

SEQ ID NO: 11037 - DNA, 656 bp, Zea mays
  unsure (1)..(656): unsure at all n locations; Clone ID: LIB3061-116-Q6-K6-E9
ctctagcacatanaagtggaatccagtagcaacaatagagcaacaatggcgaccaagatattttccctccttatgctccttgctctttctacatgtgttgctaacgcgacaattttccctcaatgctcacaagctcctatagcttcccttcttcccccataccttccatcaattatagcttcaatatgtgaaaacccagctcttcaaccatataggcttcaacaagcaatcgcagcaagcaacatacctttatcgcccttgttgtttcaacaatcgccagccctatctttggtgcagtcattggtacaaaccatcagggcacaacagctgcagcaactcgtgctacctctgatcaaccaagtagctctggcaaacctttctccctactctcagcaacaacaatttcttccattcaaccaactgtctacactgaaccctgctgcttatttgcagcaacaactattaccatttagccagctagctactgcctactctcagcaacaacaacttcttccatttaaccaattggccgcactgaaccccgctgcttatttgcagcagcaaatactactaccatttagccagctagctgcagcaaaccgtgcttccttcttgacacagcaacagttgctgcctttctaccagcagtttgcggc

SEQ ID NO: 11038 - DNA, 643 bp, Zea mays
  Clone ID: LIB3061-116-Q6-K6-F10
tttttacagtgtttgaaaaattctatgatgtcacattacttttttctggcacttcatatcccactgcaaatcatttctttcgcaagttttctgagattaagatggctattgcaagatggtgtgagagcagtgatgtcataatttgtacaatggcattctctatgaaagagaagttcaataaatattgggacatgaacaatatggctttagcagtgggggcatttcttgatcctaggtacaaacacaaaatggtggagttgtacatgtctaagatgtatgatagtgagagggctgagctagagaagttgtctttcattaatgtcatcaatgagttatttgctttgtattcatcaaacatcaatgcaaaaacaaccaatatggcttctacctccaaggagagtgaacttgttccacacaaaaatggttctttcatggatgatgaggatgaggatgaggttgatcttgatgagttgtatgcagcagcaaacaatgtgaagaaggtttcagaattggatgtgtatatgagtgagggtttggtgaaggtcaatgaaggtgatgctccatttgatatcctatcttggtggagggggcaagtgacaaatcttcctatcctttcgacccttgctcgtgatgtgttatctat

SEQ ID NO: 11039 - DNA, 640 bp, Zea mays
  unsure (1)..(640): unsure at all n locations; Clone ID: LIB3061-116-Q6-K6-F11
ttagcgacgctcganacgaggggaaatcaggtggaggaagcttaaaattagaagtccagcgcaataattgagcaggcggcggcaggcccctcctaatcactgccctaacacatgtgtgccgggccgaggtcacaatcgatgcacggaggaggatgccgccgtagctgcggagattgataatataaagcgggcggagaccgccggcccctctggcctcgctgctcctccccccttcctccccccacatgcgctgcccccgcccggccctgccctgccctgccctgctgcgcccaagctgaatctccgcacagacaattagagtagctgcattggcggggaaagcgcaagaagctcagcagaaatggcggagcaggcaggcgccggaaggtactggtgccacatgtgcgccgcggtcgtgagccccgcggagggcgaggcggaggtgaagtgcccgcattgccacagcggcttccttgaggagatggagaccgtccgcggcacgcccgcggccgatgacggcgacggtgacggcgcggtggctcaagtgtaccccggcgccgaccgcccgagctccatctgggcgcacgctatcctcagcacggtcgacagctccgtccgccgccgccgcaaccggcggcag

SEQ ID NO: 11040 - DNA, 618 bp, Zea mays
  unsure (1)..(618): unsure at all n locations; Clone ID: LIB3061-116-Q6-K6-F2
ctgcanaaaagggagcagcagctttgatcgggtggagtttcttgctcactgatcgtcgagtgaagcctttgtggtccgtgacgatgtcgaggagagccgcagcgttgttgctcgcgtgcctcgtcgccgtgacagcggcggcgctggcggacggcgcgctgctcccgtggttcggcgacggccggcgcgggctcgacgaggcagcggtgaccgacgtgggcctcctggcggccgacccgttccggatcctggagcacgtccccttcggcttcgaccgggacgacgtggccatggtctccatggcgcgcgtggactggcgcgagacccccgacgcgcacgagatcgtggtcgacgtgcccgggatgcgcagggaggacctcaggatcgaggtcgaggacaacagggtgctgcgcgtcagcggcgagcggcggcgcgctgaggagcgcaagggcgaccactggcaccgcgaggagcgctcctacggcaggttctggcgccggttccgcctccccgagaacgccgacctcgactccgtcgccgccagcctcgacagcggcgtcctcaccgtgcgattcaggaagctggcgcccgagcagatcaagggcccgcgcgtcgtcg

SEQ ID NO: 11041 - DNA, 660 bp, Zea mays
  unsure (1)..(660): unsure at all n locations; Clone ID: LIB3061-116-Q6-K6-F4
ttttacacagnaattcatgttcaacaacaacaacaacaaccgcagcaccaacaacaacaacaacaacaacagcaccaacaacaacatcaatgtgaaggccaacaacaacatcaccaacaatcacaaggccatgtgcaacaacacgaacagagccatgagcaacaccaaggacagagccatgagcaacaacatcaacaacaattccagggtcatgacaagcagcaacaaccacaacagcctcagcaatatcagcagggccaggaaaaatcacaacagcaacaatgtcattgccaggagcagcaacagactacaaggtgcagctataactactatagcagtagctcaaatctaaaaaattgtcatgaattcctaaggcagcagtgcagccctttggtaatgccttttctccaatcacgtttgatacaaccaagtagctgccaggtattgcagcaacaatgttgtcatgatcttaggcagattgagccacaatacattcaccaagcaatctacaacatggttcaatccataatccaggaggagcaacaacaacaaccatgtgagttatgtggatctcaacaagctactcaaagtgcggtggcaatcttgacagcagcacaatacctaccatcaatgtgcggcttgtaccactcatactaccaa

SEQ ID NO: 11042 - DNA, 621 bp, Zea mays
  Clone ID: LIB3061-116-Q6-K6-F5
gtcctcactggtgctcctccatcttccaagtcaccaacgcaaattgcaccaagaatccatcgagaggccgtcgacaggggaattaatggcgtcgtcgtctagcagcagccaccgccgcctcatcctcgcagccgccgtcctgctctccgtgctcgcggctgccagcgccagcgccgggacctcctgcgtgccggggtgggccatcccgcacaacccgctcccgagctgccgctggtacgtgaccagccggacctgcggcatcgggccgcgcctcccgtggccggagctgaagaggagatgctgccgggagctggcggacatcccggcgtactgccggtgcacggcgctgagcatcctcatggacggcgcgatcccgccgggcccggacgcgcagctggagggccgcctagaggacctgccgggctgcccgcgggaggtgcagaggggattcgccgccaccctcgtcacggaggccgagtgcaacctggccaccatcagcggcgtcgccgaatgcccctggattctcggcggcggaacgatgccctccaagtaactgcgaagagcatagtgcatgaggaatgagcttgtagctagctcatatgtctgaataataagcacagc

SEQ ID NO: 11043 - DNA, 639 bp, Zea mays
  Clone ID: LIB3061-116-Q6-K6-F6
caggtgcttctcgtctgagaccgagctaacgagctcaccggcgggcaggatgctggcggcgtccaccaaggtcggctctaggctggcctctccgcacgcctccttgtccgccggtgctgcggcggcggcactggcgagctcccccgtgctgggctctgggatgctcccaggcgccgggttcggcgagacggggagtcaccacgcggcagacgcgccgccggcgctgccttgcagttcctcgggcgattcaagggaatattatcagtggaagagactggtgaatcaaaggcagtcaacgctagatggaggcaaagtgcctgctgcattgggccaccatgtttttggtgcgggctgttcctcacggaaccaacatatctacagatatttttcatcttctcatcaagggagtatatgggccgggagcaaggttctacatgacctgccagggtatgtaaaaattgtggaagtagggccacgagatggtctacagaacgagaaggacatcgtgccaacacctgtaaaggttgagcttatacgaagattggccacatctggattacctgttgtggaggcaacgagttttgtatctccaaaatgggtacctcagttagctgatgcgaaggagttatggaagcagtc

SEQ ID NO: 11044 - DNA, 575 bp, Zea mays
  Clone ID: LIB3061-116-Q6-K6-F7
tttgttcctccaacaccgtcagccctattacagcagttacctttggtgcatttgttggcacaaaacatcaaggcacaacaactacaacaacttgtgctaggaaaccttgctgcctactctcagcaacagcagtttcttccattcaaccaactggctgcattgaactctgctgcttatttgcaacaacaactaccattcagtcagctagctgctgcctacccccagcaatttcttccattcaaccaactggcagcattgaactctgctgcttatttacaacagcaacagctaccaccattcagccagctagctgatgtgagccctgttgccttcttgacacaacaacagttgttgccgttctacctgcacgctgcgcctaacgctggcaccctcttacaactgcaacaattgctgccattcaaccaacttgctttgacaaacccaacagcgttctaccaacaacccatcattggtggtgccctcttttagattgcttatgagttatacttcaataatgaagttttttggatgatgtttgtggcttcccagaaataagaaagtacatttctagattc

SEQ ID NO: 11045 - DNA, 287 bp, Zea mays
  unsure (1)..(287): unsure at all n locations; Clone ID: LIB3061-116-Q6-K6-F8
aacaagacaaaacaaggaaacngaccggggangaagcactgggaaccggngagaggaaggttaaatttttttccaaaactattgaggttattgttacaggttattttttttttttgnngntgntgnttaatggaggtgatagagtgagctattntgagattgtgacacatttaaatttctcatatgatgatgttgttttattgctgcattctttattttgtgcaaaatacaagattgttagtagtgtgcctagtggtagatgtatttgttgaaatgatgtttttggg

SEQ ID NO: 11046 - DNA, 670 bp, Zea mays
  Clone ID: LIB3061-116-Q6-K6-F9
ccggtccgaactccgggtcgcccagcgtctttctgtcacgatagaaggggagttgtaaagaagagggaccatcactaaaacttcagtgaagttagtgggcactggaagaaagccttacccgcaaaaaggaacaggaaaagcacgacatggaacactgcgcggtgcccagtttcgtggtggtgcaaccatgcatgggcctaaacctcgaagccatgcaatcaagctgcagaagaaagtacggcggctggggcttaagattgccttgtctgctcgaactgctgaggggaagctcttgatctttgaggacttggaagttcctagccacaagacgaaaaacattgtgcaatacattagacagatggatgactcaaagaaggttctgttggtggatggaggcgacattgataagaagctaaagttggccactcaaaaccttcactacgttaacgtacttccttccattggcctcaacgtctacagtatcctccagcatgacacccttgtaatgactcgggccgctatcaacagaatcgtcgagcggatgcatacccccatcaaccgctagcaaggggggtttctgagtcgcaccactgtttcttacagccagcaacctgtgctttttcgttccctggttcaagctcgaggtttcctgttatcttggtgctaacat

SEQ ID NO: 11047 - DNA, 645 bp, Zea mays
  Clone ID: LIB3061-116-Q6-K6-G1
tctctccccaatccagcagccctcgcgtctggtcccccacccctcagcgcgacgaaggtaagatgttcctgcggaggatcctgaccggcgggggcggcctggcggccctgagggcggcgcgcgccgtgaaggagacgacggggatcgtgggccttgaggtggtgcctaacgcgcgagaggttctggtagggctctacgagcgcacgctcaaagagatcaaggccgtccccgaagacgagggttaccgcaaggccgttgaatccttcaccggtcaccgcctccagatctgccaggaggaggaggactggaagcgcatcgaggaccgaatcggatgcgggcaggtcgaggagctcatcgaggaggccgaggacgagctcaagctcatcgctaaaatgattgaatgggatccatggggtgttcccgatgactacgaatgtgaggtgattgaagacgacaccccaattcctaagcatgttcctcagcaccggcctgttgctcttcctgaggagttcttcaaggcactagatgctgtcaaatctgatcctgctcttcaaggcgatgctcctcctcaagtgaaggcgtaaggatggctgttcctggctaacgtcatttcacattttgccgcggtgggtagggactggtttc

SEQ ID NO: 11048 - DNA, 641 bp, Zea mays
  unsure (1)..(641): unsure at all n locations; Clone ID: LIB3061-116-Q6-K6-G10
ttttgnaaagcacatagtgtaccaacaatggcagccaaaaattttgcttccttatgctccttggtctttctgcaagtgttgctaccganaccattttcccacaatgctcacaagctcctatagcttcccttcttcccccatacctctcaccagcggtgtcttcaatgtgtgaaaacccaattgttcaaccctacaggatccaacaggcaatcgcaacaggcatcttaccattatcacccttgttcctccaacaaccgtcagccctattacagcagttacctttggtccatttggtggcacaaaacatcagggcacaacaactacaacaacttgtgctagcaaaccttgctgcatactctcagcaacatcagtttcttccattcaaccaactggctgcattgaactctgctgcttatttgcaacaacaattaccattcagccagctagttgctgcctacccccagcaatttcttccattcaaccaactagcagcattgaactctgctgcttatttacagcagcaacaactactaccattcagccagctagctgatgtgagccctgctgccttcttgacacaacaacagttgttgccgttctacctgcacgctatgcctaacgctggcaccctcttacactgc

SEQ ID NO: 11049 - DNA, 631 bp, Zea mays
  Clone ID: LIB3061-116-Q6-K6-G11
tttttaaatcttcgatttgttctccagttcctccgaaagccagtaaaagcaggtctaggggtgctttcagatttgcactacgagaaagtcggcttttagaaaaagctgcttcctggatccagccctttggttggcttttggcttctaggggggaaaagccaaagccaaagccaaaagtcaaaccaaacacaccctgaaactgggccaacttcaggcacatcacatgatgctttctttttcactatgccttgctgcactgttcgcacgttacatcttggacttgaatgtgaccaagtagtgtccatatacagacgatcactcgatcagcatacatagatggtatttttgagattagaaccaatacttgacagatcttgcattctgaaaacggaaacgtaagcgtggcaatcttttaagacatgcataagatcttagtgccatgaggctaacatctgagacttggtgttttcagattatctccggaaaacatagtgcagggaaggtcttccaagtcaactaaggttggcgacatcatgactgaagaggtattacccccactaatattttttgtgtgtgtggtttgcatgatagctagaaccctgatagtataaagaccagtacctggtgacga

SEQ ID NO: 11050 - DNA, 425 bp, Zea mays
  unsure (1)..(425): unsure at all n locations; Clone ID: LIB3061-116-Q6-K6-G12
ctgctgcntgtatttgcagcggcgaggtaggagcagttagccagctagctactgcctactctcagcaacaacaacttcttccatttaaccaattggccgcactgaaccccgctgcttatttgcagcagcaaatactactgccatttagcgagctagctgcagcaagtgcgggcgtggggtggttgacacattttctgttgctgcctttctacaagcagtttgcggctaaccccgcaaccctcttacaactacaacaattgttgccctttgtccaacttgctttgacaaacccagcagcctcctaccaacaacacatcattggtggtgccctcttttagattgattattagttgtaattcaataataaagttttttggatgatgtatgtggccaaccagaaataagaagttacatttccagattct

SEQ ID NO: 11051 - DNA, 645 bp, Zea mays
  unsure (1)..(645): unsure at all n locations; Clone ID: LIB3061-116-Q6-K6-G3
gctgntgtgacagncagtgttattggtgaaggatgtgttattaaaaactgcaagataaaccattctgtagttggactccgatcttgcatatctgaaggtgctatcatagaggacagtttactaatgggtgcggactactatgagacagaagctgataaaaaactccttgccgaaaaagtggcattcctattggtattgggaaaaatcatgcatcaggagagcaatcattgacaagaatgctcgaattggagacaatgttaagatactcaatgctgacaatgttcaagaagctgcaatggagacagacgggtacttcatcaaaggtggaattgtcacagtgatcaaggatgctttactccctagtggaacagttatatgaagtgaacgtgcgacatgcagctgtgtgtctcgacattcgacaatgatcagcacctggttacatgcgtgatctgcagatcagtctgttggagatcatcggagcaataaaagtgtcatccaaggcattttttctttctttttgctcttttgtgtccttcaatgttgtagggtagaatgttgtagcagcaaatgttagttacatgttgaatcgacattgggggcctggatttggggatacatcatgctgtaaattgatcagtttaatta

SEQ ID NO: 11052 - DNA, 614 bp, Zea mays
  unsure (1)..(614): unsure at all n locations; Clone ID: LIB3061-116-Q6-K6-G4
tgctccgccgccgctggcgaccatgtccatggcggctatcttcgtcttcctcatcgtgtccgcgctgcagctgctcgatcgctacctcgacctcgccagaaagagcggaggacttagtgatgagcagatcaaagtgcggcttgaaatcaagcaacttctcaaggaggctgatcagttgtcaacgccgtccacatttgcacaagctgctaaactcaagcgcctggctgctgccaaggagaaggaactggcaaaaatgcaggaacatgaccttaaagggaagcaatccttatacgacaaatacacaaaatttttgttggttactaaggtcataatttatgctgtgctcgttctgtgcttttggagtactcctgtaactgcagttccacaacatcttctacagcccttcggaaaaagttttcctggagaggtgttgatactgccaccggcaatgttgtggttggaatactcccgtggctgtttttgacctctcgggtcagcaagatgctgtgccagaaactcggcttcgtgcttgtgcgtccgtagcgcctttccatgagaaagtcagcaagttgctgcacctaaacaagactgctagctntgntcttctatatctt

SEQ ID NO: 11053 - DNA, 637 bp, Zea mays
  Clone ID: LIB3061-116-Q6-K6-G6
gcaacataccatagtgaagtacactagcaacatcttagcaccaatggcagccaagatttttgccatccttgccctccttgctctttcagcaagcgttgctaccgcgactattattccacaatgctcacaacaatacctctctccggtgacagccgcgagatttgaatacccaactatacaatcctacaggctacaagaggccatcgcagcaagcatcttacggtcgttagcattgaccgtccaacaaccatatgccctattgcaacaaccatccttaatgaatctatatctccaaagaatcgcagcacaacaactacaacaacagttgcttccaacaatcaatcaagtagttgcagcgaaccttgctgcttacctccagcaacaacaatttcttccattcaatcaactagctggggtgaaccctgctgcttacttgcaggcacaacagctactaccattcaaccaacttgtcaggagccctgctgccttcttactgcagcaacagttgcttccattccatctacaagttgtggcaaacattgctgctttcttgcaacaacaacaacaattgctgccattttacccacaggttgtgggaaacattaacgccttcttgcaacagcaacagttgctacca

SEQ ID NO: 11054 - DNA, 666 bp, Zea mays
  Clone ID: LIB3061-116-Q6-K6-G7
cccgggcaactagcaacatagtttgtcacatagtgtaccaacaatgcgcagccaaaaattttgcctccttatgctccttggtctttctgcaagtgctgctacggcgaccattttcccgcaatgctcgcaagctcctatagcttcccttcttcccccgtacctctcaccagcggtgtcttcggtatgtgaaaacccaattcttcaaccctacaggatccaacaggcaatcgcagctggcatcttacctttatcacccttgttcctccaacaatcatcagccctattacaacagttacctttggtgcatttattggcacaaaacatcagggcacaacaactacaacaacttgtgctagcaaaccttgctgcctactctcagcaacagcagtttcttccattcaaccaactaggttcattgaactctgcttcttatttgcaacaacaacaactaccattcagccagctacctgctgcctacccccagcaatttcttccattcaaccaactagcagcattgaactctcctgcttatttacagcagcaacaactactaccattcagccagctagctggtgtgagccctgctaccttcttgacacaaccacagttgttgccgttctaccagcacgttgcgcctaacgctggcaccctcttacaactgcaaca

SEQ ID NO: 11055 - DNA, 636 bp, Zea mays
  unsure (1)..(636): unsure at all n locations; Clone ID: LIB3061-116-Q6-K6-G8
ttttcaaaacnacaccaagcgaagcgcactagcaacgacctaacaccaatggctaccaagaattagccctccttgcgcttcttgcccttttagtgagcgcaacaaatgcgttcattattccacagtgctcacttgctcctagtgccagtattccacagttcctcccaccagttacttcaatgggcttcgaacatccagccgtgcaagcctacaggctacaactagcgcttgcggcgagcgccttacaacaaccaattgcccaattgcaacaacaatccttggcacatctaaccctacaaaccattgcaacgcaacaacaacaacaacagtttctgccatcactgagccacctagccgtggtgaaccctgtcacctacttgcaacagcagctgcttgcatccaacccacttgctctggcgaacgtagctgcataccagcaacaacaacagctgcaacagtttatgccagtgctcagtcaactagccatggtgaaccctgccgtctacctacaactactttcatctagcccgctcgcggtgggcaatgcacctacgtacctacaacaacagttgctgcaacaaattgtaccagctctgactcagctagctgtggcaaaccctgctgcctacttacaac

SEQ ID NO: 11056 - DNA, 282 bp, Zea mays
  unsure (1)..(282): unsure at all n locations; Clone ID: LIB3061-116-Q6-K6-G9
ggggcgcagntgngcgaggcggngagggaggggagggacaggcgctgccttttttatgtccacgacaacggggtntgcncgggtttttttttttttttccggccggncaccggccgggagaggggggaggcggagggcccccccccgcgcgcgctgggcctgccgctgccgcgttgtcagcggctgcaggacgtgaggctggagtgccggtgcgccgacatgcgccgtgtggtgaggcgctgcgcggtgngcttgccgattccttttggggatgggctggtc

SEQ ID NO: 11057 - DNA, 653 bp, Zea mays
  unsure (1)..(653): unsure at all n locations; Clone ID: LIB3061-116-Q6-K6-H1
gcaacanagnaaagtggaaccagtagcaacaatagagcaacaatggcgaccaagatattttccctccttatgctccttgctctttctacatgtgttgctaacgcgacaattttccctcaatgctcacaagctcctatagcttcccttcttcccccataccttccatcaattatagcttcaatatgtgaaaacccagctcttcaaccatataggcttcaacaagcaatcgcagcaagcaacatacctttatcgcccttgttgtttcaacaatcgccagccctatctttggtgcagtcattggtacaaaccatcagggcacaacagctgcagcaactcgtgctacctctgatcaaccaagtagctctggcaaacctttctccctactctcagcaacaacaatttcttccattcaaccaactgtctacactgaaccctgctgcttatttgcagcaacaactattaccatttagccagctagctactgcctactctcagcaacaacaacttcttccatttaaccaattggccgcactgaaccccgctgcttatttgcagcagcaaatactactaccatttagccagctagctgcagcaaaccgtgcttccttcttgacacagcaacagttgctgcctttctaccagcagtttgcggc

SEQ ID NO: 11058 - DNA, 453 bp, Zea mays
  unsure (1)..(453): unsure at all n locations; Clone ID: LIB3061-116-Q6-K6-H11
ttttaatgttaagnaactcaatgctggcaatgttcaagaagctgcaagggagacagacgggtacttcatcaaaggtggaattgtcacagtgatcaaggatgctttactccctagtggaacagttatatgaagtgaacgtgcgacatgcagctgtgtgtctcgacattcgacaatgatcagcacctggttacatgcgtgatctgcagatcagtctgttggagatcatcggagcaataaaagtgtcatccaaggcattttttctttctttttgctcttttgtgtccttcaatgttgtagggtagaatgttgtagcagcaaatgttagttacatgttgaatcgacattgggggcctggatttggggatacatcatgctgtaaattgatcagtttaattaccatactgtgctgctttgagcgaagccatggagaccatgctccacttttgtgccntg

SEQ ID NO: 11059 - DNA, 566 bp, Zea mays
  unsure (1)..(566): unsure at all n locations; Clone ID: LIB3061-116-Q6-K6-H12
ctcngccccctcgcagccgaggcgcgggggggggggggggtggtctcgccgcgcacgcctcctgaagcttctagacgttcgaggaggaggaggaggaggggaggctcccgccgccgccgtagccatggcgtccaccaaggtgcagcgtatcatgacccagcccatcaacctcatctggggtgggctgcagagtttttttctcatccagatctggctcttcgagcagaaggacctccggattgagggtcgcatcatcggattcgatgagtacatgaacttggtcctcgaagatgctgaggaaatcaacgtcaagaaaaacactaggaagacactgggccggatactcctcaaaggtgacaacataactttgatgatgaacagtggcaagtgaaagttcttatggcaggaacgatgtttggtgctcgcgttgagtatttctggcacgttgtactccatccattcagacttacatgtatcatgtcattgtggattagtgagagagttgtacctgctgttaatgacctgagtaaaattatgctagatgctggtcacttgtgtgtgccnna

SEQ ID NO: 11060 - DNA, 648 bp, Zea mays
  unsure (1)..(648): unsure at all n locations; Clone ID: LIB3061-116-Q6-K6-H2
cgtccggtccaactagcaacatagnaaagcacatagtgtaccaaccaatggcagccaaaaattttgcctccttatgctccttggtctttctgcaagtgctgctacggcgaccattttcccgcaatgctcgcaagctcctatagcttcccttcttcccccgtacctctcaccagcggtgtcttcggtatgtgaaaacccaattcttcaaccctacaggatccaacaggcaatcacagctggcatcttacctttatcacccttgttcctccaacaatcatcagccctattacatcagttacctttggtgcatttattggcacaaaacatcagggcacaacaactacaacaacttgtgctagcaaaccttgctgcctactctcagcaacagcagtttcttccattcaaccaactagctgcattgaactctgcttcttatttgcaacaacaacaactaccattcagccagctacctgctgcctacccccagcaatttcttccattcaaccaactggcagcattgaactctcctgcttatttacagcagcaacaactactaccattcagccagctagctggtgtgagccctgctaccttcttgatacaaccacagttgttgccgttctaccagcacgctgcgcctaacgctgg

SEQ ID NO: 11061 - DNA, 665 bp, Zea mays
  unsure (1)..(665): unsure at all n locations; Clone ID: LIB3061-116-Q6-K6-H3
ctacaagcaacatagnaagtggaatccagtagcaacaacagagcaacaatggcgaccaagatattttccctccttatgctccttgctctttctgcatgtgttgctaacgcgacaattttccctcaatgctcacaagctcctatagcttcccttcttcccccataccttccatcaatgatagcttcagtatgtgaaaacccagctcttcagccctataggctccaacaagcaatcgcagcaagcaacatacctttatcacccttgttgtttcaacaatcgccagccctatctttggtgcagtcattggtacaaaccatcagggcacagcagctgcagcaactcgtgctacctgtgatcaaccaagtagctctggcaaacctttctccctactctcagcaacaacaatttcttccattcaaccaactgtctacactgaaccctgctgcttatttgcagcaacaactattaccattcagccagctagctactgcctactctcagcaacaacaacttcttccatttaaccaattggccgcactgaaccccgctgcttatttgcagcagcaaatactactaccatttagccagctagctgcagcaaaccgtgctttcttcttgacacagcaacagttgctgcctttctaccagcagtttgcggctaaccc

SEQ ID NO: 11062 - DNA, 650 bp, Zea mays
  unsure (1)..(650): unsure at all n locations; Clone ID: LIB3061-116-Q6-K6-H4
ccagtacagcanaacggcagtgcgtagagaggatcgtcgaacagaacagcatgaagatggtcatcgttctcgtcgtgtgcctggctctgtcagctgccagcgcctctgcaatgcagatgccctgcccctgcgcggggctgcagggcttgtacggcgctggcgccggcctgacgacgatgatgggcgccggcgggctgtacccctacgcggagtacctgaggcagccgcagtgcagcccgctggcggcggcgccctactacgccgggtgtgggcagccgagcgccatgttccagccgctccggcaacagtgctgccagcagcagatgaggatgatggacgtgcagtccgtcgcgcagcagctgcagatgatgatgcagcttgagcgtgccgctgccgccagcagcagcctgtacgagccagctctgatgcagcagcagcagcagctgctggcagcccagggtctcaaccccatggccatgatgatggcgcagaacatgccggccatgggtggactctaccagtaccagctgcccagctaccgcaccaacccctgtggcgtctccgctgccattccgccctactactgattcatgatatttgggaaatctcctctatccatctctctctatctatatatgtaataatgcagt

SEQ ID NO: 11063 - DNA, 564 bp, Zea mays
  Clone ID: LIB3061-116-Q6-K6-H5
tgttcatcatcagcccttatacagcagttacctttggtgcatttattggcacaaaaatcagggcacaacaactacaacaacttgtgctagcaaaccttgctgcctactctcagcaacagcagtttcttccattcaaccaactagctgcattgaactctgcttcttatttgcaacaacaacaactaccattcagccagctatctgctgcctacccccagcaatttcttccattcaaccaactgacagcattgaactctcctgcttatttacagcagcaacaactactaccattcagccagctagctggtgtgagccctgctaccttcttgacacaaccacagttgttgccgttctaccagcacgctgcgcctaacgctggcaccctcttacaactgcaacaattgctgccattcaaccaacttgctttgacaaacccagcagcattctaccaacaacccatcattggtggtgccctcttttagatttcttatgagttatagttcaataataaagttttttgtctgatgtttgtggcttcccagaaataagaaagtacatttctag

SEQ ID NO: 11064 - DNA, 649 bp, Zea mays
  Clone ID: LIB3061-116-Q6-K6-H6
tctctctacctctcaccagcggtgtcttcaatgtgtgaaaccccaattgttcaaccctacaggatccaacaggcaatcgcaacaggcatcttaccattatcacccttgttcctccaacaaccgtcagccctattacagcagttacctttggtccatttggtggcacaaaacatcagggcacaacaactacaacaacttgtgctagcaaaccttgctgcatactctcagcaacatcagtttcttccattcaaccaactggctgcattgaactctgctgcttatttgcaacaacaattaccattcagccagctagttgctgcctacccccagcaatttcttccattcaaccaactagcagcattgaactctgctgcttatttacagcagcaacaactactaccattcagccagctagctgatgtgagccctgctgccttcttgacacaacaacagttgttgccgttctacctgcacgctatgcctaacgctggcaccctcttacaactgcaacaattgctgccattcaaccaacttgctttgacaaacccaacagtgttctaccaacaacccatcattggtggtgccctcttttagattgcttatgagttatagttcataatgaagtttttggatgattgttgtggcgtcc

SEQ ID NO: 11065 - DNA, 320 bp, Zea mays
  Clone ID: LIB3061-116-Q6-K6-H7
gtagtccttcctgcagcagcagccgcagggcgagctcgcggcgctgatggcggcccaggtagcgcagcagctgacggcgatgtgcggcctgcagctgcagcagccaggtccctgcccttgcaacgcagctgccggcggtgtctactactgaggaaactatgtactgtagtaataatgtaatggagccgctgactagctacctagctcgctagtttactcatttagcggcgatgagtaacgtagtgtcacccatcaccatgggtggcagtgtgagcaatgacctgaatgaaccattgaaatggaaaggaataatatatagg

SEQ ID NO: 11066 - DNA, 378 bp, Zea mays
  unsure (1)..(378): unsure at all n locations; Clone ID: LIB3061-116-Q6-K6-H9
gggggggggggggggcaaaaaacaactcgggctggtggcgctacactctcactaccaggacattaacgttgtccaggccatagcgcagcagctacacctccagcagtttggcgatctctacattgaccttaatctgnctcaagcgcgggggggggggggttttttttttttttctacatatcntatctaccctangtactatagtgcaccgggtactccccccacccttggcggtgtcttgtactgaattttcacactattgtagttcgggggtgaaaatataagctcaggtatcatcgtatgtgacatgtgagacttaaggtgatctaaatagaattctaattatctttccatatttaagttaccagcaggaacaag

SEQ ID NO: 11067 - DNA, 636 bp, Zea mays
  unsure (1)..(636): unsure at all n locations; Clone ID: LIB3061-117-Q6-K6-A10
aaaaaaaaaaaaaaaaagaaaaaaaagaaaanaaagagaaaaaaaaaaaaaaaaaaaaaaaaaaaaanaaaangaaaaaaaaaaaaaaaaaaaaaaaaaaaagagggggggggggggggaaattttttttttttttaaaaaaanaaaaaaaaaaaaaaaaaaaaaaaaaagaaaaaaaaaaaaaggaaaaaaaaaaaaaaaaaaaaaaaaaaaaaaaagaaaaaaaaaaaaaaaaaaaaaagaaagaagaaaaaaaaaaaaaaaaaaaaaaaaaaaaaaaaaaaaaaaaagaaaaaagaaaaaaaaagaaaaaaaaaaaaaaaaaaagaaaaaaaaaaagaaaaaaaaaaaaaaaaaaaagaaaaaaaataaaaataaaaaaaaaaaaaagaaaaaaaaaaagaaaaaagggaagaagaaaaaaaaaaagaaaataagaaaagaaaaaaaaaaaaaaaaaaaaaaaaaaaaaaggaaaaaagaaaaagagataaaaaaataaaaaaaaaaaaaaagagaaaaaaaaaataaaaaaaaaaaaaagaaaggtagaaaaaaaaaaaaaaaaagagaaaaaagaanaaaaagngaaaaaataaaaaaaaaaggaaaaccaaacccccccccccccccccc

SEQ ID NO: 11068 - DNA, 643 bp, Zea mays
  Clone ID: LIB3061-117-Q6-K6-A11
ataggagcttgccttcttgggggggggggggggccagcggtgtcttcggtatgtgaaaacccattcttcaaccctacaggatccaacaggcaatcacagctggcatcttacctttatcacccttgttcctccaacaatcatcagccctattacatcagttacctttgggggggggaggggcacttttttttagggcacaacaactacaacaacttgtgctagcaaaccttgctgcctactctcagcaacagcagtttcttccattcaaccaactagctgcattgaactctgcttcttatttgcaacaacaacaactaccattcagccagctacctgctgcctacccccagcaatttcttccattcaaccaactggcagcattgaactctcctgcttatttacagcagcaacaactactaccattcagccagctagctggtgtgagccctgctaccttcttgatacaaccacagttgttgccgttctaccagcacgctgcgcctaacgctggcaccctcttacaactgcaacaattgctgccattcaaccaacttgctttgacaaacccagcagcgttctaccaacaacccatcattggtggtgccctcttttagattcttatgagttatagttcaataataac

SEQ ID NO: 11069 - DNA, 589 bp, Zea mays
  unsure (1)..(589): unsure at all n locations; Clone ID: LIB3061-117-Q6-K6-A12
catagcactgtctgttatctggggaggggcgggggcgnataagttcacattgttggagagacaatagcaatgaagcagaaagtaataacttagattgtgttgataaagtgactctacttgaaaataaggtgcagcttgagccagtaaaagacaatgttcctggtatctgcgggggggggggtgattctnctttttttcctgagtttgaggggcctgctgatgctagattcgatgttaagactgcagtgaaggtgtactcgccggaggaatatgaacaacttaaatctgagaaggcaaatttggagggagaactagcaaagtgcaacaaaataatagaagaaacaatggctaggttaagtgatatggagaaaaaactggaagacctgacatctaagttggctgacagtgagaaatcaaatagcttgaatgagacacagttgaagtgtatggctgaatcctacaagtcacttgaatcaaggaaaattgaattagaaaatgagatagaagcgttacggtccagaatagatgctctaacagctgaactctttgatgaaagacagagtcatcaggaggacttagttaaatacag

SEQ ID NO: 11070 - DNA, 537 bp, Zea mays
  unsure (1)..(537): unsure at all n locations; Clone ID: LIB3061-117-Q6-K6-A3
ttgtgggcgacgcgctctcggcgctgcgccgngacctcaggnaccccggcggcgttctgcagagctgggaccccacgctcgtcaacccctgcacctggttccacgtcacctgcgaccgcgacaaccgcgtcacccgcctagatcttggtaatttgaacttatctggtcatctggtgcctgagcttgggaaactggagcatcttcagtatctggaactttataagaataacattcaaggaacaatcccttctgagcttggcaatttgaagaatctaataagcttcgacttgtacaagaacaacatttcggggacaatacctcctgcccttggaaagttgaagtcccttgtattcttgcgtctcaatggcaatcatttgactgggcccatcccaagggaactcgctggaatatctagtctcaaagttgttgatgtttcaagtaatgatttgtgcgggacgattcccacgtctggaccatttgagcatattcctctgagcaactttgagaagaacccgcgcttggaaggtccagagctac

SEQ ID NO: 11071 - DNA, 526 bp, Zea mays
  unsure (1)..(526): unsure at all n locations; Clone ID: LIB3061-117-Q6-K6-A5
tgttcacatagtgtaccaacaatggcagccagaaaattttgcttccttatgctccttggtctttctgcaagtgctgctaccgcagaccattttcccacaatgctcacaagctcctatagcttcctttcttcccccatacctctcaccagcggtgtcttcagtatgtgaaaacccaattcttcaaccctacaggatccaacaggcaatcgcagcaggcatcttacctttatcacccttgttcctccaacaaccgtcagccctattacagcagttacctttggtgcatttgttggcacaaaacatcaaggcacaacaactacaacaacttgtgctaggaaaccttgctgcctactctcagcaacagcagtttcttccattcaaccaactggctgcattgaactctgctgcttatttgcaacaacaactaccattcagtcagctagctgctgcctacccccagnaattttttccattcaaccaagtggtagaattgaactntgtgtgttatttacaacagtatcaggta

SEQ ID NO: 11072 - DNA, 626 bp, Zea mays
  unsure (1)..(626): unsure at all n locations; Clone ID: LIB3061-117-Q6-K6-A6
cacagcagnaaggtgaaagggagcggatatgggggccggatcgtttcctgagcgtggcggagggcggcctcggcggcgaggcgctctacttcgcggtcatcctgtggctgtccgtcatgtcgtggatcatcttcacctgggtcggcgacggcggggaggacgggaggcgggggaggaagcgccggggcagccgcggcagcccggtgttcgtcggcgcgtcggggatctgcgacggcaccgggcccgagtgcagcggcgggtacggcatctgcggcacctgcctcgactagcctgctctgctactagtaagtttgtgtgagcgtcaaaagcgcggccatgtttgtagctgtagcgtctacatgtcgtcgtcgatgcgtggcctcgatggagaagctggcgttgctctggtgatatgatgagagcagagcagctcccctgtgtgaagacaataagagggaggagcctactcatcagcctacttccatcttgcttattaggctgctcaaactgagttgtcgttagctcttttttttatttctccttcctttaaagtttgatctcgatcctctgtaaatttaagctgcagaagaaccaaatacatgaaaaaaaaaaaaaaaggcggccgc

SEQ ID NO: 11073 - DNA, 562 bp, Zea mays
  unsure (1)..(562): unsure at all n locations; Clone ID: LIB3061-117-Q6-K6-A7
cccanattgcatatggagagcagtgaaccagaacatatttcaatctggtggagcctcattcaatcatgggttatgcatgagttttgctgatccggaggttgtaattggttgtgaggatggtcgagcctttgtatatgatatgtacagcaggagttgctcacgtatttatcggcttcactcctctcctgtgacatgtttgatgataacggatgaccagctgattgttggtggatcaacttttggaaatgtagctattgcagatcaaacctcagggcagaagttaggtgttctaaaatcagatcatggaccattggcaataagatccttatcttcctgcacaaattcacacatgatatttgctggttcgtcagctggttatgcacattgctgggacttaaggactttgaggcctctctgggaaaaaagagtcagcccaaatgtcatctacagcacacgtcatttgcccggtgacacggcaacgctggcagttggaggcattgacggcgtgctccgcgttatatgccaaagaactggtgacatcattcgcagtcttgtcgttgac

SEQ ID NO: 11074 - DNA, 637 bp, Zea mays
  Clone ID: LIB3061-117-Q6-K6-A8
cagcacaacgcacggagtcagagtgggggcagcgctcgctaatcgccatagcctatagctgtagagaactgctccgggaggaagtagacaaggagagagagagagaggtcaacagggcactgccggatccggagccaaaaaaaaaacccagaaggatccatggctcccggagccggagacgactctgatcccgcctcttatatccacacggtgcagcacctgatagagaggtgcatgacgttcgggatgagcatggaggagtgcatggaggcgctggcgaagcgcgccgacgtccaacccgtggtcacctccacagtgtggaaggagctggagaaggagaacaaggagttcttcgacaagtacaggcagtggatctcggagaagagaagcgggagtacctcctagtcctagtagcacgggactcgatcgtgtctctctgctggcttagctcgctttaaattagcccgtgatgtgtattacgtgtgcttagttattttaggatttattattacttactgtgtttgattagggaggaataagcggtagggagggagggaggcttgtaatgtgattctctgtaagcaagcagagcagtagtcacctgtacggcgcgggctgtggcgttatgtgtacaggg

SEQ ID NO: 11075 - DNA, 638 bp, Zea mays
  Clone ID: LIB3061-117-Q6-K6-A9
tctgctcttccagccgccgccgccgcgtgggggtgggggagcgcagcagccgccgcagcacatcgctatctcgatctcagccatggcggaggtggagcagcaacaggacacgccgaagctgttcaaccgctggaccttcgatgatgtccaggtgaacgacatctcgctgaacgactacctggctgtgaacgcgactaagcacgcgatgtacctgccgcacaccgcggggcgttactccaagaagcggttccgcaaggcgcagtgcccgatcgtcgagcgcctcacaaactccctcatgatgcacgggcgcaacaacggcaagaaggtcatggctgtccgcatcatcaagcataccctggagatcattcacctgctcaccgatgccaaccccatccaggtcgtcgtcgacgcgatcatcaacagtggaccccgtgaggatgccacccgtattggttccgctggtgttgtgaggaggcaggccgtggatatctcacccctgaggagggtgaaccaggccatctacctcctcaccactggtgccagggagagtgctttccggaacatcaaaaccattgccgagtgccttgcagatgagctgatcaacgctgccaagggctcatccaacagttacgccatca

SEQ ID NO: 11076 - DNA, 651 bp, Zea mays
  Clone ID: LIB3061-117-Q6-K6-B1
cttctttcattcgccgccgccgcctcctctctgctgccgtcgccatggggagaaggcctgcgagatgctatcgccaaatcaagaacaagccataccccaagtccaggtactgccgtggtgtccctgaccccaagattaggatctacgatgttggcatgaagagaagggtgttgatgagtttcccctactgtgtgcaccttgtctcttgggagaaggagaatgtctccagtgaggctcttgaggctgcccgtattgcctgcaacaagtacatgaccaagtctgcaggaaaggatgccttccaccttcgggtccgggttcaccccttccatgtccttcgtatcaacaagatgctttcgtgtgctggggctgataggctccagactggaatgaggggtgcctttggcaagcctcagggcacctgtgctagggtggacattggtcaggtactcctttctgttcgatgcaaggacaacaatgctgcacatgccagtgaagctctgcgacgcgccaagttcaagttccctggccgccaaaagatattgagagcagaaagtggggcttcaccaagttcagccgtgccgacttacctgagtacaagagtgagggtagaattgttcctgatggtgtcaacgcaaagctgctccgtaacca

SEQ ID NO: 11077 - DNA, 641 bp, Zea mays
  unsure (1)..(641): unsure at all n locations; Clone ID: LIB3061-117-Q6-K6-B10
agcaacatagnaagcacaatagtgtaccaacaatggcagccaaaatattttgcctccttatgctccttggtctttctgcaagtgctgctacggcgaccattttcccgcaatgctcgcaagctcctatagcttcccttcttcccccgtacctctcaccagcggtgtcttcggtatgtgaaaacccaattcttcaaccctacaggatccaacaggcaatcacagctggcatcttacctttatcacccttgttcctccaacaatcatcagccctattacatcagttacctttggtgcatttattggcacaaaacatcagggcacaacaactacaacaacttgtgctagcaaaccttgctgcctactctcagcaacagcagtttcttccattcaaccaactagctgcattgaactctgcttcttatttgcaacaacaacaactaccattcagccagctacctgctgcctacccccagcaatttcttccattcaaccaactggcagcattgaactctcctgcttatttacagcagcaacaactactaccattcagccagctagctggtgtgagccctgctaccttcttgatacaaccacagttgttgccgttctaccagcacgctgcgcctaacgctggcaccctc

SEQ ID NO: 11078 - DNA, 654 bp, Zea mays
  unsure (1)..(654): unsure at all n locations; Clone ID: LIB3061-117-Q6-K6-B11
tctattagcaacatagnaagcacaatagtgtaccaacaatggcagccaaaaattttgcttccttatgctccttggtctttctgcaagtgctgctaccgcaaccattttcccacaatgctcacaagctcctatagcttcctttcttcccccatacctctcaccagcggtgtcttcagtatgtgaaaacccaattcttcaaccctacaggatccaacaggcaatcgcagcaggcatcttacctttatcacccttgttcctccaacaaccgtcagccctattacagcagttacctttggtgcatttgttggcacaaaacatcaaggcacaacaactacaacaacttgtgctaggaaaccttgctgcctactctcagcaacagcagtttcttccattcaaccaactggctgcattgaactctgctgcttatttgcaacaacaactaccattcagtcagctagctgctgcctacccccagcaatttcttccattcaaccaactggcagcattgaactctgctgcttatttacaacagcaacagctaccaccattcagccagctagctgatgtgagccctgttgccttcttgacacaacaacagttgttgccgttctacctgcacgctgcgcctaacgctggcaccctcttacaactgca

SEQ ID NO: 11079 - DNA, 516 bp, Zea mays
  unsure (1)..(516): unsure at all n locations; Clone ID: LIB3061-117-Q6-K6-B12
ctcngcaacaactcgtgctccagggggcggggggtggctctggcaaacctttctccctactctcagcaacaacaatttcttccattcaaccaactgtctacactgaaccctgctgcttatttacaacaacaacaactactaccattcagccagctagctactgcctactctcagcggcggcagtttcttttttttaaccaattggccgcactgaacccctctgcttatttccagcagcaaatactactaccatttggccagctagctacaacaagccccacttcctttttgaaacaacaacaattgcttccgttctaccagcagtttgtggctaaccccgcaaccctcttacaactgcaacagttgctgccctttgtccaacttgctttgacaaacccagcagccttctaccaacaacacatcattggcggtgccatcttttagattgcttattagttgtaattcaataatgaagttttttggctgatgtatgtggcctcctagaaataagaagtt

SEQ ID NO: 11080 - DNA, 644 bp, Zea mays
  unsure (1)..(644): unsure at all n locations; Clone ID: LIB3061-117-Q6-K6-B2
taaacacaccaagcgaacgcactagcaacaacctaacaacaatggctaccaagnaattatccctccttgcgcttcttgcgctttttgcgagcgcaacaaatgcgtccattattccacaatgctcacttgctcctagttccattattccacagttcctcccaccagttacttcaatggccttcgaacacccagctgtgcaagcctataggctacaacaagcgattgcggcgagcgtcttacaacaaccaattgcccaattgcaacaacaatccttggcacatctaacaatacaaaccatcgcaacgcaacagcaacaacagttcctaccagcactgagccacctagccatggtgaaccctgtcgcctacttgcaacagcagctgcttgcatccaacccacttgctctagcaaacgtagttgcaaaccagcaacaacaacaactgcaacagtttctgccagcgcttagtcaactagccatggtgaaccctgccgcctacctacaacagcaacaactgctttcatctagcccgctcgctgtggccaatgcacctacatacctgcaacaagaattgttgcaacagattgtaccagctctaactcagctagctgtggcaaaccctgttgcctacttgcaacagctgctt

SEQ ID NO: 11081 - DNA, 640 bp, Zea mays
  unsure (1)..(640): unsure at all n locations; Clone ID: LIB3061-117-Q6-K6-B3
gttgcgcaacaatgcgttcattattccacaatgctcacttgctcctagtgccattattccacagttcctcccaccagttacttcaatgggctacgaacacctagctgtgcaagccaacatgcaacaacaagcgcttgcggcgagcgtcttacaacaaccaattgcccaattgcaacaacaatccttgccacatctaacaatacaagccatcacaacgcaacagcaacaacagttcctaccagcactgagccacctagccatggtgaaccctgccgcctacttgcaagagcagctgcttgcatccaacccacttgctctggcgaacgtagttgcaaaccagcaacaacaacagctacaacagtttctgccaacgctcagtcaactagccatggtgaaccctgccgcctacgtacaacaacaacaactgctttcatctagcccgctcgctgtgggcaatgcacctacatacctgcaacaacaattgttgcaacagattgtaccagctctgactcaactagctgtggcaaaccctgttgcctacttgcaacagctgcttncattcaaccaactgactctgtcgaactctgctgcgtacctacaacagcgacaacagttacttaatccattgttagtggctaac

SEQ ID NO: 11082 - DNA, 495 bp, Zea mays
  Clone ID: LIB3061-117-Q6-K6-B4
tccgtaaaaaaaaaaaaaaaaaaaaaaaaaaaaaaaaaaaaaaaaaaaaaaaaaaaaaaaaaaaaaaaaaaaaaaaaaaaaaaaaaaaaaaaaaaaaaaaaaaaaaaaaaaaaaaaaaaaaaaaaaaaaaaaaaaaaaaaaaaaaaaaaaaaaaaaaaaaaaaaaaaaggttgaaaaaaaaaaaaagggggggggtgtttttagggggattttttttttttttggggggggttaagggggttattttttttttttggggggaaaataattaaattggggggggggggttttaaaaaaggggggggggggaaaaaagggggggggataaaaattttattttttttgaaaaaaatttttttttagggggggggaaaaaaagaagggggggtggaagtttttttttttaaaaagggtggggggttttgtggggagggggggtttttttttttttgggtatttatttaggggggggggggggttttttatttggggggg

SEQ ID NO: 11083 - DNA, 90 bp, Zea mays
  Clone ID: LIB3061-117-Q6-K6-B6
tattgacagcaccccgcatctcctctcctggacgcgacgccgtccccaacctctccgtcccgcgccgccgccgcgcctcactgtgctcgc

SEQ ID NO: 11084 - DNA, 652 bp, Zea mays
  Clone ID: LIB3061-117-Q6-K6-B8
tttgtatcccacaacgaaaactaccaaaaaattagaaatccccaaatccgcgagatctatcagtatcgagcgatttaccgatccgattgctagggtttagtttcgaaaaagaactctgaaaaaaattctggtcgaggggaggagacgatggcagcgcaagtggcggcggtggtggtgccgaatgggagcccgggcgctgtccccgcggtggtgtcgccgggagcggtcggcgtcggactcggcgtggcgcagccgctcccgaccacgtcgctctacgtcggcgacctggaggggtccgtctcggactcgcagctgtacgagctcttcagccaggcggggcaggtggtgtcggtgcgcgtctgcagggacgtcacctcgcgccgctcgctcggatacgcctacgtcaacttcaacaaccccttggatgctgcaagggcattggaagtgctgaactttgctcctcttaacaacaaacctatccgggtgatgtattcaaaccgtgatccaagtagccgcaggagtggatctgctaacattttcataaagaatcttgacaagatgatagacaataaatcccttcatgagaccttttcttcatttggtaccattctctcatgtaaggtagccatggatgaaggaggccaatccaaag

SEQ ID NO: 11085 - DNA, 660 bp, Zea mays
  Clone ID: LIB3061-117-Q6-K6-B9
tttctagcgaacgcactagcaacgcacctaacaacaatggcttccaagacattatccctccttgcgcttcttgccctttttgtgagtgcaacaaatgcgttcattattccacaatgctcacttgctccgagtgccattattccacagttcctccctccagttacttcaatgggcttcgaacacccagctgtgcaagcctataggctacaacaagcgcttgcggcgagcgtcttagaacaaccaattgcccaattacaacaacaatccttggcacatctaaccatacaaaccatcgcaacgcagcagcaacaagcactgagccacctagccgtggtgaaccctatcgcctacttgcaacaacagctgcttgcatccaacccacttgctttggcaaacgtagctgcataccaacaacaacaacagttgcaacagtttctaccagcgctcagtcaactagccatggtgaaccctatcgcctacctacaacagcaacaacttctttcatctagcccgctcgctatgggcaatgcacctacatacctgcaacaacagttgttgcaacaacagttgctgcaacaaattgtaccagctcttactcagctagctgtggcaaaccctgctgcctacttgcaacaactacttccattcaaccaactgact

SEQ ID NO: 11086 - DNA, 647 bp, Zea mays
  unsure (1)..(647): unsure at all n locations; Clone ID: LIB3061-117-Q6-K6-C1
gcacatagaagcacatagtgtaccaacaatggcagccaaaaattttgcttccttatgctccttggtctttctgcaagtgttgctaccganaccattttcccacaatgctcacaagctcctatagcttcccttcttcccccatacctctcaccagcggtgtcttcaatgtgtgaaaccccaattgttcaaccctacaggatccaacaggcaatcgcaacaggcatcttaccattatcacccttgttcctccaacaaccgtcagccctattacagcagttacctttggtccatttggtggcacaaaacatcagggcacaacaactacaacaacttgtgctagcaaaccttgctgcatactctcagcaacatcagtttcttccattcaaccaactggctgcattgaactctgctgcttatttgcaacaacaattaccattcagccagctagttgctgcctacccccagcaatttcttccattcaaccaactagcagcattgaactctgctgcttatttacagcagcaacaactactaccattcagccagctagctgatgtgagccctgctgccttcttgacacaacaacagttgttgccgttctacctgcacgctatgcctaacgctggcaccctcttacaactgcaaca

SEQ ID NO: 11087 - DNA, 118 bp, Zea mays
  unsure (1)..(118): unsure at all n locations; Clone ID: LIB3061-117-Q6-K6-C10
ttttttagnacgcgagcgcgccctttttttttttgcttattagttgtaattcaataataaagttttttggatgatgtatgtggccaaccagaaataagaagttacatttccagattct

SEQ ID NO: 11088 - DNA, 230 bp, Zea mays
  Clone ID: LIB3061-117-Q6-K6-C11
gcctgcggaaagggtacagagctggcgcaggcggtggacgacgtactcttcgcgctgccggccaacgaggaccgtgacgggcccattatgcacctaccgacgaccaccttcaaactgccgagggagaaggatatacccaagcggagggcaccgaccaagtgggagctgagaggaaaggcgaaaggaattaccaagcgcaaaaagaacaagcgggaggggaatgagcaaac

SEQ ID NO: 11089 - DNA, 650 bp, Zea mays
  unsure (1)..(650): unsure at all n locations; Clone ID: LIB3061-117-Q6-K6-C12
ctggaccctnacgcagtcgccgccgctgcgggtgtgcgttgccaatgcactcgccgccgccgctcaaatctcccctcccaatggcaccccgtcgctcacgatcaaatatttcctcccctataagtgcaagatcgccaacgaggagatattgatggcgctattggtggacccacctgacatggggagggagatgcttattgagatgcaccatctgctgcggcgtaggcatcgcagacggcgtggccgccggattggccggtggacgggcgctcgctcaatcctccatcgccgcccctatatcagtctagtatgtgagtcatattgatttttataatcgattttatgcgccagttcttgcctcgactaatgggtcctcttccattttgtaatcacctctgcatgtttactgtatcactttggtaaattactattgttccatgttgtcttccacaacatactgggctggttcagcggttagtttcctattcaaccatttcgtaatgaaggaggtattggtttttaggtaaatatttatttatgattgtgctggtattatctcaataggctgggaaaatttaaataacctcatatgacataaatctcaactgcccatgcactcttagttgttgctttgaaccggtctttcattg

SEQ ID NO: 11090 - DNA, 442 bp, Zea mays
  unsure (1)..(442): unsure at all n locations; Clone ID: LIB3061-117-Q6-K6-C2
gaggatgggttgttgaacgttttttaaatcagttacttatagaacttgatggtgctgatcaaagacaaggtgtntatgtgataggagctacaaacaggattgatgtgatagatgatgctgttttacgtncgggtagatttggaaagaaaattatgtacctttacctggtgcagacgagagagtttnaatattaaaggcacatgctcgtagcaagcccatcttgtatgatgttgatttggatgcacttggtcgttgtgctgagtgcaacaatatgactggtgccgagttagtattattggtgaatgaagtagncatggtattactggaagagagatggaattaggtgataaggggacattatgaatgagttagtgtagttagattgagatgttgtagttttgaacatggtgtatagaaagattaagtgattagttatttgaaa

SEQ ID NO: 11091 - DNA, 638 bp, Zea mays
  unsure (1)..(638): unsure at all n locations; Clone ID: LIB3061-117-Q6-K6-C4
ctagcaacatagnaagcacaatagtgtaccaacaatggcagccaaaaattttgcttccttatgctccttggtctttctgcaagtgttgctaccganaccattttcccacaatgctcacaagctcctatagcttcccttcttcccccatacctctcaccagcggtgtcttcaatgtgtgaaaccccaattgttcaaccctacaggatccaacaggcaatcgcaacaggcatcttaccattatcacccttgttcctccaacaaccgtcagccctattacagcagttacctttggtccatttggtggcacaaaacatcagggcacaacaactacaacaacttgtgctagcaaaccttgctgcatactctcagcaacatcagtttcttccattcaaccaactggctgcattgaactctgctgcttatttgcaacaacaattaccattcagccagctagttgctgcctacccccagcaatttcttccattcaaccaactagcagcattgaactctgctgcttatttacagcagcaacaactactaccattcagccagctagctgatgtgagccctgctgccttcttgacacaacaacagttgttgccgttctacctgcacgctatgcctaacgctggcaccct

SEQ ID NO: 11092 - DNA, 319 bp, Zea mays
  unsure (1)..(319): unsure at all n locations; Clone ID: LIB3061-117-Q6-K6-C5
cccggttcgacccagcgtccttttcatanaagtagaatccatagcaacatagagcaacatggcgaccaagaattttcccttcttatgctccttgctctttctacatgtgttgntaacgcgacaattttgcttgaatgctcacaagctcctatagcttcccttattgcaccataccttccatcaattataggttgaggatgtgaaaacttatttatttaaccatataggcttaaacaagaaatgggaggaagcaacatacctttatcgaaattgatgataaaacaatgatcagatgtatatttggtgcaatgattggtat

SEQ ID NO: 11093 - DNA, 627 bp, Zea mays
  Clone ID: LIB3061-117-Q6-K6-C6
ctttaagacatctttacagctatatccaccagtacatccatttgctcgagagtgatgtacgactagatgttctagaaggactaaacgagaagataagaaagcgtttcaagacaccgaagttatcaaatagtaacttcgctaagatatgcaagcatgcttctctggcatggtgccggtgtattctcatcaaactggcctcaatcactccactgcctgaatccgcagatgcaaccaatcagcctgcaccattatccaatgggcttctactctatgttgacttgcaacctgatgagcttcttatctcatcccctgatgggcctgctcaattcaaagggcttgacatgaactggtttgagacacttaacagaattaaaaacatcccggtcaagcaaacatccgaagataacttggagactgctgttacgttaatgaagagcacttataacttttatcgggagagcccttgtggaacatttccttcaggtatcaatctctacacggttacaccatcacaagctcctattgaagggctaccgccaaccgctgctgtagttgagacgctcgacttaagtattccaagaaaactccttctgtgggtatacactctggttcatggtcgttactcaa

SEQ ID NO: 11094 - DNA, 644 bp, Zea mays
  unsure (1)..(644): unsure at all n locations; Clone ID: LIB3061-117-Q6-K6-C7
tgttttgagcattcagnaacacaccaagctgaactacctagcaacgacttaacaacaatggctaccaagaattagccctccttgcgcttcttgccctttttgtgagcgcaacaaatgcgttcattattccacaatgctcacttgctcctagtgccattataccacagttcctccgaccagttacttcaatgggcttcgaacacctagctgtgcaagcctacaggctacaacaagcgcttgcggcgagcgtcttacaacaaccaattaaccaattgcaacaacaatccttggcacatctaaccatacaaaccatcgcaacacaacagcaacaacagttcctaccagcactgagccaactagatgtggtgaaccctgtcgcctacttgcaacagcaggtgcttgcatccaacccacttgctctggcaaacgtagctgcataccaacaacaacaacaattgcaacagtttctgccagcgctcagtcaactagccatggtgaaccctgccgcctacctacaacagcaacaactgctttcatctagccctctcgttgtgggtaatgcacctacatacctgcaacaacaattgctgcaacagattgtaccagctctgactcagctagctgtggcaaaccctgctgcctac

SEQ ID NO: 11095 - DNA, 590 bp, Zea mays
  Clone ID: LIB3061-117-Q6-K6-C9
ttgctctgcaacgcgccccgcttcgtgcccaccgtcgccaaccacgacctgcaccacatccagtgggacgtgccgccgcgccagcacccgcacccgctcgcgctcgccgacatgcccgccatgctcgccagcggcgcgcccttcgcgcgcaagttcccgcgggacgaccccgtgctcgacgccatcgacgacggcctcctcgcgcgcccgcgccccgccaacgccaccgcggccttcgtgcccggcggctggtgcggcgccgacgccgagtgccgcgccgtcgataacgactgggtgctcaggcctgggcccggagcccagcgcttccggaggctcatcgacaggatcgtcaggtcagaggccttccccaacaggcagtgcaagtagcgtcgtcgtcgtcgtcatcatgtgtgtgtttgtgtttgtgtgtgtacaggaaaaaaaaacaccagacggtttgttgtactcatgtagtggacactggagatgatcatacttcacttttcatataacaacaatacacacataaaacatgctagtgttagcgaatttcagaatcaagaaacatcttggaatgtctgtgtaagact

SEQ ID NO: 11096 - DNA, 630 bp, Zea mays
  unsure (1)..(630): unsure at all n locations; Clone ID: LIB3061-117-Q6-K6-D1
tacacatanaagcacatagtgtaccaacaatggcagccaaaaattttgcttccttatgctccttggtctttctgcaagtgttgctaccganaccattttcccacaatgctcacaagctcctatagcttcccttcttcccccatacctctcaccagcggtgtcttcaatgtgtgaaaccccaattgttcaaccctacaggatccaacaggcaatcgcaacaggcatcttaccattatcacccttgttcctccaacaaccgtcagccctattacagcagttacctttggtccatttggtggcacaaaacatcagggcacaacaactacaacaacttgtgctagcaaaccttgctgcatactctcagcaacatcagtttcttccattcaaccaactggctgcattgaactctgctgcttatttgcaacaacaattaccattcagccagctagttgctgcctacccccagcaatttcttncattcaaccaactagcagcattgaactctggtgnttatttacagnagnaacaactactaccattcagncagctagctgatgtgagccctgctggcttnttgacacaacaacagttgttgncgttttacctgcacgctatgcctaacgctggcac

SEQ ID NO: 11097 - DNA, 662 bp, Zea mays
  unsure (1)..(662): unsure at all n locations; Clone ID: LIB3061-117-Q6-K6-D10
ttttgcattgttcgtttngctcgacgttgcagataatggagaaccctgctccgagtatcgtagtgccccccattgccgcacctgtatcagcgaacttcagcagactcgccttccgcaacctgtacatccgacggacgggtccagacagcagggagatggtgactgtggagggaagaagaggctctagtgatcagacaggcgacatgaggtacgtgagtgacttccccgtctacgatggccgtggctccgacgccgtcctggtggctcgcgtgcagggcgtcacaaccacgttcgggaactccaaccagttcttcaccgtcgccttcgaggccggcaggctcaagggctccacgctccttaccgaaggagtggtgacggatggatcagatgaatgggcaatctacggcgggaccggagagtttgctatggcgagaggtgtcgtcaaaagaaggtaccttgccgatagggatggcgccgggaacactgacgagctcagcatgcaggttttctgcccggtgtttggctcatcacagcaaccaaacaagcaggactccagcatctctgtcaccaagattgggttatggggtggcgnaagagggtcggngcangacatcacgacgacggagccaccgcagcgcctgcacagcctcaccgttcgtgcc

SEQ ID NO: 11098 - DNA, 660 bp, Zea mays
  unsure (1)..(660): unsure at all n locations; Clone ID: LIB3061-117-Q6-K6-D11
tgtatcatagnaagcacaatagtgtaccaacaatggcagccaaaaattttgcctccttatgctccttggtctttctgcaagtgctgctacggcgaccattttcccacaatgctcacaagctcctatagcttcccttcttcccccgtacctctcaccagcggtgtcttcggtatgtgaaaacccaattcttcaaccctataggatccaacaggcaatcgcagctggcatcttacctttatcacccttgttcctccaacaatcatcagccctattacagcagttacctttggtgcatttattggcacaaaacatcagggcacaacaactacaacaacttgtgctagcaaaccttgctgcctactctcagcaacaacagtttcttccattcaaccaactagctgcattgaactctgcttcttatttgcaacaacaacaactaccattcagccagctatctgctgcctacccccagcaatttcttccattcaaccaactgacagctttgaactctcctgcttatttacagcagcaacaactactaccattcagccagctagctggtgtgagccctgctaccttcttgacacaaccacaattgttgccgttctaccagcacgctgcgcctaacgctggcaccctcttacaactgcaacaattgct

SEQ ID NO: 11099 - DNA, 655 bp, Zea mays
  unsure (1)..(655): unsure at all n locations; Clone ID: LIB3061-117-Q6-K6-D12
tttttacatanaagcacaatagtgtaccaacaatgggagccaaaaattttgcctccttatgctccttggtctttctgcaagtgctgctacggcgaccattttcccgcaatgctcgcaagctcctatagcttcccttcttcccccgtacctctcaccagcggtgtcttcggtatgtgaaaacccaattcttcaaccctacaggatccaacaggcaatcgcagctggcatcttacctttatcacccttgttcctccaacaatcatcagccctattacaacagttacctttggtgcatttattggcacaaaacatcagggcacaacaactacaacaacttgtgctagcaaaccttgctgcctactctcagcaacagcagtttcttccattcaaccaactaggttcattgaactctgcttcttatttgcaacaacaacaactaccattcagccagctacctgctgcctacccccagcaatttcttccattcaaccaactagcagcattgaactctcctgcttatttacagcagcaacaactactaccattcagccagctagctggtgtgagccctgctaccttcttgacacaaccacagttgttgccgttctaccagcacgttgcgcctaacgctggcaccctcttacactgcaacaat

SEQ ID NO: 11100 - DNA, 559 bp, Zea mays
  unsure (1)..(559): unsure at all n locations; Clone ID: LIB3061-117-Q6-K6-D2
cccgtttcgacccagcgtccggctgggtgaggtgaaccaaaacccctctgtgaccgagnatatcgaagctgtcaggatgtccaagcgcgccggatggggagtgatggcaagccacaggagtggcgagacagaggacaccttcattgctgacctctcagttggcctgtctacgggtctttttaagacgggagccccttggggggctgagcgcctgttcaaatacaaccagctgctcaggatcgaggaagagctcggtgatgccgcggtctacgccggagcaaagttcagggcaccagtggagccctactaagaaaggaagaggatgaggatgttttcttgtggagctatactagctcgctgctgccttttgttacaatgtttgtacggtcgcaataaatgtatggacgtgtttgcttgagagctactgaggtgattttgttgtgggagcaccaaaagcagaaaagaacccttttttttcaatctgtttagattntgacgagtggtggtttgtactcgtcgtaatgtngtttgtctaaattgagtttgatggaacaggaaa

SEQ ID NO: 11101 - DNA, 645 bp, Zea mays
  unsure (1)..(645): unsure at all n locations; Clone ID: LIB3061-117-Q6-K6-D3
cccggctacgaacttggggaggcgtagcccccgntccggcgaggtgccgcgagcgaggcagcgatgagaggccgtgcgtcccatctccgcgcgctcctctcgcgagcgctctctccaagccttcctcctcctggtcgcgctctgcctcaggtcactaggcccggtgcgtctccgttcggagctggattcgtggggcgcgcgcgcttcttctccatcgacgcctcggctgcgacgcagggcgggtcgaagccccctgcgccaccgccggcgggtactgcgggcggcgagggagggggtggtggtcagtctgggaaatctgaacaagcggacgccgggaaagccgtccgcggagggccggtgtcttggctcagttttctactcctgcttgtgactggaggagggataatcgtgtactacgacaaagaaaagaagcgtcacattgaagaattgaagaatagaacaagtgctgtgaagcctggacaatcagtaggcactgcagccattggcggtccattcaagcttttgaatcatgatggaaaacctgttactgaaaaggatttcttgggcaaatggacgctgctttattttggatttacacactgtcctgacatttgtccagatgaactccagaaaaggctgcagcga

SEQ ID NO: 11102 - DNA, 595 bp, Zea mays
  Clone ID: LIB3061-117-Q6-K6-D4
agcgttttttgcacagcatcttacttttcaccttgttcctccacaaccgcagccctatacagcagtacctttggtgcatttgtggcacaaaacatcaaggcacaacaactacaacaacttgtgctaggaaacttgctgcctatctcagcaacagcagtttcttccattcaaccaactggctgcattgaactctgctgcttatttgcaacaacaactaccattcagtcagctagctgctgcctacccccagcaatttcttccattcaaccaactggcagcattgaactctgctgcttatttacaacagcaacagctaccaccattcagccagctagctgatgtgagccctgttgccttcttgacacaacaacagttgttgccgttctacctgcacgctgcgcctaacgctggcaccctcttacaactgcaacaattgctgccattcaaccaacttgctttgacaaacccaacagcgttctaccaacaacccatcattggtggtgccctcttttagattgcttatgagttatacttcaataatgaagttttttggatgatgtttgtggcttcccagaaataagaaagacatttctag

SEQ ID NO: 11103 - DNA, 677 bp, Zea mays
  unsure (1)..(677): unsure at all n locations; Clone ID: LIB3061-117-Q6-K6-D5
cccgggntcgcccacgcgtccgtttttaatgcctcgtgcataatacggagtacatatctatatttacgtcagcgttattgcaacgccctctctctgtggtctcttcttctacatactataatagtagtacattagtactaacaatgtggttggccatggcatgcttgcttcgagatcaacatgaacaatggaagcacaagtacgagaatccatgtagaagcgtgaagattttccggtgccaattgccacagaataatgccttctactcagctcaacctccaaagcatgatggctctgacaaaccactctgtccaggagctcctgtatgccactggtgtggtacctggaaaggtgataaaatatgtagtagctgcaagaaagcaaggtactgttatgagaaacatcatgcattgcattggcgtactggtcataaaaatgattgcctccagataataagttcttctgcttcaaattcagttctgccagctgtaggaatagggtttgtccgctggtttgctaaggcaagcaacgtacatagactgcacgtcttggatccttcatgtttatatagtgtgttgttttatgatcaattgaccattcattacctccgcctgatggcccttattaacaacaaaatggaattgagggtatccatggagatgcatgtagctgaactc

SEQ ID NO: 11104 - DNA, 657 bp, Zea mays
  unsure (1)..(657): unsure at all n locations; Clone ID: LIB3061-117-Q6-K6-D6
tttgtttagctaccacggcaccgccagcccggncggctataaagaccgaggcccatctcgaaatcgacgggcgatgaagaagaccagttcccctctcctgatcgtcctgttcctcacagcagcagccatggcggccgagccggagaagcaggcggcccccgcggcacaggagacggccgtgcacatcgtgtacgttgaccgccccgaggacgccgaccctgaggagttccacatccgcaccctcacccccgtcctcggcagcgaacagaaggccagggacgcagtgctctaccactacaagaacgccgccagcggcttctccgcgaagctcaccccccagcaggtcaaggatctcaaggagcaaccaggtgttctccaggttgtgccgagccagacttaccagctacatggccctgggtctggcactcaccagggcacgacacacaccttgggccttatgtgaaggcgtatgagaatcaagaagactttgtttagtatggctgtatggcacaggtctgacgaatgtgtatagtacagtactatgtaagaataagggacgtatcgtctatatactgctttgcgcatgctcagccctgttctaaagcttgtaatgcaccaatgcgtatgttttcaatacaatgacaagtatgctatctt

SEQ ID NO: 11105 - DNA, 661 bp, Zea mays
  unsure (1)..(661): unsure at all n locations; Clone ID: LIB3061-117-Q6-K6-D7
gtccaactagcaacatagnaagcacaatagtgtaccaacaatggcagccaaaaattttgcttccttatgctccttggtctttctgcaagtgctgctaccgcaaccattttcccacaatgctcacaagctcctatagcttcctttcttcccccatacctctcaccagcggtgtcttcagtatgtgaaaacccaattcttcaaccctacaggatccaacaggcaatcgcagcaggcatcttacctttatcacccttgttcctccaacaaccgtcagccctattacagcagttacctttggtgcatttgttggcacaaaacatcaaggcacaacaactacaacaacttgtgctaggaaaccttgctgcctactctcagcaacagcagtttcttccattcaaccaactggctgcattgaactctgctgcttatttgcaacaacaactaccattcagtcagctagctgctgcctacccccagcaatttcttccattcaaccaactggcagcattgaactctgctgcttatttacaacagcaacagctaccaccattcagccagctagctgatgtgagccctgttgccttcttgacacaacaacagttgttgccgttctacctgcacgctgcgcctaacgctggcaccctcttacaactgcaacaat

SEQ ID NO: 11106 - DNA, 659 bp, Zea mays
  unsure (1)..(659): unsure at all n locations; Clone ID: LIB3061-117-Q6-K6-D8
tttataccccaattgtacaccagcactgttgacaaactacgaaagcttctgtgaacaactgttgctatgcacatgcagctgttaaagcagggttacacaagcacattcttcattcatcgtcaaaacagatggttaacgatcttgagaattcagggcggtcattttcaggcccatcacatggttgggaagctggcattagtctcccggaggatctcgcagatttgtttgaagcaatagctggcgcaatttacgtggacagcgggaacgacaaagaggttgtctggagtgccatcaggcggctactggaacctcttgccacccccgggaccatggagcctgaccccgtgtcggaactgaaggaattatgcgagcacaaacactaccctaagccatcgtactctccaactcgtgacagtgtagctggagtgacaagggtggttgcacaggtgacggctgcgcggactgtgtactccgggactggaacaggccgcaaccaggatgtggcagaggttctcgctgcaaaggctctgctcaaaaagaaaaggccgcagcaagaggatgaagcttggacttggcttggaccgggcgggcatttgatatttgggaatttgcgcacatgatagctgttctcgcagaggtaacaaaacanctactgtagt

SEQ ID NO: 11107 - DNA, 652 bp, Zea mays
  unsure (1)..(652): unsure at all n locations; Clone ID: LIB3061-117-Q6-K6-E1
tctattatctaactccaaaaaccagaagctggtgcttgtggttcttgctttcattgctttagtatcaagtgtttcttgtacacagacaggcggctgcagctgtggtcaacaacaaagccatgagcagcaacatcatccacaacaacatcatccacaaaaacaacaacatcaaccaccaccacaacatcaccagcagcagcaacaccaacaacaacaagttcacatgcaaccacaaaaacatcagcaacaacaagaagttcatgttcaacaacaacaacaacaaccgtagtaccaccaccaacaacaacaacaacagtaccaacaacaacatnaatgtgaaggccaacaacaacatnannaacaataacaaggtcatgtgtaataacatgaacaggagtatgagtaatattaaggacagagttatgagtaataacatnaanaacnaatttagggttatgataagtagnaagaangagaanagtgttagnaatattagtagggttaggataaattataatagtaatattggaatttggaggagtagtaatagatagaggtgtatttttaatagtataggagttgttaaattaataaattggatgatttgtatagtanagttnagattttggggactgcctcccccccccccccc

SEQ ID NO: 11108 - DNA, 649 bp, Zea mays
  unsure (1)..(649): unsure at all n locations; Clone ID: LIB3061-117-Q6-K6-E10
tgttttaaacacaccaagcgaacacattagcaacaacctaacaacaatggctaccaagnaattatccctccttgcgcttcttgcgctttttgcgagcgcaacaaatgcgttcattattccacaatgctcacttgctccaagttccattattacacagttcctcccaccagttacttcaatgggcttcgaacacccagctgtgcaagcctataggctacaacaagcaattgcggcgagcgtcttacaacaaccaatttcccagttgcaacaacaatccttggcacatctaacaatacaaaccatcgcaacgcaacagcaacaacaattcctaccagcactgagccacctagccatggtgaaccctgccgcctacttgcaacagcagttgcttgcatcaaacccacttgctctggcaaacgtagttgcaaaccagccacaacaacagctgcaacagtttctgccagcgctcagtcaactagccatggtgaaccctgccgcctacctacaacagcaacaactgctttcatctagcccgctcgctgtggccaatgcacctacatacctgcaacaacaattgttgcaacagattgtaccagctctgactcagctagttgtggcaaaccctgctgcctacttgcaacagctgctt

SEQ ID NO: 11109 - DNA, 639 bp, Zea mays
  unsure (1)..(639): unsure at all n locations; Clone ID: LIB3061-117-Q6-K6-E3
ttgtaaacacaccaagcgaacacattagcaacaacctaacaacaatggctaccaagnaattatccctccttgcgcttcttgcgctttttgcgagcgcaacaaatgcgttcattattccacaatgctcacttgctccaagttccattattacacagttcctcccaccagttacttcaatgggcttcgaacacccagctgtgcaagcctataggctacaacaagcaattgcggcgagcgtcttacaacaaccaatttcccagttgcaacaacaatccttggcacatctaacaatacaaaccatcgcaacgcaacagcaacaacaattcctaccagcactgagccacctagccatggtgaaccctgccgcctacttgcaacagcagttgcttgcatcaaacccacttgctctggcaaacgtagttgcaaaccagccacaacaacagctgcaacagtttctgccagcgctcagtcaactagccatggtgaaccctgccgcctacctacaacagcaacaactgctttcatctagcccggtcgctgtggccaatgcacctacatacctgcaacaacaattgttgcaacagattgtaccagctctgacttagctagttgtggcaaaccctgctgcctacttgcaac

SEQ ID NO: 11110 - DNA, 301 bp, Zea mays
  unsure (1)..(301): unsure at all n locations; Clone ID: LIB3061-117-Q6-K6-E4
tgttctaatggnttattaatcgtgactaatcgacgactaattggacgaccaggtttctgatcactctgatccatctgagtacctaatcgagtgctaggtaccgatcagcgcgagtaatcgcgacctaataacactgcttcactgttatttaataccgtgcatgaggacatatgttggggtaatttcagaacgtgatatgctttcaatctttttttttctcgaacgcacaggagaactgcgcatcattatattaagagaggaaaggtccaaagtggaccgaaatatagcaccttgagggcag

SEQ ID NO: 11111 - DNA, 649 bp, Zea mays
  Clone ID: LIB3061-117-Q6-K6-E5
tttcctagcaattagctcatcgactccagattggagaactcgacaccatgaaggtgctgatcgttgcccttgctctcctggcgctcgctgcgagcgccgcctccagtacaagcggcggctgtggctgccagacaccaccgtttcatctaccgcctccgttctatatgccgcctccgttctatctgccgccgcagcagcagccgcagccatggcaataccccactcaaccaccgcagctaagcccgtgccagcagttcggatcctgcggcgtcggcagcgtcggcagcccgttcctgggccagtgcgtcgagttcctgaggcaccagtgcagcccggcggcgacgccctacggctcgccacagtgccaggcgctgcagcagcagtgctgccaccagatcaggcaggtggagccgctgcaccggtaccaggcgacatacggtgtggtcctgcagtccttcctgcagcagcagccgcagggcgagctcgcggcgctgatggcggcccaggtagcgcagcagctgacggcgatgtgcggtctgcagctgcagcagccaggtccctgcccttgcaacgcagctgccggcggtgtctactactgaggaaacttgtactgtagtaataatgtaatggagccgctgactagctacct

SEQ ID NO: 11112 - DNA, 645 bp, Zea mays
  unsure (1)..(645): unsure at all n locations; Clone ID: LIB3061-117-Q6-K6-E6
taccatcgtcttccttgtctctgccttcccgctagctcggttcttgctgtgctagcctctgttcatccacacccgcgcgcgtcaatgggggagtacaacggcggcgtgagcacatcgtggaccattgggtcggcgcacggggggatggcgccacccacgcggcccaaaataaagatcatccacatcatcgcgccggagatcatcaagaccgacgtcgcgcacttccgggacctcgtgcagcggctcaccggcaagcctgcttcctgtgccgccagcagcacgggcgacgacgacgtcgcgtcgacgctgccgccggtagaagacgaggacatggagacgacgaccaagaagaggccgaggccgaggccggcaccgcctccggcggccggtgatgagaggagcgacttcaccaaggcacaagaggagccggtcaagaagaggaagatcaagtgcgaggtgaaggtggaggagcaaggagctggcttcggcgattacgacctcggccgcggcgacctgtggatggatctcaacccgggagggttcctgagcttcttggaggaggagggcgtgttccagggcctggctgctgctgaccacgacttctttcagccctttggctcgtncaggatggatttggttggtgaa

SEQ ID NO: 11113 - DNA, 653 bp, Zea mays
  unsure (1)..(653): unsure at all n locations; Clone ID: LIB3061-117-Q6-K6-E7
tcactagcaacatagnaagcacaatagtgtaccaacaatggcagccaaaaattttgcttccttatgctccttggtctttctgcaagtgctgctaccgcaaccattttcccacaatgctcacaagctcctatagcttcctttcttcccccatacctctcaccagcggtgtcttcagtatgtgaaaacccaattcttcaaccctacaggatccaacaggcaatcgcagcaggcatcttacctttatcacccttgttcctccaacaaccgtcagccctattacagcagttacctttggtgcatttgttggcacaaaacatcaaggcacaacaactacaacaacttgtgctaggaaaccttgctgcctactctcagcaacagcagtttcttccattcaaccaactggctgcattgaactctgctgcttatttgcaacaacaactaccattcagtcagctagctgctgcctacccccagcaatttcttccattcaaccaactggcagcattgaactctgctgcttatttacaacagcaacagctaccaccattcagccagctagctgatgtgagccctgttgccttcttgacacaacaacagttgttgccgttctacctgcacgctgcgcctaacgctggcaccctcttacaactgca

SEQ ID NO: 11114 - DNA, 641 bp, Zea mays
  unsure (1)..(641): unsure at all n locations; Clone ID: LIB3061-117-Q6-K6-E8
ttttgggctgaacacggcattcctctgctttcaaanagaccaagctcctagaagatggccgagataactccttgctggaccagttttgagaggtgttcaatgctctccttcaatcagcaaaagaggattcagcttgacttggctcttgaggcaaagcccaactttngaaagaattttagaccagaattctctagtgaaaacgcaagtggtaataatatgctggacattctcctcctcttggtcacaaacacacattattgagggtgtgggagaccttttttttgctagccggtcagccatccagcacctatttctaattgctagccaggatgattttgcactttgctggagcacaggttttccaaatccgcctccatgcctcaaaggtcacagatccttggaagattttgcacttagcagttcacattttgtttcaactattttgaacaggtgaagtagcaaagttattttcagacgcgggccttgtatgtattgcaagtttgatatctccatataggagagaccgtgaatcttgccgtgcattgttatcggatggtagctttattgaagttttcttgaatatgtccttggaattatgtgaagcaagggacccaaagggcctctataagcttgctcgtgct

SEQ ID NO: 11115 - DNA, 642 bp, Zea mays
  unsure (1)..(642): unsure at all n locations; Clone ID: LIB3061-117-Q6-K6-E9
tttttagcaacatagnaagcacaatagtgtaccaacaatggcagccaaaatattttgcctccttatgctccttggtctttctgcaagtgctgctacggcgaccattttcccgcaatgctcgcaagctcctatagcttcccttcttcccccgtacctctcaccagcggtgtcttcggtatgtgaaaacccaattcttcaaccctacaggatccaacaggcaatcacagctggcatcttacctttatcacccttgttcctccaacaatcatcagccctattacatcagttacctttggtgcatttattggcacaaaacatcagggcacaacaactacaacaacttgtgctagcaaaccttgctgcctactctcagcaacagcagtttcttccattcaaccaactagctgcattgaactctgcttcttatttgcaacaacaacaactaccattcagccagctacctgctgcctacccccagcaatttcttccattcaaccaactggcagcattgaactctcctgcttatttacagcagcaacaactactaccattcagccagctagctggtgtgagccctgctaccttcttgatacaaccacagttgttgccgttctaccagcacgctgcgcctaacgctggcac

SEQ ID NO: 11116 - DNA, 628 bp, Zea mays
  unsure (1)..(628): unsure at all n locations; Clone ID: LIB3061-117-Q6-K6-F1
tttttgggcttcngacacctagctgtgcaagccacatgcaacaacaagcgcttgcggcgagcgtcttacaacaaccaattgcccaattgcaacaacaatccttgccacatctaacaatacaagccatcacaacgcaacagcaacaacagttcctaccagcactgagccacctagccatggtgaaccctgccgcctacttgcaagagcagctgcttgcatccaacccacttgctctggcgaacgtagttgcaaaccagcaacaacaacagctacaacagtttctgccaacgctcagtcaactagccatggtgaaccctgccgcctacgtacaacaacaacaactgctttcatctagcccgctcgctgtgggcaatgcacctacatacctgcaacaacaattgttgcaacagattgtaccagctctgactcaactagctgtggcaaaccctgttgcctacttgcaacagctgcttccattcaaccaactgactctgtcgaactctgctgcgtacctacaacagcgacaacagttacttaatccattggtagtggctaacccattggtcgncgncttcctacagcagcaacaattgctgccatacaaccagttctttttgatgaatcctgt

SEQ ID NO: 11117 - DNA, 664 bp, Zea mays
  Clone ID: LIB3061-117-Q6-K6-F11
tttggtaattcgacgtcgcccccgcccccccctgtggaaaatcgtgatgcggagaacagctaccgccgccctcgtcctcgtccccctcctcgctgcggcggtacagacctccgccctgcctttcatcgtcctgcacgggattggggaccagtgcgccaaccatggcgttgccaagttcactaaacttctcgccgattggtccggctccgacggctactgcctagagattggcagaggaacatgggactcttgggtcatgcctcttcaacaacaggctgatataatctgcaacaaggtcaaggaaatgaaacaactgagaggtggctacaacatagttggtctgtctcaggggaacttgattggtcgagcagtggttgagtactgtgatgatggaccgccggtcaagaatttcatctctctaggaggtcctcatgctggtaccgcttcagtgcctctttgtggttctggatttttttgcattattgttgatgctctgattaaattggagatctactcagactatgtgcaggaacatcttgcacctagtggctacctcaaaatcccaactgatatggcagattatctgaagagttgtaggtttcttccaaacttaacaatgaaattccagataaaagaaagccacctacaaggaaagatcagtagc

SEQ ID NO: 11118 - DNA, 541 bp, Zea mays
  Clone ID: LIB3061-117-Q6-K6-F12
ccataatccaggaggagcaccaacagcagcgcatgtgagttatgtggatctcaacaagctactcaaagtgcggtggcaatcttgacagcagcacaatacctaccatcaatgtgcggcttgtaccactcatactaccaaaataatccatgcagcagcaatgacattagtggtgtgggcggttgaagaattttttttacctagccgttatactcctataacggtgttaagcaataaagtaccatacattaaaaaaaaaaaaaaaaaaaaaaaaaaaaaaaaaaaaaaaaaaaaaaaaaaaaaaaaaaaaaaaaaggaaaaaaatataaaaaaaaaaaaaataaaagaaagtttgaaaagaaaaaaaaataattatttatatagagaaaaataaaattaaaaaaaaaaaaagggggggtggccttttggggggaaaggtttaaaccctggggttgcccaactaaatggtttttttttggggccccctaaataaaatttgggggcccggttttaaaaagcccggggggggggaaaaaacccgggg

SEQ ID NO: 11119 - DNA, 676 bp, Zea mays
  unsure (1)..(676): unsure at all n locations; Clone ID: LIB3061-117-Q6-K6-F2
cccggtgtcgcccacgcgtccggttcctagtgccattattccacagttcctccctccagttacttcaatgggncttcgacacccagctgtgcaagcctacaggctacaacaagcgcttgcggcgagcgtcttacaacaaccaattgcccaattacaacaacaatccttggcacatctaaccatacaaaccatcgcaacgcaacagcaacaacaatttctaccagcactgagccaactagctgtggtgaaccctgtcgcctacttgcaacagcagttgcttgcatccaacccacttgctctggcaaacatagttgcataccaacaacaacaacaattgcaacagtttctaccagcgctcagtcaactagccatggtgaaccctgccgcctacctacaacagcaacaactgatttcatctagccctctcgctgtggttaatgcacctacatacctgcaacaacagttgctgcaacagattgtaccagctctgactcagctagctgtggcaaaccctgctgcctacttgcaacagctgcttccattcaaccaactgactgtgtcgaactctgctgcgtacctacaacagcgacaacagttacttaatccactagcggtggctaacccattggtcgttgccttcctacagcagcaacaattgctgccatacaaccagttc

SEQ ID NO: 11120 - DNA, 267 bp, Zea mays
  Clone ID: LIB3061-117-Q6-K6-F3
cttatggtagtagtatttggccagctagctacaacaagccccgcttccttcttgacacaacaacaagtgcttccgttctaccagcagtttgtggctaaccccgcaaccctcttacaactgcaacagttgctgccctttgtccaacttgctttgacaaacccagcagccttctaccaacaacacatcattggcggtgccctcttttagattgcttattagttgtaattcaataatgaagttttttggctgatgtatgtggcctcctag

SEQ ID NO: 11121 - DNA, 657 bp, Zea mays
  unsure (1)..(657): unsure at all n locations; Clone ID: LIB3061-117-Q6-K6-F6
tttggtcccaagnatgctattattagaccaattaaactaccagnagtgccaaagcttccaccttatacaacatggatatttttggacaggaaccaaaggatgacagaagaccaatctgtacttggtcgacggaggatttactatgataccagttgtggtgaagctctaatttgcagtgatagtgaagatgaagccattgaagatgaggaggaaaaaaaggaatttaaacattctgaagatcacattattcggatgacagttcaagaatgtggcatgtctgatgctgtactgcaaacgctagctcgacacatggagcgggctgctgatgacataaaggccaggtatgaaattctgcatggtgagaaaactaaggattcttgcaagaaagggactgagcataatgtcaaagtggaagatttgtactgtgacaaagatttggatgcagcattggattcttttgacaatctcttctgtcgacgatgtctagtgtttgattgcaagctacatgggtgttctcaagatttagtatttcctacagaaaaacaccagcttggagtggcgttgatgacagtgtaccctgtggtattcattgccataaactggcatctgaaccagattctgctgctggtgctgatcacatgctttttgatgttgagg

SEQ ID NO: 11122 - DNA, 659 bp, Zea mays
  unsure (1)..(659): unsure at all n locations; Clone ID: LIB3061-117-Q6-K6-F7
ttcttactcgctgtcggcggagnacgatcctgagctggcgctggacatctcgcgcggcatggagtacctgcacgcgcagggcgtgatccaccgggacctcaagtcccagaacctgctgctcaacgacgagatgcgcgtcaaggtggccgacttcggcacctcctgcctggagaccaagtgccaggccaccaagggcaacaagggcacctaccggtggatggcgccggagatgaccaaggagaagccctacacgcgcaaggtggacgtgtacagcttcggcatcgtgctctgggagctcaccacctgcctcctcccgttccagggcatgacgccggtgcaggccgcgtacgccgcgtcggagaagaacctgcgcccgccgctgtcgagctcgtgcccgccggtgctcaacaacctgatcaagaagtgctggtcggcgaacccggcgcggcggccggagttcagctacattgtgtcggtgctggagaagtacgaccactgcgtgaaggaggggatgccggtgacggcgcaccaggagctcaggctctggcgctccttcgccaagatcttcaggacgggctgcatcgccaacaacctgtccataccggtgcatgcgtgatccatctcttgtttcaccttcttccttccgtaaactgagtgct

SEQ ID NO: 11123 - DNA, 664 bp, Zea mays
  Clone ID: LIB3061-117-Q6-K6-F8
tttcaagcaacatagaagtggcatacagtagcaaaaatagagcaacaatggcggccaagatattttccatccttatgctccttgctctttctgcatgtgttgctaacgcgaccatttttccatcaatactcacaagctcctatagctgcccttcttcccccataccttccatcaatgaccgctttagtatgtgaaaacccagcccttcaaccctacaggatccagcaagcaatcgcaacaagcaacttacctttatcacacctgttctttcaacaatcgccagccctatctttggtgcagtcattggtacaaaccatcagggcagaacagttgcagcaactcgtgctaccagtgatcagccaagtatctctggcaaacctttccccctactctcagcaacaacaatttcttccattcaaccaactgtctatactgaaccctgctgcttatttgcagcaacaacaactactaccattcagccagctagctactgcctactctcagcagcaacaatttcttccatttaaccaattggccgcactgaacccctctgcttatttccagcagcaaatactactaccatttggccagctagctacaacaagccccgcttccttcttgacacaacaacaagtgcttccgttctaccagcagtttgtggcta

SEQ ID NO: 11124 - DNA, 612 bp, Zea mays
  unsure (1)..(612): unsure at all n locations; Clone ID: LIB3061-117-Q6-K6-F9
gtgtcttcaatgtgntgaaaacccaattgttcaaccctacaggatccaacaggcaatcgcaacaggcatcttaccattatcacccttgttcctccaacaaccgtcagccctattacagcagttacctttggtccatttggtggcacaaaacatcagggcacaacaactacaacaacttgtgctagcaaaccttgctgcatactctcagcaacatcagtttcttccattcaaccaactggctgcattgaactctgctgcttatttgcaacaacaattaccattcagccagctagttgctgcctacccccagcaatttcttccattcaaccaactagcagcattgaactctgctgcttatttacagcagcaacaactactaccattcagccagctagctgatgtgagccctgctgccttcttgacacaacaacagttgttgccgttctacctgcacgctatgcctaacgctggcaccctcttacaactgcaacaattgctgccattcaaccaacttgctttgacaaactcaacagtgttctaccaacaacccatcattggtggtgccctcttttagattgcttatgagttatagttcaataatgaagttttttg

SEQ ID NO: 11125 - DNA, 648 bp, Zea mays
  unsure (1)..(648): unsure at all n locations; Clone ID: LIB3061-117-Q6-K6-G10
tctttctcatanaagcacatagtgtaccaacatggcagccaaaaattttgcttccttatgctccttggtctttctgcaagtgttgctaccganaccattttcccacaatgctcacaagctcctatagcttcccttcttcccccatacctctcaccagcggtgtcttcaatgtgtgaaaccccaattgttcaaccctacaggatccaacaggcaatcgcaacaggcatcttaccattatcacccttgttcctccaacaaccgtcagccctattacagcagttacctttggtccatttggtggcacaaaacatcagggcacaacaactacaacaacttgtgctagcaaaccttgctgcatactctcagcaacatcagtttcttccattcaaccaactggctgcattgaactctgctgcttatttgcaacaacaattaccattcagccagctagttgctgcctacccccagcaatttcttccattcaaccaactagcagcattgaactctgctgcttatttacagcagcaacaactactaccattcagccagctagctgatgtgagccctgctgccttcttgacacaacaacagttgttgccgttctacctgcacgctatgcctaacgctggcaccctcttacaactgcac

SEQ ID NO: 11126 - DNA, 525 bp, Zea mays
  unsure (1)..(525): unsure at all n locations; Clone ID: LIB3061-117-Q6-K6-G11
tattattggcacaaaacacagggcacaacaactacaacaacttgtgctagcaaaccttgctgcctactctcagcaacagcagtttcttccattcaaccaactagctgcattgaactctgcttcttatttgcaacaacaacaactaccattcagccagctacctgttgcctacccccaacaatttcttccattcaaccaactggcagcattgaactctcctgcttatttacagcagcaacaactactaccattcagccagctagctggtgtgagccctgctaccttcttgacacaaccacagttgttgccgttctaccagcacgctgcgcctaacgctggcaccctcttacaactgcaacaattgctgccattcaaccaacttgctttgacaaacctagcagtgttctaccaacaacccatcattggtggtgccctcttttagatttcttatgagttatagttcaataataaagttttttgtctgatgtttgtggcttcccagaaataagaaagtacatttcntag

SEQ ID NO: 11127 - DNA, 630 bp, Zea mays
  Clone ID: LIB3061-117-Q6-K6-G12
cgcagcggggatcaggacgagggcgggggtgtgcgtgaccggcgcgggcggcttcgtggcctcgtggctcgtcgagcgcctcctcgccggcggccgatacatggtccatggcaccgtccgtgatccgggcgacgccaagaacgcgcacctggcggcgatggacggcgccggggaccggctgctcctgttcagggccgaattgctcgactacggcagcgtggcggcggccatcgccggctgcgacggcgtcttccacgtcgcgtccccagtccccatgacctatccaatcggtgaccccgaggtagagctgctcgctccggccgtgacgggcaccaagaacgtcctgaaggcgtgctcggaggccaaggtgaagagggtcgtcgtggtgtcgtcggtggccgccgtgatggtgaaccctggctggccccagaacgaggccatggacgaggcttgttggtccgacgtcgaattctgcagaaccactcagaactggtactgtctctccaagacactcgcggagctggaagcgcttgattacgcaaagaggagtggactagacgtggtgtccgtctgcccgtcgctggtgatcgggcccttgctgcagtcgacggtgaacgcaagcagctccgt

SEQ ID NO: 11128 - DNA, 629 bp, Zea mays
  unsure (1)..(629): unsure at all n locations; Clone ID: LIB3061-117-Q6-K6-G2
tttgtagcgacagctcngcaaacattgtgagagtgatccggcgctgagaagagaggctaagatcgccgcagccgccgcggcggcggcggcgctgtgcttcgcggccctggtggccgtggccgtctgccaaggcgaggtcgagcggcagaggctcagggacctgcagtgctggcaggaggtccaggagagcccgctcgacgcgtgccgccaggtcctcgaccggcagctaaccggcggcggcgtcggcggcccgttccggtggggcaccgggctccggatgcggtgctgccagcagctccaggacgtgagccgcgagtgccgctgcgccgccatccggagcatggtcaggggctacgaggaggccatgccgcctctggagaaaggctggtggccatgggggcggcagcagcagccgccgccgcagggaggaggaggaggacaggggggctactactacccctgcagccgggcaggagagggataccaaacgcagatgtatccaccgtgtcgtcccggcaccaccgggccaaggatcggncgngtgaggcttacgaaggcccgggagtacgccgnggggttgccgatgatgtgccggttgtcggagccccaggagtgcagcattttctccg

SEQ ID NO: 11129 - DNA, 608 bp, Zea mays
  unsure (1)..(608): unsure at all n locations; Clone ID: LIB3061-117-Q6-K6-G3
ctgctaaatgcaccaagnaaaccatcgaggggccgtcgacaggggaattaatggcgtcgtcgtctagcagcagccaccgccgcctcatcctcgcagccgccgtcctgctctccgtgctcgcggctgccagcgccagcgccgggacctcctgcgtgccggggtgggccatcccgcacaacccgctcccgagctgccgctggtacgtgaccagccggacctgcggcatcgggccgcgcctcccgtggccggagctgaagaggagatgctgccgggagctggcggacatcccggcgtactgccggtgcacggcgctgagcatcctcatggacggcgcgatcccgccgggcccggacgcgcagctggagggccgcctagaggacctgccgggctgcccgcgggaggtgcagaggggattcgccgccaccctcgtcacggaggccgagtgcaacctggccaccatcagcggcgtcgccgaatgcccctggattctcggcggcggaacgatgccctccaagtaactgcgaagagcatagtgcatgaggaatgagcttgtagctagctcatatgtctgaataataagcacagcaaggagatgaatgcatttctcg

SEQ ID NO: 11130 - DNA, 649 bp, Zea mays
  Clone ID: LIB3061-117-Q6-K6-G4
tgttacaatagtgtaccaacatggcagccaaaatttttgcctccttatgctccttggtatttctgcaagtgctgctacggcgaccattttcccgcaatgctcacaagctcctatagcttcccttcttcccccgtacctctcaccagcggtgtcttcggtatgtgaaaacccaattcttcaaccctacaggatccaacaggcaatcgcagctggcatcttacctttatcacccttgttcctccaacaatcatcagccctattacagcagttacctttggtgcatttattggcacaaaacatcagggcacaacaactacaacaacttgtgctagcaaaccttgctgcctactctcagcaacagcagtttcttccattcaaccaactagctgcattgaactctgcttcttatttgcaacaacaacaactaccattcagccagctacctgttgcctacccccaacaatttcttccattcaaccaactggcagcattgaactctcctgcttatttacagcagcaacaactactaccattcagccagctagctggtgtgagccctgctaccttcttgacacaaccacagttgttgccgttctaccagcacgctgcgcctaacgctggcaccctcttacactgcaacattgctgcc

SEQ ID NO: 11131 - DNA, 638 bp, Zea mays
  unsure (1)..(638): unsure at all n locations; Clone ID: LIB3061-117-Q6-K6-G5
tttttaaacaagnagcttgatatatttcaatctagacttgtgttggcatcaccggagactgccactgatggtgattatgctgctattttgggtgttgttggacatgagtatttccacaactggactgggaatagagtaacttgccgtgattggttccagctaaccctgaaagaaggactgaccgttttcagggatcaggagttctcttcagatcttggctgtcgtacggtaaaacgtattgctgatgtctccaaacttagaatctatcaattcccacaggacgccgggcctatggcacatcctatccgtccccattcttatatcaagatggacaacttctatactgttacggtttacgagaagggtgctgaagttgtcagaatgtacaagaccatgtttggagcatcagggttccgaaagggcatggatctttattttaaaaggcatgatgggcaagctgtcacttgtgaagacttctatgcagccatgtgtgatgcaaataatgcacaactgccaaactttttacaatggtactctcaagcaggtacgcctatagtcaaggtggcatcttcatatgatcctagttctcagacattctctttgaaacttagccaagaagtaccacccactcctggcca

SEQ ID NO: 11132 - DNA, 652 bp, Zea mays
  unsure (1)..(652): unsure at all n locations; Clone ID: LIB3061-117-Q6-K6-G6
tttgcaacatagnaagcacaatagtgtaccaacaatggcagccaaaaattttgcttccttatgctccttggtctttctgcaagtgttgctaccganaccattttcccacaatgctcacaagctcctatagcttcccttcttcccccatacctctcaccagcggtgtcttcaatgtgtgaaaccccaattgttcaaccctacaggatccaacaggcaatcgcaacaggcatcttaccattatcacccttgttcctccaacaaccgtcagccctattacagcagttacctttggtccatttggtggcacaaaacatcagggcacaacaactacaacaacttgtgctagcaaaccttgctgcatactctcagcaacatcagtttcttccattcaaccaactggctgcattgaactctgctgcttatttgcaacaacaattaccattcagccagctagttgctgcctacccccagcaatttcttccattcaaccaactagcagcattgaactctgctgcttatttacagcagcaacaactactaccattcagccagctagctgatgtgagccctgctgccttcttgacacaacaacagttgttgccgttctacctgcacgctatgcctaaacgctgcaccctcttacactgcaaca

SEQ ID NO: 11133 - DNA, 645 bp, Zea mays
  Clone ID: LIB3061-117-Q6-K6-G8
ttaaacacaccaagcgaactacctagcaacgacttaacaacaatggctaccaagatattagccctccttgcgcttcttgccctttttgtgagcgcaacaaatgcgttcattattccacaatgctcacttgctcctagtgccattataccacagttcctccgaccagttacttcaatgggcttcgaacacctagctgtgcaagcctacaggctacaacaagcgcttgcggcgagcgtcttacaacaaccaattaaccaattgcaacaacaatccttggcacatctaaccatacaaaccatcgcaacacaacagcaacaacagttcctaccagcactgagccaactagatgtggtgaaccctgtcgcctacttgcaacagcaggtgcttgcatccaacccacttgctctggcaaacgtagctgcataccaacaacaacaacaattgcaacagtttctgccagcgctcagtcaactagccatggtgaaccctgccgcctacctacaacagcaacaactgctttcatctagccctctcgttgtgggtaatgcacctacatacctgcaacaacaattgctgcaacagattgtaccagctctgactcagctagctgtggcaaaccctgctgcctacttgcaacagctgctt

SEQ ID NO: 11134 - DNA, 605 bp, Zea mays
  unsure (1)..(605): unsure at all n locations; Clone ID: LIB3061-117-Q6-K6-H1
tcggtttagctacaacaagccccacttccttttntgaaaccaacaacaattgcttccgttctaccagcagtttgtggctaaccccgcaaccctcttacaactgcaacagttgctgccctttgtccaacttgctttgacaaacccagcagccttctaccaacaacacatcattggcggtgccatcttttagattgcttattagttgtaattcaataatgaagttttttggctgatgtatgtggcctcctagaaataagaagttacatttccaaattctaatgtgctattggcctgcaagggtgttcgataattattttccctaagattgggaagcaagctataaatcatccttatagtgtgaaaaaaaaaaaaaaaaaaaaaaaaaaaaaaaaaaaaaaaaaaaaaaaaaaaaaaaaaaaaaaaaaaaaaaaaaaaaaaaaaannnnannnnaaaaaaaaaaaaaaaaaaaaaaaaaaaaaaaaaaanaaaaaaaaaaaaaaaaaaaaaaaaaaaaaannnnnaaaaaaaaaaaaaaaanngggggngngnattaaaaaaaaaaaaaatataaaagggggttagaaagataattttttttttttat

SEQ ID NO: 11135 - DNA, 657 bp, Zea mays
  unsure (1)..(657): unsure at all n locations; Clone ID: LIB3061-117-Q6-K6-H10
ttttcacatagnaagcacaatagtgtaccaacaatggcgagccaaaaattttgcctccttatgctccttggtatttctgcaagtgctgctacggcgaccattttcccgcaatgctcacaagctcctatagcttcccttcttcccccgtacctctcaccagcggtgtcttcggtatgtgaaaacccaattcttcaaccctacaggatccaacaggcaatcgcagctggcatcttacctttatcacccttgttcctccaacaatcatcagccctattacagcagttacctttggtgcatttattggcacaaaacatcagggcacaacaactacaacaacttgtgctagcaaaccttgctgcctactctcagcaacagcagtttcttccattcaaccaactagctgcattgaactctgcttcttatttgcaacaacaacaactaccattcagccagctacctgttgcctacccccaacaatttcttccattcaaccaactggcagcattgaactctcctgcttatttacagcagcaacaactactaccattcagccagctagctggtgtgagccctgctaccttcttgacacaaccacagttgtttgccgttctaccagcacgctgcgcctaacgctggcaccctcttacaactgcaaca

SEQ ID NO: 11136 - DNA, 602 bp, Zea mays
  unsure (1)..(602): unsure at all n locations; Clone ID: LIB3061-117-Q6-K6-H11
tcggcttcgtcaccttcgggggggggggggggatgcggaacgccatcgagggcatgaacggcaaggagctggacggccgcaacatcaccgtcaacgaggcccagtcccgcggcggccgtggaggcggcggcggcggcgggtacggtggtggccgtggaggcggcgggtggggggggggcgtttttttttatggcggcggcggctacggcggtggcggcggctacggtggtggcggcggcggctacggtggtggtggcggcggctacggcggtggcaaccgtggcggcggctacggcaactccgacgggaactggaggaactgagcggtggggcccgcgcggccaagttatcctgttcgctaccgtgttgtttaccctagtccagagtgtttatcttcgttcgtctcgtgtttgttgttgcccatctgtgtttttgattgaaggtcgctctgtgtcagttgttagtgctgtgttcatcctcggctccagcagacccatgcatcaaccagcatggactgcggatcgatgggtgctgttacccccgtcaggctttattctaagttaaatcctaaggaagaaaaggtgcttnttggtgctgcaaaa

SEQ ID NO: 11137 - DNA, 514 bp, Zea mays
  unsure (1)..(514): unsure at all n locations; Clone ID: LIB3061-117-Q6-K6-H2
cccggtcagntgcaacagtttcttccagcgctcagtcaactagccatggtgaaccctatcgcctacctacaacagcaacaacttctttcatctagcccgctcgctatgggcaatgcacctacatacctgcaacaacagttgttgcaacaacagttgctgcaacaaattgtaccagctcttactcagctagctgtggcaaaccctgctgcctacttgcaacaactacttccattcaaccaactgactgtgtcgaactctgctgcgtacctacaacagcgacaacagttacttaatccactagcggtggctaacccattggtcgctgccttcctacagcagcaacaattgctgccatacaaccagttctctttgatgaaccctgccttgtcgtggcagcaacccatcgttggtggtgccatcttttagattacatatgagatgtactcgataatggtgccctcatagcggcatgtgtttcctaaaaataacaatatattgattgagatttatctcg

SEQ ID NO: 11138 - DNA, 645 bp, Zea mays
  unsure (1)..(645): unsure at all n locations; Clone ID: LIB3061-117-Q6-K6-H3
cgtccggttccctccgngcatcctagtgactcccatggctccggccatgtcggcgcagttcacaagaataaccttcagcaacctgtttgtccgtcgggctggcccaggcagcacggagctgaccgtggagggaaggccatccgaccagctgggcaggagaaacctcactgacagccccgtatttgacggccgtggccctgacgccagcctcgtggctcgcgtacagggagtcgctacccagatgggcgacgtgcgccagttgtacaccgtcgtgttccaggagaggccgctcaagggctccacgctcgtcaccgaaggcgcgatgacagaagggtcagacgagtgggcgatctacggtggaactggagtgttcgcgatggcgagaggcgtcataaggagaacgtttcttgccgacacgagcggcgggaactccgacgagcttgccgtggaggttctctgcccggtgttccgcccggcggcgtttggctcatcgtcgtcacagccagcagcaaaggacatcagctccaccgtcgtcgtcaccaaggtcggagtgtggggtggagagggagggtcggcgcaggacatcgcgacgacggagccgccgaggcgtctgcagagcctgaccgtccgcgccggcgttgccgt

SEQ ID NO: 11139 - DNA, 562 bp, Zea mays
  unsure (1)..(562): unsure at all n locations; Clone ID: LIB3061-117-Q6-K6-H4
cccggcagcaacatgttgtcatgtatcttagcagnatgagccacaatacattcaccaagcaatctacaacatggttcaatccataatccaggaggagcaacaacaacaactacaacaacttgtgctagcaaaccttgctgcctactctcagcaacagcagtttcttccattcaaccaactagctgcattgaactctgcttcttatttgcaacaacaacaactaccattcagccagctacctgctgcctacccccagcaatttcttccattcaaccaactggcagcattgaactctcctgcttatttacagcagcaacaactactaccattcagccagctagctggtgtgagccctgctaccttcttgatacaaccacagttgttgccgttctaccagcacgctgcgcctaacgctggcaccctcttacaactgcaacaattgctgccattcaaccaacttgccttgacaaacccagcagcgttctaccaacaacccatcattggtggtgccctcttttagatttcttatgagttatagttcaataataaagttttttgtctg

SEQ ID NO: 11140 - DNA, 543 bp, Zea mays
  unsure (1)..(543): unsure at all n locations; Clone ID: LIB3061-117-Q6-K6-H5
tatccagnattcnnngtggggacccaccctcttnncgagttccaaggtttcccaagggtccaactcttcttcttctctctgagnngccgtagcnnatttgtctggtnntggattggnngttgttccgcttttgggtanngccgggtgggatnncgaaatctgtgtggcancccaatatggctgcnnggtcgaggggacgaaagaagaaggtaanntcatcgacaccgaccccgngaattgatgaacgcgatggnccatcttcttggcgctgcggtcgccggagctggaggtgctgggcctcaccactaccttcggcaacgtccacaccgccctcgccacgcgcaacgcgctccacctgctggaggctgttggcaggactgacatccccgtggcagagggatcccatgtaacgatcaagaaagccaccaagctgaggatcgcaagcttcgtccacggttcagacggcctgngaaaccaggacttccctccaccagctaccaagcctgtagatcagtctgctgctgccttcctggttgagcaggc

SEQ ID NO: 11141 - DNA, 648 bp, Zea mays
  unsure (1)..(648): unsure at all n locations; Clone ID: LIB3061-117-Q6-K6-H6
ttttcgcnacaggntgcaggccttgcaagatcagctaattgaggcaataaatcatgtgcnacaaagtatctgaagtacatgtttttttagccatatgccgaggtttttgggaccggatgggacaggatgtgctgagtttcctggagaatcgcaaagaaaacaaagcctggtataaaggtgcacgagtcgcaatctcagtattggatgatacttttgcatcccagctgcaacagctgctaggtaatacagtcccaccgaaggacctagagccacccagatctatcgtggaagttcgttctattctctgcaaagatgcaccccgccagaagaattctagtttctattattgatgatcaggcttaactgtacatagtagtcatgcgctgcgcgtgcagcttttctcttggagagaaaagctccaaagtgcccaaatagccggatctttataaagaaactagaggaggctcaatggtatctgagaagcttgccttgtgttacaccatatctttttgctagttaaattggctatgttcccattgcctgtggatgtggactacattcggaaagtggattgtgcttcagagtgtagtccaattgacattgtaggttagcttcattggtaacacttacctgtggttaagcagttgc

SEQ ID NO: 11142 - DNA, 658 bp, Zea mays
  unsure (1)..(658): unsure at all n locations; Clone ID: LIB3061-117-Q6-K6-H7
tttctcactagcaacatagnaagcacaatagtgtaccaacaatggcagccaaaaattttgcctccttatgctccttggtctttctgcaagtgctgctacggcgaccattttcccacaatgctcacaagctcctatagcttcccttcttcccccgtacctctcaccagcggtgtcttcggtatgtgaaaacccaattcttcaaccctataggatccaacaggcaatcgcagctggcatcttacctttatcacccttgttcctccaacaatcatcagccctattacagcagttacctttggtgcatttattggcacaaaacatcagggcacaacaactacaacaacttgtgctagcaaaccttgctgcctactctcagcaacaacagtttcttccattcaaccaactagctgcattgaactctgcttcttatttgcaacaacaacaactaccattcagccagctatctgctgcctacccccagcaatttcttccattcaaccaactgacagctttgaactctcctgcttatttacagcagcaacaactactaccattcagccagctagctggtgtgagccctgctaccttcttgacacaaccaccaattgttgccgttctaccagcacgctgcgcctaacgctggcaccctcttacactg

SEQ ID NO: 11143 - DNA, 634 bp, Zea mays
  Clone ID: LIB3061-117-Q6-K6-H8
tgttttatggaggcaatgtgctgcgccgaggtgagtggctatcgctgaatggatcgaccggcgaagtgatcctcggaaagcagccgctctccccaccagccctcagtggcgatctgggaacattcatgtcctgggtggatgacgttagaaagctcaaggtcctggcaaacgcggatacccctgaggatgcattggctgcgcggaacaacggggcagaaggaatcgggttatgccggacagagcacatgttcttcgcttcggatgagaggattaaggctgtgaggcagatgattatggctcccacagttgagctgaggcagcaggcgctggatcgccttctgccttaccagaggtctgacttcgaaggcatcttccgtgctatggatggactttcagtgactattcgacttctggaccctcccctccacgagttccttccagaagggaacgtcgaggaaatcgtgcgtgaactgtgttctgagacgggagccaaccaggaggatgccctcgcacggatcgaaaagtttcggaagtaaacccgatgcttggcttccgtggctgcaggcttggtatatcgtaccctgagctaacagaaatgcaaggccgtgccatctttgaagctgctataacgatg

SEQ ID NO: 11144 - DNA, 409 bp, Zea mays
  Clone ID: LIB3061-117-Q6-K6-H9
ttgcgctgccttgcaaattggtatgtaaatctacggctcacaagaaaacacacgtggattgagtacatggcaccacaattctgctgctatcgttacatctgtgagtagaaattttgctgtggtgcatgaagtgcagcaagcactgcagctgctgagagttatatgacagaagtattcatagtatagtacagcgcagatgaatattatagtctcttcttccaagggttttgtcgattcgaggaacagattagtcaaattttgtggtgtttagacttctgacctccgtttgtgcatagctcagcttcatccaaaactatctgctgtcacctaaccaagatgttctggtctgtgatgtaagacatgtttatacatttttttaaaaaaagaaacaaactgtactttcgacttt

SEQ ID NO: 11145 - DNA, 601 bp, Zea mays
  unsure (1)..(601): unsure at all n locations; Clone ID: LIB3061-118-Q6-K6-A10
cccnacgcgtccgtagnaaagcacaatagtgtaccaacaatggcagccaaaatattttgcctccttatgctccttggtctttctgcaagtgctgctacggcgaccattttcccgcaatgctcgcaagctcctatagcttcccttcttcccccgtacctctcaccagcggtgtcttcggtatgtgaaaacccaattcttcaaccctacaggatccaacaggcaatcacagctggcatcttacctttatcacccttgttcctccaacaatcatcagccctattacatcagttacctttggtgcatttattggcacaaaacatcagggcacaacaactacaacaacttgtgctagcaaaccttgctgcctactctcagcaacagcagtttcttccattcaaccaactagctgcattgaactctgcttcttatttgcaacaacaacaactaccattcagccagctacctgctgcctacccccagcaatttcttccattcaaccaactggcagcattgaactctcctgcttatttacagcagcaacaactactaccattcagccagctagctggtgtgagccctgctaccttcttgatacaaccac

SEQ ID NO: 11146 - DNA, 631 bp, Zea mays
  Clone ID: LIB3061-118-Q6-K6-A12
gcacaatattgtaccaataatggcagccaaaatttttgcctcattatgctccttggtctttctgcaagtgctgctacggcgagcattttcccgcaatgctcacaagctcctatagcttcccttcttcccccatacctctcaccagcgatgtcttcagtatgtgaaaatccaattcttctaccctacaggatccaacaggcaatcgcagcaggcatcttacctttatcacccttgttcctccaacaatcatcagccctattacagcagttacctttggtgcatttattggcacaaaacatcagggcacaacaactacaacaactcgtgctagcaaaccttgctgcctactctcagcaacagcagttacctttggtgcatttgttggcacaaaacatcagggcacaacaactacaacaactcgtgctagcaaaccttgctgcctactctcagcaacaacagtttctgccattcaaccaactagctgcattgaactctgctgcttatttgcagcaacaacaactactaccattcagccagctagctgctgcctacccccggcaatttcttccattcaaccaactggcagcattgaactctcatgcttatgtacaacaacaacaactactaccat

SEQ ID NO: 11147 - DNA, 482 bp, Zea mays
  Clone ID: LIB3061-118-Q6-K6-A2
agcaaaccttgctgcctactctcagcaacagcagtttcttccattcaaccaactagctgcattgaactctgcttcttatttgcaacaacaacaactaccattcagccagctacctgctgcctacccccagcaatttcttccattcaaccaactggcagcattgaactctcctgcttatttacagcagcaacaactactaccattcagccagctagctggtgtgagccctgctaccttcttgatacaaccacagttgttgccgttctaccagcacgctgcgcctaacgctggcaccctcttacaactgcaacaattgctgccattcaaccaacttgctttgacaaacccagcagcgttctaccaacaacccatcattggtggtgccctcttttagatttcttatgagttatagttcaataataaagttttttgtctgatgtttgtggcttcccagaaataagaaaggacatttctagattctt

SEQ ID NO: 11148 - DNA, 516 bp, Zea mays
  unsure (1)..(516): unsure at all n locations; Clone ID: LIB3061-118-Q6-K6-A3
cgtcacgcgtcagacccacgcagcgcaccttctcttctccgccgcgtcgccgccgaacatcagcatcggatcgatggagggctgggacaaggggaccaagagcacggtgggcgagatcccgctgctgtcgacgcgcgcgggtccgcgggacggcgaggcgtggcggcagaggctcaaggaggagtaccgcgcgctcatcgcctacacgtcggtgaacaaggccaaggacaacgactggttccgcatcgccgccgccaacccggagggaacccgctgggaggggacctgctggtacgtccacaacctccgccgctatgagttccctctccagttcgacatgcccgtcgcctacccccaggtcgcccccgagatcgagctccccaccctcgacggcaagactcacaagatgtaccgcggtgggaagatctgcctcaccgtgcacttcaagccgctgtgggccaagaactgcccgaggttcgggctggcgcacgcgctgtgcctcggcctcncgccgtg

SEQ ID NO: 11149 - DNA, 599 bp, Zea mays
  unsure (1)..(599): unsure at all n locations; Clone ID: LIB3061-118-Q6-K6-A6
gagaccaacagcaacatanaagtggaatccagtagcaacaatagagcaacaatggcgaccaagatattttccctccttatgctccttgctctttctacatgtgttgctaacgcgacaattttccctcaatgctcacaagctcctatagcttcccttcttcccccataccttccatcaattatagcttcaatatgtgaaaacccagctcttcaaccatataggcttcaacaagcaatcgcagcaagcaacatacctttatcgcccttgttgtttcaacaatcgccagccctatctttggtgcagtcattggtacaaaccatcagggcacaacagctgcagcaactcgtgctacctctgatcaaccaagtagctctggcaaacctttctccctactctcagcaacaacaatttcttccattcaaccaactgtctacactgaaccctgctgcttatttgcagcaacaactattaccatttagccagctagctactgcctactctcagcaacaacaacttcttccatttaaccaattggccgcactgaaccccgctgcttatttgcagcagcaaatactactaccatttagccagctagctgc

SEQ ID NO: 11150 - DNA, 638 bp, Zea mays
  Clone ID: LIB3061-118-Q6-K6-A9
caacaagcaacatagaaagtggaatacagtagcaaaaatagagcaacaatggcggccaagatattttccatccttatgctccttgctctttctgcatgtgttgctaacgcgaccatttttcctcaatactcacaagctcctatagctgcccttcttcccccataccttccatcaatgaccgctttagtatgtgaaaacccagcccttcaaccctacaggatccagcaagcaatcgcaacaagcaacttacctttatcacacctgttctttcaacaatcgccagccctatctttggtgcagtcattggtacaaaccatcagggcagaacagttgcagcaactcgtgctaccagtgatcagccaagtagctctggcaaacctttccccctactctcagcaacaacaatttcttccattcaaccaactgtctatactgaaccctgctgcttatttgcagcaacaacaactactaccattcagccagctagctactgcctactctcagcagcaacaatttcttccatttaaccaattggccgcactgaacccctctgcttatttccagcagcaaatactactaccatttggccagctagctacaacaagccccgcttcctttttgacacaacaacaagtgct

SEQ ID NO: 11151 - DNA, 599 bp, Zea mays
  Clone ID: LIB3061-118-Q6-K6-B1
gttccacctcctcgtccacgagtgaggaaaccctagcgaccgaccatggcgttgctcccgcgcaccgcgcggctggccctcctttccaccccgcgggcgtactccgctgccgctgctgcgggcgcctccccgacgtccccagcgccatacgggggcgcccccccaccggcgatgtcgaagacggccgagttcgtggtctctaaggtggacgacctgatgaactgggcgcgtaagggctcgatctggcccatgaccttcgggctcgcctgctgcgcggtggagatgatgcacgccggcgcgtcccgctacgacttcgaccggttcggcgtcatcttccgtccgtcgccgcgccagtccgattgcatgatcgtcgccggcacgctcaccaacaagatggctccggccctccgcaaggtttatgaccaaatgcctgagcctaggtgggttatttcaatgggcagctgtgccaacggtggtggatactaccattactcctactctgttgtacgtggatgtgaccgtatagtccctgtggacatctacgtccctgggtgcccaccaactgctgaggcactgctgtacggcgttcttcagctcca

SEQ ID NO: 11152 - DNA, 499 bp, Zea mays
  unsure (1)..(499): unsure at all n locations; Clone ID: LIB3061-118-Q6-K6-B10
cttgtatcttcatgtacctgctactttcagnattatcctgcggggctgtgatgtgagaaccacataatgtagttaatgatttgatgtatcgggagtgcgtgttgtataaaccacaaattgctggacttacagagtcatcggtaatcacaaccattgggtttgttaaaggtgcaccagatatagatgtacaagggtttaatgtatatcacaaaaaccgtctaatattgcccttctggaaagttgcaaacaactcatacgggaaaggacgaggagttgttggcattctggaggccaactttatcaaacctacccatgacaagcaggattttgagaagtcagtcctttatcaaagacttgagttccgcttgaaagaaatgacttacgaatactgggaccttcattgccatcgtgttggatatgacaacaaaaaattacctaaagcaacccgtgctattaatcgggccaatcatttgaacgggggcagttaccccacaagtgc

SEQ ID NO: 11153 - DNA, 597 bp, Zea mays
  Clone ID: LIB3061-118-Q6-K6-B11
gctgccccgcagcaacgaacacgaaccttggcagaacgaagctgaagtagttcgttgtgaacccagtatggcaaacgcgccgaggatcctggccctcggcctgctgctagcgctcctgtgcgctgccgccggcccggccgccgcgcagaactgcggctgccagcctaacttctgctgcagcaagttcggctactgcggcacgaccgacgactactgcggcgacgggtgccagtcgggcccgtgccgctcgggcggcggcggcggcggcggcggaggcggaggcagtggcggtgcgaacgtggctaacgtggtcagcgacgcgttcttcaacggcatcaagaaccaggccgggagcgggtgcgagggcaagaacttctacacccggagcgcgttcctgagcgccgtcaacaagtacccgggcttcgcccatggcgggacggaggtggagggcaagcgcgagatcgccgccttcttcgcgcacgtcacgcacgagaccggacatttctgctacatcagcgagatcaacaagagcaacgcctactgcgacgcaagcaaacagcagtggccgtgcgccgcggggcaaagtactacgggcgc

SEQ ID NO: 11154 - DNA, 597 bp, Zea mays
  Clone ID: LIB3061-118-Q6-K6-B12
gttctacacttcaaacatgcccatcattcttcactctgcgctgattaccaacctctattttatatcccaggtacacacctcatttctaatgctgcagtaagttatatcttctgtatgtgtgtgtgtaagtgctaatgtattttactgctatcacagcttctctacaggaagtacagtggaaacttccttgttaaccttcttgggaagtggaaggagtctgaatactctggccattctattcctgttggtggtcttgcttactatgtaactgccccatcaaggtgaaaatctagttccttcagtggggactggggaggccttctcgccatgatcatttttgttgtttttgttattcaataattaggtattcttttgactaacaatagcacattggaaaccacacagtttggctgatgtccttgcaaatccattccatgcactgttttatgtggtcttcatgctgtcagcctgtgctctgttctcaaagacatggattgaagtttctggttcatcagcaaaggatgttgctaagcagctcaaggaacaacaaatggtgatgccaggccatcgtgagtcgaacttgcagaaagaacttaa

SEQ ID NO: 11155 - DNA, 595 bp, Zea mays
  unsure (1)..(595): unsure at all n locations; Clone ID: LIB3061-118-Q6-K6-B2
caacagcctcagcaatatcagcaggggccaggaaaaacacaacagcaacaatgtcattgccaggagcagcaacagactacaaggtgcagctataactactatagcagtagctcaaatctaaaaaatgtcatgaattcctaaggcagcagtgcagccctttggtaatgccttttctccaatcacgtttgatacaaccaagtagctgccaggtattgcagcaacaatgttgtcatgatcttaggcagattgagccacaatacattcaccaagcaatctacaacatggttcaatccataatccaggaggagcaacaacaacaaccatgtgagttatgtggatctcaacaagctactcaaagtgcggtggcaatcttgacagcagcacaatacctaccatcaatgtgcggcttgtaccactcatactaccaaaataatccatgcagcagcaatgacattangtggtgtttgcaattgaagaattgtgtctacctagccgttatactcatataacggtgttaagcaataaagtaccatacattatgatgtttgtactatgatatttgaataagaatactaattgtaattataatgctnct

SEQ ID NO: 11156 - DNA, 580 bp, Zea mays
  Clone ID: LIB3061-118-Q6-K6-B3
attccccagcccggttccttttcgtgcggtttgatctcgtcggaggcccggccgcagttccgccatcagccatcgaattcgatggcggccaacttcgggaacaagatccgcaacgccaagctggttcttcttggagatgtaggcgctggcaaatctagcttggttcttcggtttgtcaagggacagtttgttgaattccaggaatcaacaatcggagcagctttcttttcccagaccttagcggtaaatgatgagactgttaagtttgaaatctgggatactgctgggcaggagaggtatcatagcttggcccccatgtattataggggtgcagccgccgccattgttgtctatgacatcacaaatccggcctccttcacccgtgccaagaaatgggttcaagaacttcaagctcaaggaaatccgaatacaatagtggctcttgctggtaacaaggttgatatgctagatgcgaggcacgtggcagtagaggaagcaaagacgtatgcccaggagaacggtctcttcttcatggagacatctgctaaaactgcaatcaatgtgaatgacatattttatg

SEQ ID NO: 11157 - DNA, 638 bp, Zea mays
  Clone ID: LIB3061-118-Q6-K6-B4
caacagcttctaatgcagaaacagagcatgatgaggcagcaaacgcttcaataagatttcatcgtctaaaatctcataaggttcaacttcaacaaaagatcaagcaagagtctgaacagtttaggtcttggaaggctgcccgtgaaaaggaagtacttcagctcaagaaggaagggagacgaaatgaatatgagatgcacaagctcttggccttaaatcagaggcagaagatggtcttacagaggaaaactgaggaagcagctgctgctacaaaaagattgaaggagttgctggaagcaaagaagtcatcacgggaaacatatggcagtgcaaatggttcggggatgcaggccttaatacgagctattgaggatgaactagaagtcactgtaagagcacacgaattgcgctcatattacgagcgacaaatgcaagagagagcagcaatatccaaggaaatagcaaaactaaaggaggaatcaaagcacaagatcagtgattgtcctcaagctatgtcacctagtgctagaagttctaggatatcagcattagagaatatgttgtgctcatcatctagtgctatggtatctatggcttctcaactgtcagaagcagagagcgggagcgtgtattcatgc

SEQ ID NO: 11158 - DNA, 562 bp, Zea mays
  unsure (1)..(562): unsure at all n locations; Clone ID: LIB3061-118-Q6-K6-B5
ngtgatatcaagagaacctaaaaggtatatcaatgctggttttgctggaattatgcttgaggatcaggtggcacctaaagcatgtggacatactgaaggaaggaaagtcatatcaagggaggaagctgtcatgcacataaaagctgctgtagatgctaggaaagagagtggctctgacattgttattgtagcaaggacagattctcgccaagctatttctcatgatgaagcattatggagggtgaaagcatttgctgatgctggagcagatgttctatttattgatgcccttgcttcagtagaagagatgaaagcattttgtgcggttgcaccagaagttccaaagatggcaaacatgttagaaggtggtggtaaaactcccatattgagccctgctgaacttgaggaaattggtttcaggcttgtagtatatcctttatccttagttggggtatcaatgcgtgcaatgcaggatgctctagttgcgataaaagacggcggtgtacctccacctagcgtcctgccatcttttcaggagatcaaggatacattgggtttcaac

SEQ ID NO: 11159 - DNA, 628 bp, Zea mays
  Clone ID: LIB3061-118-Q6-K6-B9
attttgagcattcagaaacacaccaagcgaagcgcactagcaacaacctaacaacaatggctaccaagatattatccctccttgcgcttcttgcgctttttgcgagcgcaacaaatgcgtccattattccacaatgctcacttgctcctagttccattattccacagttcctcccaccagttacttcaatggccttcgaacacccagctgtgcaagcctataggctacaacaagcgattgcggcgagcgtcttacaacaaccaattgcccaattgcaacaacaatccttggcacatctaacaatacaaaccatcgcaacgcaacagcaacaacagttcctaccagcactgagccacctagccatggtgaaccctgtcgcctacttgcaacagcagctgcttgcatccaacccacttgctctagcaaacgtagttgcaaaccagcaacaacaacaactgcaacagtttctgccagcgcttagtcaactagccatggtgaaccctgccgcctacctacaacagcaacaactgctttcatctagcccgctcgctgtggccaatgcacctacatacctgcaacaagaattgttgcaacagattgtaccagctcttactcagctagctgtggc

SEQ ID NO: 11160 - DNA, 568 bp, Zea mays
  Clone ID: LIB3061-118-Q6-K6-C1
gcgaaacgcactagcaacgacctaacaccaatggctaccaagatattagccctccttgcgcttcttgcccttttagtgagcgcaacaaatgcgttcattattccacagtgctcacttgctcctagtgccattattccacagttcctcccaccagttacttcaatgggcttcgaacatccagccgtgcaagcctacaggctacaactagcgcttgcggcgagcgccttacaacaaccaattgcccaattgcaacaacaatccttggcacatctaaccctacaaaccattgcaacgcaacaacaacaacaacaacagtttctgccatcactgagccacctagccgtggtgaaccctgtcacctacttgcaacagcagctgcttgcatccaacccacttgctctggcgaacgtagctgcataccagcaacaacaacagctgcaacagtttatgccagtgctcagtcaactagccatggtgaaccctgccgtctacctacaactactttcatctagcccgctcgcggtgggcaatgcacctacgtacctacaacaacagttgctgcaacaaa

SEQ ID NO: 11161 - DNA, 603 bp, Zea mays
  unsure (1)..(603): unsure at all n locations; Clone ID: LIB3061-118-Q6-K6-C10
gtagaaaacactacccaacacagnatgtattagctgcggtggactttgatcttaggtttacgtatgtgttggctggatgggaaggatcagctcatgattcctttgtgctccaagacgcattgtcacgcccttcgggcttaaaaattcttgaaggtcattactttctagctgatgctggttatgcagcaagacctggtatactacccccgtaccgtggtgttcggtaccatcttaaggagtttcagggtactagacgaccagaaaatccaaaggaattgttcaacctacgtcactcatctcttagaacaacaattgaacgggcatttggcacacttaaaaatagatttaagatactaacaaggtaacacttttgacacaacaaggtctatggtaatcatatcagaatcagagaaggaaaaactaaaggatagagcaaggaggctcctttcaaagcccatcaaattcttcaatgaaatgtaggagctattccttgacagtagtgctgatggatctcttgccatggatgctactacttgcctaaatgaaagtcaacctgtcgatgataatgataatgatgatgacatatgcaatgatgtctccaac

SEQ ID NO: 11162 - DNA, 628 bp, Zea mays
  Clone ID: LIB3061-118-Q6-K6-C11
ctcacttgctccgagtgccattattccacagttcctccctccagttacttcaatgggcttcgaacacccagctgtgcaagcctataggctacaacaagcgcttgcggcgagcgtcttagaacaaccaattgcccaattacaacaacaatccttggcacatctaaccatacaaaccatcgcaacgcagcagcaacaagcactgagccacctagccgtggtgaaccctatcgcctacttgcaacaacagctgcttgcatccaacccacttgctttggcaaacgtagctgcataccaacaacaacaacagttgcaacagtttctaccagcgctcagtcaactagccatggtgaaccctatcgcctacctacaacagcaacaacttctttcatctagcccgctcgctatgggcaatgcacctacatacctgcaacaacagttgttgcaacaacagttgctgcaacaaattgtaccagctcttactcagctagctgtggcaaaccctgctgcctacttgcaacaactacttccattcaaccaactgactgtgtcgaactctgctgcgtacctacaacagcgacaacagttacttaattcactagcggtggctaacccattggtcgctgccttc

SEQ ID NO: 11163 - DNA, 593 bp, Zea mays
  unsure (1)..(593): unsure at all n locations; Clone ID: LIB3061-118-Q6-K6-C12
cagtatgtgaaaaatccaattcttctaccctacagnatccaacaggcaatcgcagcaggcatcttacctttatcacccttgttcctccaacaatcatcagccctattacagcagttacctttggtgcatttattggcacaaaacatcagggcacaacaactacaacaactcgtgctagcaaaccttgctgcctactctcagcaacagcagttacctttggtgcatttgttggcacaaaacatcagggcacaacaactacaacaactcgtgctagcaaaccttgctgcctactctcagcaacaacagtttctgccattcaaccaactagctgcattgaactctgctgcttatttgcagcaacaacaactactaccattcagccagctagctgctgcctacccccggcaatttcttccattcaaccaactggcagcattgaactctcatgcttatgtacaacaacaacaactactaccattcagccagctagctgctgtgagccctgctgccttcttgacacagcaacatttgttgccgttctacctgcacactgcgcctaacgttggcaccctcttacaactgcaacaattgct

SEQ ID NO: 11164 - DNA, 51 bp, Zea mays
  Clone ID: LIB3061-118-Q6-K6-C2
gtcagaagaggccaggcgcgggcccgcgggcgccgtgctggtggtgcttgg

SEQ ID NO: 11165 - DNA, 601 bp, Zea mays
  Clone ID: LIB3061-118-Q6-K6-C3
ccgcgccccaccgctttcccgttccccaccccgaccgactgctccccctcccccgcaccagcctcaagccctcaaggcctcaaggcatcgccggcgccgcaacttcgctgaggaagcccgcacccctgcccggatccgatggccaacagcaacctcccgcggcggatcatcaaggagactcagcggctgctcagcgagccagcaccggggatcagcgcgtcgccctcggaggagaacatgcgctacttcaacgttatgatccttgggccggcgcagtcgccctatgaaggtggagtttttaagcttgaactctttttacctgaggaatatccaatggctgccccaaaggttaggtttctgacaaagatttatcatcccaacatcgacaagcttggtaggatatgcctcgacattctcaaggacaaatggagcccagcacttcagattcgaacagttcttttgagtatacaggctctactgagtgcgccaaatccagacgaccctctttcggataacattgcaaagcactggaaagccaatgaagtagaagctgtcgaaacagctaaggagtggactcgcctgtatgcgagcggtgcatgag

SEQ ID NO: 11166 - DNA, 589 bp, Zea mays
  unsure (1)..(589): unsure at all n locations; Clone ID: LIB3061-118-Q6-K6-C4
gngcccaactagcaacatagnaaagcacaatagtgtaccaacaatggcagccaaaatattttgcttccttatgctccttggtctttctgcaagtgttgctaccgcaaccattttcccacaatgctcacaagctcctatagcttcccttcttcccccatacctctcaccagcggtgtcttcaatgtgtgaaaccccaattgttcaaccctacaggatccaacaggcaatcgcaacaggcatcttaccattatcacccttgttcctccaacaaccgtcagccctattacagcagttacctttggtccatttggtggcacaaaacatcagggcacaacaactacaacaacttgtgctagcaaaccttgctgcatactctcagcaacatcagtttcttccattcaaccaactggctgcattgaactctgctgcttatttgcaacaacaattaccattcagccagctagttgctgcctacccccagcaatttcttccattcaaccaactagcagcattgaactctgctgcttatttacagcagcaacaactactaccattcagccagctagctgatgtgagccctgctgccttc

SEQ ID NO: 11167 - DNA, 549 bp, Zea mays
  Clone ID: LIB3061-118-Q6-K6-C5
gttctttctacagggtttgtccgccggattgctgaggcaagcgacgtacacgactgctcgtcttggatcctttagggttctaactaacaaagcagttgaaaagaatgaagggaagccattgcctctatttcagaaagcttttattggtctgactgctggtgcaattggtgcttgtgttggtagtcctgctgatctggcactcattagaatgcaagccgattcgaccctgccagttgcacaacgacgcaactataagaatgctttccatgcactctaccgtatcagtggtgatgagggagtccttgcgctttggaagggtgcaggtccaactgtggtgagagctatggcactcaatatgggtatgcttgcttcctatgaccagagtgtcgagctatttagggacaaatttggcgcaggagaaatttctactgttgttggagccagcgctgtttctggattctttgcctcagcatgcagtttgccctttgactatgtgaagacacagattcagaagatgcaacctgatgcgaatggcaagtacccatacac

SEQ ID NO: 11168 - DNA, 596 bp, Zea mays
  unsure (1)..(596): unsure at all n locations; Clone ID: LIB3061-118-Q6-K6-C6
ngaanaacttgcattgttcgtttgctcgatcgttgcagataatggagaaccctgctccgagtatcgtagtgccccccattgccgcacctgtatcagcgaacttcagcagactcgccttccgcaacctgtacatccgacggacgggtccagacagcagggagatggtgactgtggagggaagaagaggctctagtgatcagacaggcgacatgaggtacgtgagtgacttccccgtctacgatggccgtggctccgacgccgtcctggtggctcgcgtgcagggcgtcacaaccacgttcgggaactccaaccagttcttcaccgtcgccttcgaggccggcaggctcaagggctccacgctccttaccgaaggagtggtgacggatggatcagatgaatgggcaatctacggcgggaccggagagtttgctatggcgagaggtgtcgtcaaaagaaggtaccttgccgatagggatggcgccgggaacactgacgagctcagcatgcaggttttctgcccggtgtttggctcatcacagcaaccaaacaagcaggactccagcatctctgtcaccaagattgggttatggggtggc

SEQ ID NO: 11169 - DNA, 481 bp, Zea mays
  unsure (1)..(481): unsure at all n locations; Clone ID: LIB3061-118-Q6-K6-C7
gaggcggagnagatcgaggtggtgctcaacgaccgcctggggaagaagtgcgggtcaagtgcaacgaggacgacaccatcggcgacctcaagaagctggtggcggcgcagacggggacgcgccccgagaagatccgcatccagaagtggtacaacatctacaaggaccacatcaccctcaaggactacgaggtccacgacggcatgggcctcgagctctactacaactgagccgccgcccctctctccctctcgtcaggttggtctgaattctgaagtcatgggtgcaattcgcttcgcggtgatctcttaagctcatcacatatataaaagcaacctcagttggctatgtaagacatggcgtgccaaactatcagtgaccactgccagctttgcaatacgttgttgtatggtcaacctgcaaacttggtgtactgctactcgtactataaataacatagggttttaaccttggttgtgct

SEQ ID NO: 11170 - DNA, 629 bp, Zea mays
  Clone ID: LIB3061-118-Q6-K6-C8
cgaaagccaaaggtgaattgggaggcgtgcaacctctccctgggacagctgggcagttcggcggcatgcagcaggcattgcaaccacaagttaaccacatgggagttccacaaaggcagccaatgtacagcaaccagtcagggattggggtggcgccaacacagatgcaggcaggcttggggaaccagcagttgggttcgacatccatgatgggcatgcctccacagatgtatggcggcggatcgcaggcagccatgatgtacccgcaacaaatgccgcagccgcagccgcagcagccgatgtatggtggtggtggtcgtctggcagggtacatgcagcatcctgctgtggccgctgcacactactacagcaacctggggacagcgggaatgtatgggtaccccggcgcgaacgggctgtcccagagcatgtatggcctctcggtgcaggttaactcgtcgtaccagactaagacggcgccaccctctgcggcgacgaagcccgaagacaagcttttcggcgacctcctgagcattgccaagaccaagaaagcttcatgagacgagcacgagcaggagctttgtcgtttgatctcttacacttgtgtaacattcattgtatggatgtcg

SEQ ID NO: 11171 - DNA, 567 bp, Zea mays
  unsure (1)..(567): unsure at all n locations; Clone ID: LIB3061-118-Q6-K6-C9
ngaagcacaatagtgtaccaacaatggcagctaaaatattttgcctccttatgctccttggtctttctgcaagtgctgctacggcgaccattttcccacaatgctcacaagctcctatagcttcccttcttcccccgtacctctcaccaacggtgtcttcggtatgtgaaaacccaattcttcaaccctacaggatccaacaggcaatcgcagctggcatcttacctttatcacccttgttcctccaacaatcatcagccctattacagcagttacctttggtgcatttattggcacaaaacatcagggcacaacaactacaacaacttgtgctagcaaaccttgctgcctactctcagcaacagcagtttcttccattcaaccaactagctgcattgaactctgcttcttatttgcaacaacaacaactaccattcagccagctatctgctgcctacccccagcaatttcttccattcaaccaactgacagcattgaactctcctgcttatttacagcagcaacaactactaccattcagccagctagctggtgtgagccctgcta

SEQ ID NO: 11172 - DNA, 619 bp, Zea mays
  Clone ID: LIB3061-118-Q6-K6-D1
tgagcattcagaaacacaccaagcgaagcgcactagcaacgacctaacaacaatggctaccaagatattagccctccttgcgcttcttgccctttttgtgagcgcaacaaatgcgttcattattccacaatgctcacttgctcctagtgccattattccacagttcctcccaccagttacttcaatgggcttcgaacacctagctgtgcaagccaacatgcaacaacaagcgcttgcggcgagcgtcttacaacaaccaattgcccaattgcaacaacaatccttgccacatctaacaatacaagccatcacaacgcaacagcaacaacagttcctaccagcactgagccacctagccatggtgaaccctgccgcctacttgcaagagcagctgcttgcatccaacccacttgctctggcgaacgtagttgcaaaccagcaacaacaacagctacaacagtttctgccaacgctcagtcaactagccatggtgaaccctgccgcctacgtacaacaacaacaactgctttcatctagcccgctcgctgtgggcaatgcacctacatacctgcaacaacaattgttgcaacagattgtaccagctctgactcaactagct

SEQ ID NO: 11173 - DNA, 330 bp, Zea mays
  Clone ID: LIB3061-118-Q6-K6-D10
actactactgcgaatctgcgattaaagatcagaggcgacatctaatgtaccgtagtctgtttaccctgaaaagctccgctatctgcttgggttggaattcatgccagattgtgggtgcaaacctgtttccttactacctagtgtccaagtcggaatattaataagctatgccaggattcagatcgaaatatttctgtctctgagagatgtgttgcgtgacaacttttcgaagactgttgcctgaacaatatctgtgtgtttatccctagactctaatgtacaaacagagtcttatacagtactatgcattaacgtcaagtttcagagttc

SEQ ID NO: 11174 - DNA, 572 bp, Zea mays
  Clone ID: LIB3061-118-Q6-K6-D11
gctggggagaaggaaaccgcgacaggtgcagcagttcatgaccattaccggcgccagtgagaaggttgcccttcaggcactgaaagctagtgattggcacttggaaggagcttttgacttcttctatagccaacctcaggtttctgtggtcaatactcggcatcttgaagatattttcaacagatataaagaacctgatgctgatatgataatggtggaaggaatatctcaattttgcaatgatctgcaggttgatcctcaggatattgtcatgcttgtcatatcatggcacatgaaagccgccacaatgtgtgaatttactcgtcaggaattcattggtggactgcagtcaattggggtagattcaatcgagaagtttcgtggaaaattaccatcattacgagctgagctaaaagatgacaataaattccgtgatatatacaactttgcattcacttgggcaagggaaaagggtcaaaagtctctctcactggagacttctattggaatgtggcagttgctatttgctgaaaggaactggcctcttctggatcattggtgtcagtttttac

SEQ ID NO: 11175 - DNA, 648 bp, Zea mays
  unsure (1)..(648): unsure at all n locations; Clone ID: LIB3061-118-Q6-K6-D12
gnaacacaccaagcgaagcgcactagcaacgacctaacaacaatggctaccaagatattagccctccttgcgcttcttgccctttttgtgagcgcaacaaatgcgttcattattccacaatgctcacttgctcctagtgccattattccacagttcctcccaccagttacttcaatgggcttcgaacacctagctgtgcaagccaacatgcaacaacaagcgcttgcggcgagcgtcttacaacaaccaattgcccaattgcaacaacaatccttgccacatctaacaatacaagccatcacaacgcaacagcaacaacagttcctaccagcactgagccacctagccatggtgaaccctgccgcctacttgcaagagcagctgcttgcatccaacccacttgctctggcgaacgtagttgcaaaccagcaacaacaacagctacaacagtttctgccaacgctcagtcaactagccatggtgaaccctgccgcctacgtacaacaacaacaactgctttcatctagcccgctcgctgtgggcaatgcacctacatacctgcaacaacaattgttgcaacagattgtaccagctctgactcaactagctgtggcaaaccctgttgcctacttgcaacagctgcttcca

SEQ ID NO: 11176 - DNA, 388 bp, Zea mays
  unsure (1)..(388): unsure at all n locations; Clone ID: LIB3061-118-Q6-K6-D3
tttctgccaaccggcagtgcgtctagtaggatcggcggtcggcatcagcatgtaagatggtcatcgttctcgtcgtgtgcctggctctgtcagttgccagcgcctctgtcttgcagatgccctgcccctgcgcggggctgccgggcttgtncggcgctggcgccggcctgacttcgatgatgggcgccggcgggctttaccccttcccggagtacctggggcagccgcagtgccgcccgctggcggcggcgcccttcttccccgggtgtgggcagcctggcgccttgttccacccgttccggtcactttgctgcctgccgccgttgaggatgatggccttgcattccggttcgcagcatctgctgttgatgttgctgtttgagcgtgc

SEQ ID NO: 11177 - DNA, 600 bp, Zea mays
  Clone ID: LIB3061-118-Q6-K6-D4
attgaaaccaacagcacatagaagtggaatccagtagcaacaacagagcaacaatggcgaccaagatattttccctccttatgctccttgctctttctgcatgtgttgctaacgcgacaattttccctcaatgctcacaagctcctatagcttcccttcttcccccataccttccatcaatgatagcttcagtatgtgaaaacccagctcttcagccctataggctccaacaagcaatcgcagcaagcaacatacctttatcacccttgttgtttcaacaatcgccagccctatctttggtgcagtcattggtacaaaccatcagggcacagcagctgcagcaactcgtgctacctgtgatcaaccaagtagctctggcaaacctttctccctactctcagcaacaacaatttcttccattcaaccaactgtctacactgaaccctgctgcttatttgcagcaacaactattaccattcagccagctagctactgcctactctcagcacaacaacttcttccatttaaccaattggccgcactgaaccccgctgcttatttgcagcagcaaatactactaccatttagccagctagctgc

SEQ ID NO: 11178 - DNA, 293 bp, Zea mays
  Clone ID: LIB3061-118-Q6-K6-D6
gcaacaactactaccattcagccagctagctggtgtgagccctgctaccttcttgatacaaccacagttgttgccgttctaccagcacgctgcgcctaacgctggcaccctcttacaactgcaacaattgctgccattcaaccaacttgctttgacaaacccagcagcgttctaccaacaacccatcattggtggtgccctcttttagatttcttatgagttatagttcaataataaagttttttgtctgatgtttgtggcttcccagaaataagaaagtacatttctagatt

SEQ ID NO: 11179 - DNA, 613 bp, Zea mays
  Clone ID: LIB3061-118-Q6-K6-D7
aaaaaatactcggaaaaaagagagccgaaaatcgaaggggaggggaaagcaaagctgatggcggaggaccaggggtaaagcaaagcaaatggcggaggccccgagcaagatcgaatccatgaggaagtgggtcgtcgagcacaagctccgagccgtaggttgcctctggctaggtgggatcagcagttcgatcgcctacaactggtcgcggcccaatatgaagcctagcgtcaagatcatccacgcaaggttgcatgctcaagctctaaccctggctgcattagttggttctgcatgcgtggagtactatgatcagaagtatggttcttctgggccaaaggtggacaaatacacaagccaatacctggcccattcgcataaagattaaaggtcgccatgttggttcctgcatgccggattaattttgggctcatctcgggttgctcatgacccgcccatggatgctggatgtttattctttttttgtcttcataattacaaaatggtggtgtacttgccaggcaaatgttaatgagggtataatgcagatattgtcgtcgtaatttggcctcatgttgcattatctaacctcactttgttgactgtcagtgac

SEQ ID NO: 11180 - DNA, 577 bp, Zea mays
  unsure (1)..(577): unsure at all n locations; Clone ID: LIB3061-118-Q6-K6-D8
tcggcgtgcgtccgtcccctggccgtctgngaaggtgggtggggagtctaccggacgcgggtagccggggcggtcgccccaccttgccgatacgaggtgtccgctcctatttcattcggtccattccgcctctcggaagagttgagagaggagtaaggaaggcgaggacctcgcgccccgcgatgggcggcgacctgtacgccctcgacttcgacggcgtcttgtgcgacagctgcggggagagctccctctcagccatcaaggctgcgaaggtgaggtggccgtcgctgtttgagcaggttgacgccgccatggaggagtggatagtggagcagatgtacacccttcgtccagtggtggaaacaggatatgaaaacttattgcttgtaaggttgcttgttgagatccagatacactctgttcgaaaatcatcagttgcagatgggcttagcatccaagaaatattggagaactggtcaaaactgaagcccactctcatggatgagtggcaagaagatagggaatctcttgtagatctctttggccgtgtaagagatgactggattgaaaatgattt

SEQ ID NO: 11181 - DNA, 665 bp, Zea mays
  unsure (1)..(665): unsure at all n locations; Clone ID: LIB3061-118-Q6-K6-D9
nattgaaaccaacaagcaacatagaaagtggaatccagtagcaacaacagagcaacaatggcgaccaagatattttccctccttatgctccttgctctttctgcatgtgttgctaacgcgacaattttccctcaatgctcacaagctcctatagcttcccttcttcccccataccttccatcaatgatagcttcagtatgtgaaaacccagctcttcagccctataggctccaacaagcaatcgcagcaagcaacatacctttatcacccttgttgtttcaacaatcgccagccctatctttggtgcagtcattggtacaaaccatcagggcacagcagctgcagcaactcgtgctacctgtgatcaaccaagtagctctggcaaacctttctccctactctcagcaacaacaatttcttccattcaaccaactgtctacactgaaccctgctgcttatttgcagcaacaactattaccattcagccagctagctactgcctactctcagcaacaacaacttcttccatttaaccaattggccgcactgaaccccgctgcttatttgcagcagcaaatactactaccatttagccagctagctgcagcaaaccgtgcttncttcttgacacagcacagttgctgcctttctaccagcagtttgcg

SEQ ID NO: 11182 - DNA, 611 bp, Zea mays
  Clone ID: LIB3061-118-Q6-K6-E1
cttgctcctatgccattttccaagttcctccctccagttacttcaatgggcttcgaacacccagctgtgcaagcctacaggctacaacaagcgcttgcggcgagcgtcttacaacaaccaattgcccaattacaacaacaatccttggcacatctaaccatacaaaccatcgcaacgcaacagcaacaacaatttctaccagcactgagccaactagctgtggtgaaccctgtcgcctacttgcaacagcagttgcttgcatccaacccacttgctctggcaaacatagttgcataccaacaacaacaacaattgcaacagtttctaccagcgctcagtcaactagccatggtgaaccctgccgcctacctacaacagcaacaactgatttcatctagccctctcgctgtggttaatgcacctacatacctgcaacaacagttgctgcaacagattgtaccagctctgactcagctagctgtggcaaaccctgctgcctacttgcaacagctgcttccattcaaccaactgactgtgtcgaactctgctgcgtacctacaacagcgacaacagttacttaatccattagcggtggctaacccattggtcgc

SEQ ID NO: 11183 - DNA, 644 bp, Zea mays
  Clone ID: LIB3061-118-Q6-K6-E12
gtccattattccacaatggtcgctatttgtttagttccattattccacagttcctcccaccagttacttcaatggccttcgaacacccagctgtgcaagcctataggctacaacaagcgattgcggcgagcgtcttacaacaaccaattgcccaattgcaacaacaatccttggcacatctaacaatacaaaccatcgcaacgcaacagcaacaacagttcctaccagcactgagccacctagccatggtgaaccctgtcgcctacttgcaacagcagctgcttgcatccaacccacttgctctagcaaacgtagttgcaaaccagcaacaacaacaactgcaacagtttctgccagcgcttagtcaactagccatggtgaaccctgccgcctacctacaacagcaacaactgctttcatctagcccgctcgctgtggccaatgcacctacatacctgcaacaagaattgttgcaacagattgtaccagctctaactcagctagctgtggcaaaccctgttgcctacttgcaacagctgcttccattcaaccaactaactatgtcgaactctgttgcgtacctacaacagcgacaacagttacttaatccattggcagtggctaacccatttggtcgctgcctt

SEQ ID NO: 11184 - DNA, 487 bp, Zea mays
  unsure (1)..(487): unsure at all n locations; Clone ID: LIB3061-118-Q6-K6-E3
aacctttctccctactctcagcaacaacaatttcttccattcaaccaactgtctacactgaaccctgctgcttatttgcagcaacaactattaccatttagccagctagctactgcctactctcagcaacaacaacttcttccatttaaccaattggccgcactgaaccccgctgcttatttgcagcagcaaatactactgccatttagcgagctagctgcagcaagtcgtgcttccttcttgacacaacaacagttgttgccgttctacctgcacgctatgcctaacgctggcaccctcttacaactgcaacaattgctgccattcaaccaacttgctttgacaaacccaacagtgttctaccaacaacccatcattggtggtgccctcttttagattgcttatgagttatagttcaataatgaagttttttggatgatgtttgtggcgtcccagaaataagaaagtacatttctagattctnana

SEQ ID NO: 11185 - DNA, 252 bp, Zea mays
  unsure (1)..(252): unsure at all n locations; Clone ID: LIB3061-118-Q6-K6-E5
tagcaacatagnaaagcacaatagtgtaccaacaatggcagccaaaaattttgcctccttatgctccttggtctttctgcaagtgctgctacggcgaccattttcccgcaatgctcgcaagctcctatagcttcccttcttcccccgtacctctcaccagcggtgtcttcggtatgtgaaaacccaattcttcaaccctacaggatccaacaggcaatcacagctggcatcttaccttttatcaccccttgg

SEQ ID NO: 11186 - DNA, 387 bp, Zea mays
  unsure (1)..(387): unsure at all n locations; Clone ID: LIB3061-118-Q6-K6-E6
tctagctatcagcttccagtgagnacggcaagcgacaccacaaccagacaacacaccaccaccgagctgtgagaagaagttcgcagacaggatgggcaagctgtggacgatcctcactcacctccactccctagcagggccaacggtgatgctgctgtaccctctgtacgcgtccgtgcgggcgatggagagcccgtccaagctggacgacgagcagtggctcgcctactggatcctctactccttcgtcacgctcatggagatgctcctcgagtccctcatatactnggatccccatctggtacgagctcaagctgctgttcatcgcgtggctcgtgctccccaacttcaggggcgccgccttcatctacgacaagttcgtgcgcg

SEQ ID NO: 11187 - DNA, 420 bp, Zea mays
  Clone ID: LIB3061-118-Q6-K6-E7
gtctgaaaaactttattattgaactataactcataagaaactaaaagaggcaccaccaatgatgggttgttggtagaacgctgctgggtttgtcaaagcaagttggttgaatggcagcaattgttgcagttgtaagagggtgccagcgttaggcgcaccgtgctggtagaacggcaacaactgtggttgtatcaagaaggttgcacggctcacaccatatcgctggctgcctggcagcagcctcctgttgctctctattaccgggctgagtggtctactggcacctgccttgttgcggcatatttatcgcggctggtggggcgtttcctcccggatcgcccgtttcacttgtcaaccccctagcccccgctacgtccggtttcttcctttcctttttcgccatgtgtgccgtttttcccc

SEQ ID NO: 11188 - DNA, 415 bp, Zea mays
  Clone ID: LIB3061-118-Q6-K6-E8
gttaccggccctgactcagcagcgctgtgggacgccaagacatgatgtgcgccgctgaccctggtcacgggcgttacctaaccgtctcagccatgttccgtgggaagatgagcaccaaagaggtcgacgagcatatgatcaacgtgcagaacaagaactggtactactttgtgtgatggatccccaacaaccagaagtccagcgtgtgtgacatcccgccgaggggcctgaccatggcgtccaccttcgtggggaacttaacttctatccgagagcatagcacggagggtgagcgagcatttctactgccatgttaaagaagaaggctttcttgtactggcacacgggcgaagtcatcgacgatattgatttcaccgaggccctaagcactatgaatgacctagtgtctgactac

SEQ ID NO: 11189 - DNA, 336 bp, Zea mays
  unsure (1)..(336): unsure at all n locations; Clone ID: LIB3061-118-Q6-K6-E9
cgcaaagcggccaggtcgcggggctgttggcggcgcagatagcgcagcaactgacggcgatgtgcggcctgcagcagccgactccatgcccctacgctgctgccggcggtgtcccccactgaagaactatgtgctgtagtatagccgctggctagctagctagttgagtcatttagcggcgatgattgagtaataatgtgtcacgcatcaccatgggtggcagtgtcagtgtgagcaatgacctgaatgaacaattgaaatgaaaagaaaaaagtattgttccaaaaaaaaaaaaaaaaaaaaaaaaaaaaaaaaaaaaaaaaaaaaaaannnnng

SEQ ID NO: 11190 - DNA, 467 bp, Zea mays
  unsure (1)..(467): unsure at all n locations; Clone ID: LIB3061-118-Q6-K6-F10
gtgtggttctgtggttttttgggcttcgggcgcctagctgtgcngtctncgggctgcaactggcgcttgcggcgtgcgtcttctncgtctcgttnaccaattgcgacctctttccttggctcctctccccgtgctgaccctcgcttcgcttctgcttcttctgttcctaccttctctgtgccgactcgatgtggtgnnccctgtcgcctgcttgcctctgcgggtgcttgcttcccacccacttgctctggctgccgttgctgcgttccgtcttcggcgtcttttgcgtcagtttctgccggcgctcagtcttcttgcgctggtgttccctgccgtcttcctgctgctgcttcagctgctttcttctagccctctcgttgtgggttttgccccttctttcctgcggcatcgtttgctggctctgtttgtcccagctcttgactcagctagctgtggtctcccctgct

SEQ ID NO: 11191 - DNA, 415 bp, Zea mays
  unsure (1)..(415): unsure at all n locations; Clone ID: LIB3061-118-Q6-K6-F11
gggnaattgaggctgatgacatggnaagctctgtacaagaaggtccatgctgccatccgtgctgatccttctgtggtcaagtcaaccaagcagccaccaaaggagcacaagaggtacaaccccaagaaactgacgtacgagcagaggaaggccagtctcattgaaaggctcaaccaactcaactcctcgggcggcgcagatgacgacgatgaggatgacgagtaaagtttggtcccatcgaagtagtgctatcttatgcggcgatcagtatttgtgctatggcatttatcgctacctgtagtcgtgcaacatgcatttttgtttaagtttgtcgatgcgaacaaagttgtttctgttagtttggagctggagttctgaatatttacttttataatattaaaattggaccgagtcg

SEQ ID NO: 11192 - DNA, 620 bp, Zea mays
  Clone ID: LIB3061-118-Q6-K6-F12
atccagttgtcaacaattgaagcaaccaatggcgaccaagaatattttccctccttatgctccttgctctttctacatgtgttgctaacgcgacaattttccctcaatgctcacaagctcctatagcttcccttcttcccccataccttccatcaattatagcttcaatatgtgaaaacccagctcttcaaccatataggcttcaacaagcaatcgcagcaagcaacatacctttatcgcccttgttgtttcaacaatcgccagccctatctttggtgcagtcattggtccaaaccatcagggcacaacagctgcagcaactcgtgctacctctgatcaaccaagtagctctggcaaacctttctccctactctcagcaacaacaatttcttccattcaaccaactgtctacactgaaccctgctgcttatttgcagcaacaactattaccatttagccagctagctactgcctactctcagcaacaacaacttcttccatttaaccaattggccgcactgaaccccgctgcttatttgcagcagcaaatactactaccatttagccagctagctgcagcaaaccgtgcttccttcttgacacagcaacagttgctgcct

SEQ ID NO: 11193 - DNA, 549 bp, Zea mays
  unsure (1)..(549): unsure at all n locations; Clone ID: LIB3061-118-Q6-K6-F2
gngccacctagccgtggtgaaccctgtcacctacttgcaacagcagctgcttgcatccaacccacttgctctggcgaacgtagctgcataccagcaacaacaacagctgcaacagtttatgccagtgctcagtcaactagccatggtgaaccctgccgtctacctacaactactttcatctagcccgctcgcggtgggcaatgcacctacgtacctacaacaacagttgctgcaacaaattgtaccagctctgactcagctagctgtggcaaaccctgctgcctacttacaacagttgcttccattcaaccaactggctgtgtcaaactctgctgcgtacctacaacagcgacaacagttacttaatccattggcagtggctaacccattggtcgctaccttcctgcagcagcaacaacaattgctgccatacaaccagttctctttgatgaaccctgccttgcagcaacccatcgttggaggtgccatcttttagattacatatgagatgtactcgacaatggtgccctcatacgacatgtgtttcct

SEQ ID NO: 11194 - DNA, 542 bp, Zea mays
  unsure (1)..(542): unsure at all n locations; Clone ID: LIB3061-118-Q6-K6-F3
ngatcagcaagcggcagtgcgtagagaggatcgtcgaacagaacagcatgaagatggtcatcgttctcgtcgtgtgcctggctctgtcagctgccagcgcctctgcaatgcagatgccctgcccctgcgcggggctgcagggcttgtacggcgctggcgccggcctgacgacgatgatgggcgccggcgggctgtacccctacgcggagtacctgaggcagccgcagtgcagcccgctggcggcggcgccctactacgccgggtgtgggcagccgagcgccatgttccagccgctccggcaacagtgctgccagcagcagatgaggatgatggacgtgcagtccgtcgcgcagcagctgcagatgatgatgcagcttgagcgtgccgctgccgccagcagcagcctgtacgagccagctctgatgcagcagcagcagcagctgctggcagcccagggtctcaaccccatggccatgatgatggcgcagaacatgccggccatggggtggactctaccagtaccagctgcccagctaccgcac

SEQ ID NO: 11195 - DNA, 619 bp, Zea mays
  unsure (1)..(619): unsure at all n locations; Clone ID: LIB3061-118-Q6-K6-F4
gttcccatcgtcacaaggccagtaccaaacgtgccagcgcgacgtcgacaggcacaacgtctgcgccatggaggtgaggcacagcgtcgaacggctggaccaggccgacgcctacagccctggggctgggaggatcacacgcctcaccagccacaagttccccgtcctcaacctcgtacagatgagcgcggtgcgggtagacctgtaccaggacgccatcatgtcgccgttctggaacttcaacgcccacagcgccatgtacggcatcaggggcagtgcaagggtccaggtcgccagcgacaacgggaccacggtgttcgacgacgtgctccgtgcggggcagctgctcatcgtaccccagggctacctcgtcgccaccaaggcgcagggagaaggcttccagtacatcgccttcgagacgaaccctgacaccatggtcagccacgttgccgggaagaactccgtcctgagcgacttgccggccgccgtcatcgccagctcgtatgccatctccatggaggaagctgcagagctcaagaacggtaggaagcnatgagctggctgtgcttactcctgctgggcagtggcagctaccaacaaggtcaagctggcagcgccc

SEQ ID NO: 11196 - DNA, 583 bp, Zea mays
  unsure (1)..(583): unsure at all n locations; Clone ID: LIB3061-118-Q6-K6-F5
tcttccccatcccgtttctatggccgcgcgcggtgggttgacactgcaattattgatttccgcttaatctattgccgtgccgtagaagcggaagctactggacgaggggctggagcggaagcgggaggcggaactcaatgagctttacgatgccatgaaagattgggtcagcgaactcagngaaagacaatgcggaactcaacgagaagctggtggagaagcaggatgagctcgagaaggcccgtcaggaattccttgaagatattcgtacaagggacgctgaaattctgaagctgaagcagctcttagatgagaaggctngaaaaaaacaattctgcagctactgggtttccttgcctagcgcctgaagctgtcctagaaaattcaactccattgtcacctaaaagaaagacaccattttcccacggcaagctagaatgctccagaagacatacacgcatctcagggaataggacaacagagatncggagtgctcatatgctttctttgctgcttaatctttagttcgatgaagatctcggtaaatgatggaacagaaattttntcggtttcagtatctatg

SEQ ID NO: 11197 - DNA, 582 bp, Zea mays
  unsure (1)..(582): unsure at all n locations; Clone ID: LIB3061-118-Q6-K6-F6
gccgctgccgcacacggcgagnaggatagggttgctccccccgttgccgactcgccgccgcatcgccgcgagcgtcatgaagaccttcccgctgtccaggggnaagcaccatctccctagccctcttctccgacgtctccaacagccgggagctcctggacttgatgcagtcagggaagctggagccggcggtcgctctcctcaacgcgtcactggtgccggatgtgttccctatcctcgcggcagcgcttaaggcgctgttgtccaagactagggagtcactgaccacaaggactctgcactctgagctcgtctacaactactcggggtccaaacatataacagagtccctgaagcgctgtgggatctctgataatacaacttacatccttgctgcttgttttgatgcttccgacgaggagatgaaggcagtggagaagctcatcagtggcaccgaaattgatctcacagaactggaaagaagagcaaaccagccacagatcttgaagcattacaagatacctccccaagaactatcgattnctacgttgccggacgcaattgtatgcaggattgctgctc

SEQ ID NO: 11198 - DNA, 167 bp, Zea mays
  unsure (1)..(167): unsure at all n locations; Clone ID: LIB3061-118-Q6-K6-F7
ngacaattgctggcattcaaccaacttgctttgacaaacccagcagtgttctaccaacaacccatcattggtggtgccctcttttagatttcttatgagttatagttcaataataaagttttttatctgatgtttgtggcttcccagaaataagaaagtacatttct

SEQ ID NO: 11199 - DNA, 594 bp, Zea mays
  unsure (1)..(594): unsure at all n locations; Clone ID: LIB3061-118-Q6-K6-F8
ggcgcggcgagggccatcggtggctgcccgntatacgtcagcgacaagccggggnaaccacaacttcgagctgctcaggaagctcgtgctccccgacggcaccgtgctacgcgcgcagcttcccggccggcccacacgggactgcctcttctccgacccggcgcgcgacggcgcgagtttgctcaagatttggaacctgaacaagtgcggtggcgtggtgggtgtgttcaactgccagggagccgggtggtgccgcgtgaccaagcggacgcgcgtgcacgacgcgtcgccgggcacgctgaccggcaccgtgcgtgccgacgacgtcgacgccatagcgcgcgtcgctggtgacggcggcgggtgggacggcgagaccgtggtgtatgcgcaccgcacgcgggagctagtgcgactgccccggggcgtcgcgctgcctgtgacgctaggcccgctccagtatgaggtgttccatgtgtgcccgctccgcgccgtcgtgccggggtttctcgttcgcgcccgtcgggctgctcgatatgttcaacgctgggggcgccgttgaggagtgcgacgtgatcagcaatgtcggcggca

SEQ ID NO: 11200 - DNA, 180 bp, Zea mays
  Clone ID: LIB3061-118-Q6-K6-F9
cctggcttgcgctctcttgcccttttgtgttgtgtgcctcgggatgcgttcatttgttccccagctgctgcagttcgctctcgcgttgcccatgttcttccacgggttccgtcctttccgtgttgctccgagtgggcgttcggtacaccctgcttgtgccatgtcctgtaggctgcgacc

SEQ ID NO: 11201 - DNA, 609 bp, Zea mays
  unsure (1)..(609): unsure at all n locations; Clone ID: LIB3061-118-Q6-K6-G10
nattgaaaccaactagcaacatagnaaagcacaatagtgtaccaacaatggcagccaaaaattttgcctccttatgctccttggtctttctgcaagtgctgctacggcgaccattttcccgcaatgctcgcaagctcctatagcttcccttcttcccccgtacctctcaccagcggtgtcttcggtatgtgaaaacccaattcttcaaccctacaggatccaacaggcaatcacagctggcatcttacctttatcacccttgttcctccaacaatcatcagccctattacatcagttacctttggtgcatttattggcacaaaacatcagggcacaacaactacaacaacttgtgctagcaaaccttgctgcctactctcagcaacagcagtttcttccattcaaccaactagctgcattgaactctgcttcttatttgcaacaacaacaactaccattcagccagctacctgctgcctacccccagcaatttcttccattcaaccaactggcagcattgaactctcctgcttatttacagcagcaacaactactaccattcagccagctagnctggtgtgagccctgctaccttcttgatacaaccac

SEQ ID NO: 11202 - DNA, 602 bp, Zea mays
  unsure (1)..(602): unsure at all n locations; Clone ID: LIB3061-118-Q6-K6-G11
tagnaaagcacaatagtgtaccaacaatggcagccaaaatttttgcctccttatgctccttggtctttctgcaagtgctgctacggcgaccattttcccacaatgctcacaagctcctatagcttcccttcttcccccgtacctctcaccagcggtgtcttcggtatgtgaaaacccaattcttcaaccctataggatccaacaggcaatcgcagctggcatcttacctttatcacccttgttcctccaacaatcatcagccctattacagcagttacctttggtgcatttattggcacaaaacatcagggcacaacaactacaacaacttgtgctagcaaaccttgctgcctactctcagcaacaacagtttcttccattcaaccaactagctgcattgaactctgcttcttatttgcaacaacaacaactaccattcagccagctatctgctgcctacccccagcaatttcttccattcaaccaactgacagctttgaactctcctgcttatttacagcagcaacaactactaccattcagccagctagctggtgtgagccctgctaccttcttgacacaaccacaattgttgccgttct

SEQ ID NO: 11203 - DNA, 618 bp, Zea mays
  Clone ID: LIB3061-118-Q6-K6-G12
gcctactctcagcaacaacagtttcttccattcaaccaactagctgcattgaactctgcttcttatttgcaacaacaacaacaatcatcagccctattacagcagttacctttggtgcatttattggcacaaaacatcagggcacaacaactacaacaacttgtgctagcaaaccttgctgcctactctcagcaacaacagtttcttccattcaaccaactagctgcattgaactctgcttcttatttgcaacaacaacaactaccattcagccagctatctgctgcctacccccagcaatttcttccattcaaccaactgacagctttgaactctcctgcttatttacagcagcaacaactactaccattcagccagctagctggtgtgagccctgctaccttcttgacacaaccacaattgttgccgttctaccagcacgctgcgcctaacgctggcaccctcttacaactgcaacaattgctgccattcaaccaacttgctttgacaaacccaacagcattctaccaacaacccatcattggtggtgccctcttttagatttcttatgagttatagttcaataataaagttttttgtctgatgtttgtggcttcc

SEQ ID NO: 11204 - DNA, 555 bp, Zea mays
  unsure (1)..(555): unsure at all n locations; Clone ID: LIB3061-118-Q6-K6-G2
gagnactagcagaactgttgattgccaaatgtgcacagaagaaatactatatgcaatggcatcaatgggcttggttactggggggcagtacgtgggaatcagcacctgctggtgctggctgggttggtgctcatttgaaaaacaaggggaaggagattatttttccttgatggggcaaggacggtagatctgaaagcagcatggcgtggaaatatttttcttgaaaacagtaggcacaggattaagtacaagaatactccattagaattttgagttgaagggtcttgaattttttacccaattgctggagcaaactcagggatctaacacggtttagtctaactacttagttaagagtattcaacataaagattctttggaatcacaataagctgacaaatgcatcatttctttatcaatttcaccatctcatctgcatagttccctttgttnttattctgttattcacatggtttttctagtgatgttattatcaaagcagttgacgatgcttacctgtttttccatgctaacgtggcttcgatattatcatgt

SEQ ID NO: 11205 - DNA, 481 bp, Zea mays
  unsure (1)..(481): unsure at all n locations; Clone ID: LIB3061-118-Q6-K6-G3
ngaacagcaatcacagctggcatcttacctttatcacccttgttcctccaacaatcatcagccctattacatcagttacctttggtgcatttattggcacaaaacatcagggcacaacaactacaacaacttgtgctagcaaaccttgctgcctactctcagcaacagcagtttcttccattcaaccaactagctgcattgaactctgcttcttatttgcaacaacaacaactaccattcagccagctacctgctgcctacccccagcaatttcttccattcaaccaactggcagcattgaactctcctgcttatttacagcagcaacaactactaccattcagccagctagctggtgtgagccctgctaccttcttgatacaaccacagttgttgccgttctaccagcacgctgcgcctaacgctggcaccctcttacaactgcaacaattgctgccattcaaccaacttgctttgacaa

SEQ ID NO: 11206 - DNA, 480 bp, Zea mays
  unsure (1)..(480): unsure at all n locations; Clone ID: LIB3061-118-Q6-K6-G4
gnaaacacaccaagcgaacacattagcaacaacctaacaacaatggctaccaagatattatccctccttgcgcttcttgcgctttttgcgagcgcaacaaatgcgttcattattccacaatgctcacttgctccaagttccattattacacagttcctcccaccagttacttcaatgggcttcgaacacccagctgtgcaagcctataggctacaacaagcaattgcggcgagcgtcttacaacaaccaatttcccagttgcaacaacaatccttggcacatctaacaatacaaaccatcgcaacgcaacagcaacaacaattcctaccagcactgagccacctagccatggtgaaccctgccgcctacttgcaacagcagttgcttgcatcaaacccacttgctctggcaaacgtagttgcaaaccagccacaacaacagctgcaacagtttctgccagcgctcagtcaactagccatg

SEQ ID NO: 11207 - DNA, 605 bp, Zea mays
  Clone ID: LIB3061-118-Q6-K6-G6
tccacctcctgctggtgccagggccgggagggcgtcgcggaggtggcgcgcatggggctcgccggggacgggtcggcggacaccgcccacctcagtaataatgaaaatgggcggttcatttatggagttgcgagttctcctggtaaaagagcatcgatggaggacttctatgaggcaagaatagacgacgttgatggagagaaaattggaatgttcggtgtatatgatggtcatggaggagtccgagcagctgagtatgttaagcagcaccttttcagcaatttaatcaaacatccaaagttcatcactgataccaaggctgctatcgccgaaacttacaacctcacagattcagaatttctgaaagctgatagctgtcaaactcgagatgctggctcaactgcctcaacagctattattgtaggtgaccgtttgcttgttgcaaatgttggagattctagagccgttatttctaaaggaggacaggcgattgcggtttcaagggatcacaaacctgatcagacagatgagagacaaagaattgaggacgcagggggctttgttatgtgggctgggactggcgagtgggtggtgttcttgctgtc

SEQ ID NO: 11208 - DNA, 618 bp, Zea mays
  unsure (1)..(618): unsure at all n locations; Clone ID: LIB3061-118-Q6-K6-G7
gngaccagcaagcaacatagnaagtagaatccattagcaacaatagagcaacaatggcgaccaagatattttccctccttatgctccttgctctttctacatgtgttgctaacgcgacaattttccctcaatgctcacaagctcctatagcttcccttcttcccccataccttccatcaattatagcttcagtatgtgaaaacccagctcttcaaccatataggcttcaacaagcaatcgcagcaagcaacatacctttatcgcccttgttgtttcaacaatcaccagccctatctttggtgcagtcattggtacaaaccatcagggcacaacagctgcagcaactcgtgctacctgtgatcaaccaagtagctctggcaaacctttctccctactctcagcaacaacaatttcttccattcaaccaactgtctacactgaaccctgctgcttatttgcagcaacaactattaccatttagccagctagctactgcctactctcagcaacaacaacttcttccatttaaccaattggccgcactgaaccccgctgcttatttgcagcagcaaatactactgccatttagcgagctagctgcagcaagtcgtgcttcct

SEQ ID NO: 11209 - DNA, 624 bp, Zea mays
  Clone ID: LIB3061-118-Q6-K6-G8
tagcaattagctcatcgactccagattggagaactcgacaccatgaaggtgctgatcgttgcccttgctctcctggcgctcgctgcgagcgccgcctccagtacaagcggcggctgtggctgccagacaccaccgtttcatctaccgcctccgttctatatgccgcctccgttctatctgccgccgcagcagcagccgcagccatggcaataccccactcaaccaccgcagctaagcccgtgccagcagttcggatcctgcggcgtcggcagcgtcggcagcccgttcctgggccagtgcgtcgagttcctgaggcaccagtgcagcccggcggcgacgccctacggctcgccacagtgccaggcgctgcagcagcagtgctgccaccagatcaggcaggtggagccgctgcaccggtaccaggcgacatacggtgtggtcctgcagtccttcctgcagcagcagccgcagggcgagctcgcggcgctgatggcggcccaggtagcgcagcagctgacggcgatgtgcggcctgcagctgcagcagccaggtccctgcccttgcaacgcagctgccggcggtgtctactactgaggaaactatgtactgtagtaataatgtaat

SEQ ID NO: 11210 - DNA, 593 bp, Zea mays
  unsure (1)..(593): unsure at all n locations; Clone ID: LIB3061-118-Q6-K6-H1
caactagcaacatagnaaagcacaatattgtaccaataatggcagccaaaatttttgcctcattatgctccttggtctttctgcaagtgctgctacggcgagcattttcccgcaatgctcacaagctcctatagcttcccttcttcccccatacctctcaccagcgatgtcttcagtatgtngaaaatccaattcttctaccctacaggatccaacaggcaatcgcagcaggcatcttacctttatcacccttgttcctccaacaatcatcagccctattacagcagttacctttggtgcatttattggcacaaaacatcagggcacaacaactacaacaactcgtgctagcaaaccttgctgcctactctcagcaacagcagttacctttggtgcatttgttggcacaaaacatcagggcacaacaactacaacaactcgtgctagcaaaccttgctgcctactctcagcaacaacagtttctgccattcaaccaactagctgcattgaactctgctgcttatttgcagcaacaacaactactaccattcagccagctagctgctgcctacccccggcaatttcttccattc

SEQ ID NO: 11211 - DNA, 630 bp, Zea mays
  unsure (1)..(630): unsure at all n locations; Clone ID: LIB3061-118-Q6-K6-H11
ngatacatagtgaagtacactagcaacatcttagcaccaatggcagccaagatttttgcgctccttgccctccttgctctttcagcaagtgttgctaccgcgactattattccacaatgctcacaacaatacctctctccagtgatagccgcgagatttgaatacccatctatacaatcctacaggctacaagaggccatcacagcaagcatcttacggtcgttagcattgaccgtccaacaaccatatgccctattgcaacaaccatccttagtgaatctgtatctccaaagaatcacagcacaacaactacaacaacggttgcttccaacaattaatcaagtagttgcagcgaaccttgctgcttaccttcagcaacaacaatttcttccattcaatcaactagctggggtgaaccctgctgcttacttgcaggcacaacagctactaccattcaaccaacttgtcgggagccctgctgccatcttattgcagcaacagttgctgccattccgtctacaagttgttgcaaacattgctgctttcttgcaacaacaacaattgctgccattttacccacaggttgtgggaaacattaacgccttcttgcaacaacaacaattgctgcca

SEQ ID NO: 11212 - DNA, 430 bp, Zea mays
  unsure (1)..(430): unsure at all n locations; Clone ID: LIB3061-118-Q6-K6-H12
accggtccggccctcccggcaacaagcaacatagnaaagtggnaatccagtagcaacaatagagcaacaatggcgaccaagnaattttccctccttatgctccttgctctttctacatgtgttgctaacgcgacaattttccctcaatgctcacaagctcctatagcttcccttcttcccccataccttccatcaattatagcttcaatatgtgaaaacccagctcttcaaccatataggcttcaacaagcaatcgcagcaagcaacatacctttatcgcccttgttgtttcaacaatcgccagccctatctttggtgcagtcattggtacaaaccatcagggcacaacagctgcagcaactcgtgctacctctgatcaaccaagtagctctggcaaacctttctccctactctcagcaacaacaatttc

SEQ ID NO: 11213 - DNA, 603 bp, Zea mays
  Clone ID: LIB3061-118-Q6-K6-H2
caattagctcatcgactccagattggagaactcgacaccatgaaggtgctgatcgttgcccttgctctcctggcgctcgctgcgagcgccgcctccagtacaagcggcggctgtggctgccagacaccaccgtttcatctaccgcctccgttctatatgccgcctccgttctatctgccgccgcagcagcagccgcagccatggcaataccccactcaaccaccgcagctaagcccgtgccagcagttcggatcctgcggcgtcggcagcgtcggcagcccgttcctgggccagtgcgtcgagttcctgaggcaccagtgcagcccggcggcgacgccctacggctcgccacagtgccaggcgctgcagcagcagtgctgccaccagatcaggcaggtggagccgctgcaccggtaccaggcgacatacggtgtggtcctgcagtccttcctgcagcagcagccgcagggcgagctcgcggcgctgatggcggcccaggtagcgcagcagctgacggcgatgtgcggtctgcagctgcagcagccaggtccctgcccttgcaacgcagctgccgggcggtgtctacttactgagaaactatgt

SEQ ID NO: 11214 - DNA, 332 bp, Zea mays
  unsure (1)..(332): unsure at all n locations; Clone ID: LIB3061-118-Q6-K6-H3
cgcccggcctcctccccttccttctaggctccgcgtctcgctgtccccactccgtctcatcccgctgccgctccttctcatcgtcgtcgtcccagtcccggagtcgctccgctcctctggctaagcgcaggtttgagggatgccgaggggttgtacctcgccagcgattcggacaagcggctattgatctacttcccctttatgcaggtcaagctacattccgtgctattcaaaggccccaaggatgacgcaatggcaatgactatctaccaatggacatcgtggagctatcttccgatcatttgatagagaataaacctttgcnntgctaa

SEQ ID NO: 11215 - DNA, 426 bp, Zea mays
  Clone ID: LIB3061-118-Q6-K6-H4
gctgcattgaactctgctgcttatttgcaacaacaattaccattcagccagctagttgctgcctacccccagcaatttcttccattcaaccaactagcagcattgaactctgctgcttatttacagcagcaacaactactaccattcagccagctagctgatgtgagccctgctgccttcttgacacaacaacagttgttgccgttctacctgcacgctatgcctaacgctggcaccctcttacaactgcaacaattgctgccattcaaccaacttgctttgacaaactcaacagtgttctaccaacaacccatcattggtggtgccctcttttagattgcttatgagttatagttcaataatgaagttttttggatgatgtttgtggcgtcccagaaataagaaagtacatttctagattcttaa

SEQ ID NO: 11216 - DNA, 575 bp, Zea mays
  unsure (1)..(575): unsure at all n locations; Clone ID: LIB3061-118-Q6-K6-H5
ctgatcttgaaatgagttcaanaaattggccggcttttcctgcggtgttgctatcagagccgaaggagactggtggctattatgctttcgtggaattcgaggaactcagcggtgtacacaatgcgttaaaggcttcaccaattgaaataaatgggcggcagatatatgttgaggagaggaagccaaatagcggaataagagggaggggaggacgtggccgtttcagtggtggaggccggggatattcgagaggtggaggcgacgagtacaatagtaaccgtgggaggtcaaacggttacggtcgtgctcctcaccaagagaggggcatacttgggagccacactccaaggaactgattcagtcgagcagcaaacataaggttttgatccgtgtcgtcaaagcgagagagagagatcctaaacaatccgcctatcagctactaggccgcgtttgggttttggggcttgttttgtcgatgaatgtgtgtgcgcgcgtcatcgacctatgtgacacttaaaacttttgctagtctgacgctatctctntacattaaaaaaaaaaaaaaaggcggccgc

SEQ ID NO: 11217 - DNA, 510 bp, Zea mays
  Clone ID: LIB3061-118-Q6-K6-H6
tttaaaaaaaaaaaaaaaaaaaaaaaaaaaaaaaaaaaaaaaaaaaaaaaaaaaaaaaaaaaaaaaaaaaaaaaaaaaaaaaaaaaaaaaaattttaggatataaagatttaaaaaattcgggggggactttttttggggtttttaaattttattttctgtttttttgggaaccattaattttgtttttttgggggcggggtgatttttttttggttgggcggggtgttttcccccgtttttgccctgggggaaaccccgttgttttcccttcctttttttggctttggtgggcttttccgtttttccccgtgggggttttggattattggcccctcccgtttggctttttggaaattggcccgcccctttttttttagtgggacccccctttggggtggtttttttggcccgggtgctgttggtttttccttaggcggtgctttttttttttttgcctttttgcccccctttttcgggttttttccttttttttcctggcattttgggg

SEQ ID NO: 11218 - DNA, 625 bp, Zea mays
  Clone ID: LIB3061-118-Q6-K6-H7
caatcatcattcatcttagtagtataggcaccaaatcaaatctgcaacatcaattatctaactccaaaaaccatgaagctggtgcttgtggttcttgctttcattgctttagtatcaagtgtttcttgtacacagacaggcggctgcagctgtggtcaacaacaaagccatgagcagcaacatcatccacaacaacatcatccacaaaaacaacaacatcaaccaccaccacaacatcaccagcagcagcaacaccaacaacaacaagttcacatgcaaccacaaaaacatcagcaacaacaagaagttcatgttcaacaacaacaacaacaaccgcagcaccaacaacaacaacaacaacaacagcaccaacaacaacatcaatgtgaaggccaacaacaacatcaccaacaatcacaaggccatgtgcaacaacacgaacagagccatgagcaacaccaaggacagagccatgagcaacaacatcaacaacaattccagggtcatgacaagcagcaacaaccacaacagcctcagcaatatcagcagggccaggaaaaatcacaacagcaacaatgtcattgccaggagcagcaacagactacaaggtgcagctataactact

SEQ ID NO: 11219 - DNA, 368 bp, Zea mays
  unsure (1)..(368): unsure at all n locations; Clone ID: LIB3061-118-Q6-K6-H8
tgcgtgggggggatcgtcgtacagttcagggtgttgatggtcatggttctcgtcgtgtgcctggctctgtcagctgccagcgcctctgctntgcagatgccctgcccctgcgcggggctgcagggcttgtacggcgctggcgcctgtctggcgacggtgatgggcgcctgggggctgtgccccttcgcggtgttcctgaggtagtgcgagtgcattccgttggcggnggtgccctactacgccgggtgtgggctgacgagcgccatgttccagccggtccggcaacggtgctgccggctgctggtgagggtgatggacgtgcatttcgttgcgcagcatctgttgatgatgatgctggttgagcgtgc

SEQ ID NO: 11220 - DNA, 613 bp, Zea mays
  Clone ID: LIB3061-118-Q6-K6-H9
gacctaacacatggcttccaaaacttatccctccttgcgcttcttgccctttttgtgagtgcaacaaatgcgttcattattccacaatgctcacttgctccgagtgccattattccacagttcctccctccagttacttcaatgggcttcgaacacccagctgtgcaagcctataggctacaacaagcgcttgcggcgagcgtcttagaacaaccaattgcccaattacaacaacaatccttggcacatctaaccatacaaaccatcgcaacgcagcagcaacaagcactgagccacctagccgtggtgaaccctatcgcctacttgcaacaacagctgcttgcatccaacccacttgctttggcaaacgtagctgcataccaacaacaacaacagttgcaacagtttctaccagcgctcagtcaactagccatggtgaaccctatcgcctacctacaacagcaacaacttctttcatctagcccgctcgctatgggcaatgcacctacatacctgcaacaacagttgttgcaacaacagttgctgcaacaaattgtaccagctcttactcagctagctgtggcaaaccctgctgcctacttgcaacaactac

SEQ ID NO: 11221 - DNA, 320 bp, Zea mays
  Clone ID: LIB3061-120-Q6-N6-A1
gcaaagggcacaacactttgcctggctaaaataaaatggggaaggttcaaccttgttgtggttgctaagggccggccggtttgtttgggatttacaatttattaactacccacccaccagaaaacctatttaaattcatacccttagttttaccatcttttttatttttacccttaggcgtatttttttattagttttaccattttggtgtataggactggaaagggaaaattgagccaaaaaaatacgactaaggtttaaaatgggaacaacaggaaaaccaagggcaccaccttaaaaaaaaactaaattgggaacat

SEQ ID NO: 11222 - DNA, 549 bp, Zea mays
  Clone ID: LIB3061-120-Q6-N6-A10
acggctaaacatttaaatgatgaagacttgaggtatcacaagatgcacaaaaaatcccaaaccagcacaaactttaaccagttcatagcaaggtataccagatcaacatcgacactagtaaaagggcaaactcttccataggcaaattcaagggctaaacagttctgtctccaggcaagcacactcacttgaagcatttcgcgtcaagcaaggcctcgccctcaaagggctcctggtcctcaatcatcgcattgacacgctccttctgggcctcatcagagatgtccaccttggtccactcgtagagctccatgtcatagacctcgtccattacaaacttgggaacatcctggccacggaagagccaaaggcccttcagcttgaagggtggctcagagcctatcacgagcatcttcccaaaggcgtacttgcggcacaggtccatccgctgcaggaatccaccaaccttgttcagggtcacaaaggagacggtgttctcatcattgtacttgtagtcacagaaccacaaagagtagccctctgggtcgt

SEQ ID NO: 11223 - DNA, 520 bp, Zea mays
  Clone ID: LIB3061-120-Q6-N6-A12
agaacaaaatggcatattacaggggtatgggaagcagatctgttagatgagttaggacttcaccgttacaagatagcacctttgcaacaccactcactatcaaataaaaaccgcgacagcttaaattagtttcagaacacaactgggaaagaaagggaaaaaaacaagcactccatcgctgttggatggaccgtcctctgctcagcaccgctcaagacggcagttcagctagtctgttcgcttcacggcgcagcgtgccaaggcttgcagataacctggcagcgtagagaggcatctcccaagagagcacagaaggtttagtagctgtgctgccagagatggtgcgatggctgggatggtacgccctgggaattgttcaagcttccctcggtgaggttctgggggtgctcctgtggcagactggcctgcgactgcgactggtagaagcttgggtacccaagaccaccgtattgagagggctgatgtgcctggcggaagccaccctgctggctctggccct

SEQ ID NO: 11224 - DNA, 452 bp, Zea mays
  unsure (1)..(452): unsure at all n locations; Clone ID: LIB3061-120-Q6-N6-A2
aattgagataaatctcaattcaaatattgattatttctaggaaacacatgccggaatgagggcaccattatcgagtacatctcatatgtaatctaaaagaggcacctccaacgatgggttgctgcctcgacaagacagggtttatcaaagagaactggttgtatggcagcaattgttgctgctgtaggaaggcagcgaccaatgggttagccactgctagtggattaagtaactgttgtcgctgttgtaggtacgcagcagagttcgacatagtcagttggttgaatggaagcagttgttgcaagtaggcagcagggtttgccacaactagctgagttagagctggtacaatctgttgcaacaattgttgttgnaagtatgtaggtgcattggacacagcgagcgggctaaatgaaaggaattgttgttgttgtaggtaggcggcagggttt

SEQ ID NO: 11225 - DNA, 192 bp, Zea mays
  Clone ID: LIB3061-120-Q6-N6-A3
ggggggggaaaaacaatccgtttttgaaagagggggttgttttgagaaaaaaaaagcccgcagagaaaagaagggggagcctttttgacaataaaggttttggggggcccgggccccccccttgaagaaaagatacgagggggggggaaataaaagtctaataaaaaaaaaaaggggagagaaaaccccccc

SEQ ID NO: 11226 - DNA, 465 bp, Zea mays
  Clone ID: LIB3061-120-Q6-N6-A4
aagaatctagaaatgtactttcttatttctgggaagccacaaacatcagataaaaaactttattattgaactataactcataagaaatctaaaagagggcaccaccaatgatgggttgttggtagaacactgctgggtttgtcaaagcaagttggttgaatggcagcaattgttgcagttgtaagagggtgccagcgttaggcgcaacgtgctggtagaacggcaacaactgtggttgtgtcaagaaggtagcagggctcacaccagctagctggctgaatggtagtagttgttgctgctgtaaataagcaggagagttcaatgctgctagttggttgaatggaagaaattgctgggggtaggcagcaggtagctggctcaatggaagttgttgttgttgcaaataaaaagcaaagttcaatgaacctagttggttgaatggaagaaacctgtgttgctgaaagt

SEQ ID NO: 11227 - DNA, 469 bp, Zea mays
  Clone ID: LIB3061-120-Q6-N6-A5
ccgttctaaaaaactagtattcatttcatttttatgtctatattcaaatagcagacgatgaatctagacacatttacaaaaacacatacattaataatatgtgttgtttgtttgtcttctaacttatttaataatctagaggagggtaaacaaacaagggcgaaatgtctatcttcatcaaataattgaccggatgaaaatggtccctgtttaagcataaataacagagaaatctttggggcactaggcagcaacaggaagcaagccgttttgtctaagaagtggttcaggcgaaggctcccgtcctcggaatgaaacgaacaccttaagcggagactttccacctccaagcgcaagaacagtgtctctgaatcgtctgccagtttcctcgattgccttctcattaatcaaaccagcgttttcaaaagctgaaaatgcatcaattgacagtacttcagcccacttgtaa

SEQ ID NO: 11228 - DNA, 211 bp, Zea mays
  Clone ID: LIB3061-120-Q6-N6-A6
aaataaaaaaagggcctctttatttttggggaagccccaaacatgggacaaaaaactttttttttggactttaaccccttagaaatttaaaaggaggggcccccccaagttggggtgttgggtgaaccctcttggggttgtcaaaacaaggtggttgaatgggaacaattgttgccattgtaaaaaggggcccgcgtttggcgcagggtgc

SEQ ID NO: 11229 - DNA, 440 bp, Zea mays
  Clone ID: LIB3061-120-Q6-N6-A7
ctagaaatgtactttcttatttctgggaagccacaaatatcagcaaaaaaactttattattgaactataactcataagcaatctaaaagagggcaccaccaatgatgggttgttggtagaacactgctgggtttgtcaaagcaagttggtcgaatggcagcaattgttgcagttgtaagagggtgccaacgttaggcgcagtgtgcaggtagaacggcaacaaatgttgctgtgtcaagaaggcagcagggctcacagcagctagctggctgaatggtagtagttgttgttgttgtacataagcatgagagttcaatgctgccagttggttgaatggaagaaaattgccggggtaggcagcagctagctggctgaatggtagtagttgttgttgctgcaaataagcagcagaattcaatgcagctagttggttgaatggc

SEQ ID NO: 11230 - DNA, 571 bp, Zea mays
  Clone ID: LIB3061-120-Q6-N6-A9
aagaatctagaaatgtactttcttatttctgggaagccacaaacatcatccaaaaaacttcattattgaagtataactcataagcaatctaaaagagggcaccaccaatgatgggttgttggtagaacgctgttgggtttgtcaaagcaagttggttgaatggcagcaattgttgcagttgtaagagggtgccagcgttaggcgcagcgtgcaggtagaacggcaacaactgttgttgtgtcaagaaggcaacagggctcacatcagctagctggctgaatggtggtagctgttgctgttgtaaataagcagcagagttcaatgctgccagttggttgaatggaagaaattgctgggggtaggcagcagctagctgactgaatggtagttgttgttgcaaataagcagcagagttcaatgcagccagttggttgaatggaagaaactgctgttgctgagagtaggcagcaaggtttcctaacacaagttgttgtagttgttgtgccttgatgttttgtgccaacaaatgcaccaaaggtaactgctgtaatagggctgacggttgttggag

SEQ ID NO: 11231 - DNA, 487 bp, Zea mays
  Clone ID: LIB3061-120-Q6-N6-B10
gggaaattgtcaacttttgataattgtgaacttgttattcccagacatactaccaaagtaggagtgctcatcatatcacatattcacatccatgcttacacacagcacgcacatcattatttgttctaccacgaagctagcgacgacatggcgtgctctgaatctgaagacgacatggcaatggtatggatcctagcagtaggccagtactagcagtacgtagttaggcgaggacgaggctcttcttgaaatgcgcgatctgaatgttctccacgttgagcttcttgaagttgctgttcttcctggtgctgaagaagtcgccccagttgtaggcgtcgtacctgggcagatcgtcctcgctcaccagctcctccaccggctccaccatggtgtaggtcgccgggttgaagaagtagggcatggagaacctctctctcgccgagttcactgacacccggtgctccgcgctctcgtacctgtcgttgct

SEQ ID NO: 11232 - DNA, 505 bp, Zea mays
  Clone ID: LIB3061-120-Q6-N6-B2
gaaacaaaacatcagctatcgctgtggacatgccgaagtatagatgacaatgaaaatccaggcatccagtaaaggggcaaagaaatatatatatcacgttattatttggctacacctccgtgttcattattcaccaaggataaaaattaaatccacttagcccaggagcatccatccaatcttaacccgcatccctccaaccttaacccaataaataacctctgcttaacaccgccaaaaccaacatggctggaagtgtcaccttccttcagctacaaattgtttcattaatacatggtaacaagaataaactagacaagggcatagggtttcaattctcttagaatagcataataaacagtacggtaattgcagaatggtagtgcacttaatctgcccgggattgaccagcacgggatgaaaggataattccaacaatgagaccgtacagagcaagcgcttctgcgaaaatgaggatgaggatcatgcccacaaaaagcttcgg

SEQ ID NO: 11233 - DNA, 526 bp, Zea mays
  Clone ID: LIB3061-120-Q6-N6-B3
aaaatctggaaatgtaacttcttatttctggttggccacatacatcatccaaaaaactttattattgaattacaactaataagcaatctaaaagagggcaccaccaatgatgtgttgttggtaggaggccgctcggtctgtcaaagcaagttggacaaagggcaacaattgttgtagttgtaagagggttgcggggttagccgcaaactgctggtagaaaggcagcaactgttgctgtgtcaagaaggaagcacggtttgctgcagctagctggctaaatggtagtagtatttgctgctgcaaataagcagcggggttcagtgcggccaattggttaaatggaaaaagttgttgttgctgagagtaggcagtagctagctggctgaatggtaatagttgttgctgcaaataagcagcagggttcagtgtaaacagttggttgaatggaagaaattgttgttcctgagagtagggagaaaggtttgccagagcactttggtgatcacaggtagcacaaattgctgca

SEQ ID NO: 11234 - DNA, 482 bp, Zea mays
  Clone ID: LIB3061-120-Q6-N6-B8
atcgagataaatctcaatcaatatattgattatttctaggaaacacatgtcggtatgagggcaccattgtcgagtacatctcatatgtaatctaaaagatggcacctccaacgatgggttgctgcaaggcagggttcatcaaagagaactggttgtatggcagcaattgttgttgctgctgcaggaaggtagcgaccaatgggttagccactgccaatggattaagtaactgttgtcgctgttgtaggtacgcagcagagtttgacacagccagttggttgaatggaagcaactgttgtaagtaggcagcagggtttgccacagctagctgagtcagagctggtacaatttgttgcagcaactgttgttgtaggtacgtaggtgcattgcccaccgcgagcgggctagatgaaagtagttgtaggtagacggcagggttcaccatggctagttgactgagcactggcataaactgttgcaac

SEQ ID NO: 11235 - DNA, 405 bp, Zea mays
  Clone ID: LIB3061-120-Q6-N6-C1
catccaaaaaactttattattgaattacaactaataatcaatctaaaagagggcaccaccaatgatgtgttgttggtaggaggctgctgggtttgtcaaagcaagttggacaaagggcaacaattgttgtagttgtaagagggttgcggggttagccgcaaactgcttgtaaaaaggcagcaactgttgctgtgtcaagaaggaagcacgacttgctgcagctagctcgctaaatggcagtagtatttgctgctgcaaataagcagcggggttcagtgcggccaattggttaaatggaaaaagttgttgttgctgagagtaggcagtagctagctggctaaatggtaatagttgttgctgcaaataaacagcagggttcagtgtaaacagttggttgaatggaaa

SEQ ID NO: 11236 - DNA, 503 bp, Zea mays
  Clone ID: LIB3061-120-Q6-N6-C10
atatcgagataaatctcaatcaatatattgattatttctaggaaacacatgtcggtatgagggcaccattgtcgagtacatctcatatgtaatctaaaagatggcacctccaacgatgggttgctgcaaggcagggttcatcaaagagaactggttgtatggcagcaattgttgttgctgctgcaggaaggtagcgaccaatgggttagccactgccaatggattaagtaactgttgtcgctgttgtaggtacgcagcagagtttgacacagccagttggttgaatggaagcaactgttgtaagtaggcagcagggtttgccacagctagctgagtcagagctggtacaatttgttgcagcaactgttgttgtaggtacgtaggtgcattgcccaccgcgagcgggctagatgaaagtagttgtaggtagacggcagggttcaccatggctagttgactgagcactggcataaactgttgcagctgttgttgttgctggtatg

SEQ ID NO: 11237 - DNA, 549 bp, Zea mays
  Clone ID: LIB3061-120-Q6-N6-C11
agaaatgtactttcttatttctgggaagccacaaacatcatccaaaaaacttcattattgaactataactcataagcaatctaaaagagggcaccgccaatgatgggttgttggtagaacgttgttgggtttgtcaaagcaagttggttgaatggcagcaattgttgcagttgtaagagggtgccagcgttaggcgcagcgtgcaggtagaacggcaacaactgttgttgtgtcaagaaggcaacagggctcacatcagctagctggctgaatggtggtagctgttgctgttgtaaataagcagcagagttcaatgctgccagttggttgaatggaagaaattgctgggggtaggcagcagctagctgactgaatggtagttgttgttgcaaataagcagcagagttcaatgcagccagttggttgaatggaagaaactgctgttgctgagagtaggcagcaaggtttcctagcacaagttgttgtagttgttgtgccttgatgttttgtgccaacaaatgcaccaaaggtaactgctgtaatagggct

SEQ ID NO: 11238 - DNA, 542 bp, Zea mays
  unsure (1)..(542): unsure at all n locations; Clone ID: LIB3061-120-Q6-N6-C12
caccaaacaagatagcatacttgtcattgtattgaaaacatacgcattggtgcattacaagctttagaacagggctgagcatgcgcaaagcagtatatagacgatacgtcccttattcttacatagtactgtactatacacattcgtcagacctgtgccatacagccatactaaacaaagtcttcttgattctcatacgccttcacataaggcccaaggtgtgtgtcgtgccctggtgagtgccagacccagggccatgtagctggtaagtctggctcggcacaacctggagaacacctggttgctccttgagatccttgacctgctggggggtgagcttcgcggagaagccgctggcggcgttcttgtagtggtagagcactgcgtccctggccttctgttcgctgccgaggacgggggtgagggntgcggatgtggaactcctcagggtcggcgtcctcggggcggtcaacgtacacgatgtgcacggccgtctcctgtgccgcgggggccgcctgcttctccggctcggccgccatggc

SEQ ID NO: 11239 - DNA, 402 bp, Zea mays
  Clone ID: LIB3061-120-Q6-N6-C4
cagataaaaaactttattattgaactataactcataagaaatctaaaagagggcaccaccaatgatgggttgttggtagaacactgctgggtttgtcaaagcaagttggttgaatggcagcaattgttgcagttgtaagagggtgccagcgttaggcgcaacgtgctggtagaacggcaacaactgtggttgtgtcaaaaaggtagcagggctcacaccagctagctggctgaatggtagtagttgttgctgctgtaaataagcaggagagttcaatgctgctagttggttgaatggaagaaattgctgggggtaggcaacaggtagctggctgaatggtagttgtttgttgttgcaaataagaagcagagttcaatgaacctagttggttgaatggaaaaa

SEQ ID NO: 11240 - DNA, 448 bp, Zea mays
  Clone ID: LIB3061-120-Q6-N6-C7
agaatctggaaatgtaacttcttatttctggttggccacatacatcatccaaaaaactttattattgaattacaactaataagcaatctaaaagagggcaccaccaatgatgtgttgttggtaggaggccgctgggtctgtcaaagcaagttggacaaagggcaacaattgttgtagttgtaagagggttgcggggttagccgcaaactgctggtagaaaggcagcaactgttgctgtgtcaagaaggaagcacggtttgctgcagctagctggctaaatggtagtagtatttgctgctgcaaataagcagcggggttcagtgcggccaattggttaaatggaagaagttgttgttgctgagagtaggcagtagctagctggctaaatggtaatagttgttgctgcaaataaacagacagggttcaatgtaaacagttggttgaatgg

SEQ ID NO: 11241 - DNA, 511 bp, Zea mays
  unsure (1)..(511): unsure at all n locations; Clone ID: LIB3061-120-Q6-N6-C8
gacaattaagacaacgaaactaaacatggctaaaaactactactacaaatgtctgcagactggcacataggcatacaaacaataaatcaggcctaactgcagctctacaacctacaaagcgacaaacatagcacggcttctttatctgatcgttacaaacttatttgtaccatgcttagcccaaaacgtcttcaagtcaattggattaacaagattgtacccttcaccagcaagcttctcaagcacctttttgaatgcaccttggctcatcttccttccagcaatacgtgcgccccggcgctttgtgttcattggcagtggatacgttgaaatagaagtcgtgcagcatgcagactgccacccacctgcaccccaccggtagcactgctggggagctccggtgcacgagcacactggtgttggtatgttggcaaggtccaactcaataccgntaatcatcatccccacattcttcttaggtcccctcctccgggtcgcgtgcccattaatt

SEQ ID NO: 11242 - DNA, 273 bp, Zea mays
  Clone ID: LIB3061-120-Q6-N6-D1
agcccaaattcaactcatatttcagtagcaacaagctaaaagctgacaaatgctactccatctaatcttaatcttccaaaaattggtgtgttgtaaaacttacacatgtttttgcagcttggtatggacagggttttgaagggtacaacggtgaactatacactggtgtgttgagatgggtgcagtcacaacaaacaggtgtgccttgggaagcaacaaaaaaacttgactgggaggtgggtggggaacataaaaaaaaaagacctttgctgt

SEQ ID NO: 11243 - DNA, 530 bp, Zea mays
  Clone ID: LIB3061-120-Q6-N6-D10
aatcataataaataattaaatttaaacaacaatagaacaagtatttgcagtttacatcatgtcaatgacagcacgatcagtgatttagtgggcaacaatttcagtgccactttcttttgcctcaggagatcaaagcaaacgggggacagagacacaacatctaactactacacagaacaaggaagagttaaacaactctgaccaaaacgagagtcatcacaaaagcctattctacagtttttttttctaaccgtgacaacggtcctgcgcctctcttgcaggatcagccacgtataagctcgacgctaggtgattattggttaatgtacagaagttagcacaaagtgctgccattatagcccgatgaatgccatgccaccgttgagtcattggcgttgggcagacggagaatgttgcacctgcactggtgggaagaaccccatgcctgctgatgactggaagaatcctgctgatgtgggtgattgctgtggtgcctgaagagactgctgctgctgttggggttggttctg

SEQ ID NO: 11244 - DNA, 444 bp, Zea mays
  Clone ID: LIB3061-120-Q6-N6-D12
aaattgggaacaaaacttttttcttttcatttaaatgggtcattcagggcattggtaaaactgaccctgccccccatggggatgcgggacacatttttactcaatcatcgccgctaaatgactaaactagctagctagccaggggtttttctacagcacatagttttttaagggggggacacccccggcagcaacgtaggggcatggagtcggctgctgcaggatggactggaggaccaacccaaaaatcgcctggtaccggggctggggttccacctgcctgagctggtggaaacactgttgccgaaacaactggcacttagggaagcagtagggcgttcccctcgggctgcactgatgcctaaaaaactcgacccactggcccaggatcggggtgctgccaacccccaaggttccctgaaattggcacgggcttggatgcgg

SEQ ID NO: 11245 - DNA, 77 bp, Zea mays
  Clone ID: LIB3061-120-Q6-N6-D2
ttttttttttttttttttttttttttttttttttttttttttttttttttttttttttttttttttttttttttttt

SEQ ID NO: 11246 - DNA, 541 bp, Zea mays
  Clone ID: LIB3061-120-Q6-N6-D4
agaatctagaaatgtactttcttatttctgggaagccacaaacatcagataaaaaactttattattgaactataactcataagaaatctaaaagagggcaccaccaatgatgggttgttggtagaacactgctgggtttgtcaaagcaagttggttgaatggcagcaattgttgcagttgtaagagggtgccagcgttaggcgcaacgtgctggtagaacggcaacaactgtggttgtgtcaagaaggtagcagggctcacaccagctagctggctgaatggtagtagttgttgctgctgtaaataagcaggagagttcaatgctgctagttggttgaatggaagaaattgctgggggtaggcagcaggtagctggctgaatggtagttgttgttgttgcaaataagaagcagagttcaatgaacctagttggttgaatggaagaaactgctgttgctgagagtaggcagcaaggtttgctagcacaagttggtgtagttgttgggccctgatggtttgtgccataaatgcaccaaaagta

SEQ ID NO: 11247 - DNA, 469 bp, Zea mays
  Clone ID: LIB3061-120-Q6-N6-D5
accggcaaaagaactttcgacccattttctttcctatttccacatattccattttacatacatataagcaatgacaatggaggactatagcaagatctatatcaagccatgaagcaacacatgcaaaaaagaaagaaaagaaaaaaaaaggagcaaaaagctaaacaaagtggcaaaaaagcagaggtgcaggggaagcaggtcgaaccaacagaaaggggcagggatcaaggcgtcaaaattagtgttatacaacttacaaccatgccagaccttgcgcttgcgtcctaccatgatgaccttctgctagtgacacggccatggaaaacatcatctgctcctcgatgctctccgggctgaagtggcttggagccatggtgaaattctcagcgaaaggcagcggttgcatggcccctgcatccaccatgatgtccgatccggcatagcttgttcccgcctccgcaccctc

SEQ ID NO: 11248 - DNA, 365 bp, Zea mays
  Clone ID: LIB3061-120-Q6-N6-D6
ccacccaaaaactttatttttgaattccacctaataagcaatctaaaagagggcccccccaatgatgttttgttggtaggaggccgttcggtctgtcaaagcaagttggacaaagggcaacaattgttgtatttgaaaaagggttgcggggttagccccaaactgttggtaaaaaggcaccaactgttgctgtttcaaaaaggaaccccggtttgctgcacctacctggctaaatggtaaaagtatttgctgctgcaaataaccaggggggttcagggcggccaattggttaaatgaaaaaagttgttgttgctgaaagtaggcaatacctagctggctaaatggaaaaagttgttgctgaaaaa

SEQ ID NO: 11249 - DNA, 432 bp, Zea mays
  Clone ID: LIB3061-120-Q6-N6-D7
ggcatgggacaaatttaaagggggtatacgaggaagcagcgtacatgggaaataaataaagaccgcatgaactcaaaaataaaccaaacagccaaaagggcatgggcgggtttccgtctcctttttttttcaacacacacacaaacacaaggaccacgtgcgcggagagggtttttattcagtagtagtacacgtagcagtagtagacatgcaagtcgtgaccatcatgcgtaggtagctagatatggtcatgacggtccgatccgcgggcgccgacgtacggggggataaatatggatcgtcttcaggtggccgccgtcgcccgtcgtcgtcgtttagggttcaattcaccctggaacaatcggtggaggtgctgatggtgtaggggatgctgaccccccacttggaggggatgctggcggcgtttcccgc

SEQ ID NO: 11250 - DNA, 447 bp, Zea mays
  Clone ID: LIB3061-120-Q6-N6-D8
aaaatgggaaatataaaagaagggggggggggggaaaagagagggggggggaaaagaaaggggggggaaagaaaaaaaaggggggggaggggggggggggggagagaggggagaagagaggggggggaggggaaaaagggaaaaaaaaaaaaaaaaaggggccacaaaaaaaaggggggggggaagaaaaaagaggggggaggaaaaaaaaaagggggagggggggaaaattgtggtggtgggagaaggggagaaaagggcgggtaaaaggaagaaaaaaaaaaaaaaaaaagtgggggggttaaaagagggggggggaaaaaaaaaagagaggggggggaaaggggagacgccggaggaaaaaaaaaaagagaagaaaaaagctgggggggggaagaagaaaaaaaaagaggggggggagaaaaagggggtttaaaaaaaaaagag

SEQ ID NO: 11251 - DNA, 505 bp, Zea mays
  Clone ID: LIB3061-120-Q6-N6-D9
aacttctgtctgcttagtttattgctcattcttacagagtccatagtacagtttgaatatctgtaatataggagaaaaggatgagctagctagcgtggctcagcacctcctttcctatgttaagccaattatattctgtgaatcaggcagctcatctgatatatctatctaacttagtctggcacggcctgtgtggagtttgaatacaacagtgaataatgatggcacaaattgatcgtccgccatggatgatcttcacttcaacgaggcttacaagcttttgaccgagatgcatctttcctcattgtccagaatgctgcacggtaccgattctgcatcattgctttcatgtttgcagtgtaagtagtctcgatcattttctccacctccattgtaaatccataatggtaagcaacctttttcacatcttccaaacttaattcaatagacatatcatcatctggcccatatgaatcagcaaagtgatacagaaggggacccaaat

SEQ ID NO: 11252 - DNA, 507 bp, Zea mays
  Clone ID: LIB3061-120-Q6-N6-E1
atacatcaattggcagcttttggcttcaccttaatttcttatgttccacttcacatttccatttaattagaggaaggaccggtgaagtaaatcgctcacattttctcatgcacgttgggagatcagatctttgcttgcattggatggggacgagcctagctacttccaagtataacaggaatcgttaattatatcacaagaacaaatccggatcccctttaattattgttccggatgaacgatccgagaaatgcattcatcttcttgctgtgcttattattcagacatatgagctagctacaagctcattcctcatgcactatgctcttcgcagttacttggagggcatcgttccgccgccgagaatccaggggcattcggcgacgccgctgatggtggccaggttgcactcggcctccgtgacgagggtggcggcgaatcccctctgcacctcccgggggcagcccggcaggtcctttaggcggcccttcacttgcgcgtccgggc

SEQ ID NO: 11253 - DNA, 457 bp, Zea mays
  Clone ID: LIB3061-120-Q6-N6-E10
cccaaccagatccttacatttaaggcatggatttattatggggattaaggacatcgggccttaatctcacactacacagcaaatgacacaaaaacactaggggcacaaccggggaggcccggacacaagtacatgggaccaaactattgtaatttgacaagtaaaattaagtccaacactacatgcaaaatgcagcaaccacagcttattgaattcaaaaaataaaataagcacaaaaaaacttaatcgcagtcaacagctcatgtatcatcacaaatttttacaagatccaaacaaccatcaccttataactttattaatgcaaatggattggagcttatattttttcgagggcctgaacaaaatcatttttaaggtcctaaaaatcctccactccaatgctgaacctgatcaggttgtccttgatcccataaatgtccctctgctcctttgaatc

SEQ ID NO: 11254 - DNA, 490 bp, Zea mays
  Clone ID: LIB3061-120-Q6-N6-E11
aaacacaacgaaaagagcttgaaaattgaaataggcaaatatagtaattacatggaacatgcaacctaacaaattgagctccggataggcaaatggaacattgattaacttggactcaaaatattgtattttttttcatctgagacaaacacacgatccggaaacaccacatcaaactccaaatatacttgtccatccgtttccagttcacgtacgcttcacgacattgccaccttcttggccaagaactttgatcattcaacctttttcttgtcatcctctccgccgccggctccgtcctcctcctcctcatcctcctccttgtcgacgaggatcttcttgcacgcctcgtagcacatgaaggcgatgccggcggcgggcatgagcttgatgcagctagggccgagacctcggtacaggccgccggcgccctccttcttgaggatgcagtagatagcgtggaggacgttctggtacacctgcctcccgc

SEQ ID NO: 11255 - DNA, 493 bp, Zea mays
  Clone ID: LIB3061-120-Q6-N6-E12
ggagaccgaaccattttctttttattatgtacgagaccaatattaccggaggcactgccaatgtttacttgtcaacgggcacttaattgctctataatatgaaccactaaaatttccggaatcaagtgataccgataaggagaagcaaaagacctataacctactcgaacctagtcagttaccatcaaatcgttagggacttgtccgaaaatgtcggggcaaccttcccagctgcttttttttttggattcccagtacccaccgacgtaacggtatgtgtcaatagctttatccttcgaaaaccaccgaggcttccatccgctttcctgcatttttcgtgcctgccgttgtctttgttcaagcctcaatttttaagcatttgccctttcatattaaccgttctccaaacatttttggtctggtcgtaatcttgagtctgtaggtggcagtttctccttcaatccaggggtaagttcattcaatgtaattgcaa

SEQ ID NO: 11256 - DNA, 258 bp, Zea mays
  Clone ID: LIB3061-120-Q6-N6-E2
ggggaaacccgcccctttttttgtaaaccggtaaaagcaaaggggcccccgctttggtcgggcaggggggcctcaaagcccaacaagcaaaaagttgggggtccccctctagcagaaacccctaaggggggggaactttggggcttacaaaaaacccaaaacacttttgcccttacaaaaaaagaccctacaaagatcccaaaacactgaactattttaaacaaaggggggagaaaaaaaccttgggggggggagaaa

SEQ ID NO: 11257 - DNA, 559 bp, Zea mays
  unsure (1)..(559): unsure at all n locations; Clone ID: LIB3061-120-Q6-N6-E4
gacaaaaaacaaacagtgcttgttntgaaaaaaaaactaccgctatatgtacgatttccttacatcaaatgtaataaagaagtaaaaagacatggtaaacccctagccagaaacctagcattcagagcatgcaatgctgcacctatatctatcctaactaaaaccaaaagtatggagggttttgcaacccagagccttgccggccaccatggcggtcttccatcccaagaattatcaataagcaggcatcagcttttgcaacaccaatcttctcattttctgatgtactggctgctcctcaaatggaaatggtgtcaaggtgaaaaatgtaccggaagtgtgttgcgccctattttgcagaagggggcatgtgaacaaacttcgatggctcatctagatgccacttactgtacacggatttacaattcacagtaggtaaaatctggatgcaacaaaggaattttttaagtgagggcaaactccttttttttggaaggaaaactggggtttttttttgtagggggtgaactacttgttgatctcatctgcagtaagtgtt

SEQ ID NO: 11258 - DNA, 529 bp, Zea mays
  Clone ID: LIB3061-120-Q6-N6-E5
atcgagataaatctcaatcaatatattgattatttttaggaaacacatgccgctatgagggcaccattatcgagtacatctcatatgtaatctaaaagaggcaccaccaacgatgggttgctgccacgacaaggcagggttcatcaaagagaactggttgtatggcagcaattgttgctgctgtaggaaggcagcgaccaatgggttagccaccgctagtggattaagtaactgttgtcgctgttgtaggtacgcagcagagttcgacacagtcagttggttgaatggaagtagttgttgcaagtaggcagcagggtttgccacagctagctgagtaagagctggtacaatttgttgcagcaactgttgttgcaacaactgttgttgcaggtatgtaggtgcattgcccatagcgagcgggctagatgaaagaagttgttgctgttgtaggtaggcgatagggttcaccatggctagtttgactgagcgctggtagaaactgttgcaactgttgttgttgttggtatgc

SEQ ID NO: 11259 - DNA, 310 bp, Zea mays
  Clone ID: LIB3061-120-Q6-N6-E6
gggggcctcttacattatccaaaaaattttttttttgaattcaactaataagcaatctaaaagagggcacccccaatgatgtgttgggggtagaaggctgctggggttggcaaagcaaggtggacaaagggcaccaactggtgcagttgtaaaaggggtgaggggttagccacaaaccgctgggggaacggaagcacttgttgattggggaagaaagaaaagggcttgttgtaccaactggccaaagggaagagaattgctggtggaaaaaacaaaggggtcagggcggccacatggttaaatggaaaag

SEQ ID NO: 11260 - DNA, 504 bp, Zea mays
  Clone ID: LIB3061-120-Q6-N6-E7
aaatctcaatcaatatattgattatttttaggaaacacatgccgctatgagggcaccattatcgagtacatctcatatgtaatctaaaagaggcaccaccaacgatgggttgctgccacgacaaggcagggttcatcaaagagaactggttgtatggcagcaattgttgctgctgtaggaaggcagcgaccaatgggttagccaccgctagtggattaagtaactgttgtcgctgttgtaggtacgcagcagagttcgacacagtcagttggttgaatggaagtagttgttgcaagtaggcagcagggtttgccacagctagctgagtaagagctggtacaatttgttgcagcaactgttgttgcaacaactgttgttgcaggtatgtaggtgcattgcccatagcgagcgggctagatgaaagaagttgttgctgttgtaggtaggcgatagggttcaccatggcttgttgactgagcgctggtagaaactgttgcaactgtt

SEQ ID NO: 11261 - DNA, 303 bp, Zea mays
  Clone ID: LIB3061-120-Q6-N6-E8
ggtattgttattttttttttttgggggggcgcctacctgaaccaaaaaacattattttgatttgcgcgaaggagcaatccaaaaaggggcacccccaaagaagggttgctggaaaaacccccccggggaggggaaaacaaatttttgcgttcaaccaaccggcggggttggactctgcaggttatttacaacagcaacaacccgggcgcgggggtggacccgcgaatatataacacagccccgccggcggaccagcttttcctaccgagaagcgggccagaacccggccgggtcaaggacata

SEQ ID NO: 11262 - DNA, 372 bp, Zea mays
  Clone ID: LIB3061-120-Q6-N6-E9
gaaaaaaggaccttcttatttctggggagccacaaacatcagataaaaaactttttttttggactattacccataagaaaactaaaagggggggccccccatgatgggttgttggtaaaacactgctgggtttgtcaaaacaagttggttgaatggcaacaattgttgcagttgtaaaagggggccagcgttaggcgcaacctgctggtaaaacggcaacaactgtggttgtgtcaaaaaagtagcagggctcacaccaactagctggctgaatgggaatagttgttaaacctgaccaattcaaggggattaatgatgaggggaggccaatttaccagaagcccttttttccccgtaccttttaacaaaggg

SEQ ID NO: 11263 - DNA, 343 bp, Zea mays
  Clone ID: LIB3061-120-Q6-N6-F11
gggaaaccccaaaaatgccccatgggttggggggggggtttactggcataaaaccatccttggtacaagcacaccattcatgggttagccaaaaaaagagaagggggaattccctcccattttcttttacgaacaaactccagggaacccccccaccacccatattggacttacttacttagcccaaaaaaaaaaccctggatttggaaaatctttcaaccctaaaaacccacgggggaccaaaccaaacgtgaaggggtttttttttttttaccccctttcccccccaaaggatttcccaaaaccaacctttttttttaaaccgggtttacgtccaagccaa

SEQ ID NO: 11264 - DNA, 249 bp, Zea mays
  Clone ID: LIB3061-120-Q6-N6-F2
catcattaattgcttatttatgatatattattccatcaagatcacatttttcacggtagccatacatgaggtcctcctttttttaatggtgtactagtagcttagaagctaacaccaaccaaggaaggacaaccaagaagctaaggcctggtttattattaactggaaacataaaataaaaagtagggtttgttaattgcatttggtatgtatcacccaactgacggagtcatggggacggtgtcaacg

SEQ ID NO: 11265 - DNA, 187 bp, Zea mays
  Clone ID: LIB3061-120-Q6-N6-F4
atggggcaattctctagttaactcctctgagttcagatcaaccatcatcggttcaaatgttgtgtactataccaggcaacaagtgtaggatcaacacagaatactagtgtatgcgcacgcatgcaggaaggcagcaacaccaacagagtaaaccatccaagccaaaccatgcttgttgggacagcac

SEQ ID NO: 11266 - DNA, 82 bp, Zea mays
  Clone ID: LIB3061-120-Q6-N6-F6
tttttttttttatttttttttttttttttttttttttttttttttttttttttttttttttttttttttttttttttttttt

SEQ ID NO: 11267 - DNA, 412 bp, Zea mays
  unsure (1)..(412): unsure at all n locations; Clone ID: LIB3061-120-Q6-N6-F7
tngggggcctnaannattgggggggggaaaaaaaaaaaaaaaccggagggacaaaaaaaaaaggggttaaaaaacgggaaagccggggggcccccaaaaacttggcccccagaaaaccggggaataaaaaaaaaaaaaaaaaaaccccggggggccaaaaaaaaaaaaacggcaaaaacgggaaagcgggggggcccccccaaacttggcggcgaaaaaaaaaaaaacccccaaaaaaaaaccccgggggggggccaaaaaaaggggcaaaaaaaaaaaagcccccctggggtttaaacccccccccagggggggaaaaaaaaaaaaaagtgcccaaccaaaaaaaacacacgggcaaaaaactggggacaaaaaaaaaaaaccccccaaaggctggtttaaacaaaggggc

SEQ ID NO: 11268 - DNA, 432 bp, Zea mays
  unsure (1)..(432): unsure at all n locations; Clone ID: LIB3061-120-Q6-N6-G10
gggccaacggtggaccactgtaacataggtccctgcatagtttctattattcagttgtgaagatcacactacgctgacaagaaaaacattttagaccaaaaagaataggcattccatacattatagtttgctgtctttgataccacaaatggttcccggtcgataccacataatagcatacctatgtccatcaaaagctacggcaagtagcactcaaacacacgctagactgtcatacagaaagcttacaaaagcagagacttaaccaagcaagctcatggcactatgggtggacggaattaggtcatagtttccaagacctggatttacaaaagatgggcagtccaaactttagtattcccactttttgagctccataccatcaggggnggctcccttctaccttctttgctccaaatctttccaattggt

SEQ ID NO: 11269 - DNA, 240 bp, Zea mays
  Clone ID: LIB3061-120-Q6-N6-G12
aagaatctagaaagtactttcttatttctgggaagccacaaacatcatccaaaaaacttcattattgaagtataactcataagcaatctaaaagaggcaccaccaatgatgggttgttggtagaaacgctgttgggtttgtcaaagcaagttggttgaatggcagcaattgttgcagttgtaagagggtgccagcgttaggcgccagcgtgcaggtagaacggcaacaactgttgttgtg

SEQ ID NO: 11270 - DNA, 432 bp, Zea mays
  Clone ID: LIB3061-120-Q6-N6-G2
ctagaaatgtactttcttatttctgggaagccacaaacatcagacaaaaaactttattattgaactataactcataagaaatctaaaagagggcaccaccaatgatgggttgttggtagaacgctgctgggtttgtcaaagcaagttggttgaatggcagcaattgttgcagttgtaagagggtgccagcgttaggcgcagcgtgctggtagaacggcaacaactgtggttgtatcaagaaggtagcagggctcacaccagctagctggctgaatggtagtagttggtgctgctgtaaataagcaggagagttcaatgctgccagttggttgaatggaaaaaattgttgggggtaggcaacaggtagctggctgaatgggagtttgttgttgttgcaaattagaagcagaattcaatgcaacttagttggtt

SEQ ID NO: 11271 - DNA, 387 bp, Zea mays
  Clone ID: LIB3061-120-Q6-N6-G4
ggaacaacatatcaatatcattggacaaaaatagctgcgaacaaaaaccttgctcattcttctctcgtctcgtttcatagcgggagcaaacaaagggaacaacaggggtaccaacacctaatccaaaggtagaacggacactaacacggtgacagaagcgaacggtaacacgatactatagatagataagataactcggccgaagccaggatgggcccacacatcagtccctccagccgccgccgccgccgccgtagccgccaccaccaccctcgcgccgaccgccgtaaccgccaccgcctacgtagccggcggcaccaccctcgcgccgaccgccgtagccgccaccgccggcataacccccgtcacggggcccgccaccatagc

SEQ ID NO: 11272 - DNA, 372 bp, Zea mays
  Clone ID: LIB3061-120-Q6-N6-G5
agaatctggaaatgtaacttcttatttctggttggccacatacatcatccaaaaaactttattattgaattacaactaataagcaatctaaaagagggcaccaccaatgatgtgttgttggtaggaggctgctgggtttgtcaaagcaagttggacaaagggcaacaattgttgtagttgtaagagggttgcggggttagccccaaactgctggttgaaaggcagcaactgttgctttgtcaaaaaggaaacacggtttgctgcagctagctggctaaatgggagtaatatttgctgctgcaaataagcagcgaggttcagtgcggccaattggttaaaaggaaaaaatttttgttgataaaagttggcaat

SEQ ID NO: 11273 - DNA, 404 bp, Zea mays
  Clone ID: LIB3061-120-Q6-N6-G6
aaaaaaatctcaaaaggactgttgcgcaaatttaagatttcaatcaacagaacacaaagagtgatctaacgatgtgagacaaacatgtccaagttcgttcataaacatggcgcttctacaattcatggttcatggatacatgcggctccgctcaaggtcttttcagcaacaggtttaagcagaagcagtaggcgcatcggccatttcctgttcaaccggagttttctgaaccgggtagtagtggtagtgcagctccccgacatcatccccaaaaagcttcgtccaaccatcagggccaacgtggtaaacactaacacaaccaccacttgctgcattacggaatgttgccccataaatagcccgtcgcgctaatttcgcgggttcctcaactgacatgctgaagc

SEQ ID NO: 11274 - DNA, 146 bp, Zea mays
  Clone ID: LIB3061-120-Q6-N6-G7
aaagaaactaaaaagggacttttttattttgggggccccccaaacctcatccaaaaaacttcttttttggacttttactcattagccatttaaaagagagggccccccccatgggggggtggtgggaaaacactgttgcggccccc

SEQ ID NO: 11275 - DNA, 447 bp, Zea mays
  Clone ID: LIB3061-120-Q6-N6-G8
agaatctggaaatgtaacttcttatttctggttggccacatacatcatccaaaaaactttattattgaattacaactaataagcaatctaaaagagggcaccaccaatgatgtgttgttggtaggaggccgctgggtctgtcaaagcaagttggacaaagggcaacaattgttgtagttgtaagagggttgcggggttagccgcaaactgctggtagaaaggcagcaactgttgctgtgtcaagaaggaagcacggtttgctgcagctagctggctaaatggtagtagtatttgctgctgcaaataagcagcggggttcagtgcggccaattggttaaatggaagaagttgttgttgctgagagtaggcagtagctagctggctaaatggtaatagttgttgctgcaaataagcagcagggttcagtgtagacagttggttgaatgg

SEQ ID NO: 11276 - DNA, 473 bp, Zea mays
  Clone ID: LIB3061-120-Q6-N6-G9
gaccccatgaaggtggtggagcgcgtgcagaagaagactggccgcaaggtcgagctgctgtcgccgatgccgcccccgccggaggtggaggagaagaaggaagatgaggcggagaagaagaaggacgatgagaagaaggcagagcccgagccgccgaagccggaggagaagaaggagccgccggtgatcgctgtggtgctgaaggtgcacatacactgcgaggcgtgcgccgaggggatcaagaagaggatcctcaagatgaaaggcgtgcagtccgtagaaccggacctcaaggcgtcggaggtgacggtgaagggcgtgttcgaggagtccaagctggcggagtacgtgtacaagcgcacgggcaagcacgcggccgtcgtcaagtccgagccggccccggcgccggagggcggcggcggcgacaaggcggccaaggaggaggagaagaaggatgcaggcggagccggaag

SEQ ID NO: 11277 - DNA, 417 bp, Zea mays
  Clone ID: LIB3061-120-Q6-N6-H1
aagaatctagaaatgtactttcttatttctgggaagccacaaacatcagacaaaaactttattattgaactataactcataagaaatctaaaagagggcaccaccaatgatgggttgttggtagaatgctgttgggtttgtcaaagcaagttggttgaatggcagcaattgttgcagttgtaagagggtgccagcgttaggcgcagcgtgctggtagaacggcaacaattgtggttgtgtcaagaaggtagcagggctcacaccagctagctggctgaatggtagtagttgttgctgctgtaaataagcaggagagttcaaagctgtcagttggttgaatggaagaaattgctgggggtaggcagcagatagctggctgaatggaagatgatgttgttgcaaataaaaagcagagtt

SEQ ID NO: 11278 - DNA, 538 bp, Zea mays
  Clone ID: LIB3061-120-Q6-N6-H10
gacgactcaattcagatggttattactgctgccaggccattccatatgtatacatcccgtcgagtcacgaaagaaacgcaaagcaaaccaccaggaggagatgacaaatcatcaaattcagttcatgacagaccagggccaccagggcctcattcttgatcatagcaaacacaggaaatcaatatctcaacctatagtatcgatggtcaggagataaactgactgtttctagggtgcatccatatctccttccatgagtgaaactctatcgccagtcttgctgagcagcttccacaatctacagatttttcccttctttctcctcaatggtctttgccttgcgataatccttgtccgtgccgaacaaccagtccatgtaaacaaatgttgaggcatagttccctgactttgtgtacagcacacggtgatggtagtcatggaagtccgagccgccatacagcggcaggaaatttgatgggctccatgggaagtgatagccgctgtgagcttcaactgtctccaaaacccttaacaccat

SEQ ID NO: 11279 - DNA, 254 bp, Zea mays
  Clone ID: LIB3061-120-Q6-N6-H2
acaacaaaactgtggaattctataatatatcaaagtaaacatgtttcaggaaacatctggtgttaagattgcaccggggctgtatttaccagcacatccgtgcttctacgtaaacactatataacaattataagcagtttcaattgcaaccatataaacactttgaaggagcgtcagtgccttcaactagttcagtgacccatgttgatctttatttcaattgtgcagtatgtttatatttgcattacttcaaa

SEQ ID NO: 11280 - DNA, 219 bp, Zea mays
  Clone ID: LIB3061-120-Q6-N6-H3
gcaaccaatattttgattttttttgggaaacacacgtgggtttgagggcaccattttcgagtacatctcatttgtaatttaaaagatggcacctgcaacgaggggttgctgcctcgacaagtgcaggatccaacaaaaagaactggttgaatggtgacaattgttgttatttgaagaagggggagtccagtgggttagccattaccaatggtttaataa

SEQ ID NO: 11281 - DNA, 72 bp, Zea mays
  Clone ID: LIB3061-120-Q6-N6-H4
gggggggggggggttttcccgggttagtcgggccggggccggggggggggggggtttgggttggtggggggg

SEQ ID NO: 11282 - DNA, 126 bp, Zea mays
  Clone ID: LIB3061-120-Q6-N6-H6
gggggggggtgccttgttggtttacaccggttttggggtttaaaggtttggttggcccaatgggtggaattgtttaccctcctgtggggtttggtggtgggtgggcttttttgggggtgtgggtgg

SEQ ID NO: 11283 - DNA, 430 bp, Zea mays
  Clone ID: LIB3061-120-Q6-N6-H7
agtaaaaactgacatggggctggtttgttcccccactttactggtgggatggtaatttacaagagcctatcttcctgtgtatgttgcaccattgaaccaaaaacaatgaagtaatcataagttacacatatgtggttaatcgagaagcgctacaaaatcgaaacctcgaaatataatgccaaaacttttgcacagcgaccttctcgccgacaggaatctgattcgtttcttcaacaatcaacatgaaatgtcaagctggtggtctttccagtagcataccttacctcacatgaagcccgggtcgagctaagtgtcaggagaggggagacttcaggctgcttaggtctcaactcacgacctcatcggatgttgaatggctagtttccaagttgaatttaagctcactgggatacacaaagacagtccctgc

SEQ ID NO: 11284 - DNA, 336 bp, Zea mays
  Clone ID: LIB3061-120-Q6-N6-H8
cgggggggttgggggggggggccgggggggttccccttttttcttttggggggggtttttaaaggtgggggaaattgggggctaggggtgttctgggggaaaaatggtttcccgccaaatttcccaaaaaaaaataggggggggaaaaaaagggaaaaaaggggggggccattgggggggggcaaacaaaaaaaaaggggtggggctgcgggggcgtttttcgggggggaaaaccgggggggcgctttttttaatataagtgccaaaccgggggggggagggggttttgttttggcgcccaagggggttttttttttcccgggggggggggggaaa

SEQ ID NO: 11285 - DNA, 529 bp, Zea mays
  Clone ID: LIB3061-120-Q6-N6-H9
cagaaatatattgagataaatctcaatcaatatattgattatttctaggaaacacatgccggaatgagggcaccattatcgagtacatctcatatgtaatctaaaagatggcacctccaacgatgggttgctgcctcgacaagacagggtttatcaaagagaactggttgtatggcagcaattgttgctgctgtaggaaggcagcgaccaatgggttagccactgctagtggattaagtaactgttgtcgctgttgtaggtacgcagcagagttcgacatagtcagttggttgaatggaagcagctgttgcaagtaggcagcagggtttgccacaactagctgagtcagagctggtacaatctgttgcaacaattgttgttgcaggtatgtaggtgcattggccacagcgagcgggctagatgaaagcagttgttgctgttgtaggtaggcggcagggttcaccatggctagttgactgagcgctggcagaaactgttgcagctgttgtttgtggctggtttgcaacta

SEQ ID NO: 11286 - DNA, 424 bp, Zea mays
  Clone ID: LIB3061-121-Q6-N6-A1
gggagaaggaacttttttttttttggggggccccttccttagcccaaaaactttttttttggatttccacttattgggggttttaaaaatgggcccccccatggtgtgttttttgtaaaaaggtttttggttttttaaaaaaaatttgaccaaggggaaaaatttgttgtgtttttaaaggggtggggggtttaacaaaaaatctgtttgtaaaagggagatatttttttttttattaaaaagaatgggggtttttttttatttgtttgaaaaatgtttttaattttttttttggaaaaaaaaatagggggtttatgggggccaattttttaaaaaaaaaaaatttttttgtttgggtgggtattttttttatttgttggtagggggtggttggtttttttttttatttgagtatagttttttt

SEQ ID NO: 11287 - DNA, 537 bp, Zea mays
  unsure (1)..(537): unsure at all n locations; Clone ID: LIB3061-121-Q6-N6-A11
cagaaatatatcgagataaatctcaatcaatatattgattatttttaggaaacacatgccgctatgagggcaccattatcgagtacatctcatatgtaatctaaaagatggcaccaccaacgatgggttgctgccacgacaaggcagggttcatcaaagagaactggttgtatggcagcaattgttgctgctgtaggaaggcagcgaccaatgggttagccaccgctagtggattaagtaactgttgtcgctgttgtnggtacgcagcagagttcgacacagtcagttggttgaatggaagtagttgttgcaagtaggcagcagggtttgccacagctagctgagtaagagctggtacaatttgttgcagcaactgttgttgcaacaactgttgttgcaggtatgtaggtgcattgcccatagcgagcgggctttatgaaagaagtgttgctgtttgtggttggcgatagggttcaccatggcttgttgactgagccctgggagaaactgttgcaactgttgttggtgttggtttgc

SEQ ID NO: 11288 - DNA, 351 bp, Zea mays
  unsure (1)..(351): unsure at all n locations; Clone ID: LIB3061-121-Q6-N6-A3
tgggggggggtttttttttttttttttttttttttttttttttttttttttttttttttttttttttttttattggggaagggtattaaaattatggggacgaaaacgcgggaaatattggggggccaagtgagagctacgttatgtgggggggggggggcgcacaggacaaatgggggggcttggacgtggngccgaataaattttttttttttaaccctggggggttgtactggggggcgggggaaaaaaaggttaacttgtgggggtttgagggggggacaatattgggaaacccggggggaaattccggggcttttgaagaattaagggggcgattttgggcggggg

SEQ ID NO: 11289 - DNA, 400 bp, Zea mays
  Clone ID: LIB3061-121-Q6-N6-A4
acattagaatctggaaatgtaactttttatttctggttggccacatacatcatccaaaaaactttattattgaattacaactaataatcaatctaaaagagggcaccaccaatgatgtgttgttggtaggaggctggtgggtttgtcaaagcaagttggacaaagggcaacaattgttgtagttgtaagagggttgcggggtttgccgtaaactgtttgttgaaaggcagtaactgttgttgtgttaagaaggaagtactacttgctgcagctagctcgctaaatggcagtagtatttgttggtgtaaataagtggtggggtttagtgggggcaattggttaaatggaagaggttgttgttgctggaagttggtgtttgctagctggctaaatggtaata

SEQ ID NO: 11290 - DNA, 299 bp, Zea mays
  Clone ID: LIB3061-121-Q6-N6-A5
ggagttcggtaaaccaggcactttctgttcccaatcaactacattactcagtaattttaattgtgcgctggaaaccaaaaccgcatataggtctcaaaaaactctaaacattggttaaaacaggaaccgatacgactgggcgggcgagcataaaagtttccagcgcgagagtgcgccaggatacaagcttcgttcaacggttggccttggcaacacgctcaatctcgggcttgttcttgatggtgtaactgttggatgagcccttgggtgggtggttaggttatttggaggggactcgg

SEQ ID NO: 11291 - DNA, 542 bp, Zea mays
  unsure (1)..(542): unsure at all n locations; Clone ID: LIB3061-121-Q6-N6-A9
agaaatgtactttcttatttctgggaagccacaaacatcagnataaaaaactttattattgaactataactcataagaaatctaaaagagggcaccaccaatgatgggttgttggtagaacactgctgggtttgtcaaagcaagttggttgaatggcagcaattgttgcagttgtaagagggtgccagcgttaggcgcaacgtgctggtagaacggcaacaactgtggttgtgtcaagaaggtagcagggctcacaccagctagctggctgaatggtagtagttgttgctgctgtaaataagcaggagagttcaatgctgctagttggttgaatggaagaaattgctgggggtaggcagcaggtagctggctgaatggtaattgttgttgttgcaaataagaagcagagttcaatgaacctagttgggtgaatggaaaaaactgctgttgctgagagtaggcagcaaggtttgctagcacaagttgttgtagttgttgggcccctgagttttgtgcccataaatgcgccaaaggtaactgtt

SEQ ID NO: 11292 - DNA, 328 bp, Zea mays
  Clone ID: LIB3061-121-Q6-N6-B1
gggaagccacaaacatcagacaaaaaactttattattgaactataactcataagaaatctaaaagagggcaccaccaatgatgggttgttggtagaatgctgctgggtttgtcaaagcaagttggttgaatggcagcaattgttgcagttgtaagagggtgccagcgttaggcgcagcgtgctggtagaacggcaacaactgtggttgtgtcaagaaggtagcagggctcacaccagctagctggctgaatggtagtagttgttggtggtgtaaataagcaggagagttcaatgctgtcagttggttgaatggaaaaaattggtgggg

SEQ ID NO: 11293 - DNA, 529 bp, Zea mays
  Clone ID: LIB3061-121-Q6-N6-B10
gtaagatagcaagaccaacacatgcattattaaatattatcttacatttgctatttttaaaatggcaatcataaccatcattgtccaagtatgaaacactaatcaaatttctctgtaaagagggaacataaagaacatctctaagtaaaagcgtgaaaccatcagcaagctctacagaaagatcgccaacggcttcaacatctgcttggactccatttgcacttctttgtgtagtcctcgttgaacggaatccccgtaaagaattagcaacatgaacagttgctcctgagtcaatccactaagtagattttgaatatcgtacatataggaattcatttacaaatatgataatattctcacatttctttgccatgaccattttcaagaacttgggatagtctttcttgtagtattccttcttcttgcagggaagacactggtctttctccactgtgaatttctgttgctgatgctgaggagcctttccctttgaggaggagttagcattaaaggtctttttcttggtttc

SEQ ID NO: 11294 - DNA, 57 bp, Zea mays
  Clone ID: LIB3061-121-Q6-N6-B11
ttttggtttttgtttttttttttttttttttttttttttttttttttggttgttttt

SEQ ID NO: 11295 - DNA, 226 bp, Zea mays
  Clone ID: LIB3061-121-Q6-N6-B2
tttgttggttgttttttttttttgaggataaatttgaatgaatatattgattatttttaggaaacacatgccggaatgagggcaccattatcgagtacattttatatgtaatttaaaagatgggaccttcaaagatgggttgatggctggacgagacagggtttataaaagagaactggttgtttggcagcaattgttgttgttgaaggaagggagtgaccaatgg

SEQ ID NO: 11296 - DNA, 126 bp, Zea mays
  Clone ID: LIB3061-121-Q6-N6-B3
gatgtgaaaaaggtgcgttctgagttggggggagcccccaacacgagatttataaattttgaagggaagtaggggggagaagaagaatttaaaaaggggcgcggccgaggagaggaagaagggggg

SEQ ID NO: 11297 - DNA, 456 bp, Zea mays
  Clone ID: LIB3061-121-Q6-N6-B7
gcagcaccaagaagcaccattttttccttaggattaacttagaacaaatcctgacaggagtaacagcatccatcgatccacagtccatgctggttgatgcatgggtctgctggagccgaggatgaacacagcactaacaactgacacagagcgaccttgcaatcaaaaacacagatgggcaacaacaaacgagacgaacgaagataaaccctctggactagggtaaacatcacggtagcgaacaggataacttggccgcgcgggccccaccgctcagttcctccagttcccgtcggagttgccgtagccgccgccacggttgccaccgccgtagccgtcaccaccaccaccgtagccaccgtcgccaccgtagccgccgccgccaccgccgtagccgccgccgtcattacggggcccggcaccggcgtagccggcgtcttcacgggcaccaccgta

SEQ ID NO: 11298 - DNA, 452 bp, Zea mays
  unsure (1)..(452): unsure at all n locations; Clone ID: LIB3061-121-Q6-N6-C1
cgttaatgccaatcagggcagcacagcgcctcacattcacctcaaaactctgcttcaaaaaatgttagcatcgatgacacggctctataaaggtgtattcacaggctttcatcttccagacacgaattcgaataaaagacgcgggggggtaaaacttnacgacactgtgattagtgtggcggtaaacaacataaaggagaagacacactgagttttgtgagcgccttatgacttggaccctgaagatttatttgaagatgctttattgtggttattgggtgcggggtaaattggcttttaaggatatggagggttattattgggtttgctgtgcattttgtttagaggatgcatatggggcttaagaactgttgtgtatgaagattgaaagtttggggagttttttagaaaaaccgagggggaaaagttttttttggtatttgagagggggg

SEQ ID NO: 11299 - DNA, 473 bp, Zea mays
  Clone ID: LIB3061-121-Q6-N6-C10
agaaatgtactttcttatttctgggaagccacaaacatcagataaaaaactttattattgaactataactcataagaaatctaaaagagggcaccaccaatgatgggttgttggtagaacactgctgggtttgtcaaagcaagttggttgaatggcagcaattgttgcagttgtaagagggtgccagcgttaggcgcaacgtgctggtagaacggcaacaactgtggttgtgtcaagaaggtagcagggctcacaccagctagctggctgaatggtagtagttgttgctgctgtaaataagcaggagagttcaatgctgctagttggttgaatggaagaaattgctgggggtaggcagcaggtagctggctgaatggtagttgttgttgttgcaaataagaagcagagttcaatgaacctagttggttgaatggaaaaaactgcttgtgctgagagtaagcaacaagggttgc

SEQ ID NO: 11300 - DNA, 131 bp, Zea mays
  unsure (1)..(131): unsure at all n locations; Clone ID: LIB3061-121-Q6-N6-C11
ggaatncataggagaatcgattcctaaacttagatcttgtttcttctataatttgatttcatagaaccatggggaaacacacactncnnacgccgtgccagnacaacagggagactataatcgacactcct

SEQ ID NO: 11301 - DNA, 328 bp, Zea mays
  Clone ID: LIB3061-121-Q6-N6-C2
tttgtgtgggtgggactagaagctcaatcgctttttagaaaacagtgtacaaatcaggtctgaaaatatggcataacgctctgaacttgagacgactaaccaaaaagtgtgctcatcaggacacacattttggtgcaagacaatccatgggggggggggggggtacagcgctgttggggggggtgctctgtagcttattcatgtggaatttaagctttttacccttaagggtgtacccattagtttgggcacactgttcaggacgggaagaaattatgccaggaaccgggcactggcaaaatggtttttaatgtgtggggtaaggggt

SEQ ID NO: 11302 - DNA, 385 bp, Zea mays
  Clone ID: LIB3061-121-Q6-N6-C4
agcacataagaatctagaaatgtactttcttatttctgggaagccacaaacatcatccaaaaaacttcattattgaactataactcataagcaatctaaaagagggcaccgccaatgatgggttgttggtagaacgttgttgggtttgtcaaagcaagttggttgaatggcagcaattgttgcagttgtaagagggtgccagcgttaggcgcagcgtgcaggtagaacggcaacaactgttgttgtgtcaagaaggcaacagggctcacatcagctagctggctgaatggtggtagctgttgctgttgtaaataagcagcagagttcaatgctgccagttggttgaatggaagaaattgctgggggtaggcagcagctagctgac

SEQ ID NO: 11303 - DNA, 483 bp, Zea mays
  unsure (1)..(483): unsure at all n locations; Clone ID: LIB3061-121-Q6-N6-C5
gagacaatctatgcataataactgaggataaaaaatgcactgtgctcctcggggaatggagctaactaaagacaaggaggctgtacagcaatgcccaggaacctgcaaaagctgaatggctgcatctgagacctgcagacaacacactacattggccgttgtttggattattacaatttggacgctgaacggtagagctcgatgtagtcgagggcaggtcggttccacgaccagtcctgctccatgactctcttgcagaggcagtggaaccagctccgggcatcgaaccaagctgagatcgccctgttcagggcatagtcaacaccgttgctatcagctccgtcaaagctaaacccgttgggctcaaggcctcgatctcgggctcgttccttgtcattggccacatcgaagacagtgtcgaagagccctccagtcttgcggacaatcgggatggttccatcccgnatggcgaccagctgagtt

SEQ ID NO: 11304 - DNA, 363 bp, Zea mays
  Clone ID: LIB3061-121-Q6-N6-C6
agaaatgtactttcttatttctgggaagccacaaacatcatccaaaaaacttcattattgaactataactcataagcaatctaaaagagggcaccgccaatgatgggttgttggtagaacgttgttgggtttgtcaaagcaagttggttgaatggcagcaattgttgctgttgtaagagggtgccagcgttaggcgcagcgtgcaggttgaacggcaacaactgttgttgtgtcaagaaggctacagggctcacattagctagctggctgaatggtggtagctgttgctgttgtaggtaagcagctgagttgtttgctgccggttggttgaatggaagaaattgttgggggttggctgtgttt

SEQ ID NO: 11305 - DNA, 325 bp, Zea mays
  unsure (1)..(325): unsure at all n locations; Clone ID: LIB3061-121-Q6-N6-C7
gggtacacgtgttggtttgtgggtgccgtcggtgggttctgtgtgtttggtggggtttttttttttttttcnccgcgggtggggggggggggggggtcattatagggggggggggggggggggtggcttggggggggtggtgggggaggggggggtccgggggaaggggggggggggggcgcctgagggggggggggtgctcctggggggggggcgtgtaatctggctcgggcggtggggggggtgggtgggggcggtggggggggggggggggtgcccccggtgctggggtgggggggggcgggggggggggggggcggggcgg

SEQ ID NO: 11306 - DNA, 99 bp, Zea mays
  unsure (1)..(99): unsure at all n locations; Clone ID: LIB3061-121-Q6-N6-C8
atgggcnctccccgtgggggggggggggggggaggtttccggggggggtgttcccggtttaaggggcgggagatcacggggaaaggggggggctttttt

SEQ ID NO: 11307 - DNA, 241 bp, Zea mays
  Clone ID: LIB3061-121-Q6-N6-D1
taaaaagtacttttttatttttgggaagccacaaacttatccaaaaaattgattattgaagtataacttataagcaatctaaaagagggcaccaccaatgatgggttgttggtagaacgctgttgggtttgtgaaagcaagttggttgaatgggaggaattgttgcagttgtaagagggtgccagtgttaggtgcagtgtgcaggtagaaaggtaacaactgttgttgtgttaagaaggga

SEQ ID NO: 11308 - DNA, 308 bp, Zea mays
  Clone ID: LIB3061-121-Q6-N6-D10
gggggggggggggggggactttttttttgggggggggcccttcccttttccaaaaaactttttttttgggttcccccctttagtcaatttaaaagagaggggcccccccaagtttttttttttgtaggggggttttgggtttttcaaaacagggggggcaaaggggaaaaatttttttttttttaaaaggggggggggggtccccccaaacccttttttaaaaggcctcccggcccctggggtgcccccgggaatttcggccgggcccctggggggtcccaaattttcttttttggggtggttttaaa

SEQ ID NO: 11309 - DNA, 179 bp, Zea mays
  Clone ID: LIB3061-121-Q6-N6-D11
agccataacaaacatgttttgcttacaacaatctgctcatttttttcctggcaaatcacttcggtgtatcaaaaactttagagctatgtagttgaaagactaatcaacacgcagtttaaccatgagcaagctttgtttaattattacagtctacgagtacttattcaggcagatcactc

SEQ ID NO: 11310 - DNA, 456 bp, Zea mays
  Clone ID: LIB3061-121-Q6-N6-D12
gaacgaatagcctgaatccataaacaaatgttgggctgaacattgtcacacaagggatgggtccctgcgtggggatggccccattcaggcaaacagaattctggtcaaaccgatccatgttcccagggggcgtgcagcaaccctcatttacttacaaaagcccagagggcttgttacatcgacattttctcattttttttggggcaaggggggggataacccccaacaaaaaataatcacacattttgcctatcttataccacaccacatttggcaatgtccatctccggcagtttctaacagacattaacttgggcctcagctaatcatcgagtcgtcatccttttatccagagatcacccccctacgaaggcacattgtttccgtgcatgctcagggaccaatttcaccataaaatccgccggcccgtttttaaactcatgggggttaaaattg

SEQ ID NO: 11311 - DNA, 349 bp, Zea mays
  Clone ID: LIB3061-121-Q6-N6-D2
gcaaaaaacaaacagtgcttgtttgacaaataaaacaatcgttacatgtacaatttccttacagaaaatgtcaataaaatagtgaaaagaacatggtagacatgttaccctagccagaaacctagcaatcagaacatgcggggttaaacctacatttatcctaactaaaccaaaagtatgagagggttttgaaaacccagagccttcccgggaagcctttcatccaaagaattgtgaatgagcaggcatcaggttttgcaacaccaatgttgtgatttaccataggtgttgggccctgttttacagaagagagcatgtgagggaactttcatgggttatgtggacgcca

SEQ ID NO: 11312 - DNA, 399 bp, Zea mays
  unsure (1)..(399): unsure at all n locations; Clone ID: LIB3061-121-Q6-N6-D3
ccaatcatcttttttccttatatattattcctttccatttcaatggttcattcaggtcattgctcacactgccacccatggtgatgggtgacactacgttactcatcgccgctaaatgagtaaactagcgagctaggtagctagtcagcggctccattacattattactacagtacatagtttcctcagtagtagacaccgtcggcagctgcgttgcaagggcagggacctggctgctgcagntgcaggccgnacattgccgtcagctgctgcgctacctgggccgccatcagcgccgtgagctcgccctgcggttgcttctgcaggaaggactgcaggaccacaccgtatgtcggctggtaccggtgcaggggttccacctgcctgaactggtgggag

SEQ ID NO: 11313 - DNA, 123 bp, Zea mays
  Clone ID: LIB3061-121-Q6-N6-D4
ggtggggttcggggggggggggggttggggttggggggggggggggggggggttttttttaagggggggggggggtgagaaaagagaagggggggggttgggttgttgggggtttgggggggt

SEQ ID NO: 11314 - DNA, 428 bp, Zea mays
  Clone ID: LIB3061-121-Q6-N6-D5
gggaggaacagaggtttgttatttgccaacagattacacacatgattggcattccacacgcaaccgatcgatatgacgattatactcctatttattagcaccagctatatatatatagccatgtctggagtctggactagcaagcaaccgagatcgatgatacagagatagattcatcggtttgcatgagcatgacttgttggcagccactatgttacaccaccatccaccaacgcatgtacaaagttctgcatcatcatcgcatcgcctccgcctgatgatgatagatcagtgcagcgccgtcaggacagtagacccttccaccaccttgaaagtggcaccgcagatctcttcttcgtcggcggggacagcggggaccttgtgcttggggttctcgtagcacttgagccctccgagggcgttggagt

SEQ ID NO: 11315 - DNA, 263 bp, Zea mays
  Clone ID: LIB3061-121-Q6-N6-D6
ccataaaaaccgggaaagggaccttcttatttcgggggggccccttccctcacccaaaaaccttttttttgggtttccacctaatagccaatcaaaaagggggcccccccaatgatgtgttgttggtggggggccccccggcctgccaaagcaggtgggccaaagggcaccaattgttgtatttgaaaaagggtggcggggttacccccaacccgctggtaaaaaggcccacctgttgcttggtaaaaaagaaaccccggttt

SEQ ID NO: 11316 - DNA, 457 bp, Zea mays
  Clone ID: LIB3061-121-Q6-N6-D7
actccaccactacaggtccatttatttactcgcaatataaaattaccgatcggtacttaactacacacgcaagcaattagttcatgcgcttattaggttgtgccactggccaccactacactacattacactagcacaagcaagcagctacacatacttgtccatatcacataaacgaaacagcatatataagaagatgtcccaacatctttgcaccacgcgcgagatcaggggccctgcaggccgaactcttcagggcgcggccacgttctccttggcgagcggcgcgatctcctcgccttcgacccctggctcgccgccggcgaccccgaggctgagcagcacgttctcccagttcttggcagggcccttccaggagagatcctggatcatgcagttcctcaccatctcctcgtacgccggcgtgccgaccaccttgatggcgcgctgcaatgtg

SEQ ID NO: 11317 - DNA, 424 bp, Zea mays
  Clone ID: LIB3061-121-Q6-N6-D9
ttttttttttttttttttttttttttttttttttttttttttttttttttttttttttttttttttttttttttttttttttttttttttttttttgtttttttttttttttttgttttttttttttttggggaagggaaccctttttttgggggggggcccttcctttggcgcaaaaaaatttttttttggtttccccggcaatggcccgtttaaaaaaggggccccccaaataatttttttgggcaaaagggtcgggggttattaaaaatagggtggtaaaagggggcaaacttggtttttttaaaaaagggtgggggtttacccaaaaaaggggtgtgaaaagaagataatttttgttttttaaaaaaagaagggggggtgtggtctccttgctggccaaaaggtaaatattatgggctgg

SEQ ID NO: 11318 - DNA, 257 bp, Zea mays
  Clone ID: LIB3061-121-Q6-N6-E1
gggggggggggggttttttataaaatttttttttttttttttttttttttttttttttttttttttttttttttttttatgttttatttttaaaggggaggaaaaaagaaggggggggggttgggggggggaaaagggggtaggaggggaggggggggggggggagaaaaaggaggggggggggaggggtaaaagaaaaaaggggggggggggggtgaaagggggaggaggggagaaggggagaaaaggggaggggg

SEQ ID NO: 11319 - DNA, 413 bp, Zea mays
  Clone ID: LIB3061-121-Q6-N6-E12
ggggcccggaaaaaggaattttgtgggggggggggggcccctccctttggcgaaaaaagctttttttgggattcaacccaaaaaagcacccaaaagaggggggcccccaaaaaattttttttgggggggggggcctggggttttaaaaaacgggggggaaaaagggaaaaaatggtggttttttaaaaggggggggggggttcccccaaaacggggggggaaaggggaaaaatttttttttggtaaaaaaaaaaacacgttttgcccccacccccgggcaaaagggggaaaattttggggggggaaaaaaaccgggggggggccgggggggcaaattggtaaaaaaaaaaaaatttgtgtttttgaaagttgcccctccttcggggcgcgaaagggaaaaggttgcggcaaaa

SEQ ID NO: 11320 - DNA, 269 bp, Zea mays
  unsure (1)..(269): unsure at all n locations; Clone ID: LIB3061-121-Q6-N6-E2
ttttgtgttgtttttttttaattatttttttttttttttttttttttttttttttttttttttttttttttttttttttttttttttttttttttttttttaagaaaaaaaaatttttttattaaaaaatttttaaattttgggggggggggggggggggggaaaaattgagggggggggggggggnaaaaaaaaaaaaaaaaaccaagcgtttttttaaaagaaaagggggatttttaaaaaaaggtaaagattgggggagggtattt

SEQ ID NO: 11321 - DNA, 182 bp, Zea mays
  Clone ID: LIB3061-121-Q6-N6-E3
ggggggaccaaatggccccttgaatgtggaaaattaagtttttttttttggggggggggattcttttggccaaaaaacgggtttttggaattaaaactaataaggaaataaaaagaggggaccgccaaagtagttttttgggtagaaggctgatgggtttggtaaaggagggggggcaaggg

SEQ ID NO: 11322 - DNA, 487 bp, Zea mays
  Clone ID: LIB3061-121-Q6-N6-E4
catttttgttttattatgcgacgacatttgctggcgttggatataacgtaagatcaggcaacaaactggtcggctacattacattcctcgtgaggggtcatgcatactaaaaaaaactgtcggctatttaggttgggttgcctgaatagtttgtgcagctcactcgaaaaatgcacaaagtacaccgccacgaggcctgaggaatccatggttgcagggggggcgactctagatggcccgactgggctgtgaggactaaaacgactgcttggctaaggaaaaacacacacactgaccgatggtgggagttgtggtttgataagaaacaccttatcttatctaatctttgccacttactaatccacctctgtatctgacctagtagtggtggcctacgagttggggatgtctcacaaactagtccgagtgctgtgactactagattgcttgggagagctggcctcctcattatgatactgatgcagct

SEQ ID NO: 11323 - DNA, 479 bp, Zea mays
  Clone ID: LIB3061-121-Q6-N6-E5
ggaaatgtaacttcttatttctggttggccacatacatcatccaaaaaactttattattgaattacaactaataagcaatctaaaagagggcaccaccaatgatgtgttgttggtaggaggccgctgggtctgtcaaagcaagttggacaaagggcaacaattgttgtagttgtaagagggttgcggggttagccgcaaactgctggtagaaaggcagcaactgttgctgtgtcaagaaggaagcacggtttgctgcagctagctggctaaatggtagtagtatttgctgctgcaaataagcagcggggttcagtgcggccaattggttaaatggaagaagttgttgttgctgagagtaggcagtagctagctggctaaatggtaatagttgttgctgcaaataagcagcagggttcagtgtaaacagttggttgaatggaaaaaattgttgttgctgagagtagggaaaaaggtttgc

SEQ ID NO: 11324 - DNA, 417 bp, Zea mays
  Clone ID: LIB3061-121-Q6-N6-E7
atagagcctcaagaaataaagtagtttaaaatttactggctacattttagaccatataaggaacaccgcgtacgccgggtgtatttatttgtatacgaacatagtaattaagtgcagcagcagatcatgatgtgtcgttgcattgatcaggcctcgtcgtcgtcgttgtcagcactggcagcagtagcggcagcggcagtagtttgattcttaacgagcgcaacgatcctcgctgcttcgttcttatccttgatgccaagcttctgcatgtcggggatcacagcggtggggtggtcagcccactcgaaggccgccttggagatcctgtcccacttctgcacctgcttcccctgcgtcacggtcaaggtcaccccgtgctggctgttgaaccccgcgtccaccgtgcgggacacggtg

SEQ ID NO: 11325 - DNA, 438 bp, Zea mays
  unsure (1)..(438): unsure at all n locations; Clone ID: LIB3061-121-Q6-N6-E8
ggtaatataaaagcacatataatatcaacaggttcacaaaacatatgcgtcacacgtttccaggcatgcctaacatagcacattaatcaaggctatagggtcccacctaacaaagtacacatttttggagattataccatcctcgtcatgtttgtgtgtgttaatgctcaattaaccgagtngcacaccacaacgatgatttatacttcattactggtgatcttagagcaaaataactttcaaccacatttggggactagaagcacataagaatctagaaatgttctttcttatttctgggaagcccaaacatcagacaaaaaactttattattgaactattactcataagaaatctaaaagagggcccaccaatgatggggtggtggtagaatgctgctgggtttgtcaaaacaagttggttgaatggcagcaattg

SEQ ID NO: 11326 - DNA, 559 bp, Zea mays
  Clone ID: LIB3061-121-Q6-N6-F10
aagaatctagaaatgtactttcttatttctgggaagccacaaacatcagacaaaaaactttattattgaactataactcataagaaatctaaaagagggcaccaccaatgatgggttgttggtagaatgctgctgggtttgtcaaagcaagttggttgaatggcagcaattgttgcagttgtaagagggtgccagcgttaggcgcagcgtgctggtagaacggcaacaactgtggttgtgtcaagaaggtagcagggctcacaccagctagctggctgaatggtagtagttgttgctgctgtaaataagcaggagagttcaatgctgtcagttggttgaatggaagaaattgctgggggtaggcagcagatagctggctgaatggtagttgttgttgttgcaaataagaagcagagttcaatgcagctagttggttgaatggaagaaactgctgttgctgagagtaggcagcaaggtttgctagcacaagttgttgtagttgttgggccctgatgttttgtgccaataaatgcaccaaaggtaactgctgtaatagggc

SEQ ID NO: 11327 - DNA, 448 bp, Zea mays
  Clone ID: LIB3061-121-Q6-N6-F11
tttttggggtttttttttttttttttttttttttttttttttttttttttttttttttcacataaaaagggcacacaggggatatttcaaacacacacccccccccccgggggggccccccacaaattttcccaaaaaaccccccgtgaggggcaaaactcgctatcaaccccgcgcccccccccgtggccccccccgaaaatcccccccccccccccgggggccccccatttccccctataggggggccttaaaaaccggggcgtaaacggggaaaaagcttccccctgggaaaaattattcccccacaaaaccccacaaaaaaaaaccccggggcacaaaaagaaaaaaccgggggccccccaaaggagcgctcccacaccaaaaaaaaggcgggccccacccccccctttccccgggggaaaaaaccttgtccccccccccttat

SEQ ID NO: 11328 - DNA, 423 bp, Zea mays
  Clone ID: LIB3061-121-Q6-N6-F6
tttttgtgtttttttttttttttttttttttttttttttttttttttttttttttttttttttttgggagggatccctggggcctgaattaacatgaaacatccagataaatataccttttggcgaatcatccaccttttttggttttgggagctaagggcgcaattcgttcatgccacggtttttttttggttcacaggccagaccaaaacaaccctgggcaagaccccttacctcaatctcaatggtccaaaccctaaaacgaaatcgcttgggaaaatatgctggtgccttaactcatcccccttccggacaaacagaaaattttgttcggtcttttgaccgaggacaaccccacccccaattttgccgcaacatccgcagaattatggggccctggccatgtccatttgcccaccgggg

SEQ ID NO: 11329 - DNA, 396 bp, Zea mays
  Clone ID: LIB3061-121-Q6-N6-F7
ggaaatgtaacttcttatttctaggaggccacatacatcagccaaaaaacttcattattgaattacaactaataagcaatctaaaagatggcaccgccaatgatgtgttgttggtagaaggctgctgggtttgtcaaagcaagttggacaaagggcagcaactgttgcagttgtaagagggttgcggggttagccacaaactgctggtagaacggaagcaattgttgttgtttcaaaaaggaagtggggcttgttgtagctagctggccaaatggtagtagtatttgctgctggaaataagcagaggggttcagtgcggccaattggttaaatggaagaaattgttgcttgttgagagtggcagtagctagctggctgaatggtagtagttgttgt

SEQ ID NO: 11330 - DNA, 318 bp, Zea mays
  Clone ID: LIB3061-121-Q6-N6-G1
tttttgtttttttttttttttttttttttaaaaatctaaaaatgtactttcttatttttgggaagccacaaacatcatccaaaaaacttcattattgaagtataactcataagcaatctaaaagagggcaccaccaatgatgggttggggggggaacgcttttgggtttgtgaaagcagggtggttgaatggaaaaaattgttgcagttgtaagagggtgccagggttaggggcagtgtgcaggtagaacgggaacaactgttgttgtgttaagaagggaaaagggttaaaataaattagctgggatgaatggtggta

SEQ ID NO: 11331 - DNA, 440 bp, Zea mays
  Clone ID: LIB3061-121-Q6-N6-G10
gacaagaaacagaataccttgaatgtcccaacacacatcctcaaatcaaatgtggcgaacctctcgcttagttcactcccccctaccgactttaacagcaggtgaacagggtcaatcacacaaatgtttgatcactggcaaagctaagccgagggatctggggctccctcaggtttgtctgtctccatctgctcggctcgaggctcctctgcgggtccctcgctggctgtgctttcgccacctgattgctgctgctctggtgtctgaggctcaagagcttggttttttgccacaggcggagtctgcggcttaggagctggcttcggtttcgtcatgatcggcttgcaaaacctatcaagtgtttcagctttcttcttaagggcagcagcaaggagtaccgaattagcatgctttggcagagcatcctgctgctgtttttt

SEQ ID NO: 11332 - DNA, 103 bp, Zea mays
  Clone ID: LIB3061-121-Q6-N6-G12
ctgacaacagcacaccgcacatgacacatctcttatatatcgagtcacctcttaaacctcatcgtgtatgtttgatacagaatgcatatcttgggcaaaactc

SEQ ID NO: 11333 - DNA, 381 bp, Zea mays
  unsure (1)..(381): unsure at all n locations; Clone ID: LIB3061-121-Q6-N6-G2
tttttgtttttacggctaaacatttaaatgatgaagacttgggtatacaagagcacaaaaaacccaaaccagcacaaactttaaccagttcatagcaggtataccagatcaacatcgacactagtaaaagggcaaactcttgcatgggcgagttcaagggctaaacaggtgtgggtccaggcaagcacactcacttgaagcatttngcgttaagcaaggcctcgccctaaaagggctcctggtcctcaatcatcgaattgacacgctccttttgggccttatgagagatgtccaccttggtccactcgtagagcttcatgttatagacctggtgcattacaaacttgggaacattctggccacggaagagacaaaggccct

SEQ ID NO: 11334 - DNA, 305 bp, Zea mays
  Clone ID: LIB3061-121-Q6-N6-G3
ttgtgggggtggtgtgaacaaacaatgggaaaacaaacagtggcacgagctttaacgcagaagtctacaatttagaaaccacgggtaaaccacgaacatattagagggttatgttgtgctactgataatttgactttagtttgcagtggaggggggtggcaaagggaaactgtggcccacatgtggtggtcccccagttacacgtaactgtgtatcagaggctttcttatgttcttgagaatcggaggggggtggccttttttgaggttgaagacgctttcgatgactgagagctcggtgggctg

SEQ ID NO: 11335 - DNA, 422 bp, Zea mays
  unsure (1)..(422): unsure at all n locations; Clone ID: LIB3061-121-Q6-N6-G4
gggggggtggggttgggccatccatccatgcataaaataaaaaacgggctaagagacaaattctatgcacctactcctccgcgggctttacaccatgggaggataaccagccccaactccaaagaagtccatncccctgaggggggggggggttgatactttggggggggggacgagacatataatatttgctcggaacgaactggggcacgggacccctcctttcttgcttatcaccagcaaccaagcgggccatttgagcttgcatgcgggttcttttgagctggcgttgttactggggttgcgtttttggcctttggggttncggtgtacagggaaaaaccatgttaggtttaccactcgcgagcatggtcgtgtggactggttatttttcgggggggggattagggtcgtttacgggt

SEQ ID NO: 11336 - DNA, 276 bp, Zea mays
  Clone ID: LIB3061-121-Q6-N6-G5
ggggggggggggtttttttttttttttttttttctttttttttttattttttttttttttttttttttttttttttttttttttttttttttttttttgggtttttaattcccagggggttttttttttaaattttattttacagggggggggggggggggtcctttgggggggggcgggcgggtttagaaaaaaagggtagggagccccatttttttattgggaacccccccttttggttttgggggggtggggggtttttttgggggtgtgggg

SEQ ID NO: 11337 - DNA, 477 bp, Zea mays
  Clone ID: LIB3061-121-Q6-N6-G6
tttttgtggtttttagaaatgtactttcttatttctgggacgccacaaacatcatccaaaaaacttcattattgaactataactcataagcaatctaaaagagggcaccaccaatgatgggttgttggtagaacactgttgggtttgtgaaagcaagttggttgaatggcagcaattggtgcagttgtaagagggtgccagcgttaggcatagcgtgcaggtagaacggcaacaactgttgttgtgtcaagaaggcagcagggctcacatcagctagctggctgaatggtagtagttgttgctgctgtaaataagcagcagagttcaatgctgctagttggttgaatggaagaaattgctgggggtaggcagcaactagcttgctgaatgggaattgttggtgcaaataagccgcagaggtcaatgcagcctgttgggtgaatggaaggaactgatgttgcttgagatttgccaaca

SEQ ID NO: 11338 - DNA, 402 bp, Zea mays
  Clone ID: LIB3061-121-Q6-N6-G7
cgagataaatctcaatcaatatattgattatttctaggaaacacacgtcggtttgagggcaccattatcgagtacatctcatatgtaatctaaaagatggcacctccaacgatgggttgctgcctgggcaggacaggattcatcaaagagaacgggttgtgtggcagcaattgttgctgctgtaggaaggcggcgaccaatgggttagccactaccaatggattaagtaactgttgtcgctgttgtaggtccccagcagagttcgacagagtcagttggttgaatggaagcagctgttgcaagtaggcaacagggtttgccacagctagttgagtcagagctggtacaatctgttgcaacaattgttgttgcaggtttgtaggtgcattgcccacagcgagc

SEQ ID NO: 11339 - DNA, 458 bp, Zea mays
  Clone ID: LIB3061-121-Q6-N6-G8
actccaccactacaggtccatttatttactcgcaatataaaattaccgatcggtacttaactacacacgcaagcaattagttcatgcgcttattaggttgtgccactggccaccactacactacattacactagcacaagcaagcagctacacatacttgtccatatcacataaacgaaacagcatatataagaagatgtcccaacatctttgcaccacgcgcgagatcaggggccctgcaggccgaactcttcagggcgcggccacgttctccttggcgagcggggcgatctcctcgccttcgacccctggctcgccgccggcgaccccgaggctgagcagcacgttctcccagttcttggcagggcccttccaggagagatcctggatcatgcagttccttaccatctccttgtacgccggcgtgccgaccaccttgatggcgcgctggaatgtgg

SEQ ID NO: 11340 - DNA, 416 bp, Zea mays
  Clone ID: LIB3061-121-Q6-N6-G9
atcgagataaatctcaatcaatatattgattatttctaggaaacacatgccgctatgagggcaccattatcgagtacatctcatatgtaatctaaaagatggcacctccaacgatgggttgctgccacaacaaggcagggttcatcaaagagaactggttgtatggcagcaattgttgctgctgtaggaaggcagcgaccaatgggttagccaccgctagtggattaagtaactgttgtcgctgttgtaggtacgcagcagagttcgacacagtcagttggttgaatggaagcagctgttgcaagtaggcagcagggtttgccacagctagctgagtcagagctggtacaatctgttgcagcaactgttgttgcaggtatgtaggtgcattaaccacaacgagagggctagatgaa

SEQ ID NO: 11341 - DNA, 240 bp, Zea mays
  unsure (1)..(240): unsure at all n locations; Clone ID: LIB3061-121-Q6-N6-H1
agaaatgtactttcttatttctgggacgccacaaacatcatccaaaaaactnattattgaactataactcataagcaatctaaaagagggcaccaccaatgatgggttgttggtagaacactgttgggtttgtgaaaggaggttggttgaatggtaggaattgtgtgagttgtaagagggtggtagggttaggcatagtgtgcaggtggtaagggaacaattgttgttgtgttaagaagg

SEQ ID NO: 11342 - DNA, 458 bp, Zea mays
  Clone ID: LIB3061-121-Q6-N6-H10
atcgagataaatctcaaccaatatattgattatttctaggaaacacatgccggtatgagggcaccattatcgattacatctcatatgtaatctaaaagatggcacctccaacgatgggttgctgccacgacaaggcagggttcatcaaagagaactggctgtatggtagcaattgttgctgctgtaggaaggcagtgaccaatgggttaggcactgctagtggattaagtaactgttgtcgctgttgtaggtacccagcagagttcgacacagtcagttggttgaatggaagcagctgttgcaagtaggcagcagggtttgccacagctagctgagtcagagctggtacaatctgttgcagcaattgttgttgcaggtatgtaggtgccttacccacaacgagagggctagatgaaagccattgttgctgttgtaggtaggcggctgggttcaccatg

SEQ ID NO: 11343 - DNA, 525 bp, Zea mays
  Clone ID: LIB3061-121-Q6-N6-H11
atcaagtagctacgaccgtttcaattcacattccacaaagaaatggtgcaaccagtacatgattcaaaacaactgaaataatccaagtctagcaatttcttgtaatacagtgaagcagccaacaaagaagatacaaaagagaccagagtagcggcaacattaagtattcatcgtttcaacatgaaacccttaatcaattccttcatcacaagagtatcgggtgtctttagccatagttcaggcggaacatgtcattctgcacgaagaaggacccagcggccggcagcaaatggaatgcctgggagaacttgatggggtgctcctcggggccggtgcgtatggaaccggagacgaagacgagcatgcctccctggggacccgatggctggcagtctacggtgacgatctgatgctcgcaggcctggaaagggagagatccgagcttgccggcaatggcggaggggccctggaacttctggccctcgaaggtgagcatggaggttttctggtacagcccaaccagcg

SEQ ID NO: 11344 - DNA, 590 bp, Zea mays
  Clone ID: LIB3061-121-Q6-N6-H12
ttccctcgtcgctgcccctgtccctgctgctgctcctcctcctgtgctgctccggcacctcgtggggatggagcacgtcccggggaggagccgccagggagtgcggcttcgatggcaagctggaggccctggagccgcgccacaaggtgcagtctgaggccggctccgtccagtacttcagccggttcaacgaagccgaccgggagctcacctgcgccggcatcttcgccgtccgcgtcgtcgtcgacgccatgggcctcctgctccctcgatactccaacgtccattcgcttgtctacatcgtccaagggagagggatcattgggttctcgtttccgggatgccaagaggagacccagcagcagcagtatggatacggatatggatatggacaccatcaccatcagcatgaccaccacaagatccaccgattcgagcagggcgacgtggtggccatgccggccggcgcccagcactggctgtacaacgacggcgacgcgccgcttgtggcggtctacgtcttcgacgagaacaacaacatcaaccagctcgagcctttcatgaagaaattcttgctggctgggggcttc

SEQ ID NO: 11345 - DNA, 201 bp, Zea mays
  Clone ID: LIB3061-121-Q6-N6-H2
ttggggtgtgggagccataacaaacatgttttgcttacaacaatttgctcattttttttctggcaaatcactcggtgtattaaaactttagagctatgtagttgaaagactaatgaacagggagtttaaccatgagtaagctttgggggggggttagagtttaggagtacttatttgggtaggttattttttaggttgtgt

SEQ ID NO: 11346 - DNA, 320 bp, Zea mays
  Clone ID: LIB3061-121-Q6-N6-H3
ggggtgggttgttgggttttttttttttttgttgttgttttttttttttttttttttttttttgttggtgtgtttgtgtgggggatgggttttgggggtttggggggggggtgggggggggggtttggggggaggtgtttgtgtagggggggggggggggggggggggtggggggggggggggggggggggggttgggggtgggggtggggaggggggggaaaggggggggggggggggggggggggggggtggggtggggaggggagggggtggaaggggggagagtgggagggggggagaggggtggggggggggggg

SEQ ID NO: 11347 - DNA, 219 bp, Zea mays
  unsure (1)..(219): unsure at all n locations; Clone ID: LIB3061-121-Q6-N6-H4
tggggtgggtttaagagaagcgttttttttattcctgtttaatgcaatgtaataacaagtcttatgtacagttgcaggctacaggcctactcccactgaaaagaatcggcaccgaaccatcacgactctgccaccgncagcgccgcgggcggcaggttttgcccggcatccagttgttttgacaccgtgttctggtcgatgaagttgaacagggcgagc

SEQ ID NO: 11348 - DNA, 441 bp, Zea mays
  Clone ID: LIB3061-121-Q6-N6-H6
gaaatatattgagataaatctcaatcaatatattgattatttctaggaaacacatgccggaatgagggcaccattatcgagtacatctcatatgtaatctaaaagaggcacctccaacgatgggttgctgcctcgacaagacagggtttatcaaagagaactggttgtatggcagcaattgttgctgctgtaggaaggcagcgaccaatgggttagccactgctagtggattaagtaactgttgtcgctgttgtaggtacgcagcagagttcgacatagtcagttggttgaatggaagcagctgttgcaagtaggcagcagggtttgccacaactagctgagtcagagctggtacaatctgttgcaacaattgttgttgcaggtatgtaggtgcattggccacagcgagcgggctagatgaaaagcattgttgctgttgta

SEQ ID NO: 11349 - DNA, 446 bp, Zea mays
  Clone ID: LIB3061-121-Q6-N6-H7
ctggaaatgtaacttcttatttctggttggccacatacatcatccaaaaaactttattattgaattacaactaataagcaatctaaaagagggcaccaccaatgatgtgttgttggtaggaggctgctgggtttgtcaaagcaagttggacaaagggcaacaattgttgtagttgtaagagggttgcggggttagccgcaaactgctggtagaaaggcagcaactgttgctgtgtcaagaaggaagcacggcttgctgcagctagctggctaaatggtagtaatatttgctgctgcaaataagcagcgaggttcagtgcggccaattggttaaatggaagaagttgttgttgatgagagtaggcagtagctagctggctgaatggtaatagttgttgctgcaaataagcagcagggttcactgtaaatagttggttgaatggaaaa

SEQ ID NO: 11350 - DNA, 472 bp, Zea mays
  Clone ID: LIB3061-121-Q6-N6-H8
acggttggactaaaacaaatatgatttaacattatcagttactcattacatatagactgatatctagtatggtatctgattacggttggactaaaacaaatatgatttaacattatcagttacccattacattacaaatatatgaaccaaacggcactttgtttcttcgttcgagcgggcgacgacggtatgcaagtatgtttggtgagatgaggtgtcagcatagatgtccaccaaggtgtcaaaccacgatgagaagcgaacagaagcagagccaggagtgaagacaggcgatgtttcagccaacggcacacttcggattattagctcccttcttccattcctttacaaataactcaacgatgctctatgtggcaaacaaagggattaaggttctacaaggtctgtatcctctggatctgcgactcagcttgcgcgtcgctagctgaactatcaacagtgtgctcgatga

SEQ ID NO: 11351 - DNA, 511 bp, Zea mays
  Clone ID: LIB3061-121-Q6-N6-H9
atcgagataaatctcaatcaatatattgattatttctaggaaacacatgtcggtatgagggcaccattgtcgagtacatctcatatgtaatctaaaagatggcacctccaacgatgggttgctgcaaggcagggttcatcaaagagaactggttgtatggcagcaattgttgttgctgctgcaggaaggtagcgaccaatgggttagccactgccaatggattaagtaactgttgtcgctgttgtaggtacgcagcagagtttgacacagccagttggttgaatggaagcaactgttgtaagtaggcagcagggtttgccacagctagctgagtcagagctggtacaatttgttgcagcaactgttgttgtaggtacgtaggtgcattgcccaccgcgagcgggctagatgaaagtagttgtaggtagacggcagggttcaccatggctagttgactgagcactggcataaactgttgcagctgttgttggtgctggtatgcaactacgtt

SEQ ID NO: 11352 - DNA, 629 bp, Zea mays
  unsure (1)..(629): unsure at all n locations; Clone ID: LIB3061-083-01-K6-A1
ggngaaacgaattgtgggtggcataggggatggttctatacaggtctggaccataaaagctggatggggtagcagaccagatatccacgttgagaaaacacacacagaggatattactggggttaagttctcaacagatggacagagtcttctgtcaagaagtatggatagtactcttaagatatgggatttgagaagaatgaaaactcctttgaaagtatttgaagatctgccaaatcactacgctgagacaaatgcagcatttagctcagatgagcagcttatttttacaggaacatctattgaaaaagatggtgacaatgggggattactttgtttctttgatagaaagaaacttgagcttgtatcaagggtgggaatttcagcacattacagtgtgataaggtgcctctggcatccaagaatcaaccaggtgtttgcaacagttggagacaagaaagaaggtgggactcatatcctgtacgatccttctattagtcaaaggggagctcttgtatgtgttggacgagcaccaaggaaaaagtctgttgatgattntgaggtgcaacctgtcatacacaatccacatgcattgccacttttcagagatcaaccaagtcgtaagcgtc

SEQ ID NO: 11353 - DNA, 667 bp, Zea mays
  unsure (1)..(667): unsure at all n locations; Clone ID: LIB3061-083-01-K6-A10
ctccaccccgcggcgccccaaccccttccaccgacgggagacaccaaaatggcaaccatgagatggcagaagagccagaattaccaggtcatcaggatgcacctggtgaggctgctaaagaggatggtagccccactgaggaggccgaagaggttgaagatgatggtgagcttccagccatgaagttcagaaactaccttccccatgatgaacaacttcgaggaggcaagctggctccagtgtctcttcccaagtttgaagacccaattagtgccgaaactgcagagccaaaggaagtggagaacctttttggaaacatagcaccaaagaatccaaattgggatctgaaacgtgatgtgcagaagagaattgataaactggaaaggcgcacgcagaaagcgttggctgagattgcattggaacagcagagggagaaggaagccttggaggaatctcaagattgaccgacctgtataagtgaccagtgactcatgctggttggtccctcgagcagacgtcattatcttatttagataatgtaatgtactttgggatgctctgtgtatctaccatcttgggatgtactgaattgagtttgggacgtgtatctacctaccatcttgtattgtcagctcaaggatgtagcanactagtagcaacttcaaaa

SEQ ID NO: 11354 - DNA, 634 bp, Zea mays
  unsure (1)..(634): unsure at all n locations; Clone ID: LIB3061-083-01-K6-A2
gccgcacgcctctccgccccgctccgctccagattgcgcgcacccacccatggcgctcgccgcttcccaccacggcttcctgcccttcgcccccgctgccacgcctaccccgtcacgggggcacctgcgcttccgcgccgcgcgccctctgccccgccccgcccggagaatttgttgccaatctatcaactcagctaatgtgttgggagcttcttcaacgacatctgatgaggcagtcccagtcccagttgtccagatagatcaggactcagaccgtgatgcgaccattgtgcagctaagttttggagatcgtttgggggcgctacttgacacgatgaaagcactcaaggaccttggccttgatgtcacaaaaggaagtgtgacaactgactcagctgtcacacaaacaaagttccacatcatgcgatttgggcgcaaggttgaggaccctgacatgttagaaaggattcggctaaccatcatcaacaaccttctccagtaccatcctgaatcaagtgagaagttagccatgggtgaattttttgggataaaacctcctgagaagaggtagatgttgatattgcaacacatatagttgttgaagatgacggaccaaaaagagcatactntacat

SEQ ID NO: 11355 - DNA, 684 bp, Zea mays
  unsure (1)..(684): unsure at all n locations; Clone ID: LIB3061-083-01-K6-A3
gaccaactagcaacatagnaaagcacaatagtgtaccaacaatggcagccaaaaattttgcctccttatgctccttggtctttctgcaagtgctgctacggcgaccattttcccgcaatgctcgcaagctcctatagcttcccttcttcccccgtacctctcaccagcggtgtcttcggtatgtgaaaacccaattcttcaaccctacaggatccaacaggcaatcgcagctggcatcttacctttatcacccttgttcctccaacaatcatcagccctattacaacagttacctttggtgcatttattggcacaaaacatcagggcacaacaactacaacaacttgtgctagcaaaccttgctgcctactctcagcaacagcagtttcttccattcaaccaactaggttcattgaactctgcttcttatttgcaacaacaacaactaccattcagccagctacctgctgcctacccccagcaatttcttccattcaaccaactagcagcattgaactctcctgcttatttacagcagcaacaactactaccattcagccagctagctggtgtgagccctgctaccttcttgacacaaccacagttgttgccgttctaccagcacgttgcgcctaaacgctgcaccctcttacactgcaacattgctgccattaaccaacttgc

SEQ ID NO: 11356 - DNA, 649 bp, Zea mays
  Clone ID: LIB3061-083-01-K6-A4
atcttacattgggcttcttccgtcgccggcccacaccggagctcccagcggaggtgtatccgctgccgtggaagagtccctgtgctccctgtcaggctgggtgctgacagtacggcggcatgggcctcggctacatgtaccactgcatcgccatggaggagatcaccagggcctccggcgccgtcggcctctcctacggcgcgcactccaacctctgcatcaaccagctcgtccggcacggcagtcccgagcagaggctcaagtatctgcccaagtggggagcatatcggggcactggcaatgagtgaacccaactctggctctgatgttgtcagtatgaagtgcaaagctgagaaagtggacggcggctatgtccttaatgggaataagatgtggtgcaccaatgggccgtctgctcagacgctggttgtttatgcaaaaacagatctaactgcgggatcaaaaggaataactgcattcataatcgagaaagggatgcccgggttcagtactgctcagaaattggacaaacttggcatgagaggaagcgacacatgtgaacttgtttttgagaactgctttgtgccacgcgagaatgtcctcggtgaagaagcaaaggtgtttatgtcatgatgtcagggcttgatct

SEQ ID NO: 11357 - DNA, 435 bp, Zea mays
  Clone ID: LIB3061-083-01-K6-A5
actggctgcattgaactctgctgcttatttgcaacaacaattaccattcagccagctagttgctgcctacccccagcaatttcttccattcaaccaactagcagcattgaactctgctgcttatttacagcagcaacaactactaccattcagccagctagctgatgtgagccctgctgccttcttgacacaacaacagttgttgccgttctacctgcacgctatgcctaacgctggcaccctcttacaactgcaacaattgctgccattcaaccaacttgctttgacaaactcaacagtgttctaccaacaacccatcattggtggtgccctcttttagattgcttatgagttatagttcaataatgaagttttttggatgatgtttgtggcgtcccagaaataagaaagtacatttctagattcttatgtgct

SEQ ID NO: 11358 - DNA, 682 bp, Zea mays
  unsure (1)..(682): unsure at all n locations; Clone ID: LIB3061-083-01-K6-A7
nccgtccgattgagaaccaactagcaacatagnaaagcacaatagtgtaccaacaatggcagccaaaatattttgcctccttatgctccttggtctttctgcaagtgctgctacggcgaccattttcccacaatgctcacaagctcctatagcttcccttcttcccccgtacctctcaccagcggtgtcttcggtatgtgaaaacccaattcttcaaccctataggatccaacaggcaatcgcagctggcatcttacctttatcacccttgttcctccaacaatcatcagccctattacagcagttacctttggtgcatttattggcacaaaacatcagggcacaacaactacaacaacttgtgctagcaaaccttgctgcctactctcagcaacaacagtttcttccattcaaccaactagctgcattgaactctgcttcttatttgcaacaacaacaactaccattcagccagctatctgctgcctacccccagcaatttcttccattcaaccaactgacagctttgaactctcctgcttatttacagcagcaacaactactaccattcagccagctagctggtgtgagccctgctaccttcttgacacaaccacaattgttgccgttctaccagcacgctgcgcctaacgctggcaccctcttacactgcaacattgct

SEQ ID NO: 11359 - DNA, 653 bp, Zea mays
  Clone ID: LIB3061-083-01-K6-A9
tattattgataccaactagcaacatacatagtgaagtacactagcaacatcttagcaccaatgggagccaagatttttgccctccttgccctccttgctctttcagcaagcgctgctacctcgacttttattccacaatgctcacaacaatacctctctccggtgacagccgcgggatttcaatacccaactatacaatcctacatggtacaagaggccatccaagcaagcatcttacggtcattagcattaaccctccaacaaccatatgctctattgcaacagccatccttagtgcatctgtatctccaaagaatcgcggcacaacaactacaacaacagttgctaccaacaatcaatcaagtagttgcagcgaaccttgctgcttacctccagcaacaacagtttcttccattcaatcaactagctggggtgaaccctgctatctacttgcaggcacaacagctactaccatttaaccaacttgtcgggagcccttatgccttcttactgcaacaacagcttctgccattccatctgcaagctgtggcaaacattgttgctttcttgagacacaacatttgttgccattttacccacaagttgtgggaaacattaatgccttcttgcacagcaacattgctaccattcta

SEQ ID NO: 11360 - DNA, 661 bp, Zea mays
  unsure (1)..(661): unsure at all n locations; Clone ID: LIB3061-083-01-K6-B1
gttcggcaagnacggcgacacccacctcctcggcgacaaccccagtggctcggcttcggcggcaggtaccaggacctcatcggcaacaagggtctggagaccgtcaccatggngccgcgcctgaaatgaccagggccgtcaacgacctggcgaagaagaagaagatggcgacactggaggaggaggaggtgcagatgcagatgcagatgccggaggccgctgatctggcggcggcggcagcggctgacccacaggccgacacgaagagcaagctggtgaagctggtggtcatggtgtgcgaggggctgcggttcaacaccgtgtcccgcacggtggacgcggggttcaacagccagcacggggtgaccttgaccgtgacgcaggggaagcaggtgcagaagtgggacaggatctccaaggcggccttcgagtgggctgaccaccccaccgctgtgatccccgacatgcagaagcttggcatcaaggataagaacgaagcagcgaggatcgttgcgctcgttaagaatcaaactactgccgctgccgctactgctgccagtgctgacaacgacgacgacgaggcctgatcaatgcaacgacacatcatgatctgctgctgcacttaattactatgttcgtatacaaataaatacacccggcg

SEQ ID NO: 11361 - DNA, 665 bp, Zea mays
  unsure (1)..(665): unsure at all n locations; Clone ID: LIB3061-083-01-K6-B10
ctccgcatagnaaagcacaatagtgtaccaacaatggcagccaaaaattttgcctccttatgctccttggtctttctgcaagtgctgctacggcgaccattttcccgcaatgctcgcaagctcctatagcttcccttcttcccccgtacctctcaccagcggtgtcttcggtatgtgaaaacccaattcttcaaccctacaggatccaacaggcaatcacagctggcatcttacctttatcacccttgttcctccaacaatcatcagccctattacatcagttacctttggtgcatttattggcacaaaacatcagggcacaacaactacaacaacttgtgctagcaaaccttgctgcctactctcagcaacagcagtttcttccattcaaccaactagctgcattgaactctgcttcttatttgcaacaacaacaactaccattcagccagctacctgctgcctacccccagcaatttcttccattcaaccaactggcagcattgaactctcctgcttatttacagcagcaacaactactaccattcagccagctagctggtgtgagccctgctaccttcttgatacaaccacagttgttgccgttctaccagcacgctgcgcctaacgctggcaccctcttacactgcaacattgctgccatc

SEQ ID NO: 11362 - DNA, 93 bp, Zea mays
  Clone ID: LIB3061-083-01-K6-B11
cataagcaatctaaaagaggcaccgccaatgatgaagttttttggatgatgtttgtggcttcccagaaataagaaagtcatttctagattctt

SEQ ID NO: 11363 - DNA, 681 bp, Zea mays
  Clone ID: LIB3061-083-01-K6-B12
ctccgcatagaaaagcacaatagtgtaccaacaatggcagccaaaatattttgcctccttatgctccttggtctttctgcaagtgctgctacggcgaccattttcccgcaatgctcgcaagctcctatagcttcccttcttcccccgtacctctcaccagcggtgtcttcggtatgtgaaaacccaattcttcaaccctacaggatccaacaggcaatcgcagctggcatcttacctttatcacccttgttcctccaacaatcatcagccctattacaacagttacctttggtgcatttattggcacaaaacatcagggcacaacaactacaacaacttgtgctagcaaaccttgctgcctactctcagcaacagcagtttcttccattcaaccaactaggttcattgaactctgcttcttatttgcaacaacaacaactaccattcagccagctacctgctgcctacccccagcaatttcttccattcaaccaactagcagcattgaactctcctgcttatttacagcagcaacaactactaccattcagccagctagctggtgtgagccctgctaccttcttgacacaaccacagttgttgccgttctaccagcacgttgcgcctaacgctggcaccctcttacactgcaacattgctgccattcaaccaactgctttg

SEQ ID NO: 11364 - DNA, 692 bp, Zea mays
  unsure (1)..(692): unsure at all n locations; Clone ID: LIB3061-083-01-K6-B2
accgcgtccgcacggggagctgtaccgctacatttgcgatacgaagggcgcattcgtgcagcctgcgttctacgaagcgttcggcctgactgtgatcgagtccatgacgtgcggtctgccaacgatcgcgacctgccatggtggccctgctgagatcatcgtggacggggtatctggcctgcacattgacccttaccacagcgacaaggccgcggatatcctggtcaacttctttgacaaatgcaaggcagatccgagctactgggacaagatctcacagggcggcctgcagagaatctatgagaagtacacctggaagctctactccgagaggctgatgaccctgaccggcgtgtacgggttctggaagtacgtgagcaacctggagaggcgcgagacccgccgctacatcgagatgttctacgccctgaagtaccgtagcctggcaagccaggttccgctgtccttcgattagtacggggaaagaagaagaagaagaagcccaggccggagaaccatcgcctgcatttcgatctgtttcaccgcaattcgcattgttagtcgtgtattggagttatgtgtacttggtttccaagaactttggttccttctcgttntttttccttgtttgagcgtttttgggcagcgctggcctggttcctagtatggtgggaattggctgcaccttttgc

SEQ ID NO: 11365 - DNA, 663 bp, Zea mays
  unsure (1)..(663): unsure at all n locations; Clone ID: LIB3061-083-01-K6-B3
nnncgtccgagcgaaccgagnaaaccaacacaacaagcaaagcagcgatccgacatccgagagatggacgcggtgatgttcgggctggagactcccctgatggccgcgctgcagcacctgctggacgtgcccgacggcgacgccggcgcgggcggcgacaacaagacgggcagcggcggcagcgccacgcgcacctacgtccgcgacgcgcgcgccatggcggccaccccggccgacgtgaaggagctgcccggcgcgtacgcgttcgtggtggacatgccggggctgggcacgggcgacatccgggtgcaggtggaggacgagcgggtgctggtggtcagcggcgagcggcgccgggaggagcgcgaggacgacgccaagtacctgcgcatggagcggcggatgggcaagttcatgcgcaagttcgtgctgccggacaacgccgacgtcgacaaggtcgccgccgtgtgcagggacggcgtgctcacggtgaccgtcgagaagctgcccccgccggagcccaagaagcccaagaccatcgaggtcaaggtcgcctgagggagcaagcagtagctgtgcttctgaaactttgtgtgtttgtgtttgcttccttctttggtatcaccaatcatcctatctgatatatcgactggggtttttgct

SEQ ID NO: 11366 - DNA, 657 bp, Zea mays
  unsure (1)..(657): unsure at all n locations; Clone ID: LIB3061-083-01-K6-B4
cgcccgcttgctttctctcccccgctccagcttatggcggaggcggcgccagcagccggcggcggcatcggggacatcctcgccacgagcgatcgggacttcctcgtccgcaactccggcgagcaggtgaagatcagcagcgttgaggcgagccctgtggccatctacttctccgcctcatggtgcccgccatgcaggaggttcacgcccaagcttattgaagtatacgaaaaactggcctcacagggcaagagcttcgaggtcgtctttgcttcggccgatcgcaatgaggaagctttcaatgaatactttgcaaagatgccatggttggctgtccctttttctgacagtgaaggccgtgaggcccttgatggccggttcaaggtctctggtatcccacaccttgtcatccttgatgcaaaaactggtgaagtttacactgaagatggtgttgaattcgtgagtgagtatggcgtggaggcttaccctttcacaccagatcggatcaatgaactgaaggaacaggaaaaggcagaaaaggagaatcaaactattcaaagcgtgcttggcacatctactcgagactatctcatttcaaacaagggagacaaggtacccatctctgagcttgaggggaagtatgttggtctntgcttt

SEQ ID NO: 11367 - DNA, 452 bp, Zea mays
  Clone ID: LIB3061-083-01-K6-B5
attatagtttaaatcctctcttatggaaaaatgagccgacggatcttgagatcgacgaaatcactaaaccacgcggaggaggaggacgattatatatatggacataaattgggtctccttgctgcgtaaatgcttcaagaggctgctgatccaaaagaatgaagccatccatggtctgactgcaaatatcgacaacatgtttttggacaagacatttagcgatataggtcgtcattagttttaacatttacaaaagaacaatatttgttttcaattgaagtttaaacttgcagactgtatagttgtgattacaacaagtattgcggatcctgtcactttaaaccattgtttagttgccttaatcaaagtgagggtcagaattgtatggtgttctttgatattgcagtagatgctccactaagttcaatgaaaagttcatgttggtctttacg

SEQ ID NO: 11368 - DNA, 667 bp, Zea mays
  Clone ID: LIB3061-083-01-K6-B6
cattttcccgcaatgctcgcaagctcctatagcttcccttcttcccccgtacctctcaccagcggtgtcttcggtatgtgaaaacccaattcttcaaccctacaggatccaacaggcaatcgcagctggcatcttacctttatcacccttgttcctccaacaatcatcagccctattacaacagttacctttggtgcatttattggcacaaaacatcagggcacaacaactacaacaacttgtgctagcaaaccttgctgcctactctcagcaacagcagtttcttccattcaaccaactaggttcattgaactctgcttcttatttgcaacaacaacaactaccattcagccagctacctgctgcctacccccagcaatttcttccattcaaccaactagcagcattgaactctcctgcttatttacagcagcaacaactactaccattcagccagctagctggtgtgagccctgctaccttcttgacacaaccacagttgttgccgttctaccagcacgttgcgcctaacgctggcaccctcttacaactgcaacaattgctgccattcaaccaacttgctttgacaaacccagcagtgttctaccaacaacccatcattggtggtgccctcttttagatttcttatgagttatagttcaataat

SEQ ID NO: 11369 - DNA, 669 bp, Zea mays
  Clone ID: LIB3061-083-01-K6-B7
ggtgaaagcgacggctaggaagtaggaaccgtggccgcgaacgcagacggcctcgagctctccctcaacccccgccgcgggctcttcctctgccccccaggcgtacgctcttcgcccccctgtccgcgcccggtgcccagggctcccgcctcagccagtccccccgccccgtgcgtcgcgcagtcgctagaggtggtggtttcaggggattatggaatgcttaacaacaagttttccaagaaatgttggaaaagagtacagctgttcaagcaagttggtgtccagaaaccaatggacccccaaaaggatttgctgctacgtctcttgttcgacaaactccagtcgatgccacaagttcactgatgtggcatgccccatgagcccagttattcgaaaaagttacgctggagatgctttgctgcaagtttgaacttagaagatggccctgcaccctctgactcgacgtcatcttcatcagagcagactactgatgctgatggaactactaatggtgatgtatctgaaaatctgctttctcgaaagccgagctctgatgagttaaaggctcttttggctgattcggaacgaagtaagcttttgagaagactcagtgaagcaaatcaatataaccgattcctcaagagacagttgcaaataaaggatgatgca

SEQ ID NO: 11370 - DNA, 638 bp, Zea mays
  unsure (1)..(638): unsure at all n locations; Clone ID: LIB3061-083-01-K6-B8
gtagtttagtagcatttcaggatgtttgtggatcctggggtgttacaacatcttatttttttaacaggaattcgacggggacgagaggtttgatgcggccttaccgagatctcaagaagggcagcggcctcgtcagagtcgtcggagtaggcggcgcccgtagggttttgggcatgagcctcgggatgaggccacgacgtccatggcgagcggatattcgtacgttggagattggactggcgaggacagaggcttcaaggggaggctacgacgtccatggcgagcgaaagggtctcgggcgggcgggggaggaggcgccgatgatgggggcgggatccggatctggcggcggacggtggtgtgggcgctgcggatggggcatggcgaggaggcttgtgtggtggaggcagcgctggtatccgtggtgcggggcggctgcgtgatgcggcgcggctgcgggtgcgcgggagggagcgctgggatccgcgcggtggatggaaggatggcggaggatggaaggagcggctacggtgctggcgcggatgcgggcggttgcggagcggctgcgcgatgcgggcatctgcgcgcgatagaacggtggttgtggacgcctacactactaactnnagtagtagtag

SEQ ID NO: 11371 - DNA, 687 bp, Zea mays
  unsure (1)..(687): unsure at all n locations; Clone ID: LIB3061-083-01-K6-B9
caacaagcaacatagnaagtggaatccagtagcaacaacagagcaacaatggcgaccaagatattttccctccttatgctccttgctctttctgcatgtgttgctaacgcgacaattttccctcaatgctcacaagctcctatagcttcccttcttcccccataccttccatcaatgatagcttcagtatgtgaaaacccagctcttcagccctataggctccaacaagcaatcgcagcaagcaacatacctttatcacccttgttgtttcaacaatcgccagccctatctttggtgcagtcattggtacaaaccatcagggcacagcagctgcagcaactcgtgctacctgtgatcaaccaagtagctctggcaaacctttctccctactctcagcaacaacaatttcttccattcaaccaactgtctacactgaaccctgctgcttatttgcagcaacaactattaccattcagccagctagctactgcctactctcagcaacaacaacttcttccatttaaccaattggccgcactgaaccccgctgcttatttgcagcagcaaatactactaccatttagccagctagctgcagcaaaccgtgcttccttcttgacacagcaacagttgctgcctttctaccagcagtttgcggctaaccccgcaaccctcttacaactacaa

SEQ ID NO: 11372 - DNA, 671 bp, Zea mays
  unsure (1)..(671): unsure at all n locations; Clone ID: LIB3061-083-01-K6-C10
caactagcaacatagnaaagcacaatagtgtaccaacaatggcagccaaaaattttgcctccttatgctccttggtctttctgcaagtgctgctacggcgaccattttcccgcaatgctcgcaagctcctatagcttcccttcttcccccgtacctctcaccagcggtgtcttcggtatgtgaaaacccaattcttcaaccctacaggatccaacaggcaatcgcagctggcatcttacctttatcacccttgttcctccaacaatcatcagccctattacaacagttacctttggtgcatttattggcacaaaacatcagggcacaacaactacaacaacttgtgctagcaaaccttgctgcctactctcagcaacagcagtttcttccattcaaccaactaggttcattgaactctgcttcttatttgcaacaacaacaactaccattcagccagctacctgctgcctacccccagcaatttcttccattcaaccaactagcagcattgaactctcctgcttatttacagcagcaacaactactaccattcagccagctagctggtgtgagccctgctaccttcttgacacaaccacagttgttgccgttctaccagcacgttgcgcctaacgctggcaccctcttacactgcaacattgctgccattc

SEQ ID NO: 11373 - DNA, 626 bp, Zea mays
  Clone ID: LIB3061-083-01-K6-C11
caatctttcttgctgctccaattcgctctctttactcggccagcggaaggggagaggagggcgagatgacggtggagaaggtggacgcggggctttccgacttcgacgcccacttcgatcgcctcttcgcttccccggacgccgcctccgacggcaaggtgaagctgctgctcttcctggccgaccgcaagcctggctcctccctctcctggtgccccgactgcaacgtggcggagccggtgatctacgagcggctggaggcactggagggcaaggacgcggtgctcctgcgcgcctacgtcggggacaagcccacttggcgcgacccggcgcacccgtggagggtggaccccaggttcgggctcaagggcgtgccaacgctgatccgctgggaggatggcgccgccgccgcccgcctcggggacgacgaggcgcacctcaaggacaaggttgacgccctcctctgcgctggcggcaactgagtactgacagatctggtttcccgttcgggttccatctgcgtagagtggccataataacatgtactgtaattcagttcatctacatgccggaccagaagctggggaatcgtgtgaagcttaataattcagtttatctacatgccg

SEQ ID NO: 11374 - DNA, 679 bp, Zea mays
  Clone ID: LIB3061-083-01-K6-C12
ggtcttcagaccattagctttatctactccagagcgcagaagaacccgatcgacaccatgagggtgttgctcgttgccctcgctctcctggctctcgctgcgagcgccacctccacgcatacaagcggcggctgcggctgccagccaccgccgccggttcatctaccgccgccggtgcatctgccacctccggttcacctgccacctccggtgcatctcccaccgccggtccacctgccgccgccggtccacctgccaccgccggtccatgtgccgccgccggttcatctgccgccgccaccatgccactaccctactcaaccgccccggcctcagcctcatccccagccacacccatgcccgtgccaacagccgcatccaagcccgtgccagctgcagggaacctgcggcgttggcagcaccccgatcctgggccagtgcgtcgagtttctgaggcatcagtgcagcccgacggcgacgccctactgctcgcctcagtgccagtcgttgcggcagcagtgttgccagcagctcaggcaggtggagccgcagcaccggtaccaggcgatcttcggcttggtcctccagtccatcctgcagcagcagccgcaaagcggcccagtcgcggggcttgtggcggcgcagatagcgcagcaactgacggcgatgtgcgggctgc

SEQ ID NO: 11375 - DNA, 663 bp, Zea mays
  unsure (1)..(663): unsure at all n locations; Clone ID: LIB3061-083-01-K6-C2
ctcgtagagagaaggaaaaattccccaaaccctagctcccgatctcgatggcgaaccctcgcgtcttcttcgacatgaccgtcggcggcgccccggcgggccggatcgtgatggagctgtacgccaacgaggtgcccaagaccgcggagaacttccgcgcgctgtgcacgggcgagaagggcgtgggcaagtccgggaagccgctccactacaagggctccaccttccaccgcgtcatccccgagttcatgtgccagggcggcgacttcacccgcggcaacggcaccggcggcgagtccatctacggcgagaagttccccgacgagaagttcgtgcgcaagcacaccgcccccggtgtgctctccatggccaacgccgggcccaacaccaacggctcccagttcttcatctgcaccgtcgcgaccccttggctcgacggcaagcacgtcgtcttcggccaggtcgtcgagggcatggacgtcgtcaaggccatcgagaaggtgggcacccgcaacggctccacctccaaggtggtcaaggtcgctgactgcggacagctctcctagatctctctgatctggtctgttcggccgccctcccttcgtcatcgtcgactccccctgcgtncgttcctttggatctgataagatggtgtgatctgag

SEQ ID NO: 11376 - DNA, 678 bp, Zea mays
  unsure (1)..(678): unsure at all n locations; Clone ID: LIB3061-083-01-K6-C4
gcaacatagnaaagcacaatagtgtaccaacaatggcagccaaaatattttgcctccttatgctccttggtctttctgcaagtgctgctacggcgaccattttcccgcaatgctcgcaagctcctatagcttcccttcttcccccgtacctctcaccagcggtgtcttcggtatgtgaaaacccaattcttcaaccctacaggatccaacaggcaatcacagctggcatcttacctttatcacccttgttcctccaacaatcatcagccctattacatcagttacctttggtgcatttattggcacaaaacatcagggcacaacaactacaacaacttgtgctagcaaaccttgctgcctactctcagcaacagcagtttcttccattcaaccaactagctgcattgaactctgcttcttatttgcaacaacaacaactaccattcagccagctacctgctgcctacccccagcaatttcttccattcaaccaactggcagcattgaactctcctgcttatttacagcagcaacaactactaccattcagccagctagctggtgtgagccctgctaccttcttgatacaaccacagttgttgccgttctaccagcacgctgcgcctaacgctggcaccctcttacaactgcacaattgctgccattcaaccaacttgc

SEQ ID NO: 11377 - DNA, 452 bp, Zea mays
  Clone ID: LIB3061-083-01-K6-C5
ctccgcatcgctaagctttccttgggcaccggaccccggccggccgattgatgacggagcttcccctcctcggcgctggcgctgcccgggcgagaacacaagccggtggaagtggaaaggaggcggcggtagccggtaggtgtccgctgttcctgacgcgcaagtcggaccgtacccgtcgccttcgccggacgtcggcgtcgcgacgccgagcgacgcgtgtgaccgaagcggcccacgcgcgcgcgcacagacaaaaataaaattaacttgtcttctcgcccggatgatctcttcacctccgcgcaagggtatggatgcgggatgcccaatctaaagtacccgctcctacatccacgcacgcacacagacaaaacccttttattattattactagtcggttgcccgtgcgttgcgacgacttacaacaatacccatgtaaactatccatg

SEQ ID NO: 11378 - DNA, 658 bp, Zea mays
  Clone ID: LIB3061-083-01-K6-C6
ggctttgtggtggcgggcggcggctacagctggagctggcgacgcatcctcctcgtccggcgaggtatcacctaattcccagcttgttctccctcatctggcctggcgcaggtagaagcactatcgcacgtagtgccgccacttcaagcagggccgtgccgccacttcaagcagggccacttcaagcagcgccgcccttcgctaccaagaactcgacctatgaggctgtgaggagtactacaagaaaaaatttggcagatccaatactaaaggttggtaaaagtaatcaacacacttttgacatattagcatggtggaaagcacacaaagaagatggtctacaccaaagattggatagctagagcaagaaaaggttccaaggctaagagtgttgctattcctaatatggtttatgaaatggatgaacttgaggctcttgcaagaaatccttcatttgaggatgaagacctagatgatgataatgatgatggacctgaggcatcgttgtaagcttgttgatgaagatctagatgatgataatgtaccatgaatgctatgaatgtttcttattgtacttgctccataatgttttgtgaccttgcaaacttgggacttgtggacttgtggctcttgaacctatgatgaacttgtatattat

SEQ ID NO: 11379 - DNA, 684 bp, Zea mays
  unsure (1)..(684): unsure at all n locations; Clone ID: LIB3061-083-01-K6-C7
caactagcaacatagnaaagcacaatagtgtaccaacaatggcagccaaaaattttgcctccttatgctccttggtctttctgcaagtgctgctacggcgaccattttcccgcaatgctcgcaagctcctatagcttcccttcttcccccgtacctctcaccagcggtgtcttcggtatgtgaaaacccaattcttcaaccctacaggatccaacaggcaatcgcagctggcatcttacctttatcacccttgttcctccaacaatcatcagccctattacaacagttacctttggtgcatttattggcacaaaacatcagggcacaacaactacaacaacttgtgctagcaaaccttgctgcctactctcagcaacagcagtttcttccattcaaccaactaggttcattgaactctgcttcttatttgcaacaacaacaactaccattcagccagctacctgctgcctacccccagcaatttcttccattcaaccaactagcagcattgaactctcctgcttatttacagcagcaacaactactaccattcagccagctagctggtgtgagccctgctaccttcttgacacaaccacagttgttgccgttctaccagcacgttgcgcctaacgctggcaccctcttacactgcaacattgctgcattcaccaacttgctttg

SEQ ID NO: 11380 - DNA, 653 bp, Zea mays
  Clone ID: LIB3061-083-01-K6-C8
attttcagcattcaaaacacaccaagcgaagcgcactagcaacgacctaacaccaatggctaccaagatattagccctccttgcgcttcttgcccttttagtgagcgcaacaaatgcgttcattattccacagtgctcacttgctcctagtgccattattccacagttcctcccaccagttacttcaatgggcttcgaacatccagccgtgcaagcctacaggctacaactagcgcttgcggcgagcgccttacaacaaccaattgcccaattgcaacaacaatccttggcacatctaaccctacaaaccattgcaacgcaacaacaacaacaacaacagtttctgccatcactgagccacctagccgtggtgaaccctgtcacctacttgcaacagcagctgcttgcatccaacccacttgctctggcgaacgtagctgcataccagcaacaacaacagctgcaacagtttatgccagtgctcagtcaactagccatggtgaaccctgccgtctacctacaactactttcatctagcccgctcgcggtgggcaatgcacctacgtacctacaacaacagttgctgcaacaaattgtaccagctctgactcagctagctgtggcaaaccctgctgcctacttacaacagttgc

SEQ ID NO: 11381 - DNA, 665 bp, Zea mays
  unsure (1)..(665): unsure at all n locations; Clone ID: LIB3061-083-01-K6-C9
ggcccttatcgatgacaagaagaactacattgttggtatcttcgctgaattcagcggcaccgaatttaaaacttcatggaggtcgcagagaagctgaggtctgactacgactttggccacactttgcatgccaaccacctcccacgtggtgatgcagcagtggaacggccattggtcaggctgctgaagccatttgatgagcttgttgttgacagcaaggattttgatgtcgctgcactgatgaagtttattgatgctagcaccatccctagagttgtcacttttgacaagaaccctgacaaccacccatacctcatgaaattcttccaaagctcagcccccaaggctatgctgtttttgaacttctccaccggaccttttgattctttcaagtctgcctactctgctgccgcggaggaattcaaggacaaggaaatcaagttccttattggtgacatcgaagccagccagggtgccttccagtactttggcctgaaagaggaccagacaccccttatcctcatccaggatggtgactccaagaagttcttgaaggttcacgttgaggctgaccagatcgtctcttggttgaaggagtactttgacggcaaattgactccgttcaggaagtctgagcctattccntgagtcaacaatgagcctgt

SEQ ID NO: 11382 - DNA, 674 bp, Zea mays
  unsure (1)..(674): unsure at all n locations; Clone ID: LIB3061-083-01-K6-D1
gcccaactagcaacatagnaaagcacaatagtgtaccaacaatggcagccaaaatattttgcttccttatgctccttggtctttctgcaagtgctgctaccganaccattttcccacaatgctcacaagctcctatagcttcctttcttcccccatacctctcaccagcggtgtcttcagtatgtgaaaacccaattcttcaaccctacaggatccaacaggcaatcgcagcaggcatcttacctttatcacccttgttcctccaacaaccgtcagccctattacagcagttacctttggtgcatttgttggcacaaaacatcaaggcacaacaactacaacaacttgtgctaggaaaccttgctgcctactctcagcaacagcagtttcttccattcaaccaactggctgcattgaactctgctgcttatttgcaacaacaactaccattcagtcagctagctgctgcctacccccagcaatttcttccattcaaccaactggcagcattgaactctgctgcttatttacaacagcaacagctaccaccattcagccagctagctgatgtgagccctgttgccttcttgacacaacaacagttgttgccgttctacctgcacgctgcgcctaaacgctgcaccctcttacaactgcaacaattgctgccattc

SEQ ID NO: 11383 - DNA, 678 bp, Zea mays
  unsure (1)..(678): unsure at all n locations; Clone ID: LIB3061-083-01-K6-D11
accggtccggccttcccggnatcgagttggattgggttcaaagttgggcttttggacagctgtggtgtgcacggcagctctgtgacttgtgaggaggaagggaggaagaaagcggatccatggcgtcgaagcggatcctcaaggagctcaaggacctgcagaaggatcctcccacctcttgcagcgcaggccctgttgccgaagatatgttctactggcaggcgacgattatggggccatcagatagcccatacgctggtggcgtatttttggtcactattcactttccaccggactacccattcaaaccaccgaaggttgcattcaagacgaaggtttaccatccgaatatcaacagcaacgggagcatctgtcttgatatcttgaaggagcaatggagccctgcactgacagtttctaaggtcctcctctcaatttgttcccttctgacggacccaaaccctgacgatccgttggtcccagagattgctcacttgtacaagactgatcgcgtgaagtacgaatcgactgctaggagctggactcagaaatatgcaatgggctgacaagctattggtctctcgtagacctaaagcacgtactgccttctgtaactgaaaccagatgtctaaattaatttgtccattcgtgcatcgaacttttgatatataatggaag

SEQ ID NO: 11384 - DNA, 264 bp, Zea mays
  Clone ID: LIB3061-083-01-K6-D12
gctagctgatgtgagccctgttgccttcttgacacaacaacagttgttgccgttctacctgcacgctgcgcctaacgctggcaccctcttacaactgcaacaattgctgccattcaaccaacttgctttgacaaacccaacagcgttctaccaacaacccatcattggtggtgccctcttttagattgcttatgagttatacttcaataatgaagttttttggatgatgtttgtggcttcccagaaataagaaagtacatttct

SEQ ID NO: 11385 - DNA, 669 bp, Zea mays
  unsure (1)..(669): unsure at all n locations; Clone ID: LIB3061-083-01-K6-D2
agaacaactagcaacatagnaaagcacaatagtgtaccaacaatggcagccaaaatattttgcctccttatgctccttggtctttctgcaagtgctgctacggcgaccattttcccgcaatgctcgcaagctcctatagcttcccttcttcccccgtacctctcaccagcggtgtcttcggtatgtgaaaacccaattcttcaaccctacaggatccaacaggcaatcacagctggcatcttacctttatcacccttgttcctccaacaatcatcagccctattacatcagttacctttggtgcatttattggcacaaaacatcagggcacaacaactacaacaacttgtgctagcaaaccttgctgcctactctcagcaacagcagtttcttccattcaaccaactagctgcattgaactctgcttcttatttgcaacaacaacaactaccattcagccagctacctgctgcctacccccagcaatttcttccattcaaccaactggcagcattgaactctcctgcttatttacagcagcaacaactactaccattcagccagctagctggtgtgagccctgctaccttcttgatacaaccacagttgttgccgttctaccagcacgctgcgcctaaacgctgcaccctcttacactgcaacattgct

SEQ ID NO: 11386 - DNA, 469 bp, Zea mays
  unsure (1)..(469): unsure at all n locations; Clone ID: LIB3061-083-01-K6-D3
cagccaagcgcggggggcggcgccagcggcaaacaaaaaggggggcgacgcagcgacccggggcgnggcgggggggccgcgccggcgaccagccagccggagagcgcgcaagcgcccacagcgncgcgcgccncccccgaaccgcggaccagcggngggggggggggggggggaacccagnnccccaaccccacaggagccaacaaaaaaacacagacggcagccgaccgcaaggacccacggggccgcggcaaacacgacccccagcacagcaacgacccngggggcanccaccggcacaaagcagggggcccaacaccnacaccagcgcgggcgcgcaaaccgcgccggcggcccgcagcaacagcaagggccgccaggcaaccaacnagccgcacggaaccccgcnccncaagcgcaacaacagcagcgaccaggcagccagcaaccagcaggcaacccgcagcaa

SEQ ID NO: 11387 - DNA, 684 bp, Zea mays
  unsure (1)..(684): unsure at all n locations; Clone ID: LIB3061-083-01-K6-D4
ctcacttgctcctagtgccagtattccacagtgctcacttgctcctagtgccagtattccacagttcctcccaccagttacttcaatgggcttcgaacatccagccgtgcaagcctacaggctacaactagcgcttgcggcgagcgccttacaacaaccaattgcccaattgcaacaacaatccttggcacatctaaccctacaaaccattgcaacgcaacaacaacaacaacagtttctgccatcactgagccacctagccgtggtgaaccctgtcacctacttgcaacagcagctgcttgcatccaacccacttgctctggcgaacgtagctgcataccagcaacaacaacagctgcaacagtttatgccagtgctcagtcaactagccatggtgaaccctgccgtctacctacaactactttcatctagcccgctcgcggtgggcaatgcacctacgtacctacaacaacagttgctgcaacaaattgtaccagctctgactcagctagctgtggcaaaccctgctgcctacttacaacagttgcttccattcaaccaactggctgtgtcaaactctgctgcgtacctacaacagcgacaacagttacttaatccattggcagtggctaacccattggtcgctaccttnctgcagcagcaacaacaattgctgccatacaa

SEQ ID NO: 11388 - DNA, 639 bp, Zea mays
  Clone ID: LIB3061-083-01-K6-D5
ctccgctcggatttcctcaatgacccagctgccacatatgccgtggcagacagtattgcaagatgcaccgatgaagctgtggacgcaaagcttaggtctttcatgaatgagcactggagcgaggcagctttttgtgcgggattcgaatctgcacagcagcactttgttaatttcatgaggataatggaaaggggtgaatcaccaatccgcttaggggacctcccacttgagctggtgattgccatggcctacctgccgctctataaggaatgcatgaattccaatgggcgacttttgcctcaaaggcttagaggtcagcttgtggaggctgcaagcaggctcgaggaccggcaagtggaaagggatagccaaagcagagaactcttggccatcttggagcaccacataccacgattcatgatgcaaacttgaaggtaagcgcaggcatccactctgaaccactgctgtcaatgcaagcaaaaaacaacttacaagggcaatccacgccgtcttcagtgccgccatcatgttcctgcttggggacatcaccaaatgatagcatcttgagttggctctcctgcaggcgatcttcggagagtatataattctggggaatggtgtgtgccttgtcgagcatgt

SEQ ID NO: 11389 - DNA, 677 bp, Zea mays
  unsure (1)..(677): unsure at all n locations; Clone ID: LIB3061-083-01-K6-D7
aaacacaccaagcgaactacctagcaacgacttaacaacaatggctaccaagatattagccctccttgcgcttcttgccctttttgtgagcgcaacaaatgcgttcattattccacaatgctcacttgctcctagtgccattataccacagttcctccgaccagttacttcaatgggcttcgaacacctagctgtgcaagcctacaggctacaacaagcgcttgcggcgagcgtcttacaacaaccaattaaccaattgcaacaacaatccttggcacatctaaccatacaaaccatcgcaacacaacagcaacaacagttcctaccagcactgagccaactagatgtggtgaaccctgtcgcctacttgcaacagcaggtgcttgcatccaacccacttgctctggcaaacgtagctgcataccaacaacaacaacaattgcaacagtttctgccagcgctcagtcaactagccatggtgaaccctgccgcctacctacaacagcaacaactgctttcatctagccctctcgttgtgggtaatgcacctacatacctgcaacaacaattgctgcaacagattgtaccagctctgactcactagctgtggcaaaccctgctgcctacttgcaacagctgcttncattcaaccactgactgtgtcgaacttngctgcg

SEQ ID NO: 11390 - DNA, 647 bp, Zea mays
  Clone ID: LIB3061-083-01-K6-D8
gcgcgcggggtttccgatcgggttcatgggcggtttctgtgtttctgccgcgcgacttggcttgcctgatgttggcctcatttcctatggagaaatggtagatcaagggcgtctcatcaatgaagctgtttcaatcccagtgattggtgatggagacaatggttacggaaactctatgaatatcaagagaaccataaaaggatatatcaatgctggttttgctggaattatgcttgaggatcaggtggcacctaaagcatgtggacatactgaaggaaggaaagtcatatcaagggaggaagctgtcatgcacataaaagctgctgtagatgctaggaaagagagtggctctgacattgttattgtagcaaggacagattctcgccaagctatttctcatgatgaagcattatggagggtgaaagcatttgctgatgctggagcagatgttctatttattgatgcccttgcttcagtagaagagatgaaagcattttgtgcggttgcaccagaagttccaaagatggcaaacatgttagaagggtggtggtaaaactcccatattgagccctgctgaacttgaggaaattggtttcaggcttgtagtatatcctttatcccttagttgggtatcaatgcgtgcatgc

SEQ ID NO: 11391 - DNA, 707 bp, Zea mays
  unsure (1)..(707): unsure at all n locations; Clone ID: LIB3061-083-01-K6-D9
ngacagcaccaacaacaacatcaatgtgaaggccaacaacaacatcaccaacaatcacaaggccatgtgcaacaacacgaacagagccatgagcaacaccaaggacagagccatgagcaacaacatcaacaacaattccagggtcatgacaagcagcaacaaccacaacagcctcagcaatatcagcagggccagngaaaaatcacaacagcaacaatgtcattgccaggagcagcaacagactacaaggtgcagctataactactatagcagtagctcaaatctaaaaaattgtcatgaattcctaaggcagcagtgcagccctttggtaatgccttttctccaatcacgtttgatacaaccaagtagctgccaggtattgcagcaacaatgttgtcatgatcttaggcagattgagccacaatacattcaccaagcaatctacaacatggttcaatccataatccaggaggagcaacaacaacaaccatgtgagttatgtggatctcaacaagctactcaaagtgcggtggcaatcttgacagcagcacaatacctaccatcaatgtgcggcttgtaccactcatactaccaaaataatccatgcagcagcaatgacattagtggtgtttgcaattgaagaattgtgtctacctagccgttatactcatataacggtngtaagcaataaagtaccatacattatg

SEQ ID NO: 11392 - DNA, 589 bp, Zea mays
  unsure (1)..(589): unsure at all n locations; Clone ID: LIB3061-083-01-K6-E10
aggcttctgcaagcatgcctggatggcttccttcgtgtgatactggatggaggttctactcgtgtcttctctccaaatgatgcagctttattggaggaagatcttgaaaccctgaaggaattttttgtttctggtggagatggactgcctcgtggaactgttgaaaacttggtctcgcgtgtacgtcctgtaataaatctgatcaagcaagagacccgcgtgctcattgatgacctacgagaagttactcaaggtggcaagagcaaatttggagcggactccaaaaccctccttagggtcctgtgtcacagaaatgattcagaggcatcacattacgtgaagaagcaattcaagatacccagctcagctccgagcgcctgattgattgcgaacaaaaaacagatatcgaacaggacagtgcagccttgctcgtaacccaagaaacggtgctccaccgcccattttcatgtttgtgtaacagttattattcatcggtaacactaggactttgggtggacgcggcagtaagcatgtatttacacaaatactaacacactggtcctgtattgattggtactagttntggacc

SEQ ID NO: 11393 - DNA, 690 bp, Zea mays
  unsure (1)..(690): unsure at all n locations; Clone ID: LIB3061-083-01-K6-E11
agcacgcgccgccgccagcaccgcgtccgccatggccgcctcctcccgccgcgcgtctcaattgctggggtccgcggcctcccgcctcctcctcgggcggggcttcgccgcggcagccgccgcggcgccctcgccggcggtcttcgtcgacaagagcacccgtgtgatctgccagggcatcacggggaagaacggcaccttccacaccgagcaggccatcgagtacggcaccaacatggttggtggagtgactcccaagaaaggtggaactgaacatttagggctcccagtgtttaactctgtagcagaagctaaggctgaaacaaaagccaatgcatctgttatatatgttccaccaccatttgctgccgccgctataatggaggcaatggaggctgagctcgaccttgttgtctgcattacggaaggaattccccagcatgacatggtgaaagtgaaggctgcactaaatagacaatctaaaactcgattgattgggccaaattgccctggtatcattaagcctggtgagtgtaaaattggaatcatgccaggttacatcccacaagcctggcgtattgngattgtatctcgttctggtaccttgacatatgaagcggtgtttcaaacaacagctgtaggcttggggcagtcaacttgtgtangcattggtggtgacccattcaatgg

SEQ ID NO: 11394 - DNA, 659 bp, Zea mays
  Clone ID: LIB3061-083-01-K6-E12
accggtccgaccttcccgggcggttataaaggatctgcagaatgcagaactttgcgcaaattcgtcgatcctcggagcatcgagacacagacaaacccgatcgaccggtctatcgctctgctacttttccaccagtcatcggaccatgcggctgtggctgtcgacgatgcctcatcacttaaaccccctgctggtagcaaacaccaccagggccctgctgctaaccaaaaccaaggcctgataccagattcatcggtgtattcccctggagatggggcccccaaggatgtacagtccctggacaagttctgaatttatgtccctgctctccatgggcatgttcggttccccgggaatggtcgtctggaacgaatcctggtcggattgtttctctaatttatataagctttgatcagttggaacgattcttgggggaatttcgggataaatgaacaggccctaatgcgtctccgtgacctggttaaggcggcataatctaggcagatgtaaaaaacaagtatattgtgtacccaatagtctgtagcctgttccaatcacattggttttgacatgcttgtatcctatgggtaggcggccgttgtgctctctagtggcgttgactcacatatgtgtaatctaaaaaaaaaaatctttctttc

SEQ ID NO: 11395 - DNA, 662 bp, Zea mays
  unsure (1)..(662): unsure at all n locations; Clone ID: LIB3061-083-01-K6-E2
agcaacatagnaaagcacaatagtgtaccaacaatggcagccaaaatattttgcctccttatgctccttggtctttctgcaagtgctgctacggcgaccattttcccgcaatgctcgcaagctcctatagcttcccttcttcccccgtacctctcaccagcggtgtcttcggtatgtgaaaacccaattcttcaaccctacaggatccaacaggcaatcgcagctggcatcttacctttatcacccttgttcctccaacaatcatcagccctattacaacagttacctttggtgcatttattggcacaaaacatcagggcacaacaactacaacaacttgtgctagcaaaccttgctgcctactctcagcaacagcagtttcttccattcaaccaactaggttcattgaactctgcttcttatttgcaacaacaacaactaccattcagccagctacctgctgcctacccccagcaatttcttccattcaaccaactagcagcattgaactctcctgcttatttacagcagcaacaactactaccattcagccagctagctggtgtgagccctgctaccttcttgacacaaccacagttgttgccgttctaccagcacgttgcgcctaaacgctgcaccctcttacaactgcaacaattgct

SEQ ID NO: 11396 - DNA, 694 bp, Zea mays
  unsure (1)..(694): unsure at all n locations; Clone ID: LIB3061-083-01-K6-E3
gcaaattgcaccaanaaatccatcgagaggccgtcgacaggggaattaatggcgtcgtcgtctagcagcagccaccgccgcctcatcctcgcagccgccgtcctgctctccgtgctcgcggctgccagcgccagcgccgggacctcctgcgtgccggggtgggccatcccgcacaacccgctcccgagctgccgctggtacgtgaccagccggacctgcggcatcgggccgcgcctcccgtggccggagctgaagaggagatgctgccgggagctggcggacatcccggcgtactgccggtgcacggcgctgagcatcctcatggacggcgcgatcccgccgggcccggacgcgcagctggagggccgcctagaggacctgccgggctgcccgcgggaggtgcagaggggattcgccgccaccctcgtcacggaggccgagtgcaacctggccaccatcagcggcgtcgccgaatgcccctggattctcggcggcggaacgatgccctccaagtaactgcgaagagcatagtgcatgaggaatgagcttgtagctagctcatatgtctgaataataagcacagcaagaagatgaatgcatttctcggatcgttcatccggaacataattaaagggatccgnatttgttcttgtgatatattaacgattcctgtatacttggaagtagctagctc

SEQ ID NO: 11397 - DNA, 632 bp, Zea mays
  unsure (1)..(632): unsure at all n locations; Clone ID: LIB3061-083-01-K6-E4
cgcaaattgcaccaagnaaaccatcgagaggccgtcgacaggggaattaatggcgtcgtcgtctagcagcagccaccgccgcctcatcctcgcagccgccgtcctgctctccgtgctcgcggctgccagcgccagcgccgggacctcctgcgtgccggggtgggccatcccgcacaacccgctcccgagctgccgctggtacgtgaccagccggacctgcggcatcgggccgcgcctcccgtggccggagctgaagaggagatgctgccgggagctggcggacatcccggcgtactgccggtgcacggcgctgagcatcctcatggacggcgcgatcccgccgggcccggacgcgcagctggagggccgcctagaggacctgccgggctgcccgcgggaggtgcagaggggattcgccgccaccctcgtcacggaggccgagtgcaacctggccaccatcagcggcgtcgccgaatgcccctggattctcggcggcggaacgatgccctccaagtaactgcgaagagcatagtgcatgaggaatgagcttgtagctagctcatatgtctgaataataagcacagcaagaagatgaatgcatttctcgaaaaaaaaaaaaaaggcggccgctc

SEQ ID NO: 11398 - DNA, 685 bp, Zea mays
  unsure (1)..(685): unsure at all n locations; Clone ID: LIB3061-083-01-K6-E5
aagcaacatagaaagtggaatacagtagcaacaatagagcaacaatggcggccaagatattttccatccttatgctccttgctctttctgcatgtgttgctaacgcgaccatttttcctcaatactcacaagctcctatagctgcccttcttcccccataccttccatcaatgaccgcttcagtttgtgaaaacccagcccttcaaccctacaggctccaacaagcaatcgcaacaagcaacttacctttatcacccctgttctttcaacaatcgccagccctatctttggtgcagtcattggtacaaaccatcagggcacaacagctgcaacaactcgtgctaccagtgatcagccaagtagctctggcaaacctttctccctactctcagcaacaacaatttcttccattcaaccaactgtctacactgaaccctgctgcttatttacaacaacaacaactactaccattcagccagctagctactgcctactctcagcagcaacaatttcttccatttaaccaattggccgcactgaacccctctgcttatttccagcagcaaatactactaccatttggccagctagctacaacaagccccacttcctttttgaaacacaacaattgcttccgttctaccagcnagttgtggctaaccccgcaaccctcttacaactgcac

SEQ ID NO: 11399 - DNA, 445 bp, Zea mays
  Clone ID: LIB3061-083-01-K6-E7
gcgggcccttttttttttttttttttttgcgcggcaattttccaccagttcctttgacttgtttatttcgcagcaagagtttgtttcagctgcttgcgcgggggctcagcttcatgcttcagcagggtggtatgcaaaaactttaaaaagcttaaaaatatgtcgttcacacaaagaacacgatacgaatctgtagtacagaaaacatccagtgctgctatgggatcttgctaaactgaaattctgtgcctgccttttgcgattctccgggcaatcaccttgcgcccacccttggtcgatttacgtgtaaggaatccatgggttcttttccgcttgatggtactgggctggtaagttcttttcggaagcaactggagagggtcattagcaacaggatcctcaacgtcgtcgatgaagaagcggagcgaggggaggccgcagggga

SEQ ID NO: 11400 - DNA, 595 bp, Zea mays
  unsure (1)..(595): unsure at all n locations; Clone ID: LIB3061-083-01-K6-E8
ngaaacaactagcaacatagnaaagcacaatagtgtaccaacaatggcagctaaaatttttgcctccttatgctccttggtctttctgcaagtgctgctacggcgaccattttcccacaatgctcacaagctcctatagcttcccttcttcccccgtacctctcaccaacggtgtcttcggtatgtgaaaacccaattcttcaaccctacaggatccaacaggcaatcgcagctggcatcttacctttatcacccttgttcctccaacaatcatcagccctattacagcagttacctttggtgcatttattggcacaaaacatcagggcacaacaactacaacaacttgtgctagcaaaccttgctgcctactctcagcaacagcagtttcttccattcaaccaactagctgcattgaactctgcttcttatttgcaacaacaacaactaccattcagccagctatctgctgcctacccccagcaatttcttccattcaaccaactgacagcattgaactctcctgcttatttacagcagcaacaactactaccattcagccagctagnctggtgtgagccctgctaccttcttg

SEQ ID NO: 11401 - DNA, 669 bp, Zea mays
  unsure (1)..(669): unsure at all n locations; Clone ID: LIB3061-083-01-K6-E9
gnaaagcacaatagtgtaccaacaatggcagctaaaatttttgcctccttatgctccttggtctttctgcaagtgctgctacggcgaccattttcccacaatgctcacaagctcctatagcttcccttcttcccccgtacctctcaccaacggtgtcttcggtatgtgaaaacccaattcttcaaccctacaggatccaacaggcaatcgcagctggcatcttacctttatcacccttgttcctccaacaatcatcagccctattacagcagttacctttggtgcatttattggcacaaaacatcagggcacaacaactacaacaacttgtgctagcaaaccttgctgcctactctcagcaacagcagtttcttccattcaaccaactagctgcattgaactctgcttcttatttgcaacaacaacaactaccattcagccagctatctgctgcctacccccagcaatttcttccattcaaccaactgacagcattgaactctcctgcttatttacagcagcaacaactactaccattcagccagctagctggtgtgagccctgctaccttcttgaccaaccacagttgttgccgttctacagcacgctgcgcctaacgctggcaccctcttacactgcaacattgctgccattcaaccaactgctttg

SEQ ID NO: 11402 - DNA, 672 bp, Zea mays
  unsure (1)..(672): unsure at all n locations; Clone ID: LIB3061-083-01-K6-F1
gaccaactagcaacatagnaaagcacaatagtgtaccaacaatggcagccaaaatttttgcttccttatgctccttggtctttctgcaagtgttgctaccganaccattttcccacaatgctcacaagctcctatagcttcccttcttcccccatacctctcaccagcggtgtcttcaatgtgtgaaaacccaattgttcaaccctacaggatccaacaggcaatcgcaacaggcatcttaccattatcacccttgttcctccaacaaccgtcagccctattacagcagttacctttggtccatttggtggcacaaaacatcagggcacaacaactacaacaacttgtgctagcaaaccttgctgcatactctcagcaacatcagtttcttccattcaaccaactggctgcattgaactctgctgcttatttgcaacaacaattaccattcagccagctagttgctgcctacccccagcaatttcttccattcaaccaactagcagcattgaactctgctgcttatttacagcagcaacaactactaccattcagccagctagctgatgtgagccctgctgccttcttgacacaacaacagttgttgccgttctacctgcacgctatgcctaacgctggcaccctcttacactgcaacaattgctgccattc

SEQ ID NO: 11403 - DNA, 722 bp, Zea mays
  unsure (1)..(722): unsure at all n locations; Clone ID: LIB3061-083-01-K6-F10
accggtnccggcacctcccggggtagttcagggatgaatcagagttgcagttgcaaatgtagattggatgggtaaatacagaggtgcaagtcagctagtacttttaccaaaaactactactgaggtatctaagattctttcatattgcaacaccaaacgattggctgtggttccacaaggtggcaacacaggtcttgtaggtggaagtgtgcctgttttggatgaggtgattgttggccttgcaggcatgaataaaattatttcctttgataacgtaaatggaattcttacttgtgaagctggttgtgtgttggagaatttaagtaccttcgtggaaaatgaagggtttattatgccacttgacttgggagcgaaaggtagttgccacatcggtggaaacatttcaactaatgctggcggcctgcgttttatacgctatggttcacttcatggaaatgttcttggtcttgaagttgtcctggctgatgggactatccttgatatgcttactactttaaggaaagacaatactgggtatgatctgaagcacttatttataggaagtgaaggctcgctaggagtagtcaccaaaatatcagtacttacacctgcaaagctatcttcaaccaatgttgcatttctttcctgcaatgattacacaagctgccagaaaatactactgncagctaggaggagcttgngtgagatcttgtctgcatttg

SEQ ID NO: 11404 - DNA, 669 bp, Zea mays
  Clone ID: LIB3061-083-01-K6-F12
gctcatcgactccagattggagaactcgacaccatgaaggtgctgatcgttgcccttgctctcctggcgctcgctgcgagcgccgcctccagtacaagcggcggctgtggctgccagacaccaccgtttcatctaccgcctccgttctatatgccgcctccgttctatctgccgccgcagcagcagccgcagccatggcaataccccactcaaccaccgcagctaagcccgtgccagcagttcggatcctgcggcgtcggcagcgtcggcagcccgttcctgggccagtgcgtcgagttcctgaggcaccagtgcagcccggcggcgacgccctacggctcgccacagtgccaggcgctgcagcagcagtgctgccaccagatcaggcaggtggagccgctgcaccggtaccaggcgacatacggtgtggtcctgcagtccttcctgcagcagcagccgcagggcgagctcgcggcgctgatggcggcccatgtagcgcagcagctgacggcgatgtgcggcctgcagctgcagcagccaggtccctgcccttgcaacgcagctgccggcggtgtctactactgaggaaactatgtactgtagtaataatgtaatggagccgctgactagctacctagctcgctagtgtactcatttagcggcgatgag

SEQ ID NO: 11405 - DNA, 692 bp, Zea mays
  unsure (1)..(692): unsure at all n locations; Clone ID: LIB3061-083-01-K6-F2
caatcatcattcatcttagtagtataggcaccaaatcaaatctgcaacatcaattatctaactccaaaaaccatgaagctggtgcttgtggttcttgctttcattgctttagtatcaagtgtttcttgtacacagacaggcggctgcagctgtggtcaacaacaaagccatgagcagcaacatcatccacaacaacatcatccacaaaaacaacaacatcaaccaccaccacaacatcaccagcagcagcaacaccaacaacaacaagttcacatgcaaccacaaaaacatcagcaacaacaagaagttcatgttcaacaacaacaacaacaaccgcagcaccaacaacaacaacaacaacaacagcaccaacaacaacatcaatgtgaaggccaacaacaacatcaccaacaatcacaaggccatgtgcaacaacacgaacagagccatgagcaacaccaaggacagagccatgagcaacaacatcaacaacaattccagggtcatgacaagcagcaacaaccacaacagcctcagcaatatcagcagggccaggaaaaatacaacagcaacaatgtcattgccaggagcagcaacagactacaaggtgcagctataactactatagcagtagctcaaatctaanaaatgtcatgaatttctaaagcagcagtgcagcccctttgtaatgc

SEQ ID NO: 11406 - DNA, 640 bp, Zea mays
  Clone ID: LIB3061-083-01-K6-F3
gaaattctgagatccatccagaacgtcgctccatggcgattatctccgacttcaaggaggacgaggccccgcagcagccggcggcggtcggccccggcgtcgaggagaccctggtggcagcgctagagaggaccggcggtgcactcccctttctccaggcggccatcgatgtcgctcaccgcaggtctggcctgttccgcgacccttcggcggtgagcaaggttaccgcgatggcggcggccgtcagggcgcaggtggagaccgaggagagggcagccagagaggtcaagaggaaggcggaggaggccgagaggaaggctgcggccgaggcgcagaaggctgacatggaggcggcgacggcgacggcggaggagaagctggagaaggaccgtatggatgcggataaggcggaggaaggcaacgttagacaaccaaatgctggcaatggtcttgatttggagaagtactcatggactcaacagttgcctgaggttaacatcactattcctgttcctcaaggaacaaaatcaagatttgtggtcgttgatataaagaagaccatctgaaggttgttctgaagggccagccacctatcattgatggtgagctctataagccagttaaggttgatgattgcttc

SEQ ID NO: 11407 - DNA, 677 bp, Zea mays
  Clone ID: LIB3061-083-01-K6-F4
cctggtggacccggggcgccagtcccagtccagtccctcactgtggactcctcgcgtgccccgccgcccttaaatcccccggcagcagcgtgctgcctcgtgtctcacccctccggacgaaatctgacccgggccacactccgctgctccgccatggcgatccgctccaaggcctggatctcgctgttgctcgcgctggccgtcgcgctctccgcccgggcggaggaggagcccgccgccgccgcggagggcgaggccgtgctcaccctcgacgtcgacagcttcgacgaggccgtcgccaagcaccccttcatggtcgtcgagttctacgccccctggtgtgggcactgcaagaaacttgctccagagtatgagaatgcggccaaggcacttagcaagcatgacccaccgattgttctcgctaaggttgatgctaacgaggagaagaacaggccgcttgctaccaagtacgagatccaagggttcccaaccatcaagatattcagggaccaggggaagaacattcaggaatacaagggccctagggaggctgatggcattgtggattacttgaagaagcaggttggccctgcgtccaaggagatcaagtcaccagaagatgcgacggcccttatcgatgacaagaagactacattgttggtatcttcgctgaattc

SEQ ID NO: 11408 - DNA, 173 bp, Zea mays
  Clone ID: LIB3061-083-01-K6-F5
ggctaacccattggattaagtaactgtgcaggggcggcgtttgctgccatacaaccggggtctgtgtgctgtctcctgctcttgtcgcggcgcttccctttgttgggggtgccttctggtgcgtggcttttgttttggccgggttcgtgtcgcccttgtcccgccttgtgttt

SEQ ID NO: 11409 - DNA, 671 bp, Zea mays
  unsure (1)..(671): unsure at all n locations; Clone ID: LIB3061-083-01-K6-F6
gtggnaatccagtagcaacaacagagcaacaatggcgaccaagatattttccctccttatgctccttgctctttctgcatgtgttgctaacgcgacaattttccctcaatgctcacaagctcctatagcttcccttcttcccccataccttccatcaatgatagcttcagtatgtgaaaacccagctcttcagccctataggctccaacaagcaatcgcagcaagcaacatacctttatcacccttgttgtttcaacaatcgccagccctatctttggtgcagtcattggtacaaaccatcagggcacagcagctgcagcaactcgtgctacctgtgatcaaccaagtagctctggcaaacctttctccctactctcagcaacaacaatttcttccattcaaccaactgtctacactgaaccctgctgcttatttgcagcaacaactattaccattcagccagctagctactgcctactctcagcaacaacaacttcttccatttaaccaattggccgcactgaaccccgctgcttatttgcagcagcaaatactactaccatttagccagctagctgcagcaaaccgtgcttccttcttgacacagcaacagttgctgcctttctaccagcagtttgcggctaaccccgcaaccctcttacaactacaac

SEQ ID NO: 11410 - DNA, 693 bp, Zea mays
  Clone ID: LIB3061-083-01-K6-F7
tccttctatcagtaccatcaatcatcattcatcttagtagtataggcaccaaatcaaatctgcaacatcaattatctaactccaaaaaccatgaagctggtgcttgtggttcttgctttcattgctttagtatcaagtgtttcttgtacacagacaggcggctgcagctgtggtcaacagcaaagccatgagcagcaacatcatccacaacaacatcatccacaaaaacaacaacatcaaccaccaccacaacatcaccagcagcagcaacaccaacaacaacaagttcacatgcaaccacaaaaacatcagcaacaacaagaagttcatgttcaacaacaacaacaacaaccgcagcaccaacaacaacaacaacaacaacagcaccaacaacaacatcaatgtgaaggccaacaacaacatcaccaacaatcacaaggccatgtgcaacaacacgaacagagccatgagcaacaccaaggacagagccatgagcaacaacatcaacaacaattccagggtcatgacaagcagcaacaaccacaacagcctcagcaatatcagcagggccaggaaaaatacaacagcaacaatgtcattgccaggagcagcaacagactacaaggtgcagctataactactatagcagtagctcaaatctaaaaaatgtcatgaattcctaagcagcagtgc

SEQ ID NO: 11411 - DNA, 626 bp, Zea mays
  unsure (1)..(626): unsure at all n locations; Clone ID: LIB3061-083-01-K6-F8
ngaagacacatagtgtaccaacaatggcagccaaaatttttgcctccttatgctccttggtctttctgcaagtgctgctacggcgaccattttcccgcaatgctcgcaagctcctatagcttcccttcttcccccgtacctctcaccagcggtgtcttcggtatgtgaaaacccaattctgcaaccctacaggatccaacaggcaatcacagctggcatcttacctttatcacccttgttcctccaacaatcatcagccctattacatcagttacctttggtgcatttattggcacaaaacatcagggcacaacaactacaacaacttgtgctagcaaaccttgctgcctactctcagcaacagcagtttcttccattcaaccaactagctgcattgaactctgcttcttatttgcaacaacaacaactaccattcagccagctacctgctgcctacccccagcaatttcttccattcaaccaactggcagcattgaactctcctgcttatttacagcagcaacaactactaccattcagccagctagctggtgtgagccctgctaccttcttgatacaaccacagttgttgccgttctaccagcacgctgcgcctaacgctggca

SEQ ID NO: 11412 - DNA, 113 bp, Zea mays
  unsure (1)..(113): unsure at all n locations; Clone ID: LIB3061-083-01-K6-F9
gaaggagcagtggcgccctgcactgnctgtttctaaggtccttctntnaatccgctccctcctgccggcccctnnccttgttgttgcgtgggtcccttggcttgctctttttc

SEQ ID NO: 11413 - DNA, 641 bp, Zea mays
  Clone ID: LIB3061-083-01-K6-G1
gaagtggaatccagtagcaacaatagagcaacaatggcgaccaagatattttccctccttatgctccttgctctttctacatgtgttgctaacgcgacaattttccctcaatgctcacaagctcctatagcttcccttcttcccccataccttccatcaattatagcttcaatatgtgaaaacccagctcttcaaccatataggcttcaacaagcaatcgcagcaagcaacatacctttatcgcccttgttgtttcaacaatcgccagccctatctttggtgcagtcattggtacaaaccatcagggcacaacagctgcagcaactcgtgctacctctgatcaaccaagtagctctggcaaacctttctccctactctcagcaacaacaatttcttccattcaaccaactgtctacactgaaccctgctgcttatttgcagcaacaactattaccatttagccagctagctactgcctactctcagcaacaacaacttcttccatttaaccaattggccgcactgaaccccgctgcttatttgcagcagcaaatactactaccatttagccagctagctgcagcaaaccgtgcttccttcttgacacagcaacagttgctgcctttctaccagcagtttgc

SEQ ID NO: 11414 - DNA, 251 bp, Zea mays
  Clone ID: LIB3061-083-01-K6-G10
cgccggttttggtgctctcgggattgaatgttcgtcagtgggtctgtgggtttagctaggttaggagatttaagctgtttggtttctgcaaaatctatcctccttatctgtaagtaaggattagcatgttgttggtcgatacatgatcttgattgcagcgaacacaacagatagacgaaatcatctaagagcatcctctaaattattatttagtcagtcatttacataaaaactattttatatatcttttc

SEQ ID NO: 11415 - DNA, 680 bp, Zea mays
  unsure (1)..(680): unsure at all n locations; Clone ID: LIB3061-083-01-K6-G12
nncgtccgttgaaaccaactagcaacatagnaaagcacaatagtgtaccaacaatggcagccaaaatttttgcctccttatgctccttggtctttctgcaagtgctgctacggcgaccattttcccgcaatgctcgcaagctcctatagcttcccttcttcccccgtacctctcaccagcggtgtcttcggtatgtgaaaacccaattcttcaaccctacaggatccaacaggcaatcgcagctggcatcttacctttatcacccttgttcctccaacaatcatcagccctattacaacagttacctttggtgcatttattggcacaaaacatcagggcacaacaactacaacaacttgtgctagcaaaccttgctgcctactctcagcaacagcagtttcttccattcaaccaactaggttcattgaactctgcttcttatttgcaacaacaacaactaccattcagccagctacctgctgcctacccccagcaatttcttccattcaaccaactagcagcattgaactctcctgcttatttacagcagcaacaactactaccattcagccagctagctggtgtgagccctgctaccttcttgacacaaccacagttgttgccgttctaccagcacgttgcgcctaacgctggcaccctcttacaactgcacaattgct

SEQ ID NO: 11416 - DNA, 672 bp, Zea mays
  Clone ID: LIB3061-083-01-K6-G2
cagtaacacacctagcgaagcgcactagcaacgacctaacaacaatggcttccaagacattatccctccttgcgcttcttgccctttttgtgagtgcaacaaatgcgttcattattccacaatgctcacttgctccgagtgccattattccacagttcctccctccagttacttcaatgggcttcgaacacccagctgtgcaagcctataggctacaacaagcgcttgcggcgagcgtcttagaacaaccaattgcccaattacaacaacaatccttggcacatctaaccatacaaaccatcgcaacgcagcagcaacaagcactgagccacctagccgtggtgaaccctatcgcctacttgcaacaacagctgcttgcatccaacccacttgctttggcaaacgtagctgcataccaacaacaacaacagttgcaacagtttctaccagcgctcagtcaactagccatggtgaaccctatcgcctacctacaacagcaacaacttctttcatctagcccgctcgctatgggcaatgcacctacatacctgcaacaacagttgttgcaacaacagttgctgcaacaaattgtaccagctcttactcagctagctgtggcaaaccctgctgcctacttgcaacaactacttccattcaaccaactgactgtgt

SEQ ID NO: 11417 - DNA, 662 bp, Zea mays
  Clone ID: LIB3061-083-01-K6-G3
atagtaaagcacaatagtgtaccaacaatggcagccaaaatttttgcctccttatgctccttggtatttctgcaagtgctgctacggcgaccattttcccgcaatgctcacaagctcctatagcttcccttcttcccccgtacctctcaccagcggtgtcttcggtatgtgaaaacccaattcttcaaccctacaggatccaacaggcaatcgcagctggcatcttacctttatcacccttgttcctccaacaatcatcagccctattacagcagttacctttggtgcatttattggcacaaaacatcagggcacaacaactacaacaacttgtgctagcaaaccttgctgcctactctcagcaacagcagtttcttccattcaaccaactagctgcattgaactctgcttcttatttgcaacaacaacaactaccattcagccagctacctgttgcctacccccaacaatttcttccattcaaccaactggcagcattgaactctcctgcttatttacagcagcaacaactactaccattcagccagctagctggtgtgagccctgctaccttcttgacacaaccacagttgttgccgttctaccagcacgctgcgcctaacgctggcaccctcttacaactgcaacaattgctgccattc

SEQ ID NO: 11418 - DNA, 70 bp, Zea mays
  Clone ID: LIB3061-083-01-K6-G5
attcaataataaagttttttggatgatgtatgtggccaaccagaaataagaagttacatttccagattct

SEQ ID NO: 11419 - DNA, 564 bp, Zea mays
  unsure (1)..(564): unsure at all n locations; Clone ID: LIB3061-083-01-K6-G6
ccaaagaagggctggtngattgttgaaacaacaagggcgcaacagctgcagcaactcgtgctacctgtgatcaaccaagtagctctggcaaacctttctccctactctcagcaacaacaatttcttccattcaaccaactgtctacactgaaccctgctgcttatttgcagcaacaactattaccatttagccagctagctactgcctactctcagcaacaacaacttcttccatttaaccaattggccgcactgaaccccgctgcttatttgcagcagcaaatactactgccatttagcgagctagctgcagcaagtcgtgcttccttcttgacacagcaacagttgctgcctttctacaagcagtttgcggctaaccccgcaaccctcttacaactacaacaattgttgccctttgtccaacttgctttgacaaacccagcagcctcctaccaacaacacatcattggtggtgccctcttttagattgattattagttgtaattcaataataaagttttttggatgatgtatgtggccaaccagaaataagaagttacattt

SEQ ID NO: 11420 - DNA, 684 bp, Zea mays
  unsure (1)..(684): unsure at all n locations; Clone ID: LIB3061-083-01-K6-G7
cngactagcaacatacattagtgaagtacactagcaacatcttagcaccaatggcagccaagatttttgccatccttgccctccttgctctttcagcaagcgttgctaccgcgactattattccacaatgctcacaacaatacctctctccggtgacagccgcgagatttgaatacccaactatacaatcctacaggctacaagaggccatcgcagcaagcatcttacggtcgttagcattgaccgtccaacaaccatatgccctattgcaacaaccatccttaatgaatctatatctccaaagaatcgcagcacaacaactacaacaacagttgcttccaacaatcaatcaagtagttgcagcgaaccttgctgcttacctccagcaacaacaatttcttccattcaatcaactagctggggtgaaccctgctgcttacttgcaggcacaacagctactaccattcaaccaacttgtcaggagccctgctgccttcttactgcagcaacagttgcttccattccatctacaagttgtggcaaacattgctgctttcttgcaacaacaacaacaattgctgccattttacccacaggttgtgggaaacattaacgccttcttgcaacagcaacagttgctaccattctacccacagnatgtggcaaacaatgtcgccttcttac

SEQ ID NO: 11421 - DNA, 653 bp, Zea mays
  Clone ID: LIB3061-083-01-K6-G8
gacaaccctctttttgggtcttcccgtattgaacaagcccacgttgagcaatggatggattttgccgcaacagaagttgatcctggtgttgcatggtacttgtatccaaggcttgggtacctcccttatgttagcacaactgaggaaacagctatttcttcattgaagaggtcgcttggtgctctgaacacacaccttgcttcaaacacataccttgttgggcatgctgttactctagctgacattgtaatgacatgcaacctctaccatggaattgcacggatcttgaccaagaccttcacgtctgatttccctcatgtcgagaggtatttctggaccatggttaaccagcctaacttcaagaaggtcattggtgaggtcaagcaggcagagtctgcacctcctattccgaaaaaggctgctccttctaaggagccaaaggcaaaggatgtcaagaaggaggctccaaaggaggcccccaagccaaaggtggttgaggcaccagcagaagaggaagcaccaaagccaaagccaaagaatcctcttgacttgctgccaccaagcaagatggtccttgatgactggaagaggctatactcaaacacaaagactaacttccgggaggttgccatcaaaggtttctgggacatgta

SEQ ID NO: 11422 - DNA, 704 bp, Zea mays
  Clone ID: LIB3061-083-01-K6-G9
caacatagaaagtggaatacagtagcaacaatagagcaacaatggcggccaagatattttccatccttatgctccttgctctttctgcatgtgttgctaacgcgaccatttttcctcaatactcacaagctcctatagctgcccttcttcccccataccttccatcaatgaccgcttcagtttgtgaaaacccagcccttcaaccctacaggctccaacaagcaatcgcaacaagcaacttacctttatcacccctgttctttcaacaatcgccagccctatctttggtgcagtcattggtacaaaccatcagggcacaacagctgcaacaactcgtgctaccagtgatcagccaagtagctctggcaaacctttctccctactctcagcaacaacaatttcttccattcaaccaactgtctacactgaaccctgctgcttatttacaacaacaacaactactaccattcagccagctagctactgcctactctcagcagcaacaatttcttccatttaaccaattggccgcactgaacccctctgcttatttccagcagcaaatactactaccatttggccagctagctacaacaagccccacttcctttttgaaacaacaacaattgcttccgttctaccagcagtttgtggctaaccccgcaacctcttacactgcacagttgctgcccttgtccacttgc

SEQ ID NO: 11423 - DNA, 654 bp, Zea mays
  unsure (1)..(654): unsure at all n locations; Clone ID: LIB3061-083-01-K6-H1
ngaaacacaatagtgtaccaacaatggcagccaaaatttttgcctccttatgctccttggtctttctgcaagtgctgctacggcgaccattttcccgcaatgctcgcaagctcctatagcttcccttcttcccccgtacctctcaccagcggtgtcttcggtatgtgaaaacccaattcttcaaccctacaggatccaacaggcaatcacagctggcatcttacctttatcacccttgttcctccaacaatcatcagccctattacatcagttacctttggtgcatttattggcacaaaacatcagggcacaacaactacaacaacttgtgctagcaaaccttgctgcctactctcagcaacagcagtttcttccattcaaccaactagctgcattgaactctgcttcttatttgcaacaacaacaactaccattcagccagctacctgctgcctacccccagcaatttcttccattcaaccaactggcagcattgaactctcctgcttatttacagcagcaacaactactaccattcagccagctagctggtgtgagccctgctaccttcttgatacaaccacagttgttgccgttctaccagcacgctgcgcctaacgcntgcaccctcttacactgcaacattgctgccat

SEQ ID NO: 11424 - DNA, 686 bp, Zea mays
  unsure (1)..(686): unsure at all n locations; Clone ID: LIB3061-083-01-K6-H10
ggatgggtgccaaanaaactcgatgtgtatatagatgtgccagatacaattgatatcacacatatgcgcagcaaaggattacagcctggggaagagctgctacctgaaggaggttctggtgacgacagtgccgagcctgctaatcctgttgccagtgaaattattgtaacccagcttgcaagcatgggcttcaactaccttcattgtcagaaagctgctattaacacatcaaacacaggagttgaggaagcgatgaattggctcctctcgcacatggatgatccagatataaatgacccaatatcaaaagattcacgtgcttatgagccatctgttgacgaagcaagtgttcaaactctcatctcctttggattccaggaagacattgccataaaggccctgaaagcttctagtggtaatatcgagaaagctacagactggattttcagccaccccgaagcatctacctcagcatctgctgattcttccactagcaatgtaaatgctgatgacacatatattccagatggaagtggcagatacaagctgatggcgttcgtgagccatatgggcacctctacccactgcgggcactacgtagctcatgtcctcaaagacgggaggtggacaatctttaacgacagcaaggtcgcagtatctgttgacctgcccaaggaaatgggcta

SEQ ID NO: 11425 - DNA, 690 bp, Zea mays
  unsure (1)..(690): unsure at all n locations; Clone ID: LIB3061-083-01-K6-H11
attgagaccaactagcaacatagnaaagcacaatagtgtaccaacaatggcagccaaaatattttgcctccttatgctccttggtctttctgcaagtgctgctacggcgaccattttcccgcaatgctcgcaagctcctatagcttcccttcttcccccgtacctctcaccagcggtgtcttcggtatgtgaaaacccaattcttcaaccctacaggatccaacaggcaatcacagctggcatcttacctttatcacccttgttcctccaacaatcatcagccctattacatcagttacctttggtgcatttattggcacaaaacatcagggcacaacaactacaacaacttgtgctagcaaaccttgctgcctactctcagcaacagcagtttcttccattcaaccaactagctgcattgaactctgcttcttatttgcaacaacaacaactaccattcagccagctacctgctgcctacccccagcaatttcttccattcaaccaactggcagcattgaactctcctgcttatttacagcagcaacaactactaccattcagccagctagctggtgtgagccctgctaccttcttgatacaaccacagttgttgccgttctaccagcacgctgcgcctaaacgctgcaccctcttacaactgcacattgctgccattcaccaacttgc

SEQ ID NO: 11426 - DNA, 459 bp, Zea mays
  Clone ID: LIB3061-083-01-K6-H2
cccgggtacgaacccacgccgtccgtttcgaaccgggtaaacaacacaacaagcgaagcagcgatccgacatccagagagaggacgcggtgatgttcgggctggagactcccctgatggccgcgctgcagcacctgctggacgtgcccgacggcgacgccggcgcgggcggcgacaacaagactgtcagcggcggcagcgccacgcgatcctacgtccgcgacgcgcgcgccatggcggccaccccggccgacgtgaaggagctgcccggcgcgtacgcgttcgtggtggacatgccggggctgggcacgggcgacatccgggtgcaggtggaggacgagcgggtgctggtggacagtggcgagcggcgccgggaggagcgcgaggacgacgccaaggacctgcgcatggagcgggggatgggcaagttgatgcgcaaggacgggctggcggacaacgc

SEQ ID NO: 11427 - DNA, 350 bp, Zea mays
  unsure (1)..(350): unsure at all n locations; Clone ID: LIB3061-083-01-K6-H3
gaaaaaaacccggggggggcccccaaaacccccaaaaaaaaaaaaaaaaaaaaaggggggggggggggccctcctttaaagggaggaagaggggggggggttttaaaaccccaaaaaaaaaaaaaaaaaaaaanncgaggagggggggggggggggggggggccctcccccccccccgggggggggggggggggggggggggccccccgtttattggggggggggagaaaacccccccccccccccccccccctcgccgccaaaaaaaaaaaaaaaaaaaaaaaaaggaaaagcccccccccccccccccccccccccnncncngggggggggggggggggggggggggg

SEQ ID NO: 11428 - DNA, 322 bp, Zea mays
  Clone ID: LIB3061-083-01-K6-H4
cgtcgcgttcgctccactccgcgggggtggcggacgttttctatctgggcctgtttgggctctgctggctggctccttgctgcgcgaggctgctgctcctcctttttgcagccgtccattgtgtgggggggggggtcggcgcttgttcctgggcaggccatggggcgatgtcagtgggcattggtcttgacatttccaagcgaccactctttgcggtcggccgaagtttaaacttgccgactgtgtatctgtgggtacaacaagtgttggcgctcctgccactctaacccgtggttccggcccctgattgctagtgtcggtc

SEQ ID NO: 11429 - DNA, 643 bp, Zea mays
  Clone ID: LIB3061-083-01-K6-H8
cttctccatcgagttggattgggttcaaagttgggcttttggacagctgtggtgtgcacggcagctctgtgacttgtgaggaggaagggaggaagaaagcggatccatggcgtcgaagcggatcctcaaggagctcaaggacctgcagaaggatcctcccacctcttgcagcgcaggccctgttgccgaagatatgttctactggcaggcgacgattatggggccatcagatagcccatacgctggtggcgtatttttggtcactattcactttccaccggactacccattcaaaccaccgaaggttgcattcaagacgaaggtttaccatccgaatatcaacagcaacgggagcatctgtcttgatatcttgaaggagcaatggagccctgcactgacagtttctaaggtcctcctctcaatttgttcccttctgacggacccaaaccctgacgatccgttggtcccagagattgctcacttgtacaagactgatcgcgtgaagtacgaatcgactgctaggagctggactcagaaatatgcaatgggctgacaagctattggtctctcgtagacctaaagcacgtactgccttctgtaactgaaaccagatgtctaaattaatttgtccattcgtgcatcg

SEQ ID NO: 11430 - DNA, 675 bp, Zea mays
  unsure (1)..(675): unsure at all n locations; Clone ID: LIB3061-083-01-K6-H9
gcctcactcgatccatcgcctcgccgcagcacacacgaggccggcggcgccatggccatgaagctggacatgtccgcgctcgagaccaacttcgccaacctgaccgcctccgccggcgacgacacgtacttctccgccgaggcccccgacgtgccgtccatggtgctccccatctgcgacgacttcgacggcttccaggcggccaccaaggatatggtgaagaataagaaggggacgaccacgcttgccttcatcttcgacaagggcgtcatcgtcgccgctgattccagggccagcatgggcggttatatatcctcacaaaccgtgaggaaaattattgaaataaatccttacatgctggggacaatggctggaggtgctgctgattgccaattttggcataggaacctaggaaccaagtgtcgtctccatgagctttcaaacaagcgaaggatctctattgctggtgcttccaaactgttggctaacatcctttattcatatcgtgggatgggactgtcgattggtacaatgatcgctggatgggatgagaagggtcctggcttgtactatgttgacagtgagggtgcgcggctcgtggngacaggttctctgttggctctggttcactgtatgcttatggtatctgggatgatggttaccgcttcagcatgt

SEQ ID NO: 11431 - DNA, 573 bp, Zea mays
  Clone ID: LIB3061-098-Q1-N7-A1
gcacaatgcttcaaataacaataaagagtaagtaataatattacagactagagccatttacataatataaatcaaagtacacagaatcgaaacatagccgatgtaaacaaacccaccacaagcagctgactggaggaggtcgctagcctaatcctcgaactcgtcgaagtcttggaactcctggagatcagcctctacacctttttctttacctgagcatagattgcaccaaaggaaacctggtgttttgtgaaagcaagggtgagtacacatcaacgtactcagcaaatgtcctgtttggctgaagtggactagctttatgtgggtttagggtcaagcagttgcttttagttggtcaggtaattattactagtagagagccagattttaacattaacacaagttgttaacccaaaagtactctttccaaacggaaagaatacctaaaatcataatcataatagaaaccaacattttcctcatcatcatctataaacaaaacatctctgatcaatgtgtctctaatcaatggagctcccttggccgcttataactgcgagcacggctgatata

SEQ ID NO: 11432 - DNA, 586 bp, Zea mays
  Clone ID: LIB3061-098-Q1-N7-A10
caaacgttatttgttatctattacattacaaacatataaaccaaacagcaacttagttcctatattgctaacatactgcaacatcaaacatatcaaattacaggtacaatggaaccaccgaccaggccagttcacttcttcttttgcctcgcaactgattctttagctacggcgtgcgctgcttggctgacaaaagacttcttcatattacccttagggtcgagggcttttctaatcttgaatacagcccacgcagctccgagaacatttcctgtagcgtggaggtaattgtgtgtggcttcacctgcttgttcaccgtatctgtgtgttacaacagaagtggtcacaactgaggatgtctgcatcacatttttgccagacacttccacagcatcccatattttcccaaatccatcaagtgaagcaagaataacttcgccaggcattaacttgaaaaacttttgtgctggtttggagttcaacacggtgcttgtgacaaagccagtgactttcagaacaccagacaggattgagtttgccaccctgttggacatctttgtaaccctcctagccctcttcatccttc

SEQ ID NO: 11433 - DNA, 583 bp, Zea mays
  Clone ID: LIB3061-098-Q1-N7-A11
ccatcaccacttggattttctattacatttgaatccccctgatgcacaatgtttgacatctgttgcatagaaggttcgtggacaatctcccttttagtagaagctgtatcttgtttggtcgcattttcactataccgatgatctttttcaccagaagcatccacggaaggcatgtcaacagaaccaacctttgatttcttgcgcttcttcacttgcgaggtattttgacttgtttgcctcttgtcagagacatctgtacttttgccatctttctccatgttgcttgtttcaggtacacctgcattatgacatccctcattgaggtgttttatttcttcatgcctgtcccctccatttaaaggggcacaacttccttttgtagtctttccttcaatagctacattttcacctgtagaataaatgtcatctgcaattaaaggatccctacatcccttgagagcatgatcaaacttctcttgttcagagattaaatcagtagatgcttgatcatcgctcacaaacttaacacttttgcccccctggtttccatcattatgttcataagatgaaagaggcaaaccac

SEQ ID NO: 11434 - DNA, 422 bp, Zea mays
  Clone ID: LIB3061-098-Q1-N7-A2
aaaaaagggacccccaaactttttttaccccccttgtttttggggggggggggaaaaagggtttaaaaacaaaaagccccggccggaacccccctttttgaaaacttggcgccggggttgtttaaaccggggacccctttgggggggatacattaacacccccccccccctgggtacctccgtttttttaaacccccacatgcatgggggtgggcacattaatttaattcacctcccccaaagaaaaggggggcccttgtttcgggcaagggccccttcccaaaccgtttcaaacgtttgtttcccccccccccaaaaggactacttgggaaactgggactttttaaggccacccccccccctgggggggccctctccccagaacttttccggggggttaaaacccccctttttccccattt

SEQ ID NO: 11435 - DNA, 464 bp, Zea mays
  Clone ID: LIB3061-098-Q1-N7-A3
ggcttaaaaactttttggccttaaattgggccggccccggttgaattttagcatttaacaaaggggggcgggccttttttgggatgtcatttttacaacttttatttcctcaaaatgttttacccttgaagtttttgattcccccttcaagttttccaacacttggcaaagttttgtttttttttgcttttcattctcaagcccaacctgaaaatcctgaacctttaaaaaagcataacttatttactttcgatcacacccttgtaaatgcctccaaacttgtaaatcaaggggccaggggggggccacttgccaaagtccacatggccaataaccacaatgttgaaatgggacttttttttacccatgactagaggggaagcttaaacttggaacaattagccccactcatttttgcaaaaataaaccccaaactggccctggtgtaaattgctgcaacccct

SEQ ID NO: 11436 - DNA, 448 bp, Zea mays
  Clone ID: LIB3061-098-Q1-N7-A4
gggttaaaaactttatggccttaaattgggccggccccgggtgaattttagcatttaaaaaaggggggccggccttttttgggatggcatttttacaacttttatttcctcaaaaaggtttacccttgaagtttttgattcccccttaaaattatccaacacttggcaaaattttgtttttttttgcttttcattctcaaactcaacctgaaaatcccgaacctataaaaaaacataacttatttacttttgaacacacacttgtaaaagcctccaaacttgtaaaacaaggggccaggggggggccacttgccaaaatccacatggccaaaaaccacaatgttgaaaagggacttttttttacccatgactaggggggaaacttaaacttggaacaattagccccactcatttgtgcaaaaataaacccaaaactggccctggggta

SEQ ID NO: 11437 - DNA, 429 bp, Zea mays
  Clone ID: LIB3061-098-Q1-N7-A5
ggggggaaaaaatgggggggggggggaaaaaaaaaaaagggcaggaaaggggggggggccacccgggggggaaaaagggggggaaggaaaaacccaaaaattttggtgggggggaaaaaaaaaaaaaaattgggaaaccctttaacaaaaaaattgggggacaaaaaggaaaaaaaataaacccccccccctaaaaaagttttgggaaaaaaaaaaacggggggggcccaaaaaaaaattctcaaaaaaggggggaaaaaaccaagggggggggggagggaaatatccatggggggggacccccgggggaaaacccccgaaaaaaaaaaaacccccccaagggaaaaaaaggggggggaaatccgggggttttccaaaaaaaaaaacccccggggaaaaaaaaaggggccccgggtttgccccggggaa

SEQ ID NO: 11438 - DNA, 577 bp, Zea mays
  Clone ID: LIB3061-098-Q1-N7-A6
catggttgcaatatgaccatccaatctaatagaaattcaattaggttcatgttcagttacattgcactatttgttcacaacaaagcccagtacctgaagttgctaaaccgatactccgacgggtcaggaaagtaaagcactggtctcgcgcacttcaaacagaagtgaacattgacaaatacacagctgtcaacaattgagtatccaatgcctgattttattacaaaccacagggctgtttatggaaccttcaggtacttaacttactacacattatttgcttttccaggaactggaaaccaacttttacatttaggaaaagcgggagcattccacctcatagtacaagtttcaatctggtgggcataaacaatccaagcccatgcccatctaccagtgtacgctcatatctgaagagcatctgcaattgagccagcgaggctcaaaacctcaaatggaggtctttgcccaatagcttttactgtgtgtgggcatgagtccgtgatccagaataagcaaatctgtcacctggcccagcagaactagacgccatgaaacgttcatatgactgcttagg

SEQ ID NO: 11439 - DNA, 563 bp, Zea mays
  unsure (1)..(563): unsure at all n locations; Clone ID: LIB3061-098-Q1-N7-A7
aacgtgaatcacataaacaaactgcagagactgtcaaatacaacatccatcttacgtatctcatttgtctacagtatgcgctcaggagggtttcaaatgtaagaaccacatgtcgctggagcaaatcagtttacagagtgataaaaccaagacatgtcgctggagcaaatcagtttacagagtgataaaaccaagacaagcttcaggctggctgctcataagtgatgctgctattcttgtttgaaacagtaaatcatcaacagacaacttactccaccttttccaagaaatccttgatctctgatgggcttagaactttgaactcacggtcagctcgaataattccgatttcaatgttgttggaggaaatttgcccctcatatccttctttcaaagtcaaaattgcagtgtggatggcatcatcaagctccatatcctctgngtatctcttttcaaaaaatgtctttgcatttgacacattttttcccatggctgatgccttccaggagaagttgatcctgagggatcaacctgatacaactgtgggccattgtcattatacc

SEQ ID NO: 11440 - DNA, 530 bp, Zea mays
  Clone ID: LIB3061-098-Q1-N7-A9
ggagtacaatcatggcggcatgtattagggatagataaacgagtgatgacagaacaaagtaccaaaccatactactaaacaaaggctaaggatgtccctcagcaatggcacaaggagccagagcatcacaagttccttaaaaagactttttcccttttgtttagtactacgcaggacggagagcaaaacgaggcttttaggtggtgctaggaacgctgcctccggtctggtgaagcatggcgtcgatctcgtcgccgtcctccatctccagctcatcaggggtctgctcgccgcgaagcctgcggccatcaaacaggaacgcaatggcattcatgtccacagactggcggtcacaataagcgttcatcagcttcttcagctgggtggacctctttatgcgaaagaacacctcattgccatcctgtcccttgaccttaaggttgatgtgggcgccgccctccgcgggcttcttgtcctcctcgccggctccagacatcgttaggggttagttttccggcgatcgatcgatg

SEQ ID NO: 11441 - DNA, 564 bp, Zea mays
  Clone ID: LIB3061-098-Q1-N7-B1
ttttttttttttttttttttttttttttttttttttttttttttttttttttttttttttttttttttttttttttttttttttttttttttttttttttttttttttttttttttttttttttttttttgggggggggggccccaattttttttttttgggggcctaaagggggccaattttttaaacggggggcaagggggggcggaaaaaaaatccccctaaaggaaaattaaggggcccccaaaaaaaacccaaccctaaaaaaaaaaacttttaaaaaaaaaaccggaaaaacatccttccggccccaaaaaattgcccggggggggcccaaaaaaccttggccccccccctttgaaccaccccggggccaaaaacaaccggtccaaaccccacccccggggcaaaggggagctgggtgaaaacccttggggaccccccaaacccttttttttttttccaaaaaaacccccccgggttttatggggaacctaaagggacccccccccaaggggaaaaaaccccccccccccagggggggatggggggggggccccttgg

SEQ ID NO: 11442 - DNA, 395 bp, Zea mays
  Clone ID: LIB3061-098-Q1-N7-B10
gctgctgaatttattttactaaataataacttgctactgaattccacatcaagcgaaacaacactgcacctactagatagaagaaaccgatccccctttttgtggatgagcactaggttcgacagatccaagtacccaaccctctctactggtaccagttccatccaattcggaccaccacccgacacccatttgagcaaatgaaaccacggggagctgaatcatcattaccaatactcgcaccagaagcggagctgatctgcccggccgggccgctgctcgatcgccttgaagcactccagcgctggcatggcatacccgaacagcaatgtgaggaatttcgtcaggagctcgatcgacatccctgaaccagcgtggaattcacgacgggagga

SEQ ID NO: 11443 - DNA, 596 bp, Zea mays
  Clone ID: LIB3061-098-Q1-N7-B11
gattcacaacacaagttaaatccagaatcaaaacaactcgtctaaaaacaactctgcgaacataaatctctttacagcaggcataatattacagtactattggaaaagcttataaagcttgttttgagcggcggggtggactgccactacgcaatgaggaaaggcagcacggtcagcatgaaggcctcgtaggtgaaagtcgccgacccagagtaggcggtgtccttctccttgaacttctctgtcagccccttaacagtgaggcagcattcaatgaagttgtcatattcgattgctttgctcttgcccccagtcttgtcaaatttagacacaagcagatcaaggacagttggagacacagaatatccgagactgagaagagcatcgcgcagttctgacatgtcgatcctgccacttcgatcacgatcaaacctctcaaatattgctctccagttctgaagactgtaaaacacagaagtaaattccttgggtccgatcttgcggacgttggtgttggtgaagaggtacatgaggaggtggacggtgcggaggctgaagctctggttgtacccggacagcgcggactgcagctcctt

SEQ ID NO: 11444 - DNA, 549 bp, Zea mays
  Clone ID: LIB3061-098-Q1-N7-B2
atgcgaaggttaatgaagttttcagattgctataatttttttttgacagcactgacgatcccagattttgcatctggtgatgggggtagagagaaggcctcctcggttcaacccgtggggcaatatggcatgcttctgcctgctggagttctaaaataataaaaaaaaactagcgtgggcgatctggagatgactgtccaaaagggcgatccatgtatggccagagggaaaaaaaaccccgctaaaatcagcataagcatacatacatatccaatcaaacacatttggagatgactgtccaaaagggcgccatttctcgagccacaacgtcacaatgcagcaactcgagctttgcatttctcctagcaggcacatcgaagcgttcggtcttccaagtcgtcagcaacattcagtcctgaaccggcgaggtgactggagtcaacgaggacgaagtatcagcggatacgtacagcaccagccactgctccaaacacggaaagcatggcccctgcttaaacttgctatgaaaagcaaagcgagcggctttgc

SEQ ID NO: 11445 - DNA, 540 bp, Zea mays
  Clone ID: LIB3061-098-Q1-N7-B3
acaccataacagtactttatttcaaacaaacatagaacatttaatttttttttaaaaaaaaagaaaagaacatgtccactatgcctaaggacggagcggggggaggccaaatacggcccgcctggccttggtatactccagaagcctgtccacgtccgggatcagccccttgacaccctccagcgcgcaaaaccgctccgcccacgccgccagcagcggggtcctgccggcgtcgagggccttcaccccgcaaatggcctcgggggcgtacagccacccaacaaggccgccgagcacgacgtcgacgagccccacgctgtcccctccgaagaaggccttccccttggagcactccctgaacgcctgctccagcgtttccagcgccgcgacgggctgccttgccgccttcgccattttcttcgccgtcctgcccctgaacacgggtatccacgcgctgtagaacttgtcgtcgacgtaggaggcccaaaagcgagcaatggcgcggtcgtaggggtcggatggaaggaaattaggtgcggc

SEQ ID NO: 11446 - DNA, 469 bp, Zea mays
  Clone ID: LIB3061-098-Q1-N7-B4
accttccagacagacttatcaattattcccctagcaaaggattttaaaatttccgaccgggagcggggatgaaaagacaccgggattaaactgggggggggaagaacacacacgatgaaaaccaggacattcgtaacacaaacttgggggggaaagaccaccaaaggacgggcacccacacgtacagggaacacagcattccgagacgacccttttgatactgacaaaaacccacccgggcatccatccatgcatggatgacttggttacgaggaaaccctggcgtcggcgaaagcgccgggaccttcaccttccccggagccggactcctgggccctgccctggatgggctggcctgcctgcagcggtcttggggcccgtttgggccgggggcttggctattctgcggggcgcctcctccaaatagtccggggtgggctggaacgcctgcccccccctgttggcgagg

SEQ ID NO: 11447 - DNA, 425 bp, Zea mays
  Clone ID: LIB3061-098-Q1-N7-B6
ggctaggcaaacggagttatcaattcatttctgcaaaggaaacaaccaaaatacaactgggggggggaaccctttggactaccacacgacatcacatgggccaccaaacaccggatcgaaacaaaaatctaggaaaccgggcccctcccacaaaatggaaagcacaaaacagggaacccaaaggaaaaacccccccagtaccaggcccacccccaaaaggacagggcccccttaaccccccaaccccaacaaggggcggccctggcgcttgagggcgtaaaccacctccaagggggggaccggttttcgaccggcgtgcccaatgtaagggaccgcgtcccggatgaccttctcaagaaaaaacttgagcaccccccgggtctcctcgtaaaagaaccccgaaaagccctttacgccccccctcc

SEQ ID NO: 11448 - DNA, 581 bp, Zea mays
  Clone ID: LIB3061-098-Q1-N7-B7
aaaccaaaatcatatattcaatctgaagtgataaataatctcacagattgacaccaatactttcaacccaacctgggttttcatttggagtcacaactcagaactccatccgtacgtagctagctagacgattcgttgattcatttatgctgattatgttcagtttagaacttggaaagcagcttccccattgctgatgaactgaacccagcttatttttttttcgaatttatttagagccttctccaaatcattcttcttcttctgagtcttcatcaaatcctggatttggccataacttgcaggccactgctcccagttgtgggccgtggatccttgaactgctcttcagtaactcctttgcccatggctgcagtcgaggagatgccaccctgcacagccttgagcaccctgtcgtagaaattggcgcccgaccacttctgatgctccagcgtctccacgccgttgatcctctcctccctctggatcctctccacgtaggccagcatgccgcggcgtgcgaagtcccgcgcgaacgtgttcgtgacgagcgcgtctgcgtggaacccggggagcgtgat

SEQ ID NO: 11449 - DNA, 537 bp, Zea mays
  Clone ID: LIB3061-098-Q1-N7-B8
gcattccaaatgtccaatcatgatgtccctagaaacaggcgtcaagaaacgaaaatcctcacaataagcaatacaaaaatgccggccgacaatggcaaacaacatcagaccctcaaagaaatctagattcgacgttctacactcagaatatcctcgctagtcagagcctactcataaacatacaacaacaaaatcaccatacacagcttcataagcaggcaaaaccccgcaacagagcaagatactcaggttggccgtctctctaatctcttgggcatattgatgtcgctcctcaattcagcactctagctccaataacaaaattgtctcaactccaccgctgactaaaagctaagggaggtagaaaaaactgcagtcattctcaaaggatgacagctgccttgtctggagtaacatgctggaggacagtggcgatcaaaggctcgtaatggtcagcaccagcaccacaccatgctgttcctttcatgaaaagaaaaatcggtggctcgcaaacttctcctcgagaactgtgtggga

SEQ ID NO: 11450 - DNA, 209 bp, Zea mays
  Clone ID: LIB3061-098-Q1-N7-B9
agccttattagttctgaaataaacactatgttagcgctgttagatgaaggccacttgacgatcaactttcgttttgacatccggttagtccatccatcttcaggctcattggccgacattggcttgggggttgttttgatccacacccttcgcttcgcacgattttcagctagcgtaccaacactaaatagactcaaatttcgcaagag

SEQ ID NO: 11451 - DNA, 484 bp, Zea mays
  Clone ID: LIB3061-098-Q1-N7-C1
ttttttttttttttttttttttttttttttttttttttttttttttttttttttttttttttttttgggaccctaccaaaaccccgcaaaaaacccccctatagggcgaagcaaaaatgccccccctccaaccaaaaaacaggggaagaaaaggggtcccgatttgcgcgggggccaaaggggccaaaaattgggcttttattcccaaaaacacgtgaaaaaaaaagggcggcaaaaaaggcaccccttaaaaaggggccccccgggaccggggggaaccaaaccaaaaaaaaggggcggggcccacaaaagccccgggggcgaaaaaaacccaaaacccgggggcgggacccccccccggggcttaccaaaacaccagctttaagaaaggagaggccaaaccaaaaccccccccggggcaaaaaaaggccgggcccgaatcacccccaaaaaaattgggaacaaaaaccctggtgggggggcc

SEQ ID NO: 11452 - DNA, 601 bp, Zea mays
  Clone ID: LIB3061-098-Q1-N7-C10
gacgcgctgccaatctggatggaagcttaatctggtactgccgcaaattaacactgcatatttgcatagctaggactattaagactaggagtattaagactcttctgaaactcttctgaaaattaacaggattgatggatcaatcaataggcagcgaccagagtaggagtagctaggagtgatggatcaatcaataggccaacaatctggccgtcttggcgaggcacttgtcgggctccctgacgatgtagacctcgtcggcggcgacgttggcggcggcggcggcatggaggtcctggttgcggtgccaccgccagagcgcgtgcgtgtcgttcctgacctccaggacgccgtgcccgaagctgctctccctgtacgcgctgtactccggctggcggtcccagcagaagcggcccgcggcggggcccgacgtgaagttggcggcgcagaggcggccccccatgaaggggtccggcgtcgacgccgggtccgggcagtggccggcctcgtccgcgtgcgccgtcgccatcttctcgcggttgccgccgtcgcccaccgagaagtgcacggggccgcacgcgtccagcgtgtagttgaacac

SEQ ID NO: 11453 - DNA, 575 bp, Zea mays
  Clone ID: LIB3061-098-Q1-N7-C11
ccagtcaatacttaaaacagaaacgttgtgctcctgcctccacaattgtttcagcagcgatgtgtcaagggaaacccaaaacactggaacaaaatctcagactcgatcctacagaattacagttgtgccgaccggacaggcaaaacatgctgggggcccctagcattttccagcatcttggggcagctaaaagaatctcaggcgtcattggcatatggggactcgtcgcgttgtggctgctgtcctggggatccactatagcttcttctggcatcaggaggtggtggtggcgacctgctcacgtttcgggctgccggtggtgacctgctcacgtttcgggctgccggtggtgacctgctgttatttctgggaggaggtggcggcggcaacctgctcacttttcgggctccaggtggtgacctgctgttatttctgggaggaggcggcggcagcggcggtgacctgctgagactccgtgcaggagatcccagtggcgacctgctgtaacttcgcctcctaggagaacgatctcgcgggcttctgctatagcttgggctccttcgatatcttgggct

SEQ ID NO: 11454 - DNA, 554 bp, Zea mays
  Clone ID: LIB3061-098-Q1-N7-C12
acaaaacatataatacatatatataccttgtttatgtatatcgcatacacacctagccttgaccctcggcagccgtaccaaatacaacctcctgatgccacattccatttttcagttgtcctcagttacgaacgtatggcaagcttgatttctactagcagataaaactgcggcagcatgaaccgtaaccgctgattactaccgtagaagtgcattcaccaaactgggaacagaggaccagtgcatcctttcctgtgggaatcgggtatgctgttatagcggtacaggtggttcgatagctcccagctccagtcgtccttccttgacaccttcatcggcggccaccggttgatcctcacgtagtgctccctgatctggccatcgtcgacaaagctcgttatgacggtgtaggtgcactcatggccaccccacacggcgtcatgagggtctgcactgtggtagccatcggggtggaagtagcgtcgcataggtggaccagtgtgcttccatgatggatcaaggttcctccagtaatcaggtgctgctatggtgaa

SEQ ID NO: 11455 - DNA, 612 bp, Zea mays
  Clone ID: LIB3061-098-Q1-N7-C2
agaggaccaggcttgcatatgcattatactagaaaactagatacacacagaaggttagttacctttgtagtaactggcaaaaaggctaagcttttcctgctaattattcataccaagcttagtttctatgctacgcttccgttaacatcgatcgccaggacaaaacccgaaaaaagaatcgatatgtgcaaccaaggtgaggaaaactgcagattacggaaactctccctatctcaaactcataagctggacagcgttttttaaggccatgtggtgaaaagtggatcgtattgcttctatagctttcagacatcagaaaagccagatccttcttttcacctatgcttctccatgcagattcccaagcacatggctcttcagatattttttctacagtatcaaactgtcgctgcaaattaagctgctgtctgtctagcagtggcctaccacactcttggttcttctttcaaatgactgctgccaagaacttgtgccagaggaaatttaccgtatgagcacgagggagtatgtagctagctagcctttcatccacagaaacaggcaatgggggcatcttgctcattattccgggaatctggcacatgctttgta

SEQ ID NO: 11456 - DNA, 638 bp, Zea mays
  unsure (1)..(638): unsure at all n locations; Clone ID: LIB3061-098-Q1-N7-C3
ccatagatctttctctgcagcttttgccgcttcattgagcaactcaacaggattttccagataacttatgtattcagaagagagacgtggagaaatgtttatatccagctgaacatctttgtatggtactgggactaggcaaaactgatcaacacgagcaagtagttcagaataggaattatcttcttgaccatgtaagatgcatctcgcaatactgagaagtggtcaactctactgatgcaaccatcaggctcctgttattccagatcccatcgttattagtcgttcaggagaacgaataatgatcttccgtcgctatcagcccacgcgccgttttcttctgccgtccagagccgttcttctctcttcaaggttcttctctctcccgtcaagcctcttccttccatctcattttcttcaatctccatttccctcccctgctagtctcctcccctgctgcccggagatctgctgcccgtggtcccgcgccaaagcaggtggcggcggcgctgcacctccttctctccaaactccgcgtcttctcccttgctgctcgcggccccgcgccaaagcaggtggcggcggcgctgcgaccacaaccctagtccgcgccaaagcaggtggcttngtcgttgttg

SEQ ID NO: 11457 - DNA, 400 bp, Zea mays
  Clone ID: LIB3061-098-Q1-N7-C4
gtccgggtccagcaggggaaccaggcccgcaaacagcaaggggacaaaaagcccggagaaagaagggaaaaaaaggttgacaaaaaaaagagggaaaaccggtaaaaagggcaaaaacaaacgagccaaaaacaaaaaaaaaaaaaaaggggaaaccaaaaaagggaaaaaaagaaaaacaaaaggagggaacaaaaaaaaataaatggagaaggaaaaacaaacaaaacagaaaaaaaaaaaaaaaggcaaaaacccgaagaaaaaaaaaggccaaaaaaagcgaaaagggggtttgccttttgaccaccaagacgggaaaaaaaaaaaccacccaaaacgccaaaaacaaaaaaacccacaccccgagggccaggcagatttgccccaacaggcgaaa

SEQ ID NO: 11458 - DNA, 624 bp, Zea mays
  Clone ID: LIB3061-098-Q1-N7-C5
caaaacaacaatcggttataaaatgcaaaagcaaatacgtcccagactgcaacttcagagtgcaggtccaattgaataataaatatataatataatacgatactagaaggtacacgacaggaaatacggtccaattgaattttctacatgagctgcacataacgctccgtaaaagttatttggcactgtttggtttccaggtacagattattgagggtctcggatggctagactccagactacttactgaatcaaaatctccatcattctataaacagatacaattctggagctccagcatcaacttattgtttctgccactgcaaggagaaggaatcaattaaaacctggtaatgaaagactaattgtctaattccatgtctgatgtggagcatttgaaatgcaaacgaggcacagtaaacagcaatgcctttgggaagacaaatggggagtgcctatctgctcaaatgacaaagatatggcgccaccaagtaatatagttctttttggccctttttttcgtctacattcgaagaaatcataatgaatgttgatatacatacaaactacattcataaattaattaatggatgcatgtttagtctataacgaattatattttgg

SEQ ID NO: 11459 - DNA, 610 bp, Zea mays
  unsure (1)..(610): unsure at all n locations; Clone ID: LIB3061-098-Q1-N7-C6
cggaaaagcaggcaaggaggcgcgttgataatttgtgcagatacaaccatgcataggttctttattcagttttctacatttttttctatgagcatacatatactggtattactgaccgcgcagcggcacagggcactgcgtacattactggagtactgctcgagaacgataggcgagttcacttggtcggcctgggcctgacgaccagcaccgggcagcaggcgtgatggatgaggtagtcgctcacgctgcccaggaacgcccttttgatcgcgccgaggccccggctgccgaggacgagaagcccggcctgcatacgctccacggcctggcggatggcctccttggcgtcgccctccacgacggcccccgtggcgtccacctgcctctccttgcagatgtccagcgcgcgcgccacgaccctgcgggagctctcctcctgcgccgcccgcacggactccaccgccgaggacggggcgtacacgatgccgtgcgcggcgacggggtaggcgaaagtggtcggcggcgtgctgggcgtgaacgacgacgagcgtcgcgtncgggtggcaccgcacgacgttgtccagcgcccacgacagcgcgtgcaggc

SEQ ID NO: 11460 - DNA, 580 bp, Zea mays
  Clone ID: LIB3061-098-Q1-N7-C7
ctatactgctatacgtccggttgtaaccatgatcgacgtgattcatttggctcaaatgcatatgcgaatttaatatgttgctaaaccactttgaaccttggtttcgaatttagtgttctactgaacgtgtcccggccgggataaacctcgtccaaaagagagggtgagaatggtgcactagcagtaccactggcaccgggacgtacgattattttgtgcaaaccacgtacgaagtcttcatgcttggacgcatatttattcagacacgttccttctttacaagtgctgtgctgacagcattacacaccgctacaactgaaccctgccttgccttcctgcgtgcgcgtactgacactgctacctggtactgactggtacacacggacactcgctttgttcccttggacttggacacgatcacacgacagcaaaacagcttccgtatctagctattgacgatgacgcctccgttgacgtggaggatctggccagacatgtaggacgaatcctggttgctggcgaggaagacgaagctgggcgcgatctcggccggctgcgcggcgcgcttcatggggcacct

SEQ ID NO: 11461 - DNA, 454 bp, Zea mays
  Clone ID: LIB3061-098-Q1-N7-C8
gggaacccccccaaaaaaaaataaggggaagggggtgggggggggcaaaccgaaaaaggggcccaaaaggggggggcaaaaaaaaaaaaaagggaggaggggaggatcggggaaaaataaaaggggggtgggaaaccaaagggacaaaaagggggggaaaaaaaaaaaaaaacctgttgccggggaaaaggaaggcccaaaccgatctaaaaaaaaaaaaaaaggttaaggggagccaaggaaaacgggtcccaggaaggggaaaattgctccaaaaaaaacgggggggggggagccctaaaactgcccaaaccggtttaaaaaggttccaaaggggggggcaataaaaaaaggttgttaaaaacgttaaaaggggtcgaaattttggccttcagcttaacaaagggctccaaaagggaagggacttgggggacccgacatggtgaagttttga

SEQ ID NO: 11462 - DNA, 574 bp, Zea mays
  Clone ID: LIB3061-098-Q1-N7-C9
ggggcaccagagtaacagtagcatatgaatacgatacaacaatactgcgaatctctcagcagtttcagtacagagtcgaaaaggggggaaaaagaaagaaagaaagatatcggacgaccaaactagtaaaagataacagatcagcacataataatgctggctgctgccaagccaaattatacccaatcactaagcctgcatggcatgggttgcagttgcagcggcgattgccaaagcccttcatcatccttctctccgttcatcttctatggagcagcagccagtcactgatcaaacacacacatccagcagcagcaatgcttgcaggtaacagcagagccagaggaaggtagtcctcatgtccacagtgaacactcccaaccttaagccgatgccttgtcgaacttgaggggcttcaccacctcccaggtgaagtcggcgtcgtcacggccgaaatggccgtaagcggcggtcttgatgaacctgttgccgcccttcttcaggtcgaggttgatgctgatcatcccgggcctgaagtcgaagttctccttcacgatcttgaggatctccttgt

SEQ ID NO: 11463 - DNA, 534 bp, Zea mays
  unsure (1)..(534): unsure at all n locations; Clone ID: LIB3061-098-Q1-N7-D1
gagggcaagtggtagcatacagcatgctacccacgaaagtctactacatcatacccatcatagcatgttcgaatacaacaaccaaacctaagctccagcttgaaagaaagccaggtccaaagacggtacagtatgcagcagggtccaagatcaccttactcgtcatggacctcctcctcgtcctcgtattcctcctcatctgcagtggcatcctggtactgctggtactcaaacaccaaatcgttcatgttgctctcagcttcagtgaactccatctcatccatgccctcaccagtgtaccaatgcaagaaagctttcctcctgaacatagcagtgaactgctcgctcacacggcggaacatctcctggatggaggtggaattgccaatgaaggtggaggccatggaaaggccgcgtggcgggatatcacaaacactggacttcacattgttggggatccactccacgaagtaggacgagttcttgttctggacattgatcatttgctcgtccacctncttggtgctcatcttt

SEQ ID NO: 11464 - DNA, 597 bp, Zea mays
  Clone ID: LIB3061-098-Q1-N7-D10
atccgtcagactggcaattcttgatattacatactagtctttacactttacaatttgcctctaatgatttcttgaaagtttatggagtccccagtcaggtaacctggccatcaatttcctgataagttattgtccagcatttctatgcgagttctcgccaacagtctacattctaccggaaaaaaatgctcttatttgtgtctgtcatcttgttgaagctgcctgacggatgagcctgagggactcggcgaagtcgtccaaaagctgatgagagtctggaaactgagcatcatccactgcgaggacaagcttgatggagttcgtatagctttggtaatgtatagtcagagcatgtggatgcccgtagacagagggagcgatgtagacgattggatggccgtagaactccaccttctcagcaggtccgaccatgcttgagaatgacatggtcgtatttgtgaacataccatagcagagagctgctgcagccttcatgccaaatagtttgactattaggttcccactccagtacgtgaaaaccgcttctaatgaagccttcttcctttgagctgtccttttcccttggcggatgtattc

SEQ ID NO: 11465 - DNA, 479 bp, Zea mays
  Clone ID: LIB3061-098-Q1-N7-D2
attcacacatttgttttttttcctttgccgggcgtggcgtacggccaagcgggggcggggtgatagccataccaggcccagggggggggctacgcaaccgaaaacagcggtcgccaggacaaaacccgaaaaaaggatcgatttgtgcaaccaaggggaggaaaactgccaatacggcaaaccctgccaaagtgaaactcataagccggacagcggaaggataaggcacacgtggcgtaaaatggagcgcactgcaaatatagctttcagacaacagaaaagccagatccttctttccacctacacccaggcatgcaaattcccaagcacaaaaaccttgatatattaattctacagaaccaaactgtcgctgcaaattaagccgctgactgtctagcagaggcctaccacactcttggttcttcgcacaaatgactgctgccaagaacttgtgaccacagaaatggaccgtatgagca

SEQ ID NO: 11466 - DNA, 590 bp, Zea mays
  unsure (1)..(590): unsure at all n locations; Clone ID: LIB3061-098-Q1-N7-D3
aactgttgcatgcgcggcctcttatatttattgaaagcaaaacagcattacttggtacattacaaagcaggcgtacaccgcctatacggctatacgcgtactcgggtcgtaagcctgcagagcatctgcagcaaacaaagcctacgtactacggtgcatgcagatgtagtgtagcagcatgcatcccctctacacgtacgtacttattgttggagaacaaagacacacggcaggaatgatacgcaagcaccataccgcacacatttagaggccacatccatctgcatgcatgttcttctcatgaagatttcagtttgtggcagcactgccggcgccaaagcaacagaatggagtcatgggggtgcaggggcagttctccagcgccgtcttctgcaaaccggagcagcaccatggtgtaaatgggctgcaggggcagtcctctagcgccgtcttctgcaaaccggagcaacaccacggagtcctggcggtgcaggggcagttctccgtcgccgtcctctgcaaaccgaagcacaccacggagtatggcggtgcaggngcagttgctcgtcctcccggaggctgagcgctca

SEQ ID NO: 11467 - DNA, 594 bp, Zea mays
  unsure (1)..(594): unsure at all n locations; Clone ID: LIB3061-098-Q1-N7-D4
ctcaattggctaactcacaactaatttacacttcagctgaatcttcttacatgctataccatcagtaatcagaacattcattttccttttcgtgctagcattttactcaatctacccaaaaaggaaggaaaaagaatgaaaaatcatacattctccgacaaaaaccaagcccccacatctgattctcattagggaggaagaggcagagactgggatggaggggggctaaaattagaatgccatgatgatttcgaaagaatcctcgtgtagagtatttggttccacacgtccggcacgccaggaaggcaccagtggatgcaatccgcgaacttctcggggtctgccttctgcttaggcgtcagcagcttcccttgccggatggtgtacgggnacgtngtgggcgtccttccggtaatctgacatccttgtgatattgatcactgtcactgggaccttctccatggagctggccacattgaccactaagtcatacagccgcatgtcatggtaaagatccaggtgttggcctgtagttctgatatggaagcgtctctcttacacatttgataccgtnccgggtttccccaattctgt

SEQ ID NO: 11468 - DNA, 552 bp, Zea mays
  Clone ID: LIB3061-098-Q1-N7-D5
gacaaaatgttgaattctattacatcacaactcagattttaatccagcatctcatcacaaaaaatctgaccacactccagcatgtcattacatgcaagtatccaatagcatgtcattacagcaagtatccaaccactgacacgtaagccactccaacacaccacacatgccgctaaagctactctagcagcacaatagacaaaaaatggattgaaacgtatttatccatcaatagaatgcaatagcatcagcaaaagagaagtaccaacaaagcctaacaccccatactagttagctttaacttggttgaatctgacttagcataagctcaagttgagcatccatggcatcttgcttcttcttcatctcttcttgctctctaatccttaccagttctgcttcatgcacttgctttaataatacatccatgcgctcacgttggatgctgacaagtgattgaagctctgcatttgccttcctctctattcaagttgtgcttcaatattttgtacactagatctaggtcgtgcattttggattcccacattttga

SEQ ID NO: 11469 - DNA, 537 bp, Zea mays
  Clone ID: LIB3061-098-Q1-N7-D6
gactagcgatttattcatccattcaacctcatcacaatctgttcctttctactgtcacttgtgataattaactaaaaaaacccaccgaccgcggtgtaattgtgtacataacctcaatgggatacacagacatgccgccgcaaagcaaaacacgtcgcaaatcccctctctttctaactccgtccctctctctctctccctctggtcccgcaaaaactaggcgttggaggcacgttagcgccaggttttcctcccatgcttacgcagccacagccgtccacaccttggatgctcacagctcgtccttgacgggctcggcggcggctgccttctcggatgccggtggcccctgggtggtggtggttggtgggcagcccctgcggtctccttgctcttcttgatgaagtcgacgatgtctttcgccgtcctgccgctgtcgtaggatgtcaccttcccgctcggggtcacgaagtacaaggtcgggtagccttggacgtcaaactcactgggaacgtcattggcagtcgcgtccatctt

SEQ ID NO: 11470 - DNA, 570 bp, Zea mays
  Clone ID: LIB3061-098-Q1-N7-D7
ctgctcatcactcagatcactatttttgatagcatttgatttgttcggaaaacaagcaagcatacgatcattatacacaaaacaacgctgggacagtcactgtgcggcggcgatgaggcgggacgagctgagctccgtggtgctgtagaaggactcgtcggggcagtacccggcgacgccacgctcgtcctcccaccggaggacctcccggacgtagcggaaggcctcgtcaacggtgggccggtcgcgggcgcgcgtctgccacacgaacagcttccgccccgtgctcgccgcgtacaggtccttgaacttgatggccacgtagtaaaacgcctgctgcgccagcgactggctgttgtggtgcgtccgcagcgggcagaagtcgccgaaccactcgcacgacgacagcagggaccgcccgatcttctcctcgaacgcgtcgtacttgttcagcaaaagcaggaacggcgtgtcacggaagcacggctgcctgattgtagcctcaaacaggtccctgcttttggatcatcttattcacgagtgtcctgctactgccgctcgctggggctc

SEQ ID NO: 11471 - DNA, 583 bp, Zea mays
  Clone ID: LIB3061-098-Q1-N7-D8
gataccatatagaagctaggaaagaaccaccaaccaggacaagcattcttctaccagaaaggaagatgaaaagccggggcaccaaagattaccccagaagggcaaaaaagataaaaacaaaagctcccccccgctggccactagacggcataactgtcaacccggaccggcatcgagccgattgtcaccacaccagctttgctcgtcttccggtcagcctccactaccttggaactgattttgaccttctgctcctcgccaccctcaggaactgcgctcccagagccactgactccatttagctgcttctccataccagctgtgctagtcttacggtcagcctccactgccttggagcttatcttgagagacccaagtttggcagtgaccctctgctgctcgccaccctctggaactggaactgtgctcgcagagccgctgactccatttagccgcttttcaggtgctttcagtgagccctgggcagcaccgctgtctgcatgctgctttggattttcgaccttcttccagtactggctgtttcccatccgcacctgccgccttcaagcttggacctggtgga

SEQ ID NO: 11472 - DNA, 552 bp, Zea mays
  Clone ID: LIB3061-098-Q1-N7-D9
gaaacaacatgcatatcacacagctgcttcattattcaggtcgaacaaacaggctcagctagcccgggcgttttattgtcactattgctcggtttcgcgcgcgagggggtgcgacgccgagcacaaggcctgaaggccccgccgtccaccgatgccgcctagctagcctaacaggtgaggttgggccccgggtcgacgccgagctggcggcagtactgcctgtagtagccgacgcgcgcgttcatctgggcggggttgttcccgccgcactcgagggcgccgttgatggccttggtggtggcgccgaacccctgcggcaccaccccgtgcacgctgttcatccaaaaccagagcgccgccttgaacgccaccacggggtcccgcgccaccctgccggggtccccgagcccgtcgaagccgatggccctccccgcgggcccgtagttgtagttccacgagatctgcagcgggccgcgcccgtagtacttttgccccgcggcgcacggccactgcctcttggtcgggtcgcagtaggcgttgctcttgttgatc

SEQ ID NO: 11473 - DNA, 615 bp, Zea mays
  unsure (1)..(615): unsure at all n locations; Clone ID: LIB3061-098-Q1-N7-E1
gcaaagctcagatcatcttatttgcaatgttcaacccatacatatattaacatgtaagcaatttacaaggcatccagaactactacaaagaagcatttaagcagcggtccaacaaactgcccaagcattcaagagtcatcacaaccgcgagcaaaccttccatattatcagctaatagtatcatcaaatgcatcagtgcttcaggagccacctcagtaacaatacatgagacatcaagtctacagattgtgcaatgcttaactctgaaccaactcagatgaacaggggcctcctctaactctcaaagcacttcctctttgctccaccagatatgatctgtcattttcctggggcattgtgctggaatgtaggaagccaactgttagatgagctagttatgtttacaataccctgattgtggtgaacagcatcaaattgtcctttatgtcttgaatcactataatttttccactgggaactaggaagagccacagatgttgtcagctgtgcttttccagcagccatgtcttgtctctgaacacgaaactccaacaagagaagacaatcggtcaacttcaaactttntgttcttatatccaacagtggtcaatcgaa

SEQ ID NO: 11474 - DNA, 576 bp, Zea mays
  Clone ID: LIB3061-098-Q1-N7-E10
gcagacaagagtgcagctttctcatatacttcctttacatattacagttcggtggatacagttacaacagttacagaaatgattacaactgtaagagcaaaaaccgcagctagcgtggtaaacaggtacagaattactgagttgccatgacaggtgaggggcaacaaattgtacaatagttttatttcacacacattactactagcgtacacaagatgtttctttcccggcatagtggaataggacgtactgtatttgagcggcatgccaatgcaacatctcatctcggagatttttgtcaaaccagttttcattgggtgcagaacactcatgtttccacctcattgcagtaatccacttctctttccccaacccatggctatgatgtacaaaatcacgcagccagcaacggtcccaaaagtagtttcccaaaattttctgtttgctgctcgagtttcctcctcagttgttgggtctgcgtaaagtgatatgccaatattcataccaaaaaggccaactacagccactccagcagtgatgacaacagtagcagttgagagcataactcccatctgc

SEQ ID NO: 11475 - DNA, 494 bp, Zea mays
  Clone ID: LIB3061-098-Q1-N7-E11
gaacccaggagtttgcatgccgtttgaaatagtacaaaaaacagggcacgatctttgattacaagggctccacagagagaagtcaaagataagtaaatgagaccctgagctttttgtccattggagtttaaaataaagggggggttgtgtgcggtcgatcctaaaacagggcttgacccaattttattgggctttataaaaaaacagagaacgaacgcgtgttaaaatgctccaagacaacagggaaaaaccccaagcatgggttgagaaaaggtttaacgggcaaccgccttttgagcattgtgtgggaggattttttcgggaaggatgaactggggcgggattttggggaccaccccaagcattgagtcgtactcctcgtttttgggcgcgtacttttttcttaacatttttttgagctcaattttgtcaaagcttttggcgttctcggctgcatggacctgggctaggttgatataattggttgctgattg

SEQ ID NO: 11476 - DNA, 593 bp, Zea mays
  Clone ID: LIB3061-098-Q1-N7-E12
ccggtattcgcaaataggaattgtacattgatccacacgctccagatggaagagagctagaagaaatgggaaaacgatcacacatgcatgccatggtagagctacgtaacaaactagagtagtagctagtactagctagtgaagaagtggaaatctaactagaaaggtggagagggtatacggcgggcgggcagccggtgcaggtcgcagctggtgcatctagcgctagctagaacgacgtcggcggtgggcgcgtcacagccgcgtgcccccactggccgaacatgtcgtgcgggtgcggcggcgtctgcgggacggcgtacatggacggcggcacgacgggacccccgctgctctgctgctgctccagctgctgcgcggtggcgccctcggacgagccggacagcacggcgccctcctcggcgtctgcctggtccagcggcagcctctcgtaggtggcgttgccgaacgttgcggcgatcaccatgacggggcccgaccgaatggagctccccatgacgctcccgcccaccacctgcccctgcccccccgccaggtacacggtgaagccccgtggcccccggcggcgccgg

SEQ ID NO: 11477 - DNA, 622 bp, Zea mays
  Clone ID: LIB3061-098-Q1-N7-E2
ggaataataaatacatttaattattatcatccacgactacgagtgtatgttctgaacatttccaccccgagatcacacaaataatcccctctattcacacgcagacgagggcattcagacaacattttcaatgcaagtttttttttcttcagcccaacatgtcttagcctcgtctaaaggatctgccactcttctgcttcaccagagccatcaaggtcgtcgtcattggccatgctactgccagaacaacccagtccatcatcctgtttatacatttgtttcgatggctcgattgactgcacaacagtaaagagtggcgcgccattggccttctccgccaactcagaggcccgagaacagaaatcatcaaagtcgtctttgtcacgacagtaaaaaccaatagccagggagggatctatttgttccagagctaaggctcggacaacgctgcagtggtatgaaggaagtgtctgcctccaagttatccagtgcaatgtcaaccgtcatctgaacttcatggggatctaggtagagagccctatcatcctgtaccccagcaaatgtatgttgatgtaccaggttttccacctaaaagcccaagctttgtgggaacataaatgtc

SEQ ID NO: 11478 - DNA, 604 bp, Zea mays
  unsure (1)..(604): unsure at all n locations; Clone ID: LIB3061-098-Q1-N7-E3
agaaaggtagagatctaacatataattctcatagcagagttacaaaagaattaaatgaacattcgagatccctgaaattagtactgaagatacctagaaaatttttgcaatcaataatgtacatcctgacctagaaacttacagaacattttcctataagttacaagacagcactagcattttgctgccccagtcccttatgccagatgttacatagaagttgggacttttggatgtaacactatccaccttgtaagtgctaatgaggcctaagctgcatggccagaacagaagatgttttcctttatttgggcatgatgtatcaggaaaaaaagaatgtctttctttcagtacaactctgacagctgaacgttgatcagatttctgccttgaccccacatgtgcatattttgntgttgtgcctgcaatcttgccacttccagctcaaatgtacatcggatgggcaccagtaagcacattggtacaaaacttcgctgtgaagtaaaaaagtgccatctgtcagtcattttcctctgaagaaatagacatatcttctccagaagactggccagttctccccgagagtngagggtttagctgcatg

SEQ ID NO: 11479 - DNA, 484 bp, Zea mays
  Clone ID: LIB3061-098-Q1-N7-E4
attgtggttacaattaaaaacaagcccagaagaaggtgggttaaaagggcacacgctaaaccgaagaaaaaaaaaaaaagcgcgatgctgcatgaccgggggaactagggagtcgaacacggaacatgactgaacactgaaaaaagaaaaacgggaggacaggggggatgggggataaggttccaggttcgagttaggggaaggagcatgggccgacgatcccggtggtcccggaaccagagaaaaaagatcctcccgcacaggtaaaaaaaaggagaaagcagggagggaaaaggggtctggaacccaagctggaagaaaaaacaccaatacctcaggttgctttgaagtgggaagccctgggcgcaattcatctctaaaacccacaggcgagtggagaggggacaaccctagatacgggaccttaggagttaccagcttccaagagacaatgggaaaacagaaaacatgtggttagtgggca

SEQ ID NO: 11480 - DNA, 612 bp, Zea mays
  unsure (1)..(612): unsure at all n locations; Clone ID: LIB3061-098-Q1-N7-E5
atcacaaaagcgaatgaatattacgataccaatcacgtacaacatatataggcagtcaggccagaaaataatatttcgccaacacttgttactagcttcacctactaccgactccgactccccaggggatttcggtctttgattgagggttcactactagcagtatacacgacacaaataaaataataacggtactcgttccatgcggtaaatggtctcccagtttttcgtcaacatcctccccacctttcctagccatcagaatcctacctcctcaggccctcaacgatgtatgtagcatacaggtccatagagtgctgtatggcttcataagcggcgctcgctggtagaaagtcattcacagcaacctccttgttctcattcttcttgtagtcctcgaagaagcgcctgatttcagccaagcggagaggtgggagctccttgatatcattgtaatgcctgtactcgggatcatcagcgcacactgcaatgatcttgtcatctgcctctccctgatcaatcatcggcataaggccgatggccttcgcacgtaggaaacagcctgngataacaggctcctgcattataaccagtacatccaaaggatcactg

SEQ ID NO: 11481 - DNA, 618 bp, Zea mays
  unsure (1)..(618): unsure at all n locations; Clone ID: LIB3061-098-Q1-N7-E6
gatgccaatcatgctattgcaatttgcaagagtcgtcccagattaaaattcaaatagctgtatccattttacactaccacagtttgattacaaaggttagtgcttttaggttcttttctcagacccttggcctcaccctgcgaccactggtgtcgccgccgtcagagagctgcgcccatacgctctggcttttcacgccgctgctacattgttcctcacatccggcaactgtccgcagtatctctgactgcagggatgggcagttgtctttgagatagtcgaacccctcggtccggatcacagccgaaaggttttcagcagcaaattttaggcaaacagatttaagctcgatagcatggtatcgatcagccaatgctagagtagttgccacggagtttacagaaacatgcttgcacaagtaagattcacacaacaatcttagccttggcaactcatatttgtctgcagcagccattaacttcccagctaaactatcaaatatagagcagtcagagcttgatgccatcaactcatcatcattaacaagattgtccctgtacataaagtgaagcaccgncttgaacactacaggatccatatcatcaataacgatctcct

SEQ ID NO: 11482 - DNA, 570 bp, Zea mays
  Clone ID: LIB3061-098-Q1-N7-E7
aacgtgaatcacataaacaaactgcagagactgtcaaatacaacatccatcttacgtatctcatttgtctacagtatgcgctcaggagggtttcaaatgtaagaaccacatgtcgctggagcaaatcagtttacagagtgataaaaccaagacatgtcgctggagcaaatcagtttacagagtgataaaaccaagacaagcttcaggctggctgctcataagtgatgctgctattcttgtttgaaacagtaaatcatcaacagacaacttactccaccttttccaagaaatccttgatctctgatgggcttagaactttgaactcacggtcagctcgaataattccgatttcaatgttgttggaggaaatttgcccctcatatccttctttcaaagtcaaaattgcagtgtggatggcatcatcaagctccatatcctctgtgtatctcttttcaagaaatgtctttgcatttgacacattttttcccatggctgatgccttccaggagaatatgatcctgagggatcaacctgatacaactgtgggccattgtcatcatacccagcaat

SEQ ID NO: 11483 - DNA, 570 bp, Zea mays
  Clone ID: LIB3061-098-Q1-N7-E8
ccaataaaagtggtttattagcctttttgtagtttgtagactccaacaagctacaaacagaaccacgatacagaaggggcaaaatttatgtgtaaataaggcctggttcaaaaaccggcgataacttgggggatggatgttcagcccccatgtagcaattagaaacaaacagcaaccatttggaacattttcctacatgccgacaacaaaaaactttaggctgcaaaacttaaaagccattcaagacgattgttccttctgtttcacttgcttcgcctaaaacagatgcagcagcttcccgctgtttgttcacaaaagcaatacccttctaaatgcttgccttcaactcggccttcagcgcctaaagtgccttggcctcatactcagtcattccctggaggtcggcagaaatgacggactcaacaccattcttgcccaacttgactcttgatgcgaaaaatggcagggtcagttatctcagactgaacaaatgtgcactcataaacattccggatcgccagccagcgcacggagaaaagactcaacgaatctggcagcggcataggccat

SEQ ID NO: 11484 - DNA, 540 bp, Zea mays
  Clone ID: LIB3061-098-Q1-N7-E9
gcagtcaccacccatcattaatcatcaaaccaaaaaaaaggcactacctagccgtggggcatgcacagcttctgtgcaaaattcctattgctgtaaaattggatcagcatttccaaaaaaaaaaaatccaacaacatttttatggttccctatcttcttttgctcctcaatttactcctcccttcgaactttttaaacccacttttgcattttcctctctgcttgggctttttctgcgccttgttgccctttttcctttcgtccaagttgctcccatccccatcggaagcttcgccatcaaaatctccgaacccagtgagcttctcgtactcctcttcatcgatgtctccacgtttgagcttcttcaaaagccggtactcgtgcgccagctcatccaggtcctccttagtttggattgactgacgctgcttgcccgtcttcttccgctttggcttctccggcttctctggaaggtctcttcctctccggctttggattttgagcctcctcttctgctttccttttcagcgccttcttgcg

SEQ ID NO: 11485 - DNA, 470 bp, Zea mays
  Clone ID: LIB3061-098-Q1-N7-F1
aggaagtgagaatgatatttttgtatggatcatgtacccacacaacagaaaaggtacatgacaaagacgcgaaccggcgaacgcgcggcaacttgttcggctcaggagcaggagccaccccgagcggcacccatgccatgctcacgtactcacggagacctatcggactcacgagccggagggatcccaggaacgacgggcgggagcggcaccacggggccgagcacgggcggcagcggcgggatcagcggcaagcccgtggccttctcgtcgcccccgctactaccaccaccgttggcggctgcaccgcccgacgccgccgcgccgctcgctttcagctccctgccgtcgcaatgggctagcagcagcagcgcttccaccagcaggagagcaacagcggcctgcagaaccttggccattcttgcagttcgagtacacagtgatagctactgatcgatgctcaccgcgag

SEQ ID NO: 11486 - DNA, 584 bp, Zea mays
  unsure (1)..(584): unsure at all n locations; Clone ID: LIB3061-098-Q1-N7-F2
aaggatgcatgcaagctttatccactttctgcacatcaagcatagagaaatgggcaacatcagttgtagttctcaaaaggcaaaaggccgtcgcaaaacaataatactaccattttacaacttccatagcaaccgcattgttcctgaagaacttaacgacgtgttgtggctatgccaacttccacatcttgaggccaaggcaactactccttgaaaagaaccaccttgaagagcaattaaacagtgtcttcaagtaaccgctacagaccaattgcggattcctcttaagagcaacagacccacaggaaccattttgcaataaccaacacaggtattgacaaaattgacgcagacatctgactaccctacaaaagtaatccatgcaaacatgtnttgagtgacacaaaatttgatgttgagtattaccattttgatgctccaaccatctttactcttgttttttgatattcatagtactagtgacaagtttaaccctctcttctttcaggggaagcataacaggtcccctaaagagccatttttagcgagtactcagttctaataagaactcgatgcttccacta

SEQ ID NO: 11487 - DNA, 550 bp, Zea mays
  Clone ID: LIB3061-098-Q1-N7-F4
attggataattaagttccttgccaaatcttcccaaaattacacgggagaattttgcggatctttacatcgatcgctctcatccttttgttgtttttggggggcaagaaccaatagcctgggataaatattgtctgaacagattggatgaggcgttcaactagttctccttgcagctcgaaaattctcctcccttcttgatagttgctcccaaacgcagtttttgagataacatttccagtaagattctggaactcaggccagacatttattttaaaagatccctcaaaaggcattgaattatcccatctagtaatcatttcaatacagcaggtagaaaatactggcatcatcccctttattttttcatggggaaatgcaggattaaaaattctcctgtgctttgcccatttttcaccatcatgatttacaagcccgttggctagcaacctcccaatgcggttactccttggtttgccaaagtggccaaacttattagacagcacctctttgactaactctgggtcaggaatcacacccttggtgttgggc

SEQ ID NO: 11488 - DNA, 474 bp, Zea mays
  Clone ID: LIB3061-098-Q1-N7-F8
ggccccaagggttttttttttttttcaaagggtcaggggccccttgggggggttttacattaagggggggccaacatacggggggaaaaaggggggaaaattcggtggggggggggttagtttggttcccaaaggggggccccctcacaaggggaaagttttttggggttttttcctaccccggggctttttggaataacgggtgggggaatgccaggggttgatctggcctcggggggatacaaagaaatagagggggcgatcaaggaaaccactttaaatttttccttcgggcctgaaaaaaggggttccccgttttttccagctttttggggtcccagggcaccaagggggttataaaaaaaaagatttggggggttataaaaattgccaggggtttttgcaccttttgggaaatccccaaactggttttttggccatccatgtttaccaggggatagacaccaaaagggg

SEQ ID NO: 11489 - DNA, 527 bp, Zea mays
  Clone ID: LIB3061-098-Q1-N7-F9
aaaccgaaccagaataccgttttacttaaaacgcgtgccacgataatattgttcaccaagaaaaggttctaacgcggatacaccgcgacgaccacgataaatcgagcagcgactgggccagccagccactgcagcagacacacgagactgacacaaaccgcttagtccacctcctcgatcttaggggccagggccaccgtttccagccggagcgtcctcgtccatgccgccggagcctcccatgtcggcacccgcgccctggtacattttggcgatgatggggttgcaaaggctttccagctccttcattttgtcatcgaactcgtccgcctcggcgagctggttggcgtccagccagctgatggccgcgtcgatggcgtcctcgatcttctttttgtcgtcggcagccagcttggacgcgatcttctcgtccttgatcgtgttgcgcatgttgtaggcgtagttctccagcgagttcttggactccaccttcttcttgtgctcctcgtcctcggacttgtactttt

SEQ ID NO: 11490 - DNA, 567 bp, Zea mays
  Clone ID: LIB3061-098-Q1-N7-G10
agaaagaaaactgtgatatttcataaccctacagagacaaccagaagataataaaaaaaatcatatagcatgtatctgtgaaaataaatagctttgtgacactgacacgcaccagtgccaaagccaaacaacacagaacatcccaagatgccaacttgttctagcaactactacattacattttcatctttctaaaatggccacttgggtcaggccagcaaaggctgatcagccaaacctgccccagcgccggtaatccttactgaagtccgtcattagctgtgttctttactttcgtacaacctatttatccatgcgaaaaaaaacccggaatgataggggcccaaaacagaacacttccacacatggctgttgagtatcgcagttttgaagatggtgatgctggatcatcgatcactggctcgcctccttggacaagctcagatcagggttggcgatctgaggtcccagcccaagccatggctgaccatccgacatctccttcttcacaggtgtaacatctgaaggggaacccgggtatggtgctttcgcagtaaggcgatcctt

SEQ ID NO: 11491 - DNA, 603 bp, Zea mays
  Clone ID: LIB3061-098-Q1-N7-G11
aagacaaaggaaataaggttgtgtccaacagatcatatatatatatatcatatatatgatcatataaaataatattttacactatagacaacactgtttaaaatagagaatgacatagaagagtcactgcagatagcctgagcctgagcacactatcttacaataaagcagcaagatgaggactgctgaagaattgtaatttatcacaattgagttacagtttggtaagcacaaccaatcatttgtcgcactatgtttcgatttttcacaagtgatgactttctttcaagtacaaacaatcgaacttcaaccctagctaattgtaactcataaacatgacaaatatttatacaatataaaggcaccactctggtaggaaagcgccatgtttatgcaagctcgtagtatatgcctctgcaatgatagtgtagccaactcaactggtttctgaagcacggatgttgcaggcaagaaaaaacttggataaaagatccaagcaattactgatgccgagctgtttgccatggaatggtggtaggatgcttcataccaattcagcaatccctgcaggcgctgtatcatgtgcaggacactgctgactgc

SEQ ID NO: 11492 - DNA, 288 bp, Zea mays
  Clone ID: LIB3061-098-Q1-N7-G12
agagcttgaaacacgaaatcacttgaacatttatgacgagaagattgttgcagtcacaatacaaattccctcggcattaagttataaacaaagcactgttacatgaggataagcaaatttcatagccaagagagtaagcgcagccaatgcagaccaatgttcaatttctttgtgagcatggaagcatgaacatggctacatcagttcttctcgtcttctgttttgtctgacttgtcttccttcttctcttgctctccctggctgtgcaatgatgccagcaaatcttta

SEQ ID NO: 11493 - DNA, 589 bp, Zea mays
  Clone ID: LIB3061-098-Q1-N7-G2
tttttttttttttttttttttttttttttttttttttttttttttttttttttttttttttttttttttttttttttttttttttttttttgggagagaggcattttttttttaagggaaaaaaaaagttttggtttaagaccatagaccgacaaaacatcccgtttttaaaccgtggggaaaaacccttttttttaaacggtaaaaacatgcccccgaccccatgcaaaaccagccgggggggataatgcacccaatttgggaggttggaacaagatgcatttttgggagccccagtttttgggcccataaagcacttgagcttttgccagaatagggacatgccaatcgtttccgggttaattttttaaaaacacggcccgttgaagggggacccaaaaaaaaataaaaagctttaggggaattttttttaaaactggtaatggttgaaaaatgatttggggggtgattccttgaattgaaaaattgggaagccctgaggcttttccactgttcatggaatggaaaaaaaaatcccaagttcagcattgaaatttccaaaattttgcagaaactgctgttgttgagc

SEQ ID NO: 11494 - DNA, 555 bp, Zea mays
  unsure (1)..(555): unsure at all n locations; Clone ID: LIB3061-098-Q1-N7-G3
acaggttacaaaaattttacattagtttatcggagtgattacaaaagtataagtttgaaatatatgctagctcaagggatcatcctcaataagaagtatagaagggttacttagacttataagaaggccgagcccaccggcacttaacaccatcaacaacagcacaaagttagaaccgtttcaatagccgactcgaattcgcgagatccgtagtgatttttcgatccaggcaattgtcaaacgcttggggaatatcgcgctgctagcttcgtcttcacccgattcttgggatccttgatgacgcgcggaacgacgacgagatcgagtctggagcgagctagcgagatggaatccgagcagggtcgacgactggcgaccactacagactgggagttggggcgaactgcgtgcagatgagcggtgcagatgagcgggtcggactcagcggccgagcagacccgacccagtagcgagaacaaacagagggggcgagctggagtatggacagagtcgagctgggcgactgggntgagaatccggctaggggaagctttg

SEQ ID NO: 11495 - DNA, 575 bp, Zea mays
  unsure (1)..(575): unsure at all n locations; Clone ID: LIB3061-098-Q1-N7-G4
gaagtaaaagctcaccctaggcttcaaaacatatgcatgttacgtttaacagacaattcagaaacccaaaatggtttacgggattctcaaggtaaacataaaaaagntgaggtccgttgtccatttaaccggctcgagccataataagcattacacaaattcatatctagaacaagctgtcggaggataccacacttaggccaccagagtgctcgctgtggttgactcatacttccaggtgggtggaagcttctttgtgcgcttgtagtagcgggcaaggcggtggatcctgctctccacaagaatgagcctgaatttagagtctttgtccttcctgttcctctcaaggtgcttccttatcgccaccgccttcttgatgaggaagtacaggtcctcggggatttctggtgccagcccatgggccttgaggatgcggaggatcttgctgccggtgacgctcttgacaagggggataccgtgctggtcacggagcaggacgccgatctgcgacggcatctgtcccttcttcgctgccttttgtgatcatctcctccacgtcggaggcagcggtcttg

SEQ ID NO: 11496 - DNA, 583 bp, Zea mays
  Clone ID: LIB3061-098-Q1-N7-G5
ggaacacatgaatttcaaggggttcgcatataaatttcacagaaatcagctcagatttatttgtgcatgtaaaaacgcaggaacagagggggggaaatcgtgttccagacaggccctcagtgggtactatatatagctcgctgtcgaacgagcgggcggcttttgtagtcttcataatagtcttgtttgacgaggaagcttccaggtatctattttccagagattattctgtgtcacattgtccatcttctcctgcattggtctttgtttttcttggaatatatcaaactagatgaatacccgtgtgttgctgagtgctgacgcactttcaccccccttgagttggaggagacgtctatactagctctgcataccaacagacaacaaaaaatggagttgaagaatggccgccactctgtttggtggatagcaagaagattctcaaccaatgcaaccaagctctaaaatttctggaccgtgactcaagtcactgggtcattcaaaccatgacaaaatcagctggaaccagagccgggttctcctgatgcagagcatagatcttgtcggtcattccctccttgcg

SEQ ID NO: 11497 - DNA, 565 bp, Zea mays
  Clone ID: LIB3061-098-Q1-N7-G8
gcagctgcaggggggtttatgtcaacctcatgtttcctttgcatcagatattaccagggttccatgggcaaagagtcgattcagcctaccagacacaacagcaaaatagtttaaagaaacgaacgaactctcatgttgtcctaggagagtctcactccagtcccatgggccatggcacggcccctatatgaaatggctgagcaggagcattagcaggcactgtgaaatgtacagctgctcatgtattggccccaagagaatggttcacccagagccagagcagagcttttcgagagccatgttctcgtcgccatccacgctcttcagggcacttctcacctgatcctctgggaagcccatctcaaccagcttctgcaccttctcttccaagcccgttgatgcactcttcgcgaaggcctctgtccagtagcgagccgtagcggcaaatgttggatagtcacgcaggtactgttgtgcaacaacagcatcctgaggatcatcaggtgcaggagaagaaacagagcttgaagggaaaggacgcagtcttcaaggtaagggctgggct

SEQ ID NO: 11498 - DNA, 598 bp, Zea mays
  Clone ID: LIB3061-098-Q1-N7-H1
aactactgaactgaatccatctggtgagtttctattgaagaaaattttctgtccgttacaggatcctaaccaattgttacaggaacccaaaatcaccagcacatgaccctgtatctaagctcagtttcccaccctcggcaaaaacaggtagaccagaccgccattccgagcacccccagcttccctcgagccctgagacttcggtggcatgtaaccaaaggccaaactatgttatatacacggtggtgttggtgtgccgccatcctcctaatccacgttctggatctcgcccatcattatacggttgctcgccacgttgaaccccaacactgcggcactcaccttcttccccttcttcccctttttcttcccgccgccatccagctccgcgtctatgaccgtgcctcctctagctgcagcagcagggtttgcccaccctgcaccgtcaccacggctgctgggagcttggaaggccatgtggatcacatctgctgacaggaaggccttgtagttgaggaacttgtcgatgaactcgtggttgcggtcaagggaaccaatgttctcatggaggagtatttccgcttcggtagttgattgc

SEQ ID NO: 11499 - DNA, 597 bp, Zea mays
  Clone ID: LIB3061-098-Q1-N7-H10
aacaaggaaccgccaaactttcattacactacttgattattgaggagtcgtgaaacaggctatcaaactacaaagccctgacgcgaacctgccatattgacgacttgacgacgtgactgattaagctaggatacccttctggaagcatacatgatcacacacacgtacctgtgtacgtacgtatgtatgatcgcctacatgcatgctgctagctacattattatcattcagctactccaaagtagagagtagcactagctacggccaaggtacactacgcagacagctacgaacgctgcgtacgcacgcacgcgataggactacttggtgaacttggactcgtcgatgctgacgccctccctggcggcgcgctcgccgccggactcgtccgtggtgctcagaccgcccttcttccccatctcgctgtacccctgctgccccagctgctccctgcgagtctggcctccgcagctgcgcccttcggcgaggtgctcctgggcctcgacgctcttgccgccggtcccgccggggacgacggtctcgccctcgcgggccttgcggtccagctcctttctgctttcctgacctgacgccata

SEQ ID NO: 11500 - DNA, 545 bp, Zea mays
  Clone ID: LIB3061-098-Q1-N7-H2
acaaaacatataatacatatatataccttgtttatgtatattgcatacacacctagccttgaccctcggcagccgtaccaaatacaacctcctgatgccacattccatttttcagttgtcctcagttacgaacgtatggcaagcttgatttctactagcagataagactgcggcagcatgaaccgtagccgctgattactaccgtagacttgcattcaccaaactgggaacagaggaccagtgcatcctttcctgtgggaatcaggtatgctgttatagcggtacatgtggttcgatagctcccagctccagtcgtccttccttgacaccttcattggcggccaccggttgatcctcacgtagtgctccctgatctggccatcgtcgacaaagctcgttatgaccgtgtaggtgcactcatggccaccccacacggcgtcatgagggtctgcactgtggtagccatcggggtggaagtagcgtcgcataggtggaccagtgtgcttccatgatggatcaaggttcctccagtaatcaggtgctgc

SEQ ID NO: 11501 - DNA, 420 bp, Zea mays
  Clone ID: LIB3061-098-Q1-N7-H3
gggaaaaaaaatttgtttcttggggggggccccaggggaaaaaaaaacccaaccccgggaaggggggaaaacccccccctttttcctttttaaaaaaaaaagggcccccgggggggggggggcttttttagggttgggggcccagggttttcttttaaaaaaaaaaccaaattttaaaaaggtttgaattgacccccccgggcggggggaaaaaaaaaaaggcccccggccccccaaaaaaaaaatggggcccccccggggggggggggggggaaacccccaaaaatttttttggggggggggaaaaattttttaggccaacccgggaaatcccccccccctttttccctcggggggaaaacggggaaattgggcccccgggaccaaaaaaagggaatttccggggccccggcccggggg

SEQ ID NO: 11502 - DNA, 474 bp, Zea mays
  unsure (1)..(474): unsure at all n locations; Clone ID: LIB3061-098-Q1-N7-H4
aaccaagcaagcgacattttccttaccggtcacaaactattaactgatcacatcaggttcgtgttcttagctaggacactctcccattctttttggtaccatccacggttcaagaatgaaccgacacactgcactcggacgtttcgcctaacagctacacaggcaacaaaagagaggcaaaaataattgataccgggctaaaattacaaggtcaggccatgaagccggagtctcgaaacctcaacttcaggcatccgcggccagctgctttttttgcttcgacaccttaacctgcaacttgtcgagcttggcgctcatgctcctgtgctgctcactgacggagccctcctgggcgctgcacatttgcgacctcaccttcaggcccagtcgccggggcacgacgcgggaggcccacccgccaccggcgcccttaccagggcgcccgcccagattnttgatctcctgccgcatgct

SEQ ID NO: 11503 - DNA, 443 bp, Zea mays
  Clone ID: LIB3061-098-Q1-N7-H5
agcggaaaaatagtagatttagacggggggcagagctcgccaataaggcaaaatcccctaaaccctccaatccctgaacaagccctcaatgggaatcattaacataaacactagcatagttcccaccggaaggacaagtcattttattacccaagggaatgggagggtaaaggtggactaaaactcggatcctaaagatggatcgggaaatgcacaaggaacaaaaaaacaaacctccccgataacagtttcatgggcaacaccacaatcgtttgcatttagccaggaaccccgaacatttcatcccatggggtacttttgggtccaactgcgggctggcgcctcggacttaggccgatccggtttgtacatgagagcaatttcaattttaaaagggcccgctggggggggatcaggaagcagggggcagatagaaagcaaaa

SEQ ID NO: 11504 - DNA, 587 bp, Zea mays
  Clone ID: LIB3061-098-Q1-N7-H6
aggattccatataagtttgatataaaatcttatcaacccttaaatactataaaacaatgcaatatgaaagtgcaacaccccaaaaggttattaaaaacacattccaagcaactataatatatagtaggcagcccacaggaacataataaaccgtgacatccaaacacaaaacggactgacaccaaacgcagccaaccacatagggtatgctgcgcggcacgacaataacagtttttagacatcaacaccagaccgactgacaccaaacgaagactgacatcgatgacaccagacaagcaaaataaacttattgaattaatattatcaagtgaagccatgaacagtagagcagcatcaactcttcattcatcgccatcctcaaagtcagactccgcgctctggagccactcgacaaacggtttggcattcttgacaacctgggagtcctttccagctgcgacagcaaagttgtaccagtccacaacggtttacttctgcaggaatctccgtacaacagggctttcatgacaactgggacctccttcacgcctcagggttgcacttgctgtcaaaacctcgatggcttg

SEQ ID NO: 11505 - DNA, 579 bp, Zea mays
  Clone ID: LIB3061-098-Q1-N7-H7
agacaatccgtaaaagtctaccattcataaatatattacaccgttatttttttataaaaaaactttaccactcgtcttatttaaaaaaaaataagttattatttattttttttaatttgtttggtagtttgtgtttgatttaaaatttaacatttttgaaaaaaaattaaataagacgagtggtcaaatttttgaaaaaagtcaacggtgtcatatttgtgagtggtacaaccaaaggaacatagcaatattacgggcaagtccatatttcacaagccccctatttcccacacaaagcctgaggcaacgagctgcctacttgcgtgctgccagaacaggcatccgagtccttgagctcgtggaactggcgctctgccacgaggacggcttcaccctgcctgccatcagtgctgtagcggctccagcttttatgttccgcctcttcagcacgaggtcgggtttaccatgtgatgctgagcttgatgactccggaaagatggaggcagctttgattgcggccctcttatcccttctgcttttctcaaatttcgatgcaaacttcactgaagccgctgcggt

SEQ ID NO: 11506 - DNA, 583 bp, Zea mays
  Clone ID: LIB3061-098-Q1-N7-H9
ctgtagaacaggactgtagcttttattcatataaaaggattcccaaagtccgcagagagagagagagagcgcgcgcgtacaagacgaacagtcctggctacatagcctcggcgacaacgttcaaaaaaccaaaacgacaaagccagcaaaattattcagcgcgcaagcacagtgtaattttacagcgcgataactcgctaccaaatacgctactcgcgagactcgatgaactggtgctccatctccgagagaccagaaagcagagagtttttttttcctttcattccttttggaaacctggttcattcgttcttcttctcgaacttggccctgtcagccccgctgtagggggcgacgtggtatgcgtactgctggatgacggagaacaccaccatctcaaggatcaccaggacgttctggatcgcctcctggatgtgctccacgtccagccagaaatggtgggatttgatcacgcctgcttgggttaaaacatcgagcgcaaaaccctgccagaaagagaagaagacaatccctttgatgcacaagaactttgcaagaggcttgtgaggtgccagctctttac

SEQ ID NO: 11507 - DNA, 606 bp, Zea mays
  unsure (1)..(606): unsure at all n locations; Clone ID: LIB3061-118-Q6-N6-A10
cccaacgcgtccgtagnaaagcacaatagtgtaccaacaatggcagccaaaatattttgcctccttatgctccttggtctttctgcaagtgctgctacggcgaccattttcccgcaatgctcgcaagctcctatagcttcccttcttcccccgtacctctcaccagcggtgtcttcggtatgtgaaaacccaattcttcaaccctacaggatccaacaggcaatcacagctggcatcttacctttatcacccttgttcctccaacaatcatcagccctattacatcagttacctttggtgcatttattggcacaaaacatcagggcacaacaactacaacaacttgtgctagcaaaccttgctgcctactctcagcaacagcagtttcttccattcaaccaactagctgcattgaactctgcttcttatttgcaacaacaacaactaccattcagccagctacctgctgcctacccccagcaatttcttccattcaaccaactggcagcattgaactctcctgcttatttacagcagcaacaactactaccattcagccagctagctggtgtgagccctgctaccttcttgatacaaccacagttg

SEQ ID NO: 11508 - DNA, 526 bp, Zea mays
  Clone ID: LIB3061-118-Q6-N6-A12
gcacaatattgtaccaataatggcagccaaaatattttgcctcattatgctccttggtctttctgcaagtgctgctacggcgagcattttcccgcaatgctcacaagctcctatagcttcccttcttcccccatacctctcaccagcgatgtcttcagtatgtgaaaatccaattcttctaccctacaggatccaacaggcaatcgcagcaggcatcttacctttatcacccttgttcctccaacaatcatcagccctattacagcagttacctttggtgcatttattggcacaaaacatcagggcacaacaactacaacaactcgtgctagcaaaccttgctgcctactctcagcaacagcagttacctttggtgcatttgttggcacaaaacatcagggcacaacaactacaacaactcgtgctagcaaaccttgctgcctactctcagcaacaacagtttctgccattcaaccaactagctgcattgaactctgctgcttatttgcagcaacaacaactacta

SEQ ID NO: 11509 - DNA, 482 bp, Zea mays
  Clone ID: LIB3061-118-Q6-N6-A2
agcaaaccttgctgcctactctcagcaacagcagtttcttccattcaaccaactagctgcattgaactctgcttcttatttgcaacaacaacaactaccattcagccagctacctgctgcctacccccagcaatttcttccattcaaccaactggcagcattgaactctcctgcttatttacagcagcaacaactactaccattcagccagctagctggtgtgagccctgctaccttcttgatacaaccacagttgttgccgttctaccagcacgctgcgcctaacgctggcaccctcttacaactgcaacaattgctgccattcaaccaacttgctttgacaaacccagcagcgttctaccaacaacccatcattggtggtgccctcttttagatttcttatgagttatagttcaataataaagttttttgtctgatgtttgtggcttcccagaaataagaaagtacatttctagattctt

SEQ ID NO: 11510 - DNA, 560 bp, Zea mays
  Clone ID: LIB3061-118-Q6-N6-A3
cgtcacgcgtcagacccacgcagcgcaccttctcttctccgccgcgtcgccgccgaacatcagcatcggatcgatggagggctgggacaaggggaccaagagcacggtgggcgagatcccgctgctgtcgacgcgcgcgggtccgcgggacggcgaggcgtggcggcagaggctcaaggaggagtaccgcgcgctcatcgcctacacgtcggtgaacaaggccaaggacaacgactggttccgcatcgccgccgccaacccggagggaacccgctgggaggggacctgctggtacgtccacaacctccgccgctatgagttccctctccagttcgacatgcccgtcgcctacccccaggtcgcccccgagatcgagctccccaccctcgacggcaagactcacaagatgtaccgcggtgggaagatctgcctcaccgtgcacttcaagccgctgtgggccaagaactgcccgaggttcggcctggcgcacgcgctgtgcctcggcctcgcgccgtggctcgcggcggaagtcccgattctgggtcgactcggcatggtga

SEQ ID NO: 11511 - DNA, 605 bp, Zea mays
  unsure (1)..(605): unsure at all n locations; Clone ID: LIB3061-118-Q6-N6-A4
cccagcgtccgcaactagcaacatagnaaagcacaatagtgtaccaacaatggcagccaaaatattttgcttccttatgctccttggtctttctgcaagtgttgctaccgcaaccattttcccacaatgctcacaagctcctatagcttcccttcttcccccatacctctcaccagcggtgtcttcaatgtgtgaaaacccaattgttcaaccctacaggatccaacaggcaatcgcaacaggcatcttaccattatcacccttgttcctccaacaaccgtcagccctattacagcagttacctttggtccatttggtggcacaaaacatcagggcacaacaactacaacaacttgtgctagcaaaccttgctgcatactctcagcaacatcagtttcttccattcaaccaactggctgcattgaactctgctgcttatttgcaacaacaattaccattcagccagctagttgctgcctacccccagcaatttcttccattcaaccaactagcagcattgaactctgctgcttatttacagcagcaacaactactaccattcagccagctagctgatgtgagccctgctgccttcttgacacaac

SEQ ID NO: 11512 - DNA, 601 bp, Zea mays
  unsure (1)..(601): unsure at all n locations; Clone ID: LIB3061-118-Q6-N6-A6
gtgtccaacaagcaacatagaaagtggaatccagtagcaacaatagagcaacaatggcgaccaagatattttccctccttatgctccttgctctttctacatgtgttgctaacgcgacaattttccctcaatgctcacaagctcctatagcttcccttcttcccccataccttccatcaattatagcttcaatatgtgaaaacccagctcttcaaccatataggcttcaacaagcaatcgcagcaagcaacatacctttatcgcccttgttgattcaacaatcgccagccctatctttggtgcagtcattggtacaaaccatcagggcacaacagctgcagcaactcgtgctacctctgatcaaccaagtagctctggcaaacctttctccctactctcagcaacaacaatntcttccattcaaccaactgtctacactgaaccctgctgcttatntgcagcaacaactattaccatntagccagctagctactgcctactctcagcacaacaacttnttncatttaaccaattggccgcactgaaccccgttgttatttgcagcagcaaatactactaccatttagccagctagctgcaa

SEQ ID NO: 11513 - DNA, 602 bp, Zea mays
  unsure (1)..(602): unsure at all n locations; Clone ID: LIB3061-118-Q6-N6-A8
aagcaacatagaaagtggaatccagtagcaacaatagagcaacaatggcgaccaagatactttccctccttatgctccttgctctttctgcatgtgttgctaacgcgacaattttccctcaatgctcacaagctcctatagcttcccttcttcccccataccttccatcaatgatagcttcagtatgtgaaaacccagctcttcaaccctataggctccaacaagcaatcgcagcaagcaacatacctttatcacccttgtttcaacaatcgccagccctatctttggtgcagtcattggtacaaaccatcaaggcacagcagctgcagcaactcgtgctacctgtgatcaaccaagtagctctggcaaacctttctccctactatcagcaacaacaatttcttccattcaaccaactatctacactgaaccctgctgcttatttgcagcaacaactattaccattcagccagctagctactgcctactctcatcaacaacaacttcttccatttaaccaattggccgcactgaacctcgctgcttatttgcagcagcaaatattactaccatntagccagctagctgcagcaagccgtgct

SEQ ID NO: 11514 - DNA, 611 bp, Zea mays
  unsure (1)..(611): unsure at all n locations; Clone ID: LIB3061-118-Q6-N6-A9
caacaagcaacatagnaagtggaatacagtagcaaaaatagagcaacaatggcggccaagatattttccatccttatgctccttgctctttctgcatgtgttgctaacgcgaccatttttcctcaatactcacaagctcctatagctgcccttcttcccccataccttccatcaatgaccgctttagtatgtgaaaacccagcccttcaaccctacaggatccagcaagcaatcgcaacaagcaacttacctttatcacacctgttctttcaacaatcgccagccctatctttggtgcagtcattggtacaaaccatcagggcagaacagttgcagcaactcgtgctaccagtgatcagccaagtagctctggcaaacctttccccctactctcagcaacaacaatttcttccattcaaccaactgtctatactgaaccctgctgcttatttgcagcaacaacaactactaccattcagccagctagctactgcctactctcagcagcaacaatttcttccatttaaccaattggccgcactgaacccctctgcttatttccagcagcaaatactactaccatttggccagctagctacaacagccccgct

SEQ ID NO: 11515 - DNA, 579 bp, Zea mays
  unsure (1)..(579): unsure at all n locations; Clone ID: LIB3061-118-Q6-N6-B1
gttccacctcctcgtccacgaggtgaggaaaccctagcgaccgaccatggcgttgctcccgcgcaccgcgcggctggccctcctttccaccccgcgggcgtactccgctgccgctgctgcgggcgcctccccgacgtccccagcgccatacgggggcgcccccccaccggcgatgtcgaagacggccgagttcgtggtctctaaggtggacgacctgatgaactgggcgcgtaagggctcgatctggcccatgaccttcgggctcgcctgctgcgcggtggagatgatgcacgccggcgcgtcccgctacgacttcgaccggttcggcgtcatcttccgtccgtcgccgcgccagtccgattgcatgatcgtcgccggcacgctcaccaacaagatggctccggccctccgcaaggtttatgaccaaatgcctgagcctaggtgggttatttcaatgggcagctgtgccaacggtggtggatactaccattactcctactctgttgtacgtggatgtgaccgtatagtccctgtggacatctacgtncctgggtgcccaccaaactgctgagcactgct

SEQ ID NO: 11516 - DNA, 475 bp, Zea mays
  Clone ID: LIB3061-118-Q6-N6-B10
cttgtatcttcatgtacctgcatactttcagaattatcctgcggggatgtgatgtggaaccacataatgtagttaatgatttgatgtatcgggagtgcgtgttgtataaaccacaaattgctggacttacagagtcatcggtaatcacaaccattgggtttgttaaaggtgcaccagatatagatgtacaagggtttaatgtatatcacaaaaaccgtctaatattgcccttctggaaagttgcaaacaactcatacgggaaaggacgaggagttgttggcattctggaggccaactttatcaaacctacccatgacaagcaggattttgagaagtcagtcctttatcaaagacttgagttccgcttgaaagaaatgacttaccaatactgggacctttattgccatcgtgttggatatgacaacaaaaaattacctaaagcaacccgtgctattaatcgtgccactcatatgaa

SEQ ID NO: 11517 - DNA, 518 bp, Zea mays
  Clone ID: LIB3061-118-Q6-N6-B11
gctgccccgcagcaacgaacacgaaccttggcagaacgaagctgaagtagttcgttgtgaacccagtatggcaaacgcgccgaggatcctggccctcggcctgctgctagcgctcctgtgcgctgccgccggcccggccgccgcgcagaactgcggctgccagcctaacttctgctgcagcaagttcggctactgcggcacgaccgacgactactgcggcgacgggtgccagtcgggcccgtgccgctcgggcggcggcggcggcggcggcggaggcggaggcagtggcggtgcgaacgtggctaacgtggtcagcgacgcgttcttcaacggcatcaagaaccaggccgggagcgggtgcgagggcaagaacttctacacccggagcgcgttcctgagcgccgtcaacaagtacccgggcttcgcccatggcgggacggaggtggagggcaagcgcgagatcgccgccttcttcgcgcacgtcacgcacgagaccggacatttctgctacatcagcg

SEQ ID NO: 11518 - DNA, 585 bp, Zea mays
  Clone ID: LIB3061-118-Q6-N6-B12
gttctacacttcaaacatgcccatcattcttcactctgcgctgattaccaacctctattttatatcccaggtacacacctcatttctaatgctgcagtaagttatatcttctgtatgtgtgtgtgtaagtgctaatgtattttactgctatcacagcttctctacaggaagtacagtggaaacttccttgttaaccttcttgggaagtggaaggagtctgaatactctggccattctattcctgttggtggtcttgcttactatgtaactgccccatcaaggtgaaaatctagttccttcagtggggactggggaggccttctcgccatgatcatttttgttgtttttgttattcaataattaggtattcttttgactaacaatagcacattggaaaccacacagtttggctgatgtccttgcaaatccattccatgcactgttttatgtggtcttcatgctgtcagcctgtgctctgttctcaaagacatggattgaagtttctggttcatcagcaaaagatgttgctaagcagctcaaggaacaacaaatggtgatgccaggccatcgtgagtcgaacttgca

SEQ ID NO: 11519 - DNA, 595 bp, Zea mays
  unsure (1)..(595): unsure at all n locations; Clone ID: LIB3061-118-Q6-N6-B2
caacagcctcagcaatatcagcagggccaggaaaaacacaacagcaacaatgtcattgccaggagcagcaacagactacaaggtgcagctataactactatagcagtagctcaaatctaaaaaattgtcatgaattcctaaggcagcagtgcagccctttggtaatgccttttctccaatcacgtttgatacaaccaagtagctgccaggtattgcagcaacaatgttgtcatgatcttaggcagattgagccacaatacattcaccaagcaatctacaacatggttcaatccataatccaggaggagcaacaacaacaaccatgtgagttatgtggatctcaacaagctactcaaagtgcggtggcaatcttgacagcagcacaatacctaccatcaatgtgcggcttgtaccactcatactaccaaaataatccatgcagcagcaatgacattangtggtgtttgcaattgaagaattgtgtctacctagccgttatactcatataacggtgttaagcaataaagtaccatacattatgatngttgtactatgatatttgaataaagatactanatnngtaatatatgctact

SEQ ID NO: 11520 - DNA, 609 bp, Zea mays
  unsure (1)..(609): unsure at all n locations; Clone ID: LIB3061-118-Q6-N6-B3
attccccagcccggttccttttcgtgcggtttgatctcgtcggaggcccggccgcagttccgccatcagccatcgaattcgatggcggccaacttcgggaacaagatccgcaacgccaagctggttcttcttggagatgtaggcgctggcaaatctagcttggttcttcggtttgtcaagggacagtttgttgaattccaggaatcaacaatcggagcagctttcttttcccagaccttagcggtaaatgatgagactgttaagtttgaaatctgggatactgctgggcaggagaggtatcatagcttggcccccatgtattataggggtgcagccgccgccattgttgtctatgacatcacaaatccggcctccttcacccgtgccaagaaatgggttcaagaacttcaagctcaaggaaatccgaatacaatagtggctcttgctggtaacaaggttgatatgctagatgcgaggcacgtggcagtagaggaagcaaagacgtatgcccaggagaacggtctcttcttcatggagacatctgctaaaaactgcatcaatgtgaatgacatanntttatgagattgcaaagagattgcttcaagggca

SEQ ID NO: 11521 - DNA, 599 bp, Zea mays
  Clone ID: LIB3061-118-Q6-N6-B4
caacagctttaagctaacacagatgatgaggcacaaacgcttcaataagatttcatcgtctaaaatctcataaggttcaacttcaacaaaagatcaagcaagagtctgaacagtttatgtcttggaaggctgcccgtgaaaaggaagtacttcagctcaagaaggaagggagacgaaatgaatatgagatgcacaagctcttggccttaaatcagaggcagaagatggtcttacagaggaaaactgaggaagcagctgctgctacaaaaagattgaaggagttgctggaagcaaagaagtcatcacgggaaacatatggcagtgcaaatggttcggggatgcaggccttaatacgagctattgaggatgaactagaagtcactgtaagagcacacgaattgcgctcatattacgagcgacaaatgcaagagagagcagcaatatccaaggaaatagcaaaactaaaggaggaatcaaagcacaagatcagtgattgtcctcaagctatgtcacctagtgctagaagttctaggatatcagcattagagaatatgttgtgctcatcatctagtgctatggtatctatggcttctcactgt

SEQ ID NO: 11522 - DNA, 506 bp, Zea mays
  unsure (1)..(506): unsure at all n locations; Clone ID: LIB3061-118-Q6-N6-B5
tgactatcaagagaaccataaaaggatatatcaatgctggttttgctggaattatgcttgaggatcaggtggcacctaaagcatgtggacatactgaaggaaggaaagtcatatcaagggaggaagctgtcatgcacataaaagctgctgtagatgctaggaaagagagtggctctgacattgttattgtagcaaggacagattctcgccaagctatttctcatgatgaagcattatggagggtgaaagcatttgctgatgctggagcagatgttctatttattgatgcccttgcttcagtagaagagatgaaagcattttgtgcggttgcaccagaagttccaaagatggcaaacatgttagaaggtggtggtaaaactcccatattgagccctgctgaacttgaggaaattggtttcaggcttgtagtatatcctttatccttagttggggtatcaatgcgtgcaatgcangatgctctagttgcgataaaagacggcggtgta

SEQ ID NO: 11523 - DNA, 561 bp, Zea mays
  unsure (1)..(561): unsure at all n locations; Clone ID: LIB3061-118-Q6-N6-B6
ngacacaacaactacaacaacagttgcttccaacaatcaatcaagtagttgcagcgaaccttgctgcttacctccagcaacaacaatttcttccattcaatcaactagctggggtgaaccctgctgcttacttgcaggcacaacagctactaccattcaaccaacttgtcaggagccctgctgccttcttactgcagcaacagttgcttccattccatctacaagttgtggcaaacattgctgctttcttgcaacaacaacaacaattgctgccattttacccacaggttgtgggaaacattaacgccttcttgcaacagcaacagttgctaccattctacccacaggatgtggcaaacaatgtcgccttcttacaacaacaacaattgctgccatttaaccaacttgctttgacgaatcctaccaccttattgcagcagcccaccattggtggtgccatcttctagatttttttatgctttatactgtaataataaagttctcatactgatatgtgcaacttctcagtaataaaagattagagatctatattttaagttc

SEQ ID NO: 11524 - DNA, 581 bp, Zea mays
  unsure (1)..(581): unsure at all n locations; Clone ID: LIB3061-118-Q6-N6-B7
ggcgacgttcgtccaattcgacccggcaggcagcaggcagcagctgtgctcctgtgggtgggtgggtcatgggtgaccacatgcatcgatggagccagggccgccgtgtgcgcagccaactctacctatccccgcccccgggatgggcgatggcaactatcctatcgcaacaatatcctggggtgggggctataaaacggagcggcccgcgtggggcgcgcctccatcagccgcagtcgcgtcgcgtcgcgtcgcgtccagtccaatcctcggagcctcacacgggcggacgagcgggagcttctcccaatctcccctgccctgccctgccctgccgccgcgcttagcttcgcatcttcccctcctcctcctcctccttcctcggccaagcgaggagcgaggcgcgggcgcgagcgcgtcgttgagatggattcggaggcggtgcagcacggctgcgcgcattacagccgtgggtgcagcgtcgtggcgccctgctgcggccaggccttcggctgccgccattgccacaacgacgccaagggttcggtggtttccctccttncgttttcgcttcggctccg

SEQ ID NO: 11525 - DNA, 288 bp, Zea mays
  Clone ID: LIB3061-118-Q6-N6-B8
cccggctacgtcggccgtgcgtaccgtcccctggtccgtctggaacaggtagggtgggagagtctaccggcacgacgggttagaccggggtcggtcagccccagctttgccgatacgagagtgtcacgctccctattctcatatcggctccatctccgcctactcggaaagagttgtagagaggagtaagggaaggcgaggtacctcagcgccccgcaaatagggcgaagaccgtgcacgccgctcgactctcgacggcgttcttgtcacgacagcatgcgagggaga

SEQ ID NO: 11526 - DNA, 567 bp, Zea mays
  Clone ID: LIB3061-118-Q6-N6-B9
attttgagcattcagaaacacaccaagcgaagcgcactagcaacaacctaacaacaatggctaccaagatattatccctccttgcgcttcttgcgctttttgcgagcgcaacaaatgcgtccattattccacaatgctcacttgctcctagttccattattccacagttcctcccaccagttacttcaatggccttcgaacacccagctgtgcaagcctataggctacaacaagcgattgcggcgagcgtcttacaacaaccaattgcccaattgcaacaacaatccttggcacatctaacaatacaaaccatcgcaacgcaacagcaacaacagttcctaccagcactgagccacctagccatggtgaaccctgtcgcctacttgcaacagcagctgcttgcatccaacccacttgctctagcaaacgtagttgcaaaccagcaacaacaacaactgcaacagtttctgccagcgcttagtcaactagccatggtgaaccctgccgcctacctacaacagcaacaactgctttcatctagcccgctcgctgtggccaatgcaccta

SEQ ID NO: 11527 - DNA, 609 bp, Zea mays
  unsure (1)..(609): unsure at all n locations; Clone ID: LIB3061-118-Q6-N6-C1
gcgaagcgcactagcaacgacctaacaccaatggctaccaagnaattagccctccttgcgcttcttgcccttttagtgagcgcaacaaatgcgttcattattccacagtgctcacttgctcctagtgccattattccacagttcctcccaccagttacttcaatgggcttcgaacatccagccgtgcaagcctacaggctacaactagcgcttgcggcgagcgccttacaacaaccaattgcccaattgcaacaacaatccttggcacatctaaccctacaaaccattgcaacgcaacaacaacaacaacaacagtttctgccatcactgagccacctagccgtggtgaaccctgtcacctacttgcaacagcagctgcttgcatccaacccacttgctctggcgaacgtagctgcataccagcaacaacaacagctgcaacagtttatgccagtgctcagtcaactagccatggtgaaccctgccgtctacctacaactactttcatctagcccgctcgcggtgggcaatgcacctacgtacctacaacaacagttgctgcaacaaattgtaccagctctgactcagctagctgtggcaaaccctgct

SEQ ID NO: 11528 - DNA, 597 bp, Zea mays
  unsure (1)..(597): unsure at all n locations; Clone ID: LIB3061-118-Q6-N6-C10
gtagaaaacactacccaacacagnatgtattagctgcggtggactttgatcttaggtttacgtatgtgttggctggatgggaaggatcagctcatgattcctttgtgctccaagacgcattgtcacgcccttcgggcttaaaaattcttgaaggtcattactttctagctgatgctggttatgcagcaagacctggtatactacccccgtaccgtggtgttcggtaccatcttaaggagtttcagggtactagacgaccagaaaatccaaaggaattgttcaacctacgtcactcatctcttagaacaacaattgaacgggcatttggcacacttaaaaatagatttaagatactaacaaggtaacacttttgacacaacaaggtctatggtaatcatatcagaatcagagaaggaaaaactaaaggatagagcaaggaggctcctttcaaagcccatcaaattcttcaatgaaatgtaagagctattccttgacagtagtgctgatggatctcttgccatggatgctactacttgcctaaatgaaagtcaacctgtcgattataatgataatgatgatgacatatgcaatgatgtc

SEQ ID NO: 11529 - DNA, 545 bp, Zea mays
  unsure (1)..(545): unsure at all n locations; Clone ID: LIB3061-118-Q6-N6-C11
ctcattgcntccgatgccattattccacagttcctccctccattcttcatgggcttcgaacacccagctgtgcaagcctataggctacaacaagcgcttgcggcgagcgtcttagaacaaccaattgcccaattacaacaacaatccttggcacatctaaccatacaaaccatcgcaacgcagcagcaacaagcactgagccacctagccgtggtgaaccctatcgcctacttgcaacaacagctgcttgcatccaacccacttgctttggcaaacgtagctgcataccaacaacaacaacagttgcaacagtttctaccagcgctcagtcaactagccatggtgaaccctatcgcctacctacaacagcaacaacttctttcatctagcccgctcgctatgggcaatgcacctacatacctgcaacaacagttgttgcaacaacagtatgctgcaacaaattgtaccagctcttactcaactagactgaggacaaaccctgctgcctacttgcaacaactacttgcattcaacccactgactgg

SEQ ID NO: 11530 - DNA, 478 bp, Zea mays
  unsure (1)..(478): unsure at all n locations; Clone ID: LIB3061-118-Q6-N6-C12
cagtactgtgaaaatccaattcttctaccctacagnatccaacaggcaatcgcagcaggcatcttacctttatcacccttgttcctccaacaatcatcagccctattacagcagttacctttggtgcatttattggcacaaaacatcagggcacaacaactacaacaactcgtgctagcaaaccttgctgcctactctcagcaacagcagttacctttggtgcatttgttggcacaaaacatcagggcacaacaactacaacaactcgtgctagcaaaccttgctgcctactctcagcaacaacaggttctgccatacaaccaactagctgcattgaactctgctgcttataagcagcaacaacaactactaccattcatccagctagctgctgcctacccacaacaatgagttgcatacaaccaactggcagaaaaaaactactgatgcttatgagcaacaacagcggctactacca

SEQ ID NO: 11531 - DNA, 359 bp, Zea mays
  Clone ID: LIB3061-118-Q6-N6-C2
gtcagacgaggccaggcgcggtcccgcgggcgccgtgcaggtggtgcttcggtactggtatcaatgaccctggtcctgctgggctgcagctcctgggactcagcacctggtggtgctgtctgggttggtgctgatttgaaaaacacggcgaaggggattatttttacttgttggggcaagggcggttgatctgaactgcccctgtctagcaaattttcttcttggagccctgggcacatgattctgtacacgaatactccgttagaatttcgagttcacgggtcttgactcttttacccatttgctggcgcaaactcagggatctatcacggctaattgtaactactatagtaagagtg

SEQ ID NO: 11532 - DNA, 599 bp, Zea mays
  Clone ID: LIB3061-118-Q6-N6-C3
ccgcgccccaccgctttcccgttccccaccccgaccgactgctccccctcccccgcaccagcctcaagccctcaaggcctcaaggcatcgccggcgccgcaacttcgctgaggaagcccgcacccctgcccggatccgatggccaacagcaacctcccgcggcggatcatcaaggagactcagcggctgctcagcgagccagcaccggggatcagcgcgtcgccctcggaggagaacatgcgctacttcaacgttatgatccttgggccggcgcagtcgccctatgaaggtggagtttttaagcttgaactctttttacctgaggaatatccaatggctgccccaaaggttaggtttctgacaaagatttatcatcccaacatcgacaagcttggtaggatatgcctcgacattctcaaggacaaatggagcccagcacttcagattcgaacagttcttttgagtatacaggctctactgagtgcgccaaatccagacgaccctctctcggataacattgcaaagcactggaaagccaatgaagtagaagctgtcgaaacagctaaggagtggactcgcctgtatgcgagcggtgcatg

SEQ ID NO: 11533 - DNA, 583 bp, Zea mays
  unsure (1)..(583): unsure at all n locations; Clone ID: LIB3061-118-Q6-N6-C4
gagaccaactagcaacatagnaaagcacaatagtgtaccaacaatggcagccaaaatattttgcttccttatgctccttggtctttctgcaagtgttgctaccgcaaccattttcccacaatgctcacaagctcctatagcttcccttcttcccccatacctctcaccagcggtgtcttcaatgtgtgaaaccccaattgttcaaccctacaggatccaacaggcaatcgcaacaggcatcttaccattatcacccttgttcctccaacaaccgtcagccctattacagcagttacctttggtccatttggtggcacaaaacatcagggcacaacaactacaacaacttgtgctagcaaaccttgctgcatactctcagcaacatcagtttcttccattcaaccaactggctgcattgaactctgctgcttatttgcaacaacaattaccattcagccagctagttgctgcctacccccagcaatttcttccattcaaccaactagcagcattgaactctgctgcttatttacagcagcaacaactactaccattcagccagctagctgatgtgagccctgct

SEQ ID NO: 11534 - DNA, 570 bp, Zea mays
  unsure (1)..(570): unsure at all n locations; Clone ID: LIB3061-118-Q6-N6-C5
gttctttctacaagggtttgtccgccggattgctgaggcaagcgacgtacacgactgctcgtcttggatcctttagggttctaactaacaaagcagttgaaaagaatgaagggaagccattgcctctatttcagaaagcttttattggtctgactgctggtgcaattggtgcttgtgttggtagtcctgctgatctggcactcattagaatgcaagccgattcgaccctgccagttgcacaacgacgcaactataagaatgctttccatgcactctaccgtatcagtggtgatgagggagtccttgcgctttggaagggtgcaggtccaactgtggtgagagctatggcactcaatatgggtatgcttgcttcctatgaccagagtgtcgagctatttagggacaaatttggcgcaggagaaatttctactgttgttggagccagcgctgtttctggattctttgcctcagcatgcagtttgccctttgactatgtgaagacacagattcagaagatgcaacctgatgcgaatggcaagtacccatacacagggntctttggactgtgct

SEQ ID NO: 11535 - DNA, 552 bp, Zea mays
  Clone ID: LIB3061-118-Q6-N6-C6
aagaagcttgcattgttcgtttgctcgatcgttgcagataatggagaaccctgctccgagtatcgtagtgccccccattgccgcacctgtatcagcgaacttcagcagactcgccttccgcaacctgtacatccgacggacgggtccagacagcagggagatggtgactgtggagggaagaagaggctctagtgatcagacaggcgacatgaggtacgtgagtgacttccccgtctacgatggccgtggctccgacgccgtcctggtggctcgcgtgcagggcgtcacaaccacgttcgggaactccaaccagttcttcaccgtcgccttcgaggccggcaggctcaagggctccacgctccttaccgaaggagtggtgacggatggatcagatgaatgggcaatctacggcgggaccggagagtttgctatggcgagaggtgtcgtcaaaagaaggtaccttgccgatagggatggcgccgggaacactgacgagctcagcatgcaggttttctgcccggtgtttggctcatcacagcaaccaaacaagca

SEQ ID NO: 11536 - DNA, 481 bp, Zea mays
  Clone ID: LIB3061-118-Q6-N6-C7
gaggcggagatgatcgaggtggtgctcaacgaccgcctggggaagaagtgcgggtcaagtgcaacgaggacgacaccatcggcgacctcaagaagctggtggcggcgcagacggggacgcgccccgagaagatccgcatccagaagtggtacaacatctacaaggaccacatcaccctcaaggactacgaggtccacgacggcatgggcctcgagctctactacaactgagccgccgcccctctctccctctcgtcaggttggtctgaattctgaagtcatgggtgcaattcgcttcgcggtgatctcttaagctcatcacatatataaaagcaacctcagttggctatgtaagacatggcgtgccaaactatcagtgaccactgccagctttgcaatacgttgttgtatggtcaacctgcaaacttggtgtactgctactcgtactataaataacatagggttttaaccttggttgtgct

SEQ ID NO: 11537 - DNA, 538 bp, Zea mays
  Clone ID: LIB3061-118-Q6-N6-C8
cgaatgccaatggtgaattgggaggcgtgcaacctctccctgggacagctgggcagttcggcggcatgcagcaggcattgcaaccacaagttaaccacatgggagttccacaaaggcagccaatgtacagcaaccagtcagggattggggtggcgccaacacagatgcaggcaggcttggggaaccagcagttgggttcgacatccatgatgggcatgcctccacagatgtatggcggcggatcgcaggcagccatgatgtacccgcaacaaatgccgcagccgcagccgcagcagccgatgtatggtggtggtggtcgtctggcagggtacatgcagcatcctgctgtggccgctgcacactactacagcaacctggggacagcgggaatgtatgggtaccccggcgcgaacgggctgtcccagagcatgtatggcctctcggtgcaggttaactcgtcgtaccagactaagacggcgccaccctctgcggcgacgaagcccgaagacaagcttttcggcgaccttctgagcattgc

SEQ ID NO: 11538 - DNA, 567 bp, Zea mays
  unsure (1)..(567): unsure at all n locations; Clone ID: LIB3061-118-Q6-N6-C9
ngaaagcacaatagtgtaccaacaatggcagctaaaaattttgcctccttatgctccttggtctttctgcaagtgctgctacggcgaccattttcccacaatgctcacaagctcctatagcttcccttcttcccccgtacctctcaccaacggtgtcttcggtatgtgaaaacccaattcttcaaccctacaggatccaacaggcaatcgcagctggcatcttacctttatcacccttgttcctccaacaatcatcagccctattacagcagttacctttggtgcatttattggcacaaaacatcagggcacaacaactacaacaacttgtgctagcaaaccttgctgcctactctcagcaacagcagtttcttccattcaaccaactagctgcattgaactctgcttcttatttgcaacaacaacaactaccattcagccagctatctgctgcctacccccagcaatttcttccattcaaccaactgacagcattgaactctcctgcttatttacagcagcaacaactactaccattcagccagctagctggtgtgagccctgcta

SEQ ID NO: 11539 - DNA, 578 bp, Zea mays
  unsure (1)..(578): unsure at all n locations; Clone ID: LIB3061-118-Q6-N6-D1
tgagcattcagaaacacaccaagcgaagcgcactagcaacgacctaacaacaatggctaccaagatattagccctccttgcgcttcttgccctttttgtgagcgcaacaaatgcgttcattattccacaatgctcacttgctcctagtgccattattccacagttcctcccaccagttacttcaatgggcttcgaacacctagctgtgcaagccaacatgcaacaacaagcgcttgcggcgagcgtcttacaacaaccaattgcccaattgcaacaacaatccttgccacatctaacaatacaagccatcacaacgcaacagcaacaacagttcctaccagcactgagccacctagccatggtgaaccctgccgcctacttgcaagagcagctgcttgcatccaacccacttgctctggcgaacgtagttgcaaaccagcaacaacaacagctacaacagtttctgccaacgctcagtcaactagccatggtgaaccctgccgnctacgtacaacaacaacaactgctttcatctagcccgctcgctgtgggcaatgcacctacatacctgcaacaac

SEQ ID NO: 11540 - DNA, 330 bp, Zea mays; identical to SEQ ID NO: 11173
  Clone ID: LIB3061-118-Q6-N6-D10

SEQ ID NO: 11541 - DNA, 585 bp, Zea mays
  Clone ID: LIB3061-118-Q6-N6-D11
gctggggagaggaaacccgacaggtgcagcagttcatgaccattaccggcgccagtgagaaggttgcccttcaggcactgaaagctagtgattggcacttggaaggagcttttgacttcttctatagccaacctcaggtttctgtggtcaatactcggcatcttgaagatattttcaacagatataaagaacctgatgctgatatgataatggtggaaggaatatctcaattttgcaatgatctgcaggttgatcctcaggatattgtcatgcttgtcatatcatggcacatgaaagccgccacaatgtgtgaatttactcgtcaggaattcattggtggactgcagtcaattggggtagattcaatcgagaagtttcgtggaaaattaccatcattacgagctgagctaaaagatgacaataaattccgtgatatatacaactttgcattcacttgggcaagggaaaagggtcaaaagtctctctcactggagacttctattggaatgtggcagttgctatttgctgaaagaactggcctcttctggatcattggtgtcagtttttacaggtcagacacaataa

SEQ ID NO: 11542 - DNA, 575 bp, Zea mays
  unsure (1)..(575): unsure at all n locations; Clone ID: LIB3061-118-Q6-N6-D12
gnaacacaccaagcgaagcgcactagcaacgacctaacaacaatggctaccaagatattagccctccttgcgcttcttgccctttttgtgagcgcaacaaatgcgttcattattccacaatgctcacttgctcctagtgccattattccacagttcctcccaccagttacttcaatgggcttcgaacacctagctgtgcaagccaacatgcaacaacaagcgcttgcggcgagcgtcttacaacaaccaattgcccaattgcaacaacaatccttgccacatctaacaatacaagccatcacaacgcaacagcaacaacagttcctaccagcactgagccacctagccatggtgaaccctgccgcctacttgcaagagcagctgcttgcatccaacccacttgctctggcgaacgtagttgcaaaccagcaacaacaacagctacaacagtttctgccaacgctcagtcaactagccatggtgaaccctgccggctacgtacaacaacaacaactgctttcatctagcccgctcgctgtgggcaatgcacctacatacctgcaacaacaattgtt

SEQ ID NO: 11543 - DNA, 466 bp, Zea mays
  Clone ID: LIB3061-118-Q6-N6-D2
gagccacctagccgtggtgaaccgtgtcacctacttgcaacagcagctgcttgcatccaacccacttgctctggcgaacggaggtgcataccagcaacaacaacagctgcaacagtttatgccagggctcagtcaactagggcatggtgaaccctgccgtctacctacaactactttcatctagcccgctcgcggtgggcaatgcacctacgtgcctacaacaacaggtgctgcaacaaattgtaccaactctgactcagttagctgtggcaaaccctgctggctacttacaacagttgcttacattcaacacaactggctgtgtcaaactctggtgcgtacctacaacagcgacaacagttacttaatgcattgggagtggctaacccattggtcggtaccttcctggaccagctacaacaattgctgacatacaacacgttctttgtgatgaaccctggcttgc

SEQ ID NO: 11544 - DNA, 450 bp, Zea mays
  Clone ID: LIB3061-118-Q6-N6-D3
acacatgaacagcatcgaatatggtcatctgttctctactgtgtgctctggtctctgtcacgctgccagcgcacaatgcaatgcatgatgccctgcccataccacggggtctataggaccttgtacggcgcttacgccggcctgactactattatgggcgccggaggactgtacccctacgcgaaatacctgtgaaacaccgaatgtaaccccgtgccagcagttccctactacgccgggtgtgagcagccgaacgccatgtttcagccactccggcaaaattgctgacgaacaaagatgaggatgatggaactccataccgttcgccacaatgctcaagacatgatcacaattgatcgtaccattcacgcaagcaggagcctgtacgagccaactatgatacatacagagtagcacttgatgccatcctagggtatcaaccgcatggcc

SEQ ID NO: 11545 - DNA, 646 bp, Zea mays
  Clone ID: LIB3061-118-Q6-N6-D4
attgagaccaacagcacatagaagtggaatccagtagcaacaacagagcaacaatggcgaccaagatattttccctccttatgctccttgctctttctgcatgtgttgctaacgcgacaattttccctcaatgctcacaagctcctatagcttcccttcttcccccataccttccatcaatgatagcttcagtatgtgaaaacccagctcttcagccctataggctccaacaagcaatcgcagcaagcaacatacctttatcacccttgttgtttcaacaatcgccagccctatctttggtgcagtcattggtacaaaccatcagggcacagcagctgcagcaactcgtgctacctgtgatcaaccaagtagctctggcaaacctttctccctactctcagcaacaacaatttcttccattcaaccaactgtctacactgaaccctgctgcttatttgcagcaacaactattaccattcagccagctagctactgcctactctcagcaacaacaacttcttccatttaaccaattggccgcactgaaccccgctgcttatttgcagcagcaaatactactaccatttagccagctagctgcagcaaaccgtgcttccttcttgacacagcaacagttgctgccttt

SEQ ID NO: 11546 - DNA, 392 bp, Zea mays
  Clone ID: LIB3061-118-Q6-N6-D6
gcaacaactactaccattcagccagctagctggtgtgagccctgctaccttcttgatacaaccacagttgttgccgttctaccagcacgctgcgcctaacgctggcaccctcttacaactgcaacaattgctgccattcaaccaacttgctttgacaaacccagcagcgttctaccaacaacccatcattggtggtgccctcttttagatttcttatgagttatagttcaataataaagttttttgtctgatgtttgtggcttcccagaaataagaaagtacatttctagattaaaaaaaaaaaaaaaaaaaaaaaaaaaaaaaaaaaaaaaaaaaaaaaaaaaaaaaaaaaaataaaaaaaaaaaaaaaaacaaaaaaaaaacaaacaaac

SEQ ID NO: 11547 - DNA, 605 bp, Zea mays
  Clone ID: LIB3061-118-Q6-N6-D7
aaaaaataactcggaaaaaagagagccgaaattcgaaggggaggggaaagcaaagctgatggcggagggaccaggggaaagcaaagcaaatggcggaggccccgagcaagatcgaatccatgaggaagtgggtcgtcgagcacaagctccgagccgtaggttgcctctggctaggtgggatcagcagttcgatcgcctacaactggtcgcggcccaatatgaagcctagcgtcaagatcatccacgcaaggttgcatgctcaagctctaaccctggctgcattagttggttctgcatgcgtggagtactatgatcagaagtatggttcttctgggccaaaggtggacaaatacacaagccaatacctggcccattcgcataaagattaaaggtcgccatgttggttcctgcatgccggattaattttgggctcatctcgggttgctcatgacccgcccatggatgctggatgtttattctttttttgtcttcataattacaaaatggtggtgtacttgccaggcaaatgttaatgagggtataatgcagatattgtcgtcgtaatttggcctcatgttgcattatctaacctcactttgttgact

SEQ ID NO: 11548 - DNA, 551 bp, Zea mays
  Clone ID: LIB3061-118-Q6-N6-D8
tcggcgtgcgtccgtcccctggccgtctggagaggtgggtggggagtctaccggacgcgggtagccggggcggtcgccccaccttgccgatacgaggtgtccgctcctatttcattcggtccattccgcctctcggaagagttgagagaggagtaaggaaggcgaggacctcgcgccccgcgatgggcggcgacctgtacgccctcgacttcgacggcgtcttgtgcgacagctgcggggagagctccctctcagccatcaaggctgcgaaggtgaggtggccgtcgctgtttgagcaggttgacgccgccatggaggagtggatagtggagcagatgtacacccttcgtccagtggtggaaacaggatatgaaaacttattgcttgtaaggttgcttgttgagatccagatacactctgttcgaaaatcatcagttgcagatgggcttagcatccaagaaatattggagaactggtcaaaactgaagcccactctcatggatgagtggcaagaagatagggaatctcttgtagatctctttggccgtgta

SEQ ID NO: 11549 - DNA, 620 bp, Zea mays
  unsure (1)..(620): unsure at all n locations; Clone ID: LIB3061-118-Q6-N6-D9
nttgnanaaccaacagcaacatagaaagtggaatccagtagcaacaacagagcaacaatggcgaccaagatattttccctccttatgctccttgctctttctgcatgtgttgctaacgcgacaattttccctcaatgctcacaagctcctatagcttcccttcttcccccataccttccatcaatgatagcttcagtatgtgaaaacccagctcttcagccctataggctccaacaagcaatcgcagcaagcaacatacctttatcacccttgttgtttcaacaatcgccagccctatctttggtgcagtcattggtacaaaccatcagggcacagcagctgcagcaactcgtgctacctgtgatcaaccaagtagctctggcaaacctttctccctactctcagcaacaacaatttcttccattcaaccaactgtctacactgaaccctgctgcttatttgcagcaacaactattaccattcagccagctagctactgcctactctcagcaacaacaacttcttccatttaaccaattggccgcactgaaccccgctgcttatttgcagcagcaaatactactaccatttagccagctagctgcagcaaaacgtgcttt

SEQ ID NO: 11550 - DNA, 581 bp, Zea mays
  Clone ID: LIB3061-118-Q6-N6-E1
cttgctcctagtgccattattccacagttcctccctccagttacttcaatgggcttcgaacacccagctgtgcaagcctacaggctacaacaagcgcttgcggcgagcgtcttacaacaaccaattgcccaattacaacaacaatccttggcacatctaaccatacaaaccatcgcaacgcaacagcaacaacaatttctaccagcactgagccaactagctgtggtgaaccctgtcgcctacttgcaacagcagttgcttgcatccaacccacttgctctggcaaacatagttgcataccaacaacaacaacaattgcaacagtttctaccagcgctcagtcaactagccatggtgaaccctgccgcctacctacaacagcaacaactgatttcatctagccctctcgctgtggttaatgcacctacatacctgcaacaacagttgctgcaacagattgtaccagctctgactcagctagctgtggcaaaccctgctgcctacttgcaacagctgcttccattcaaccaactgactgtgtcgaactctgctgcgtacctacaacagcgacaacagttact

SEQ ID NO: 11551 - DNA, 640 bp, Zea mays
  unsure (1)..(640): unsure at all n locations; Clone ID: LIB3061-118-Q6-N6-E11
attgagaccaactagcaacatagnaaagcacaatagtgtaccaacaatggcagccaaaatattttgcttccttatgctccttggtctttctgcaagtgttgctaccgcaaccattttcccacaatgctcacaagctcctatagcttcccttcttcccccatacctctcaccagcggtgtcttcaatgtgtgaaaacccaattgttcaaccctacaggatccaacaggcaatcgcaacaggcatcttaccattatcacccttgttcctccaacaaccgtcagccctattacagcagttacctttggtccatttggtggcacaaaacatcagggcacaacaactacaacaacttgtgctagcaaaccttgctgcatactctcagcaacatcagtttcttccattcaaccaactggctgcattgaactctgctgcttatttgcaacaacaattaccattcagccagctagttgctgcctacccccagcaatttcttccattcaaccaactagcagcattgaactctgctgcttatttacagcagcaacaactactaccattcagccagctagctgatgtgagccctgctgccttcttgacacaacaacagttgttgccgttctacctgcacgctatgcctaac

SEQ ID NO: 11552 - DNA, 495 bp, Zea mays
  Clone ID: LIB3061-118-Q6-N6-E12
gtccattattccacaatggtcgcatttgtttagttccattattccacagttcctcccaccagttacttcaatggccttcgaacacccagctgtgcaagcctataggctacaacaagcgattgcggcgagcgtcttacaacaaccaattgcccaattgcaacaacaatccttggcacatctaacaatacaaaccatcgcaacgcaacagcaacaacagttcctaccagcactgagccacctagccatggtgaaccctgtcgcctacttgcaacagcagctgcttgcatccaacccacttgctctagcaaacgtagttgcaaaccagcaacaacaacaactgcaacagtttctgccagcgcttagtcaactagccatggtgaaccctgccgtctacctacaacagcaacaactgctttcatctagcccgctcggtgggggcaaagcacctacatacctgcaacaagaattgttgcaacagattgtaccagctctaac

SEQ ID NO: 11553 - DNA, 535 bp, Zea mays
  unsure (1)..(535): unsure at all n locations; Clone ID: LIB3061-118-Q6-N6-E2
gngatctagcagnaactgttgattgccaaatgtgcacagaagaaaaactatatgcaatggcatcaatgggcttggttactggggggcagtacgtgggaatcagcacctgctggtgctggctgggttggtgctcatttgaaaaacaggggaaggagattatttttccttgatggggcaaggacggtagatctgaaagcagcatggcgtggaaatatttttcttgaaaacagtaggcacaggattaagtacaagaatactccattagaattttgagttgaagggtcttgaattttttacccaattgctggagcaaactcagggatctaacacggtttagtctaactacttagttaagagtattcaacataaagattctttggaatcacaataagctgacaaatgcatcatttctttatcaatttcaccatctcatctgcatagttccctttgtttttattctgttattcacatgggttttctagtgatgttattatcaaagcagttgacgatgcttacctgtttttccatgctaacg

SEQ ID NO: 11554 - DNA, 476 bp, Zea mays
  unsure (1)..(476): unsure at all n locations; Clone ID: LIB3061-118-Q6-N6-E3
aacctttctccctactctcagcaacaacaatttcttccattcaaccaactgtctacactgaaccctgctgcttatttgcagcaacaactattaccatttagccagctagctactgcctactctcagcaacaacaacttcttccatttaaccaattggccgcactgaaccccgctgcttatttgcagcagcaaatactactgccatttagcgagctagctgcagcaagtcgtgcttccttcttgacacaacaacagttgttgccgttctacctgcacgctatgcctaacgctggcaccctcttacaactgcaacaattgctgccattcaaccaacttgctttgacaaacccaacagtgttctaccaacaacccatcattggtggtgccctcttttagattgcttatgagttatagttcaataatgaagttttttggatgatgtttgntggcgtcccagaaataagaaagtacatttc

SEQ ID NO: 11555 - DNA, 587 bp, Zea mays
  Clone ID: LIB3061-118-Q6-N6-E4
ccgggtccaacccagccttccggaaacacaccagcgaagcacattaggcaacatacctaacaacagtggctaccaagatttatccctccttgcgcttcttgcgctttttgcgagcgcaacaaatgcgttcattattccacagtgctcacttgctccaagttccattattacacagttcctcccaccagttacttcaatgggcttcgaacacccagctgtgcaagcctataggctacaacaagcaattgcggcgagcgtcttacaacaaccaatttcccagttgcaacaacaatccttggcacatctaacaatacaaaccatcgcaacgcaacagcaacaacaattcctaccagcactgagccacctagccatggtgaaccctgccgcctacttgcaacagcagttgcttgcatcaaacccacttgctctggcaaacgtggttgcaaaccagccacaacaacagctgcaacagtttctgccatcgctcagtcaactagccatggtgaaccctgccgcctacctacaacagcaacaactgctttcatctaacccgctcgctgtggccaatgcacctacatacctgcaac

SEQ ID NO: 11556 - DNA, 587 bp, Zea mays
  unsure (1)..(587): unsure at all n locations; Clone ID: LIB3061-118-Q6-N6-E5
tagcaacatagnaaagcacaatagtgtaccaacaatggcagccaaaatattttgcctccttatgctccttggtctttctgcaagtgctgctacggcgaccattttcccgcaatgctcgcaagctcctatagcttcccttcttcccccgtacctctcaccagcggtgtcttcggtatgtgaaaacccaattcttcaaccctacaggatccaacaggcaatcacagctggcatcttacctttatcacccttgttcctccaacaatcatcagccctattacatcagttacctttggtgcatttattggcacaaaacatcagggcacaacaactacaacaacttgtgctagcaaaccttgctgcctactctcagcaacagcagtttcttccattcaaccaactagctgcattgaactctgcttcttatttgcaacaacaacaactaccattcagccagctacctgctgcctacccccagcaatttcttccattcaaccaactggcagcattgaactctcctgcttatttacagcagcaacaactactaccattcagccagctagctgggtgtgagccctgctaccttcttg

SEQ ID NO: 11557 - DNA, 581 bp, Zea mays
  unsure (1)..(581): unsure at all n locations; Clone ID: LIB3061-118-Q6-N6-E6
tctagctatcagcttccagtgagagcggcaagcgacaccacaaccagacaacacaccaccaccgagctgtgagaagaagttcgcagacaggatgggcaagctgtggacgatcctcactcacctccactccctagcagggccaacggtgatgctgctgtaccctctgtacgcgtccgtgcgggcgatggagagcccgtccaagctggacgacgagcagtggctcgcctactggatcctctactccttcgtcacgctcatggagatgctcctcgagtccctcatatactggatccccatctggtacgagctcaagctgctgttcatcgcgtggctcgtgctccccaacttcaggggcgccgccttcatctacgacaagttcgtgcgcgagcagctccggaagcacggcctcaccgccgccggctccgtcaagtcgtcgtcgccgtcgtccaaggacaaggacaagcccaagaacaagttcctcgccttcgtcacgcccaagaaggatcatgaagcttactgaagtgggttgcagtgatcccattcctggaccatgtcccngcaacctgtagctgtagtgcact

SEQ ID NO: 11558 - DNA, 399 bp, Zea mays
  Clone ID: LIB3061-118-Q6-N6-E7
gtctgaaaaactttattattgaactataactcataagaaatctaaaagagggcaccaccaatgatgggttgttggtagaacgctgctgggtttgtcaaagcaagttggttgaatggcagcaattgttgcagttgtaagagggtgccagcgttaggcgcagcgtgctggtagaacggcaacaactgtggttgtatcaagaaggtagcagggctcacaccatctagctggctgcatggcagtagcgtgctgttgctctaaataagcaggctaattgaatactggcacctgccttgttgcgacacattaatcgcggtgggtgtggtgtttccgcctcaaaggaccgttacacttgcctgccccctagcgccgcctccttctggtttcttcctttcctttctc

SEQ ID NO: 11559 - DNA, 419 bp, Zea mays
  Clone ID: LIB3061-118-Q6-N6-E8
gttaccggccctgactcagcagtgctgtgggacgccaagactatgatgtgcgccgctgaccctggtcacgggcgttacctataccgtctcatgccatgttcgcgtggggaagatgagcaccaaggaggtcgacgagcatatgatcaacgtgcagaacaagaactggtcctactttgtggagtggatccccaacaacgagaagtccagcgtgtgtgacatcccgccgtggggcctgaccatggcgtccaccttggtggggaacttaactttcatccgatgatatagcacggagggtgagcgagcagttcactgccatgttaaagacgaaggctttcttgtactggcacacgggcgaagtcatggacgatattgatttcaccgaggccctaagcactatgaatgacctcgtgtctgactac

SEQ ID NO: 11560 - DNA, 337 bp, Zea mays
  unsure (1)..(337): unsure at all n locations; Clone ID: LIB3061-118-Q6-N6-E9
cgcaaagcggccaggtcgcggggctgttggcggcgcagatagcgcagcaactgacggcgatgtgcggcctgcagcagccgactccatgcccctacgctgctgccggcggtgtcccccnactgaagaaactatgtgctgtagtatagccgctggctagctagctagttgagtcatttagcggcgatgattgagtaataatgtgtcacgcatcaccatgggtggcagtgtcagtgtgagcaatgacctgaatgaacaattgaaatgaaaagaaaaaatattgttccnnanaaaaaaaaaaaaaaaaaaaaaaaaaaaaaaaaaaaaaaaaannggggng

SEQ ID NO: 11561 - DNA, 414 bp, Zea mays
  unsure (1)..(414): unsure at all n locations; Clone ID: LIB3061-118-Q6-N6-F11
gggaattgaggctgatgacatggnaagctctgtacaagaaggtccatgctgccatccgtgctgatccttctgtggtcaagtcaaccaagcagccaccaaaggagcacaagaggtacaaccccaagaaactgacgtacgagcagaggaaggccagtctcattgaaaggctcaaccaactcaactcctcgggcggcgcagatgacgacgatgaggatgacgagtaaagtttggtcccatcgaagtagtgctatcttatgcggcgatcagtatttgtgctatggcatttatcgctacctgtagtcgtgcaacatgcatttttgtttaagtttgtcgatgcgaacaaagttgtttctgttagtttggagctggagttctgaatatttacttttataatattaaaattggaccgagtcg

SEQ ID NO: 11562 - DNA, 573 bp, Zea mays
  Clone ID: LIB3061-118-Q6-N6-F2
gagccacctagccgtggtgaaccctgtcacctacttgcaacagcagctgcttgcatccaacccacttgctctggcgaacgtagctgcataccagcaacaacaacagctgcaacagtttatgccagtgctcagtcaactagccatggtgaaccctgccgtctacctacaactactttcatctagcccgctcgcggtgggcaatgcacctacgtacctacaacaacagttgctgcaacaaattgtaccagctctgactcagctagctgtggcaaaccctgctgcctacttacaacagttgcttccattcaaccaactggctgtgtcaaactctgctgcgtacctacaacagcgacaacagttacttaatccattggcagtggctaacccattggtcgctaccttcctgcagcagcaacaacaattgctgccatacaaccagttctctttgatgaaccctgccttgcagcaacccatcgttggaggtgccatcttttagattacatatgagatgtactcgacaatggtgccctcataccgacatgtgtttcctagaaataatcaatatattgattg

SEQ ID NO: 11563 - DNA, 535 bp, Zea mays
  unsure (1)..(535): unsure at all n locations; Clone ID: LIB3061-118-Q6-N6-F3
gnatcagcaaacggcagtgcgtagagaggatcgtcgaacagaacagcatgaagatggtcatcgttctcgtcgtgtgcctggctctgtcagctgccagcgcctctgcaatgcagatgccctgcccctgcgcggggctgcagggcttgtacggcgctggcgccggcctgacgacgatgatgggcgccggcgggctgtacccctacgcggagtacctgaggcagccgcagtgcagcccgctggcggcggcgccctactacgccgggtgtgggcagccgagcgccatgttccagccgctccggcaacagtgctgccagcagcagatgaggatgatggacgtgcagtccgtcgcgcagcagctgcagatgatgatgcagcttgagcgtgccgctgccgccagcagcagcctgtacgagccagctctgatgcagcagcagcagcagctgctggcagcccagggtctcaaccccatggccatgatgatggcgcagaacatgccggccatgggtggactctaccagtaccagctgcccagcta

SEQ ID NO: 11564 - DNA, 619 bp, Zea mays
  Clone ID: LIB3061-118-Q6-N6-F4
gttcccatcgtcacaaggccagtaccaaacgtgccagcgcgacgtcgacaggcacaacgtctgcgccatggaggtgaggcacagcgtcgaacggctggaccaggccgacgcctacagccctggggctgggaggatcacacgcctcaccagccacaagttccccgtcctcaacctcgtacagatgagcgcggtgcgggtagacctgtaccaggacgccatcatgtcgccgttctggaacttcaacgcccacagcgccatgtacggcatcaggggcagtgcaagggtccaggtcgccagcgacaacgggaccacggtgttcgacgacgtgctccgtgcggggcagctgctcatcgtaccccagggctacctcgtcgccaccaaggcgcagggagaaggcttccagtacatcgccttcgagacgaaccctgacaccatggtcagccacgttgccgggaagaactccgtcctgagcgacttgccggccgccgtcatcgccagctcgtatgccatctccatggaggaagctgcagagctcaagaacggtaggaagcatgagctggctgtgcttactcctgctgggcagtggcagctaccaacaaggtcaagctggcagcgccca

SEQ ID NO: 11565 - DNA, 555 bp, Zea mays
  Clone ID: LIB3061-118-Q6-N6-F5
tcttccccatcccgtttctatggccgcgcgcggtgggttgacactgcaattattgatttccgcttaatctattgccgtgccgtagaagcggaagctactggacgaggggctggagcggaagcgggaggcggaactcaatgagctttacgatgccatgaaagattgggtcagcgaactcaggaaagacaatgcggaactcaacgagaagctggtggagaagcaggatgagctcgagaaggcccgtcaggaattccttgaagatattcgtacaagggacgctgaaattctgaagctgaagcagctcttagatgagaaggctgaaaaaaacaattctgcagctactgggtttccttgcctagcgcctgaagctgtcctagaaaattcaactccattgtcacctaaaagaaagacaccattttcccacggcaagctagaatgctccagaagacatacacgcatctcagggaataggacaacagagattcggagtgctcatatgctttctttgctgcttcaatctttagttcgcatgaaagatctcgtaaatgatggaac

SEQ ID NO: 11566 - DNA, 581 bp, Zea mays
  Clone ID: LIB3061-118-Q6-N6-F6
gccgctgccgcacacggcgaggaggatagggttgctccccccgttgccgactcgccgccgcatcgccgcgagcgtcatgaagaccttcccgctgtccaggggaagcaccatctccctagccctcttctccgacgtctccaacagccgggagctcctggacttgatgcagtcagggaagctggagccggcggtcgctctcctcaacgcgtcactggtgccggatgtgttccctatcctcgcggcagcgcttaaggcgctgttgtccaagactagggagtcactgaccacaaggactctgcactctgagctcgtctacaactactcggggtccaaacatataacagagtccctgaagcgctgtgggatctctgataatacaacttacatccttgctgcttgttttgatgcttccgacgaggagatgaaggcagtggagaagctcatcagtggcaccgagattgatctcacagaactggaaagaagagcaaaccagccacagatcttgaagcattacaagatacctccccaagaactatcgatatctacgttgccggacgcaattgtatgcaggattgctgctc

SEQ ID NO: 11567 - DNA, 165 bp, Zea mays
  Clone ID: LIB3061-118-Q6-N6-F7
aacattgctggcattcaaccaacttgctttgacaaacccagcagtgttctaccaacaacccatcattggtggtgccctcttttagatttcttatgagttatagttcaataataaagttttttatctgatgtttgtggcttcccagaaataagaaagtacatttct

SEQ ID NO: 11568 - DNA, 646 bp, Zea mays
  unsure (1)..(646): unsure at all n locations; Clone ID: LIB3061-118-Q6-N6-F8
ggcgcggcgagggccatcggtggctgcccgatatacgtcagcgacaagccggggnaaccacaacttcgagctgctcaggaagctcgtgctccccgacggcaccgtgctacgcgcgcagcttcccggccggcccacacgggactgcctcttctccgacccggcgcgcgacggcgcgagtttgctcaagatttggaacctgaacaagtgcggtggcgtggtgggtgtgttcaactgccagggagccgggtggtgccgcgtgaccaagcggacgcgcgtgcacgacgcgtcgccgggcacgctgaccggcaccgtgcgtgccgacgacgtcgacgccatagcgcgcgtcgctggtgacggcggcgggtgggacggcgagaccgtggtgtatgcgcaccgcacgcgggagctagtgcgactgccccggggcgtcgcgctgcctgtgacgctaggcccgctccagtatgaggtgttccatgtgtgcccgctccgcgccgtcgtgccggggttctcgttcgcgcccgtcgggctgctcgatatgttcaacgctgggggcgccgttgaggagtgcgacgtgatcagcaatgtcggcggcaaggccatggctctcaaggttcgcgggtgcggtcggttcggcgcttactgctcg

SEQ ID NO: 11569 - DNA, 400 bp, Zea mays
  Clone ID: LIB3061-118-Q6-N6-G1
ggccgtcccctctcctccctggcagccgcccaccatttcttcctcctccatagatcttcccctcccccacgcagcaaggatcgagaagaggaggagcaagatggattgaagaggaagagaggatcaaggagatgttctaccccccccccccatctattgcagattttcttggggaaactctaggtggctacactccagatcatgcctagtatatttcttcttcttcgatgaaggtacttgattcatgttgggaatgaggggagtagcagcacgtccaccttcactctcataataacgttgcccaggcacagccatgatttaattagaaacttcttgtcaaaggatgtttgtctttaactagtcatgcacactagttaattcaattcatgtcgttatggtt

SEQ ID NO: 11570 - DNA, 609 bp, Zea mays
  unsure (1)..(609): unsure at all n locations; Clone ID: LIB3061-118-Q6-N6-G10
ggtaccggnaattcccgggnattgganaaccaactagcaacatagnaaagcacaatagtgtaccaacaatggcagccaaaatattttgcctccttatgctccttggtctttctgcaagtgctgctacggcgaccattttcccgcaatgctcgcaagctcctatagcttcccttcttcccccgtacctctcaccagcggtgtcttcggtatgtgaaaacccaattcttcaaccctacaggatccaacaggcaatcacagctggcatcttacctttatcacccttgttcctccaacaatcatcagccctattacatcagttacctttggtgcatttattggcacaaaacatcagggcacaacaactacaacaacttgtgctagcaaaccttgctgcctactctcagcaacagcagtttcttccattcaaccaactagctgcattgaactctgcttcttatttgcaacaacaacaactaccattcagccagctacctgctgcctacccccagcaatttcttccattcaaccaactggcagcattgaactctcctgcttatttacagcagcaacaactactaccattcagccagctagctggggtgagccctg

SEQ ID NO: 11571 - DNA, 581 bp, Zea mays
  unsure (1)..(581): unsure at all n locations; Clone ID: LIB3061-118-Q6-N6-G11
tagnaagcacaatagtgtaccaacaatggcagccaaaatttttgcctccttatgctccttggtctttctgcaagtgctgctacggcgaccattttcccacaatgctcacaagctcctatagcttcccttcttcccccgtacctctcaccagcggtgtcttcggtatgtgaaaacccaattcttcaaccctataggatccaacaggcaatcgcagctggcatcttacctttatcacccttgttcctccaacaatcatcagccctattacagcagttacctttggtgcatttattggcacaaaacatcagggcacaacaactacaacaacttgtgctagcaaaccttgctgcctactctcagcaacaacaggttcttccattcaaccaactagctgcattgaactctgcttcttatttgcaacaacaacaactaccattcagccagctatttgctgcctacccccaggaatttgttgcattcaaccaactgacagcttttgaactctccctgctatttacagaagcaacaactactaccatttaatccacctaactggggtgaagcccctgctacctttcttg

SEQ ID NO: 11572 - DNA, 619 bp, Zea mays
  Clone ID: LIB3061-118-Q6-N6-G12
gcctactctcagcaacaacagtttcttccattcaaccaactagctgcattgaactctgcttcttatttgcaacaacaacaacaatcatcagccctattacagcagttacctttggtgcatttattggcacaaaacatcagggcacaacaactacaacaacttgtgctagcaaaccttgctgcctactctcagcaacaacagtttcttccattcaaccaactagctgcattgaactctgcttcttatttgcaacaacaacaactaccattcagccagctatctgctgcctacccccagcaatttcttccattcaaccaactgacagctttgaactctcctgcttatttacagcagcaacaactactaccattcagccagctagctggtgtgagccctgctaccttcttgacacaaccacaattgttgccgttctaccagcacgctgcgcctaacgctggcaccctcttacaactgcaacaattgctgccattcaaccaacttgctttgacaaacccaacagcattctaccaacaacccatcattggtggtgccctcttttagatttctcatgagttatagttcaataataaaggtttttgtctgatgtttggggcttccc

SEQ ID NO: 11573 - DNA, 567 bp, Zea mays
  Clone ID: LIB3061-118-Q6-N6-G2
gagaactagcagaactgttgattgccaaatgtgcacagaagaaaactatatgcaatggcatcaatgggcttggttactggggggcagtacgtgggaatcagcacctgctggtgctggctgggttggtgctcatttgaaaaacaggggaaggagattatttttccttgatggggcaaggacggtagatctgaaagcagcatggcgtggaaatatttttcttgaaaacagtaggcacaggattaagtacaagaatactccattagaattttgagttgaagggtcttgaattttttacccaattgctggagcaaactcagggatctaacacggtttagtctaactacttagttaagagtattcaacataaagattctttggaatcacaataagctgacaaatgcatcatttctttatcaatttcaccatctcatctgcatagttccctttgtttttattctgttattcacatggtttttctagtgatgttattatcaaagcagttgacgatgcttacctgtttttccatgctaacgtggcttcgatattatcatgtttttttgagccctt

SEQ ID NO: 11574 - DNA, 574 bp, Zea mays
  unsure (1)..(574): unsure at all n locations; Clone ID: LIB3061-118-Q6-N6-G3
ngaacagcaatcacagctggcatcttacctttatcacccttgttcctccaacaatcatcagccctattacatcagttacctttggtgcatttattggcacaaaacatcagggcacaacaactacaacaacttgtgctagcaaaccttgctgcctactctcagcaacagcagtttcttccattcaaccaactagctgcattgaactctgcttcttatttgcaacaacaacaactaccattcagccagctacctgctgcctacccccagcaatttcttccattcaaccaactggcagcattgaactctcctgcttatttacagcagcaacaactactaccattcagccagctagctggtgtgagccctgctaccttcttgatacaaccacagttgttgccgttctaccagcacgctgcgcctaacgctggcaccctcttacaactgcaacaattgctgccattcaaccaacttgctttgacaaacccagcagcgttctaccaaacaacccatcattggtggtgccnctcttttagatttcttatgagttatagttcaataataaaagtttttgtct

SEQ ID NO: 11575 - DNA, 187 bp, Zea mays
  unsure (1)..(187): unsure at all n locations; Clone ID: LIB3061-118-Q6-N6-G4
gaacacaccagcgaacacattagcaacaacctaacacatggctaccaagatttatccctccttgcgcttcttgcgctttttgcgagcgcaacaaatgcgttcatttattccacnaatgnctncnnnacttgnctnnccaagttccattattaccacagnnttcctcccaccagttacccttcaatgg

SEQ ID NO: 11576 - DNA, 573 bp, Zea mays
  Clone ID: LIB3061-118-Q6-N6-G6
tccacctcctgctggtgccagggccgggagggcgtcgcggaggtggcgcgcatggggctcgccggggacgggtcggcggacaccgcccacctcagtaataatgaaaatgggcggttcatttatggagttgcgagttctcctggtaaaagagcatcgatggaggacttctatgaggcaagaatagacgacgttgatggagagaaaattggaatgttcggtgtatatgatggtcatggaggagtccgagcagctgagtatgttaagcagcaccttttcagcaatttaatcaaacatccaaagttcatcactgataccaaggctgctatcgccgaaacttacaacctcacagattcagaatttctgaaagctgatagctgtcaaactcgagatgctggctcaactgcctcaacagctattattgtaggtgaccgtttgcttgttgcaaatgttggagattctagagccgttatttctaaaggaggacaggcgattgcggtttcaagggatcacaaacctgatcagacagatgagagacaaagaatttgaggacgcaggggctttgttatgtgggct

SEQ ID NO: 11577 - DNA, 587 bp, Zea mays
  unsure (1)..(587): unsure at all n locations; Clone ID: LIB3061-118-Q6-N6-G7
gngaccagcaagcaacatagnaagtagaatccattagcaacaatagagcaacaatggcgaccaagatattttccctccttatgctccttgctctttctacatgtgttgctaacgcgacaattttccctcaatgctcacaagctcctatagcttcccttcttcccccataccttccatcaattatagcttcagtatgtgaaaacccagctcttcaaccatataggcttcaacaagcaatcgcagcaagcaacatacctttatcgcccttgttgtttcaacaatcaccagccctatctttggtgcagtcattggtacaaaccatcagggcacaacagctgcagcaactcgtgctacctgtgatcaaccaagtagctctggcaaacctttctccctactctcagcaacaacaatttcttccattcaaccaactgtctacactgaaccctgctgcttatttgcagcaacaactattaccatttagccagctagctactgcctactctcagcaacaacaacttcttccatttaaccaattggccgcactgaaccccgctgcttatttgcagcagcaaatactactggcattt

SEQ ID NO: 11578 - DNA, 564 bp, Zea mays
  Clone ID: LIB3061-118-Q6-N6-G8
tagcaattagctcatcgactccagattggagaactcgacaccatgaaggtgctgatcgttgcccttgctctcctggcgctcgctgcgagcgccgcctccagtacaagcggcggctgtggctgccagacaccaccgtttcatctaccgcctccgttctatatgccgcctccgttctatctgccgccgcagcagcagccgcagccatggcaataccccactcaaccaccgcagctaagcccgtgccagcagttcggatcctgcggcgtcggcagcgtcggcagcccgttcctgggccagtgcgtcgagttcctgaggcaccagtgcagcccggcggcgacgccctacggctcgccacagtgccaggcgctgcagcagcagtgctgccaccagatcaggcaggtggagccgctgcaccggtaccaggcgacatacggtgtggtcctgcagtccttcctgcagcagcagccgcagggcgagctcgcggcgctgatggcggcccaagtagcgcagcagctgacggcgatgtgcggcctgcagctgcagcagcccagtccctgcccttgc

SEQ ID NO: 11579 - DNA, 584 bp, Zea mays
  unsure (1)..(584): unsure at all n locations; Clone ID: LIB3061-118-Q6-N6-H1
caactagcaacatagtaaagcacaatattgtaccaataatggcagccaaaatattttgcctcattatgctccttggtctttctgcaagtgctgctacggcgagcattttcccgcaatgctcacaagctcctatagcttcccttcttcccccatacctctcaccagcgatgtcttcagtatgtgaaaatccaattcttctaccctacaggatccaacaggcaatcgcagcaggcatcttacctttatcacccttgttcctccaacaatcatcagccctattacagcagttacctttggtgcatttattggcacaaaacatcagggcacaacaactacaacaactcgtgctagcaaaccttgctgcctactctcagcaacagcagttacctttggtgcatttgttggcacaaaacatcagggcacaacaactacaacaactcgtgctagcaaaccttgctgcctactctcagcaacaacagtttctgccattcaaccaactagctgcattgaactctgctgcttatntgcagcaacaacaactactaccattcagccagctagctgctgcctacccccggcaattt

SEQ ID NO: 11580 - DNA, 617 bp, Zea mays
  unsure (1)..(617): unsure at all n locations; Clone ID: LIB3061-118-Q6-N6-H10
ggaggaactgtggtataatgggcttcngacacctagctgtgcaagcctacaggctacaacaagcgcttgcggcgagcgtcttacaacaaccaattaaccaattgcaacaacaatccttggcacatctaaccatacaaaccatcgcaacacaacagcaacaacagttcctaccagcactgagccaactagatgtggtgaaccctgtcgcctacttgcaacagcaggtgcttgcatccaacccacttgctctggcaaacgtagctgcataccaacaacaacaacaattgcaacagtttctgccagcgctcagtcaactagccatggtgaaccctgccgcctacctacaacagcaacaactgctttcatctagccctctcgttgtgggtaatgcacctacatacctgcaacaacaattgctgcaacagattgtaccagctctgactcagctagctgtggcaaaccctgctgcctacttgcaacagctgcttccattcaaccaactgactgtgtcgaactctgctgcgtacctacaacagcgacaacagttacttaatccactagcagtgcctaacccattggtcactgccttcctacagcagcaacaattgctaccatac

SEQ ID NO: 11581 - DNA, 609 bp, Zea mays
  unsure (1)..(609): unsure at all n locations; Clone ID: LIB3061-118-Q6-N6-H11
accggtnccggaaccccccggngtcgacccacgccgtccgataccatagtgaagtacactagcaacatcttagcaccaatggcagccaagatttttgcgctccttgccctccttgctctttcagcaagtgttgctaccgcgactattattccacaatgctcacaacaatacctctctccagtgatagccgcgagatttgaatacccatctatacaatcctacaggctacaagaggccatcacagcaagcatcttacggtcgttagcattgaccgtccaacaaccatatgccctattgcaacaaccatccttagtgaatctgtatctccaaagaatcacagcacaacaactacaacaacggttgcttccaacaattaatcaagtagttgcagcgaaccttgctgcttaccttcagcaacaacaatttcttccattcaatcaactagctggggtgaaccctgctgcttacttgcaggcacaacagctactaccattcaaccaacttgtcgggagccctgctgccatcttattgcagcaacagttgctgccattccgtctacaagttgttgcaaacattgctgctttcttgcaacaacaacaattgctgcca

SEQ ID NO: 11582 - DNA, 139 bp, Zea mays
  unsure (1)..(139): unsure at all n locations; Clone ID: LIB3061-118-Q6-N6-H12
caagcaacatattttttggtaatccagtttcaacaatcccaccacagtggcgaccaagatattttccctccttatgctccttgctctnnctacatgngttgctaacgcgacattttttccttaatgctaacaagctcct

SEQ ID NO: 11583 - DNA, 587 bp, Zea mays
  Clone ID: LIB3061-118-Q6-N6-H2
caattagctcatcgactccagattggagaactcgacaccatgaaggtgctgatcgttgcccttgctctcctggcgctcgctgcgagcgccgcctccagtacaagcggcggctgtggctgccagacaccaccgtttcatctaccgcctccgttctatatgccgcctccgttctatctgccgccgcagcagcagccgcagccatggcaataccccactcaaccaccgcagctaagcccgtgccagcagttcggatcctgcggcgtcggcagcgtcggcagcccgttcctgggccagtgcgtcgagttcctgaggcaccagtgcagcccggcggcgacgccctacggctcgccacagtgccaggcgctgcagcagcagtgctgccaccagatcaggcaggtggagccgctgcaccggtaccaggcgacatacggtgtggtcctgcagtccttcctgcagcagcagccgcagggcgagctcgcggcgctgatggcggcccaggtagcgcagcagctgacggcgatgtgcggtctgcagctgcagcagcccagtccctgcccttgcaacgcagctgccggcggtgtctacta

SEQ ID NO: 11584 - DNA, 583 bp, Zea mays
  unsure (1)..(583): unsure at all n locations; Clone ID: LIB3061-118-Q6-N6-H3
cgcccggcctcctccccttccattctaggctccgcgtctcgctgtccccactccgtctcatcccgctgccgctccttctcatcgtcgtcgtcccagtcccggagtcgctccgctcctctggctaagcgcaggtttgagggatgccgaggggttgtacctcgccagcgattcggacaagcggctattgatctacttcccctttatgcaggtcaagctacattccgtgctattcaaaggccccaaggatgacgcaatggcaatgactatctaccaatggacatcgtggagctatcttccgatcatttgatagagaataaacctttgctgctaaaggatgtcaagttccaaaacgtacacgggcttaccagtgcttatagacctttgtttgttcgggacactacctttgctaatggggaacaggcaagggggaaatcttcttatagatctgttccatcactgtgacaatcatttgggagagaaacaagtaaacaaccctnttttccataaaactccatctggaagtgcacgacagccactacagttgactaacgatgntaccaagatgatgcanaagcatcagctg

SEQ ID NO: 11585 - DNA, 424 bp, Zea mays
  Clone ID: LIB3061-118-Q6-N6-H4
gctgcattgaactctgctgcttatttgcaacaacaattaccattcagccagctagttgctgcctacccccagcaatttcttccattcaaccaactagcagcattgaactctgctgcttatttacagcagcaacaactactaccattcagccagctagctgatgtgagccctgctgccttcttgacacaacaacagttgttgccgttctacctgcacgctatgcctaacgctggcaccctcttacaactgcaacaattgctgccattcaaccaacttgctttgacaaactcaacagtgttctaccaacaacccatcattggtggtgccctcttttagattgcttatgagttatagttcaataatgaagttttttggatgatgtttgtggcgtcccagaaataagaaagtacatttctagattctt

SEQ ID NO: 11586 - DNA, 556 bp, Zea mays
  Clone ID: LIB3061-118-Q6-N6-H5
ctgatcttgaaatgagttcaagaaatttggccggcttattcctgacggtgttgctatcagaagccgaaaggagactggtggctattatgctttcgtggaattcgaggaactcagcggtgtacacaatgcgttaaaggcttcaccaattgaaataaatgggcggcagatatatgttgaggagaggaagccaaatagcggaataagagggaggggaggacgtggccgtttcagtggtggaggccggggatattcgagaggtggaggcgacgagtacaatagtaaccgtgggaggtcaaacggttacggtcgtgctcctcaccaagagaggggcatacttgggagccacactccaaggaactgattcagtcgagcagcaaacataaggttttgatccgtgtcgtcaaagcgagagagagagatcctaaacaatccgcctatcagctactaggccgcgtttgggttttggggcttgttttgtcgatgaatgtgtgtgcgcgcgtcatcgacctatgtgacacttaaaacttttgctagtctgacgctatctctttacatt

SEQ ID NO: 11587 - DNA, 389 bp, Zea mays
  unsure (1)..(389): unsure at all n locations; Clone ID: LIB3061-118-Q6-N6-H6
ngaaaaaaaaaaaaaaaaaaaaaaaaaaaaaaaaaaaaaaaaaaaaaaaaaaaaaaaaaaaaaaaaaaaaaaaaaaaaaaaaaaaaaaaaaaaatttagagaataaaaaaaaaaaaaattccggggggcgtttttttggggtacaaaattttatatgctgttttggggggccattgtttttttttgggggggggggaggtttcatttttggtgggcgcgggtgtttccccccttttacctggggaaacccggtggtttccttctttttttggtttgtgggcttttcctttttccgcctgggggtttggcaattgggcccctcccgtttggctttttgcaaattggcccgcacctttttgtttatcgggacccccctttggggggggttt

SEQ ID NO: 11588 - DNA, 600 bp, Zea mays
  Clone ID: LIB3061-118-Q6-N6-H7
caatcatcattcatcttagtagtataggcaccaaatcaaatctgcaacatcaattatctaactccaaaaaccatgaagctggtgcttgtggttcttgctttcattgctttagtatcaagtgtttcttgtacacagacaggcggctgcagctgtggtcaacaacaaagccatgagcagcaacatcatccacaacaacatcatccacaaaaacaacaacatcaaccaccaccacaacatcaccagcagcagcaacaccaacaacaacaagttcacatgcaaccacaaaaacatcagcaacaacaagaagttcatgttcaacaacaacaacaacaaccgcagcaccaacaacaacaacaacaacaacagcaccaacaacaacatcaatgtgaaggccaacaacaacatcaccaacaatcacaaggccatgtgcaacaacacgaacagagccatgagcaacaccaaggacagagccatgagcaacaacatcaacaacaattccagggtcatgacaagcagcaacaaccacaacagcctcagcaatatcagcagggccaggaaaaatcacaacagcaacaatgtcattgccaggagcagcaacag

SEQ ID NO: 11589 - DNA, 581 bp, Zea mays
  Clone ID: LIB3061-118-Q6-N6-H9
gacctaacaacaatggcttccaagacttatccctccttgcgcttcttgccctttttgtgagtgcaacaaatgcgttcattattccacaatgctcacttgctccgagtgccattattccacagttcctccctccagttacttcaatgggcttcgaacacccagctgtgcaagcctataggctacaacaagcgcttgcggcgagcgtcttagaacaaccaattgcccaattacaacaacaatccttggcacatctaaccatacaaaccatcgcaacgcagcagcaacaagcactgagccacctagccgtggtgaaccctatcgcctacttgcaacaacagctgcttgcatccaacccacttgctttggcaaacgtagctgcataccaacaacaacaacagttgcaacagtttctaccagcgctcagtcaactagccatggtgaaccctatcgcctacctacaacagcaacaacttctttcatctagcccgctcgctatgggcaatgcacctacatacctgcaacaacagttgttgcaacaacagttgctgcaacaaattgtaccagctcttactcagctagct

SEQ ID NO: 11590 - DNA, 606 bp, Zea mays
  unsure (1)..(606): unsure at all n locations; Clone ID: LIB3061-121-Q6-K6-A1
ngagaccaacaagcaacatagaagtggaatacagtagcaacaatagagcaacaatggcggccaagatattttccatccttatgctccttgctctttctgcatgtgttgctaacgcgaccatttttcctcaatactcacaagctcctatagctgcccttcttcccccataccttccatcaatgaccgcttcagtttgtgaaaacccagcccttcaaccctacaggctccaacaagcaatcgcaacaagcaacttacctttatcacccctgttctttcaacaatcgccagccctatctttggtgcagtcattggtacaaaccatcagggcacaacagctgcaacaactcgtgctaccagtgatcagccaagtagctctggcaaacctttctccctactctcagcaacaacaatttcttccattcaaccaactgtctacactgaaccctgctgcttatttacaacaacaacaactactaccattcagccagctagctactgcctactctcagcagcaacaatttcttccatttaaccaattggccgcactgaacccctctgcttatttccagcagcaaatactactaccatttggccagctagctacaa

SEQ ID NO: 11591 - DNA, 625 bp, Zea mays
  Clone ID: LIB3061-121-Q6-K6-A11
caaaccatcgcaacgcagcagcaacaagcactgagccacctagccgtggtgaaccctatcgcctacttgcaacaacagctgcttgcatccaacccacttgctttggcaaacgtagctgcataccaacaacaacaacagttgcaacagtttctaccagcgctcagtcaactagccatggtgaaccctatcgcctacctacaacagcaacaacttctttcatctagcccgctcgctatgggcaatgcacctacatacctgcaacaacagttgttgcaacaacagttgctgcaacaaattgtaccagctcttactcagctagctgtggcaaaccctgctgcctacttgcaacaactacttccattcaaccaactgactgtgtcgaactctgctgcgtacctacaacagcgacaacagttacttaatccactagcggtggctaacccattggtcgctgccttcctacagcagcaacaattgctgccatacaaccagttctctttgatgaaccctgccttgtcgtggcagcaacccatcggtggtggggccatcttttagatacatatgagatgtactcgataatggggccctcatagcggcatgtgtttcctaaaaataatcaatatat

SEQ ID NO: 11592 - DNA, 382 bp, Zea mays
  Clone ID: LIB3061-121-Q6-K6-A2
attaacacacaagtcgaagcagatgggcaacaacgtgacagcaatgtgataccaagtacataatacgctccttgcgctgcttgggctttttgggaggccaccaaatgcctacattaaaccagagggctgactcactcaaagtaccaatattatacatgcacctgccaccgaacacttaggtgggggcagtacaaccatctgtgctagcctatcggcttccacatataattgcgtgcgagcgcttcacaactatctattgcccacttgcaacagcgatccttggctcatttaacaatgcaaaccatcctttcgcagcagcaacaacaattactacctgaactgaggctgctagccatggtgtaccctgtcgcctacttgcaat

SEQ ID NO: 11593 - DNA, 504 bp, Zea mays
  unsure (1)..(504): unsure at all n locations; Clone ID: LIB3061-121-Q6-K6-A3
gcgacagctcgacaaagattgtgagagtgatccggcgctgagaagagatggctaagatcgccgcagccgccgcggcggcggcggcgctgtgcttcgcggccctggtggccgtggccgtctgccaaggcgaggtcgagcggcagaggctcagggacctgcagtgctggcaggaggtccaggagagcccgctcgacgcgtgccgccaggtcctcgaccggcagctaaccggcggcggcgtcggcggcccgttccggtggggcaccgggctccggatgcggtgctgccagcagctccaggacgtgagccgcgagtgccgctgcgccgccatccggagcatggtcaggggctacgaggaggccatgccgcctctggagaaaggctggtggccatgggggcggcagcagcagccgccgccgcanggaggaggaggaggacaggggggctactactacccctgcagccgggcaggagagggataccaaacgcagatgtatccaccgtgtc

SEQ ID NO: 11594 - DNA, 590 bp, Zea mays
  unsure (1)..(590): unsure at all n locations; Clone ID: LIB3061-121-Q6-K6-A4
gcaacatagnaaagtgaatccattagcaacaatagagcaacaatggcgaccaagatattttccctccttatgctccttgctctttctacatgtgttgctaacgcgacaattttccctcaatgctcacaagctcctatagcttcccttcttcccccataccttccatcaattatagcttcagtatgtgaaaacccagctcttcaaccatataggcttcaacaagcaatcgcagcaagcaacatacctttatcgcccttgttgtttcaacaatcaccagccctatctttggtgcagtcattggtacaaaccatcagggcacaacagctgcagcaactcgtgctacctgtgatcaaccaagtagctctggcaaacctttctccctactctcagcaacaacaatttcttccattcaaccaactgtctacactgaaccctgctgcttatttgcagcaacaactattaccatttagccagctagctactgcctactctcagcaacaacaacttcttccatttaaccaattggccgcactgaaccccgctgcttatttgcagcagcaaatactactgccatttagcgagctagctgc

SEQ ID NO: 11595 - DNA, 583 bp, Zea mays
  unsure (1)..(583): unsure at all n locations; Clone ID: LIB3061-121-Q6-K6-A5
gtcgcttccagccgccgccgcgtccgcctcgccaagcgcagcagccgccgcagcacatcgctctcttgatctcagccatggcggaggtggagcagcaacaggacacgccgaagctcttcaaccgctggaccttcgatgatgtccaggtgaacgacatctcgctgaacgactacctcgctgtgaacgcgacgaagcacgcgatgtacctgccgcacaccgcggggcgctactccaagaagcggttccgcaaggcgcagtgcccgatcgttgagcgccttacaaactccctcatgatgcacgggcgcaacaacggcaagaaggtcatggctgtccgcatcatcaagcataccctggagatcattcacctgctcaccgatgccaaccccatccaggtcgtcgtcgacgcgatcatcaacagtggcccccgtgaggatgccacccgtattggttccgctggtgttgtgagaaggcaggccgtggatatctcacccctgaggagggtgaaccaggccatctacctnctcaccactggtgccagggagagtgctttccngaacatcaaaaccattgccgagtgccttgc

SEQ ID NO: 11596 - DNA, 350 bp, Zea mays
  Clone ID: LIB3061-121-Q6-K6-A6
gtgggcactacactaccattagttgtacctactccagagcgcagaaaaacaccgatcgactaccatggagggggactgctagagaccctaactctcctgggtctcgctaggagcgccacctccacccatacaagtgggggatgaggctgctcacccaacgcgtcgacatcatctaccaccgccagggcataggacacctccggttaacctgccacctggcggctacatcagccactcgactgacacctggcaacaccagctcacctaacacctccgggccatgtggccttcacaagatcaactgccgccgccaccataatagtaccctactaccacactcctgcctgagc

SEQ ID NO: 11597 - DNA, 625 bp, Zea mays
  Clone ID: LIB3061-121-Q6-K6-A9
gcacaatagtgtaccaacaatggcagccaaaatattttgcctccttatgctccttggtctttctgcaagtgctgctacggcgaccattttcccgcaatgctcgcaagctcctatagcttcccttcttcccccgtacctctcaccagcggtgtcttcggtatgtgaaaacccaattcttcaaccctacaggatccaacaggcaatcgcagctggcatcttacctttatcacccttgttcctccaacaatcatcagccctattacaacagttacctttggtgcatttattggcacaaaacatcagggcacaacaactacaacaacttgtgctagcaaaccttgctgcctactctcagcaacagcagtttcttccattcaaccaactaggttcattgaactctgcttcttatttgcaacaacaacaactaccattcagccagctacctgctgcctacccccagcaatttcttccattcaaccaactagcagcattgaactctcctgcttatttacagcagcaacaactactaccattcagccagctagctggtgtgagccctgctaccttcttgacacaaccacagttgttgccgttctaccagcacgttgcgcctaacgctggcacc

SEQ ID NO: 11598 - DNA, 569 bp, Zea mays
  unsure (1)..(569): unsure at all n locations; Clone ID: LIB3061-121-Q6-K6-B1
ngagaaagcacaatagtgtaccaacaatggcagctaaaatattttgcctccttatgctccttggtctttctgcaagtgctgctacggcgaccattttcccacaatgctcacaagctcctatagcttcccttcttcccccgtacctctcaccaacggtgtcttcggtatgtgaaaacccaattcttcaaccctacaggatccaacaggcaatcgcagctggcatcttacctttatcacccttgttcctccaacaatcatcagccctattacagcagttacctttggtgcatttattggcacaaaacatcagggcacaacaactacaacaacttgtgctagcaaaccttgctgcctactctcagcaacagcagtttcttccattcaaccaactagctgcattgaactctgcttcttatttgcaacaacaacaactaccattcagccagctatctgctgcctacccccagcaatttcttccattcaaccaactgacagcattgaactctcctgcttatttacagcagcaacaactactaccattcagccagctagctggtgtgagccctgct

SEQ ID NO: 11599 - DNA, 528 bp, Zea mays
  Clone ID: LIB3061-121-Q6-K6-B10
ggactgggtagtcacctccgtgtcccattgaacctgtggcaccggtgagggaggctaacgaggctgatgttacttggcagaccagagaagggactttgctcccataaagatgtgatatgaccttgagcataaaaagtgggtcactgccaacaagaagtgtttggctgtgataaagaacacaattgtgcctacaatagtgggcttagtcccagagtgtgagcctgtcacagagtaccttgacaaaataaatagtcagttcactggctcttcaaaaacatatgctacccagttgataaagcagctgatgacagagaggtactctggaggtggcagtggcataagagagcacatactaaggatgagcaatatggcatcaagctaaaaccaatggatctggctctcaaggatgagtttcttatccatataatttttgcttccttggcaaaggaatttgatacttttgttgttaactataacatacagcccgagaagtgggacttagagaagctcatagctatgtgtgtgtag

SEQ ID NO: 11600 - DNA, 580 bp, Zea mays
  unsure (1)..(580): unsure at all n locations; Clone ID: LIB3061-121-Q6-K6-B11
ngatcatgaatgtgcctcaataaacagaattatggattttatgatgaatgcaagcgtcgatttaatgtgcggctatggaaggtcttcacagaatgttttaacactctacctgtggctgctcttatcgatgataaaatattatgtatgcacggtggactttctcccgatctagcacacttggatgagataaagaacttgcaacgtccaaccgatgtaccagatcaaggtctactgtgtgacttactttggtcagatccaggaaaagatgttcaagggtggggcatgaatgatagaggggtctcatatacctttggtgctgacaaggtttcagaattcctgcaaaggcatgatcttgatcttatttgtcgtgctcatcaggttgtcgaggatgggtatgaattctttgctgacagacagcttgtcaccatattctcggctcccaattattgtggtgaatttgataatgctggcgcaatgatgagcgttgacgaaactttgatgtgttccttccaaattctgaaacctgctgagagaaaacaaatttatggggcccaacaaaatgtgagatagtgaacccatt

SEQ ID NO: 11601 - DNA, 485 bp, Zea mays
  Clone ID: LIB3061-121-Q6-K6-B12
gcgaaaaaaaaaaaaaaaaaaaaaaaaaaaaaaaaaaaaaaaaaaaaaaaaaaaaaaaaaaaaaaaaaaaaaggggcgggacgttctaaaaggatccaaaatttacagggcgcgtgcttttctataggatccacttttcatataggggcccctgacatcgatttcactgcttctttggtgtacaacgaacttgactggggaagacccctggctttacccagcttaatcggcttaaaccacgatgcccccttagctaaatggcgtaataccaaatagcccttcaccgatcggccttcctaacagttgggccgcctcaatggcgaatgggacacaccttgtcaccccgcattaagcttggaacgccccttgatccctcacattaagaccggtaaatttgccggtcccctaacgcccgcccttttcttttgcttccctccttttgccgcgacgttggcggtttttcccctgaatcttctaaatggggg

SEQ ID NO: 11602 - DNA, 580 bp, Zea mays
  unsure (1)..(580): unsure at all n locations; Clone ID: LIB3061-121-Q6-K6-B2
gnaaacacaccaagcgaacacattagcaacaacctaacaacaatggctaccaagatattatccctccttgcgcttcttgcgctttttgcgagcgcaacaaatgcgttcattattccacaatgctcacttgctccaagttccattattacacagttcctcccaccagttacttcaatgggcttcgaacacccagctgtgcaagcctataggctacaacaagcaattgcggcgagcgtcttacaacaaccaatttcccagttgcaacaacaatccttggcacatctaacaatacaaaccatcgcaacgcaacagcaacaacaattcctaccagcactgagccacctagccatggtgaaccctgccgcctacttgcaacagcagttgcttgcatcaaacccacttgctctggcaaacgtagttgcaaaccagccacaacaacagctgcaacagtttctgccagcgctcagtcaactagccatggtgaaccctgccgcctacctacaacagcaacaactgctttcatctagcccgctcgctgtggccaatgcacctacatacctgcaacaaacattgttgcaac

SEQ ID NO: 11603 - DNA, 575 bp, Zea mays
  Clone ID: LIB3061-121-Q6-K6-B3
gcaacatagcaaagcacaatagtgtaccaacaatggcagccaaaaattttgcctccttatgctccttggtctttctgcaagtgctgctacggcgaccattttcccgcaatgctcgcaagctcctatagcttcccttcttcccccgtacctctcaccagcggtgtcttcggtatgtgaaaacccaattcttcaaccctacaggatccaacaggcaatcgcagctggcatcttacctttatcacccttgttcctccaacaatcatcagccctattacaacagttacctttggtgcatttattggcacaaaacatcagggcacaacaactacaacaacttgtgctagcaaaccttgctgcctactctcagcaacagcagtttcttccattcaaccaactaggttcattgaactctgcttcttatttgcaacaacaacaactaccattcagccagctacctgctgcctacccccagcaatttcttccattcaaccaactagcagcattgaactctcctgcttatttacagcagcaacaactactaccattcagccagctagctggtgtgagccctgcta

SEQ ID NO: 11604 - DNA, 583 bp, Zea mays
  unsure (1)..(583): unsure at all n locations; Clone ID: LIB3061-121-Q6-K6-B5
caactagcaacatagnaaagcacaatagtgtaccaacaatggcagctaaaatattttgcctccttatgctccttggtctttctgcaagtgctgctacggcgaccattttcccacaatgctcacaagctcctatagcttcccttcttcccccgtacctctcaccaacggtgtcttcggtatgtgaaaacccaattcttcaaccctacaggatccaacaggcaatcgcagctggcatcttacctttatcacccttgttcctccaacaatcatcagccctattacagcagttacctttggtgcatttattggcacaaaacatcagggcacaacaactacaacaacttgtgctagcaaaccttgctgcctactctcagcaacagcagtttcttccattcaaccaactagctgcattgaactctgcttcttatttgcaacaacaacaactaccattcagccagctatctgctgcctacccccagcaatttcttccattcaaccaactgacagcattgaactctcctgcttatttacagcagcaacaactactaccattcagccagctagctgggtgtgagccctgcta

SEQ ID NO: 11605 - DNA, 578 bp, Zea mays
  unsure (1)..(578): unsure at all n locations; Clone ID: LIB3061-121-Q6-K6-B6
gnagaacttaagaagagctgagcgccaacccagagccccactgaacattgagtgcttgatggatgagaaagatgtgagagggtttattaagagagaggagtttgaacacatcagtgcacctgtgctggtacgtgtcaaaggacccttggagaaggccttggctgaagctggcttgacaactgaaaatgtgcactttgttgaggttgtcggatctggttctcgtgttccagccataatcaagataatcactgatttttttgggaaggagccgagacgaaccatgaatgcaagcgagtgtgttgcgcggggctgtgctctccagtgtgctattctcagccccactttcaaagtgcgggaattccaggttaatgatgggtttcctttctcaattgcattgtcatggaaacaagactcgcagaacagtgcaccccaacagacccttgtatttccaaaggggaatgtaattcccagcattaaagctctaaccttctataaatccagtacatttgaagttgatgttttgtatgtggacacatgcgactcgcaaattcacagaagaaagcacttacacaattgga

SEQ ID NO: 11606 - DNA, 534 bp, Zea mays
  Clone ID: LIB3061-121-Q6-K6-B7
gcaaggaagctggacggccgcaacatcaccgtcaacgaggcccagtcccgcggcggccgtggaggcggcggcggcggctacggtggtggccgtggaggcggcggctacggcggtggcgggcgccgtgatggcggcggcggctacggcggtggcggcggcggctacggtggcggcggtggctacggtggtggtggtggcggctacggcggtggcaaccgtggcggcggctacggcaactccgacgggaactggaggaactgagcggtggggcccgcgcggccaagttatcctgttcgctaccgtgatgtttaccctagtccagagggtttatcttcgttcgtctcgtttgttgttgcccatctgtgtttttgattgcaaggtcgctctgtgtcagttgttagtgctgtgttcatcctcggctccagcagacccatgcatcaaccagcatggactgtggatcgatggatgctgttactcctgtcaggatttgttctaagttaatccctaggaaaaaatggtgcttcttggtgctgc

SEQ ID NO: 11607 - DNA, 590 bp, Zea mays
  Clone ID: LIB3061-121-Q6-K6-C1
aacgccgtcgccgccctacggctcagatcttcgtcgtcatcttctccggcaacgagcacccaaggtggtggtccttcaaccagatcggttcctgagcgagctgacgagcatgtacgagcggagcacggagaagggctccgtctgggtcaccatgaagcgatcaactctcaagggcaaggcacagttgcggaagatggagaataaggggcaggaggtagagcacaggtgcctcgtccgcgcctccaatggcaagaagaacatctccacctcggtttctctaaaggagtacacaaagtttcaagcttcatacgcaacagttcttaaggcccatatgcatgctctgaagaaaagggagaggaaagacaagaagaagactgcagatgctgagaaggcaattgagaccgcacccaagaagcagaagaaagcatcttcaaagaaatcttcagggtccaagtcataaggcgctcacagaactcagtgtgtcttctcctttatgttgtttaccgccagactaattagagtgtcgtgaagttttacttatctggtttttattcgaattcgtgtctggaagatgaaagcctgtgaataca

SEQ ID NO: 11608 - DNA, 502 bp, Zea mays
  unsure (1)..(502): unsure at all n locations; Clone ID: LIB3061-121-Q6-K6-C10
caactagcaacatagnaaagcacaatagtgtaccaacaatggcagccaaaatattttgcctccttatgctccttggtctttctgcaagtgctgctacggcgaccattttcccgcaatgctcgcaagctcctatagcttcccttcttcccccgtacctctcaccagcggtgtcttcggtatgtgaaaacccaattcttcaaccctacaggatccaacaggcaatcgcagctggcatcttacctttatcacccttgttcctccaacaatcatcagccctattacaacagttacctttggtgcatttattggcacaaaacatcagggcacaacaactacaacaacttgtgctagcaaaccttgctgcctactctcagcaacagcagtttcttccattcaaccaactaggttcattgaactctgcttcttatttggaacaacaacaactaccattcagccagctacctgctgtctaccccccacaatttgttccattcaaccaact

SEQ ID NO: 11609 - DNA, 487 bp, Zea mays
  unsure (1)..(487): unsure at all n locations; Clone ID: LIB3061-121-Q6-K6-C11
ntaatatcgtggggattttgttcaagacgtcatgagggatacaccactcgtaagcactatagcaccacaggttaataatcttctgcaagtgtgtccaggaaataccaagctgttgtcactgaaagtggatcagccgggatatcaaataatgatgcacaaaccatctgcaacatgtttgtcactgcatcacaacaactggcaaaaaatctagagcatcacaccttaaatgaacatgggctctctaaaagatatgtacgctccctgcagatatcggaggtggtgaatcacatgaaggacttgattgagttcagccacaagaacggccttggtcctaaagagagcctgaacagctattctaaaaccatggcgaagtttcacaatatgcatgattcaagacagctcatggcgtgctgccaaccttgccaataaccagagcaacaccaaactaatggggaccaaacaagaagcgagtgcttctgtgaccaac

SEQ ID NO: 11610 - DNA, 445 bp, Zea mays
  unsure (1)..(445): unsure at all n locations; Clone ID: LIB3061-121-Q6-K6-C12
gcnacccgtatccaaccgagtcccggcggcgatggcggcggcgacgaacgccgatgtggaggtggtcgacttcgacctcgatgacgacgacctcatggacgaggacgccgggccagatccagcaccgccccccgcctcccgcctccgctccaccatcgcgggcgacgacgcgccgcgtaggaccaagggccgcggcttccgcgaggaccctaactcctccgctacccgcgactcgcgctttggcgcggggggacgcgccgacctcgactcgcttggcggcccaggacccatccactcaattgaaggatggattgtgttggtcacaggagttcacgaagaagctcaagaagatgaccttcaaaatgctttccaagaatttgggcaggacaaaaacctgcatttgaatttagaccgccccaccggatttggtaaggggtacgctttc

SEQ ID NO: 11611 - DNA, 613 bp, Zea mays
  Clone ID: LIB3061-121-Q6-K6-C2
aatcagaagagcggcggcgcgggcggacaaggagcaggcggaggaggagttgtgccaagccacaatgggtatctcgcgtgactcgatgcacaagcgccgagccaccggtggaaagcagaaggcctggaggaagaagcgaaagtatgagcttggtcgccagccagccaacaccaagttgtcaagcaataagacggtgaggagggtccgtgttcggggaggtaatgtgaaatggagggctcttcgccttgatactggtaactactcatggggaagtgaagctgttacccgcaagacccgtatcctcgacgtggtctacaatgcatcaaacaatgagcttgtgaggacacaaacccttgtgaagagtgccattgtgcaagttgatgctgccccattcaagcagtggtacctcactcactatggagttgacattggtaggaagaagaaaacccctgctgcaaagaaggataatgctgagggacaagaggttgaggcagcagctgaggaaacgaaaaagagcaccatgtcacgaggaagcttgagaagcgcaaggagggacgtacccttgaccccacacattgagagcaatttggcagtggacggttgctggcatgca

SEQ ID NO: 11612 - DNA, 605 bp, Zea mays
  unsure (1)..(605): unsure at all n locations; Clone ID: LIB3061-121-Q6-K6-C4
caactagcaacatagnaaagcacaatagtgtaccaacaatggcagccaaaaattttgcttccttatgctccttggtctttctgcaagtgctgctaccgcaaccattttcccacaatgctcacaagctcctatagcttcctttcttcccccatacctctcaccagcggtgtcttcagtatgtgaaaacccaattcttcaaccctacaggatccaacaggcaatcgcagcaggcatcttacctttatcacccttgttcctccaacaaccgtcagccctattacagcagttacctttggtgcatttgttggcacaaaacatcaaggcacaacaactacaacaacttgtgctaggaaaccttgctgcctactctcagcaacagcagtttcttccattcaaccaactggctgcattgaactctgctgcttatttgcaacaacaactaccattcagtcagctagctgctgcctacccccagcaatttcttccattcaaccaactggcagcattgaactctgctgcttatttacaacagcaacagctaccaccattcagccagctagctgatgtgagccctgttgccttcttgacacacacagttgttgccg

SEQ ID NO: 11613 - DNA, 520 bp, Zea mays
  Clone ID: LIB3061-121-Q6-K6-C5
atgggatgtttggagtcggatatgtatatggcagggacgatgaccgccgatttggcttcttctgtcgttctgctctagagtttctcctccaaagtggatcttctccgaacataatacattgccatgattggtcaagtgctcctgttgcctggctacacaaggaaaactacgcgaagtctagcttggcaaacgcacgggtggtattcaccatccacaatcttgaatttggagcgcatcatattggcaaagcaatgagatattgtgataaagcaacaactgtctctaatacatattcaaaggaagtgtcaggtcatggtgccatagttcctcatcttgggaaattctatggcattctcaatggaattgatccggatatatgggatccgtacaatgacaactttatcccggtccactacacttgtgagaatgtggttgaaggcaagagggctgctaagagggcactgcagcagaagtttgggttacagcaaatcgatgtccccgtcgtaggaatcgtcactcg

SEQ ID NO: 11614 - DNA, 547 bp, Zea mays
  unsure (1)..(547): unsure at all n locations; Clone ID: LIB3061-121-Q6-K6-C6
tccggnacccaactagcaacatagnaaagcacaatagtgtaccaacaatggcagccaaaatattttgcttccttatgctccttggtctttctgcaagtgctgctaccgcaaccattttcccacaatgctcacaagctcctatagcttcctttcttcccccatacctctcaccagcggtgtcttcagtatgtgaaaacccaattcttcaaccctacaggatccaacaggcaatcgcagcaggcatcttacctttatcacccttgttcctccaacaaccgtcagccctattacagcagttacctttggtgcatttgttggcacaaaacatcaaggcacaacaactacaacaacttgtgctaggaaaccttgctgcctactctcagcaacagcagtttcttccattcaaccaactggctgcattgaactctgctgcttatttgcaacaacaactaccattcagtcagctagctgctgcctacccccaacaatttcttccatttcaccaacctgcagcattgaactctgctgcttatttacaacagcaaca

SEQ ID NO: 11615 - DNA, 532 bp, Zea mays
  Clone ID: LIB3061-121-Q6-K6-C7
ccgaagcaacataggaaagtggaatccagtagcaacaacagagcaacaatggcgaccaagatattttccctccttatgctccttgctctttctgcatgtgttgctaacgcgacaattttccctcaatgctcacaagctcctatagcttcccttcttcccccataccttccatcaatgatagcttcagtatgtgaaaacccagctcttcagccctataggctccaacaagcaatcgcagcaagcaacatacctttatcacccttgttgtttcaacaatcgccagccctatctttggtgcagtcattggtacaaaccatcagggcacagcagctgcagcaactcgtgctacctgtgatcaaccaagtagctctggcaaacctttctccctactctcagcaacaacaattgctaccatttagccaacatgctttgacgaatcctaccaccttattgcaaccgcccaccattggtggtgccatcttctagattttttatgatttatactgcaataataaaagtctcatgctgatat

SEQ ID NO: 11616 - DNA, 447 bp, Zea mays
  Clone ID: LIB3061-121-Q6-K6-C8
gcggaggcgaagatgaggaagaagctcggcacccgattccccgcggctcgaatcaaaaagataatgcaagcagatgaggatgttggaaagattgcactagcagttcctgttttagtttcgaggtctcttgaattgtttttacaagatttaattgaccgtacttatgaaattactcttcaaagtggagcaaagacactgaattccttccacctgaagcaatgtgtgaagaggtacagttcttttgatttcctaactgaagttgtcagcaaggtaccagatcttggtggcgctgattcctgtggagatgaaagaggattacctagaagaaaaaagtcaaatggcagtgacccagaaaatgatgaatcaagatctagtaaaatggccataagaaatgcaaacatcacccccagaggacgttggaggggtccaggcataagaccaggtcgg

SEQ ID NO: 11617 - DNA, 585 bp, Zea mays
  unsure (1)..(585): unsure at all n locations; Clone ID: LIB3061-121-Q6-K6-D1
ctccggnggaccacactagcaacatagnaaagcacaatagtgtaccaacaatggcagccaaaatattttgcttccttatgctccttggtctttctgcaagtgctgctaccgcaaccattttcccacaatgctcacaagctcctatagcttcctttcttcccccatacctctcaccagcggtgtcttcagtatgtgaaaacccaattcttcaaccctacaggatccaacaggcaatcgcagcaggcatcttacctttatcacccttgttcctccaacaaccgtcagccctattacagcagttacctttggtgcatttgttggcacaaaacatcaaggcacaacaactacaacaacttgtgctaggaaaccttgctgcctactctcagcaacagcagtttcttccattcaaccaactggctgcattgaactctgctgcttatttgcaacaacaactaccattcagtcagctagctgctgcctacccccagcaatttcttccattcaaccaactggcagcattgaactctgctgcttatttacaacagncacagctaccaccattcagccagctagctgatgtgagcc

SEQ ID NO: 11618 - DNA, 231 bp, Zea mays
  Clone ID: LIB3061-121-Q6-K6-D10
tgctgcctttctacaagcagtttgcggctaaccccgcaaccctcttacaactacaacaattgttgccctttgtccaacttgctttgacaaacccagcagcctcctaccaacaacacatcattggtggtgccctcttttagattgattattagttgtaattcaataataaagttttttggatgaggtctgtggccaaccagaaataagaagttacatttccagattctaaaa

SEQ ID NO: 11619 - DNA, 393 bp, Zea mays
  Clone ID: LIB3061-121-Q6-K6-D11
gcgaagccctgggcgtcagcatgcacgtcgccgagaagctgcagagccggcgtgaccagcgaggcgagatcgtccgcgtggagccggagcacggctttcaccagctgaatccgtcgccgtcgtcgtcgtcgttttcgttcccatcgtcacaagtccagtaccaaacgtgccagcgcgacgtcgacaggcacaacgtctgcgccatggaggtgaggcacagcgtcgaacggctggaccaggccgacgtctacagccctggggctgggaggatcacacgcctcaccagccacaagttccccgtcctcaaccttgtacagatgagcgcggtgcggttagacctgtgccaggacgccatcatgtcggccgttctggaactttaacgcccacagcgcc

SEQ ID NO: 11620 - DNA, 559 bp, Zea mays
  Clone ID: LIB3061-121-Q6-K6-D12
ctcgcctgtatatatatgaccacttgtgggagaaagggcaggcaaagcagaccattagttacatggctgagcgggtggtaggtcatgggtccttcggaaccgttttccaggccaagtgtcttgaaactggtgagaccgtagctataaaaaggttcttcaagacaagagatacaagaatcgtgagctgcaaaccatgcgagtgcttgaccacccaaatgtggtggctctaaagcactgtttcttctcaaagactgagaaagaggagctttacctcaatttggtgcttgagtatgtaccggagactgctcatcgtgtcatcaaacattacaacaagatgaaccagcgcatgcctttgatttatgcaaaactgtatatgtatcagatttgtagagccttggcatacattcacaacagcattggagtgtgccacaaggacattaagccgcaaaatctcctggttaatcctcatacccatcagctaaaattgtgtgactttggcagcgcgaaaagttttgtaaaaggcgaaccaaacattttttacatctggtctaggtactac

SEQ ID NO: 11621 - DNA, 569 bp, Zea mays
  unsure (1)..(569): unsure at all n locations; Clone ID: LIB3061-121-Q6-K6-D2
gnttgttgtcccaatccagagtgcggggtcgccaagagattctggagctgtatttgcaagataagccagtggcaaatgatgtagatatcaatgcaattgcccgaagtacaccaggctttaatggggctggtacatgcattttcctttgttccattattgagaagtagcatgtcacatttcattttataagtgccatgaggaatttaaaggactgtgtaattcttttcactagcagctacatcttcctgtttttcctttgtcatttacgagtggtattttgaatatgaatacaatattacacatttttcattttaagaaaaagatgttaaacatgccttgagtataatcttttagattgtaccgtgatatttgtattctgacatctctttgtctctttctgttagacctagccaaccttgtaaacattgcagcaataaaggctgcggttgaaggtgcggacaaattgaatgctgttcagttggagtttgccaaagatcgtattatcatgggaaccgagaggagatcaatgttcatatctgatgaatcgagaaagcttactgcctaccatg

SEQ ID NO: 11622 - DNA, 595 bp, Zea mays
  Clone ID: LIB3061-121-Q6-K6-D3
cagcctagcaattagctcatcgactccagattggagaactcgacaccatgaaggtgctgatcgttgcccttgctctcctggcgctcgctgcgagcgccgcctccagtacaagcggcggctgtggctgccagacaccaccgtttcatctaccgcctccgttctatatgccgcctccgttctatctgccgccgcagcagcagccgcagccatggcaataccccactcaaccaccgcagctaagcccgtgccagcagttcggatcctgcggcgtcggcagcgtcggcagcccgttcctgggccagtgcgtcgagttcctgaggcaccagtgcagcccggcggcgacgccctacggctcgccacagtgccaggcgctgcagcagcagtgctgccaccagatcaggcaggtggagccgctgcaccggtaccaggcgacatacggtgtggtcctgcagtccttcctgcagcagcagccgcagggcgagctcgcggcgctgatggcggccccagtagcgcagcagctgacggcgatgtgcggcctgcagctgcagcagccaggtccctgcccttgcaacgcagctgccggcggtgtctacta

SEQ ID NO: 11623 - DNA, 635 bp, Zea mays
  Clone ID: LIB3061-121-Q6-K6-D4
ggatttcgggcggtaacacaaagttatctaactaacgctgtaaactagaaaagaagcaaaccattactttgattgtttggttcaaatcatctatatcatggtattccatcactctctgattggaggggtattggataacgctccattttctataagtcaggttaaaagattacattgtgcctaaaacaaacacgatacaatataatcagttgtcgctataattaaataacattacatttcactgaaccaaacaacatcttagtttagttaattaccttcatttcattgatgttgttttctttctcttcattttattgatttcctttcaaattgcatcccatcggttgattcttgatttgttgcttttgtgaacaagctttgtgacttattttggatttgagtagcacaatcataacattgctggtaagagatctcttggtcttgattgaaatggccagtcattattgtctgcgtaatagattatgtttgcattattttcatagccacaccagaactctttaattcttcatgcttttacggatctgttttgtccatatgtccgagtgaatcttcttttatctagcaaggtaactatgttcttaatcttcattatatttgaaatatattgctactca

SEQ ID NO: 11624 - DNA, 509 bp, Zea mays
  unsure (1)..(509): unsure at all n locations; Clone ID: LIB3061-121-Q6-K6-D5
agcagcttctgcttgctctggggggaaggagagagagagagcgagagagatctagtagagaggctagctaggtggtcctcgaacgaagatgttggcggtgttcagcgggcaggtggtggaggtgccggcggagctggtggcggcgggcagccggacgccgtcgcccaagacgaaggcgtcgcagctggtggggcgcttcctggccgcctccgagccggccgtgtccgtgcagctcggcgaccacggccacctcgcctactcccacaccaaccaggcgctcctccgccccaggtcgttcgcggcgaaggacgaggtgttctgcctgttcgagggggtgctggacaacctgggtcgtctgagccagcagcacgggctgtcaagcaagggcgccaacgaggtgctcctcgtcatcgaggcctacaagacgctgcgcgaccgcgcgccctacccggncagctttatgctcgcccagctcaccggctcctacgccttcgttctcttcgacaagt

SEQ ID NO: 11625 - DNA, 601 bp, Zea mays
  unsure (1)..(601): unsure at all n locations; Clone ID: LIB3061-121-Q6-K6-D6
gcaacatanaagtggaatccagtagcaacaacagagcaacaatggcgaccaagatattttccctccttatgctccttgctctttctgcatgtgttgctaacgcgacaattttccctcaatgctcacaagctcctatagcttcccttcttcccccataccttccatcaatgatagcttcagtatgtgaaaacccagctcttcagccctataggctccaacaagcaatcgcagcaagcaacatacctttatcacccttgttgtttcaacaatcgccagccctatctttggtgcagtcattggtacaaaccatcagggcacagcagctgcagcaactcgtgctacctgtgatcaaccaagtagctctggcaaacctttctccctactctcagcaacaacaatttcttccattcaaccaactgtctacactgaaccctgctgcttatttgcagcaacaactattaccattcagccagctagctactgcctactctcagcaacaacaacttcttccatttaaccaattggccgcactgaaccccgctgcttatttgcagcagcaaatactactaccatttagccagctagctgcagcaaaccgtgc

SEQ ID NO: 11626 - DNA, 574 bp, Zea mays
  Clone ID: LIB3061-121-Q6-K6-D7
agcgcatgctcatgagcgccgaggagaagttcccaggcaaggtgcgcgccgtggtcaagttcaacgcggcgctggcgcaccacatcatggccggcgccgacgtgctcgccgtcaccagccgcttcgagccctgcggcctcatccagctgcaggggatgcgatacggaacgccctgcgcctgcgcgtccaccggtggactcgtcgacaccatcatcgaaggcaagaccgggttccacatgggccgcctcagcgtcgactgtaacgtcgtggagccggcggacgtcaagaaggtggccaccacattgcagcgcgccatcaaggtggtcggcacgccggcgtacgaggagatggtgaggaactgcatgatccaggatctctcctggaagggccctgccaagaactgggagaacgtgctgctcagcctcggggtcgccggcggcgagccaggggtcgaaggcgaggagatcgcgccgctcgccaaggagaacgtggccgcgccctgaagagttcgggctgcagggcccctgatctcgcgcggggtgcaaagatgtggggacatcttcttatatatgct

SEQ ID NO: 11627 - DNA, 533 bp, Zea mays
  unsure (1)..(533): unsure at all n locations; Clone ID: LIB3061-121-Q6-K6-D9
gcaacatagnaagtggaatacagtagcaacaatagagcaacaatggcggccaagatattttccatccttatgctccttgctctttctgcatgtgttgctaacgcgaccattttgtcctcaatactcacaagctcctatagctgcccttcttcccccataccttccatcaatgaccgcttcagtttgtgaaaacccagcccttcaaccctacaggctccaacaagcaatcgcaacaggcaacttacctttatcacccctgttctttcaacaatcgccagccctatctttggtgcagtcattggtacaaaccatcagggcacaacagctgcaacaactcgtgctaccagtgatcagccaagtagctctggcaaacctttctccctactctcagcaacaacaatttcttccattcaaccaactgtatacactgaaccctgctgcttatttacaacaacaacaactactaccattcatccagctagctactgcctactctcaacagcaacaattttcttccatttaacccaattggc

SEQ ID NO: 11628 - DNA, 632 bp, Zea mays
  Clone ID: LIB3061-121-Q6-K6-E1
cattcatcttagtagtataggcaccaaatcaaatctgcaacatcaattatctaactccaaaaaccatgaagctggtgcttgtggttcttgctttcattgctttagtatcaagtgtttcttgtacacagacaggcggctgcagctgtggtcaacaacaaagccatgagcagcaacatcatccacaacaacatcatccacaaaaacaacaacatcaaccaccaccacaacatcaccagcagcagcaacaccaacaacaacaagttcacatgcaaccacaaaaacatcagcaacaacaagaagttcatgttcaacaacaacaacaacaaccgcagcaccaccaccaacaacaacaacaacagcaccaacaacaacatcaatgtgaaggccaacaacaacatcaccaacaatcacaaggccatgtgcaacaacacgaacagagccatgagcaacaccaaggacagagccatgagcaacaacatcaacaacaattccagggtcatgacaagcagcaacaaccacaacagcctcagcaatatcagcagggccagggaaaaatcacaacagcaacaatgtcattgccaggagcagcaacagactacaaggtgcagctataactactatagcagtagctc

SEQ ID NO: 11629 - DNA, 121 bp, Zea mays
  Clone ID: LIB3061-121-Q6-K6-E10
cgggcgcgtgggtcgacagtacttttggctgccctagaatcagcaagcactgactttaggcgctgacgctaggatacattctgcaagcaaatgcatcgcgtggacacaacgatgtcatccg

SEQ ID NO: 11630 - DNA, 559 bp, Zea mays
  Clone ID: LIB3061-121-Q6-K6-E11
ggcgacgactgggcgagcgccgcctcccctccctcgctccgtgaggtcctcgccggcgacgagtgctgccgcccgtttccatgtattttccgccgattagtgtccaccagatctagtgaaggctggtaacttgacgcaaggggttcaagaaatttaagccacacactcttcatcataggcccaggcaatatttgtgttaatctcagggacctccagtagattgctgagagttatccttgatacaggggaatatagacacagaattttttgaacattgatctgtagccagtgctgcaatggctacaaagcttgtggttctcggtatcccctgggatgttgacactgaagggttacgagagtacatggccaagtttggacccctagatgattgtgtcgtcatgaaggagcggtcttctgggcgatctcgtgggtttggctatgtaacattcgcatcagccgacgatgcaaagaatgttcttgattgcgagcatgttcttgggagccgtacattagaagtgaagatagctactccaaaggaagaaatgaaatcacaaggaac

SEQ ID NO: 11631 - DNA, 564 bp, Zea mays
  Clone ID: LIB3061-121-Q6-K6-E12
gaagtggaatccagtagcaacaatagagcaacaatggcgaccaagatattttccctccttatgctccttgctctttctacatgtgttgctaacgcgacaattttccctcaatgctcacaagctcctatagcttcccttcttcccccataccttccatcaattatagcttcaatatgtgaaaacccagctcttcaaccatataggcttcaacaagcaatcgcagcaagcaacatacctttatcgcccttgttgtttcaacaatcgccagccctatctttggtgcagtcattggtacaaaccatcagggcacaacagctgcagcaactcgtgctacctctgatcaaccaagtagctctggcaaacctttctccctactctcagcaacaacaatttcttccattcaaccaactgtctacactgaaccctgctgcttatttgcagcaacaactattaccatttagccagctagctactgcctactctcagcaacaacaacttcttccatttaaccaattggccgcactgaaccccgctgcttatttgcagcagcaaatactactacca

SEQ ID NO: 11632 - DNA, 247 bp, Zea mays
  Clone ID: LIB3061-121-Q6-K6-E2
tgactactgtaataccagagacgaacaacttggtcctgcagctcaagaagagagttttgtgcatttgggggccgggggcaagagagagagagagagccatggcggcggaccagcagccgcagctgcaggaggagatgaacgacgctgccggcggcggcctcaggctgcctccaggggttccgcttccacccgagcgacttcgagattgtcagcttctacctcaccaacaaggtgctcaacacgcgct

SEQ ID NO: 11633 - DNA, 616 bp, Zea mays
  unsure (1)..(616): unsure at all n locations; Clone ID: LIB3061-121-Q6-K6-E3
attgaggaccaacagcaacatagnaagtggaatacagtagcaaaaatagagcaacaatggcggccaagatattttccatccttatgctccttgctctttctgcatgtgttgctaacgcgaccatttttcctcaatactcacaagctcctatagctgcccttcttcccccataccttccatcaatgaccgctttagtatgtgaaaacccagcccttcaaccctacaggatccagcaagcaatcgcaacaagcaacttacctttatcacacctgttctttcaacaatcgccagccctatctttggtgcagtcattggtacaaaccatcagggcagaacagttgcagcaactcgtgctaccagtgatcagccaagtagctctggcaaacctttccccctactctcagcaacaacaatttcttccattcaaccaactgtctatactgaaccctgctgcttatttgcagcaacaacaactactaccattcagccagctagctactgcctactctcagcagcaacaatttcttccatttaaccaattggccgcactgaacccctctgcttatttccagcagcaaatactactaccatttggccagctagctacaacaagccc

SEQ ID NO: 11634 - DNA, 603 bp, Zea mays
  unsure (1)..(603): unsure at all n locations; Clone ID: LIB3061-121-Q6-K6-E4
gcaagagtgcgaggagttagcccggaggtagctgacctaacgaccgagaacagcgctctcagagcagaacttgacaacctcaagaaggcttgtcaagacatggaagcagaaaattcacgtctgttgggtggggtggctgacgcccaggtaccaagtgtcacgaccacactgggaatgagcatcgagccgccgaagttgcagctgcagctgcagcagcatcatgatgaggagggccagctccacaagaaatctagtaataacagcaatgggaactgtgctggaggcagccacaaaccggaggctaacactactaggtgagatacagaggtggatgaggaagtgacaaagatgagatgagatgaggtgtttcttatctaaccacaacacccatcatcggtcagtgtgtgtgttttttcttagcgaagctgtcgttttagtcctcgcagcccgctggggccatgtagagtcgcccccactgcagccatgtattatttatggctcgtcgcggngtgctttgtgtttttttgtgtgttgggtaaaaactattgatgtaacaaaacctagagagccctagagtttttttttatgtctgctaactcctga

SEQ ID NO: 11635 - DNA, 590 bp, Zea mays
  Clone ID: LIB3061-121-Q6-K6-E5
gcaacatagaaagtggaatccagtagcaacaatagagcaacaatggcgaccaagatattttccctccttatgctccttgctctttctacatgtgttgctaacgcgacaattttccctcaatgctcacaagctcctatagcttcccttcttcccccataccttccatcaattatagcttcaatatgtgaaaacccagctcttcaaccatataggcttcaacaagcaatcgcagcaagcaacatacctttatcgcccttgttgtttcaacaatcgccagccctatctttggtgcagtcattggtacaaaccatcagggcacaacagctgcagcaactcgtgctacctctgatcaaccaagtagctctggcaaacctttctccctactctcagcaacaacaatttcttccattcaaccaactgtctacactgaaccctgctgcttatttgcagcaacaactattaccatttagccagctagctactgcctactctcagcaacaacaacttcttccatttaaccaattggccgcactgaaccccgctgcttatttgcagcagcaaatactactaccatttagccagctagctgc

SEQ ID NO: 11636 - DNA, 386 bp, Zea mays
  unsure (1)..(386): unsure at all n locations; Clone ID: LIB3061-121-Q6-K6-E6
ttctgctntcacttttgcttccgccgctcacccgaggcgatctggctaacctttgcccgtactctcagttgcggacactcttttccattcaaccggctgtgtctactggcccctgctgctgatttgcctggtcaccggctcctcccgttctgccatctcgctactgcctactgtcagcgggggcgggggcttgcatttgaccacttggccgctctgaacccctctgcttatttccagctgccaactctactaccatttgggctgctcgctacaacacgccccgttcccttcttgccgctgcatctagtgcttgcgttctaccagccgttggtggcttaccccgcaaccctcttactnctgctgctgttgccggcctctgtccaact

SEQ ID NO: 11637 - DNA, 504 bp, Zea mays
  Clone ID: LIB3061-121-Q6-K6-E7
catcattttagctgttgatacaaagagaaggaatggccgagataaccctagagccgagtgatcttatggcgcaaacaaacaaaagaatagtgccaaagttcactgaaatcttccccgtggaggacgcgaactacccttacagcgccttcatcgcgtcggtccggaaagacgtgatcaaacactgcaccgaccataaagggatcttccagcccgtgctgccaccggagaagaaggtcccggagctatggttctacacagagctcaaaactaggaccagctccatcacgctcgccatacgcatggacaacctgtacctcgtgggcttcaggaccccgggcggggtgtggtgggagttcggcaaggacggcgacacccacctcctcggcgacaaccccaggtggctcggcttcggcggcaggtaccaggacctcatcggcaacaagggtctggagaccgtcaccatgggccgcgccgaaatgaccagggccgtcaacgacctggcga

SEQ ID NO: 11638 - DNA, 576 bp, Zea mays
  unsure (1)..(576): unsure at all n locations; Clone ID: LIB3061-121-Q6-K6-E8
gcaacatagnaaagcacaatagtgtaccaacaatggcagctaaaatattttgcctccttatgctccttggtctttctgcaagtgctgctacggcgaccattttcccacaatgctcacaagctcctatagcttcccttcttcccccgtacctctcaccaacggtgtcttcggtatgtgaaaacccaattcttcaaccctacaggatccaacaggcaatcgcagctggcatcttacctttatcacccttgttcctccaacaatcatcagccctattacagcagttacctttggtgcatttattggcacaaaacatcagggcacaacaactacaacaacttgtgctagcaaaccttgctgcctactctcagcaacagcagtttcttccattcaaccaactagctgcattgaactctgcttcttatttgcaacaacaacaactaccattcagccagctatctgctgcctacccccagcaatttcttccattcaaccaactgacagcattgaactctcctgcttatttacagcagcaacaactactaccattcagccagctagctggtgtgagccctgcta

SEQ ID NO: 11639 - DNA, 578 bp, Zea mays
  unsure (1)..(578): unsure at all n locations; Clone ID: LIB3061-121-Q6-K6-F10
agcaacatagnaaagcacaatagtgtaccaacaatggcagctaaaatattttgcctccttatgctccttggtctttctgcaagtgctgctacggcgaccattttcccacaatgctcacaagctcctatagcttcccttcttcccccgtacctctcaccaacggtgtcttcggtatgtgaaaacccaattcttcaaccctacaggatccaacaggcaatcgcagctggcatcttacctttatcacccttgttcctccaacaatcatcagccctattacagcagttacctttggtgcatttattggcacaaaacatcagggcacaacaactacaacaacttgtgctagcaaaccttgctgcctactctcagcaacagcagtttcttccattcaaccaactagctgcattgaactctgcttcttatttgcaacaacaacaactaccattcagccagctatctgctgcctacccccagcaatttcttccattcaaccaactgacagcattgaactctcctgcttatttacagcagcaacaactactaccattcagccagctagctggtgtgagccctgctac

SEQ ID NO: 11640 - DNA, 514 bp, Zea mays
  Clone ID: LIB3061-121-Q6-K6-F11
gccgctggctagctagctagttgagtcatttagcggcgatgattgagtaataatgtgtcacgcatcaccatgggtggcagtgtcagtgtgagcaatgacctgaatgaacaattgaaatgaaaagaaaaaaaaaaaaaaaaaaaaaaaaaaaaaaaaaaaaaaaaaaaaaaaaaaaaaaagggggggggccgcttctataggagacaaaattttacgcgcgcgtgtgtgagattatatattttttatatggggacataaaaaaaaaatacagggggcggttttaaaaaacggagagagggaaaaaactggggtgacacaaaataaaatcgttttaaaacatatccctttttcgagagggggaaaaatagagaagacgcccacacatcgccctttaaaaaacatgcgcaccctctatgtggagagtgacacgccctctagaggggcataaaacgcggggggtgtgggggttacacgcacagtgacacctatacttttgagagctctatagcccccg

SEQ ID NO: 11641 - DNA, 556 bp, Zea mays
  Clone ID: LIB3061-121-Q6-K6-F12
cttgtttcaacaatcgccagccctatctttggtgcagtcattggtacaaaccatcaaggcacagcagctgcagcaactcgtgctacctgtgatcaaccaagtagctctggcaaacctttctccctactatcagcaacaacaatttcttccattcaaccaactatctacactgaaccctgctgcttatttgcagcaacaactattaccattcagccagctagctactgcctactctcatcaacaacaacttcttccatttaaccaattggccgcactgaacctcgctgcttatttgcagcagcaaatattactaccatttagccagctagctgcagcaagccgtgcttccttcttgacacagcaacaggtgctgcctttctaccagcagtttgcggctaaccccgcaaccctcttacaactacaacaattgttgccctttgtccaacttgctttgacaaacccagcagcctcctaccaacaacacatcattggtggtgccctcttttagattgcttattagttgtaattcaataataaagttttttggatgatgtat

SEQ ID NO: 11642 - DNA, 638 bp, Zea mays
  unsure (1)..(638): unsure at all n locations; Clone ID: LIB3061-121-Q6-K6-F2
ncggcaccaagcgaacacattagcaacaacctaacaacaatggctaccaagatattatccctccttgcgcttcttgcgctttttgcgagcgcaacaaatgcgttcattattccacaatgctcacttgctccaagttccattattacacagttcctcccaccagttacttcaatgggcttcgaacacccagctgtgcaagcctataggctacaacaagcaattgcggcgagcgtcttacaacaaccaatttcccagttgcaacaacaatccttggcacatctaacaatacaaaccatcgcaacgcaacagcaacaacaattcctaccagcactgagccacctagccatggtgaaccctgccgcctacttgcaacagcagttgcttgcatcaaacccacttgctctggcaaacgtagttgcaaaccagccacaacaacagctgcaacagtttctgccagcgctcagtcaactagccatggtgaaccctgccgcctacctacaacagcaacaactgctttcatctagcccgctcgctgtggccaatgcacctacatacctgcaacaacaattgttgcaacagattgtaccagctctgactcagctagttgtggcaaaccctgctgnctacttgcaacagct

SEQ ID NO: 11643 - DNA, 170 bp, Zea mays
  Clone ID: LIB3061-121-Q6-K6-F3
tttttctctacttgctactgtcagctggggtggcggggggggatggtaagaaattgagccctgctggaactcccgctggttatcttgccggagccccatgctgcgtgccatgttaccgacctagctgcagtaagggcgcgattccattcttgacacaccatctgtctgct

SEQ ID NO: 11644 - DNA, 187 bp, Zea mays
  Clone ID: LIB3061-121-Q6-K6-F4
gtgctgtcccaacagctggtttggcttggatggtttactctgttggtgttgctgccttcctgcatgcgtgcgcatacactagtattctgtgttgatcctacacttgttgcctggtatagtacacaacatttgaaccgatgatggttgatctgaactcagaggagttaactagagaattgccacatgc

SEQ ID NO: 11645 - DNA, 494 bp, Zea mays
  Clone ID: LIB3061-121-Q6-K6-F5
gccgcatccaagcccgtgccagctgcagggaacctgcggcgttggcagcaccccgatcctgggccagtgcgtcgagtttctgaggcatcagtgcagcccgacggcgacgccctactgctcgcctcagtgccagtcgttgcggcagcagtgttgccagcagctcaggcaggtggagccgcagcaccggtaccaggcgatcttcggcttggtcctccagtccatcctgcagcagcagccgcaaagcggccaggtcgcggggctgttggcggcgcagatagcgcagcaactgacggcgatgtgcggcctgcagcagccgactccatgcccctacgctgctgccggcggtgtcccccactgaagaaactatgtgctgtagtatagccgctggctagctagctagttgagtcatttagcggcgatgattgagtaataatgtgtcacgcatcaccatgggtggcagtgtcagtgtgagcaatgacctgaatgaacaattg

SEQ ID NO: 11646 - DNA, 574 bp, Zea mays
  unsure (1)..(574): unsure at all n locations; Clone ID: LIB3061-121-Q6-K6-F6
gaaccttcctcctcgcctccgtctttccctcccccagctcaggcaggaccgcaggagccagacccaaacccacgaaaccctcctgcctcgccgccgcttcctcatcctcccgccgcttagtcccggacccggaccaaccttcgtgaggacgggaattggactaagggggtaggatgccgccaaagaaagcggcgccatcgaaggcggagctggccaagaagcagaaggtcgtggaggacaagaccttcgggctgaagaacaagaataagagcaagaacgtccaaaagtacgtccagtccctgcaccaggccgtccagcccaagcctgactcgaccaagaccgccgccaagaagaagaaggaggaggagaaggcgcgcgagaaggagcttaatgatctgttcaaggttgccgtcagccagcccaaggtccctgttggtgttgatcccaagtcaatattgtgtgagttcttcaaggctggccagtgnccagagggttttaagtgcaaattctctcatgacctgaatgtccagaggaagggtgaaaagattgatatctatacagacaagcgtgatgc

SEQ ID NO: 11647 - DNA, 547 bp, Zea mays
  Clone ID: LIB3061-121-Q6-K6-F7
cgccagccctatctttggtgcagtcattggtacaaaccatcagggcacaacagctgcaacaactcgtgctaccagtgatcagccaagtagctctggcaaacctttctccctactctcagcaacaacaatttcttccattcaaccaactgtctacactgaaccctgctgcttatttacaacaacaacaactactaccattcagccagctagctactgcctactctcagcagcaacaatttcttccatttaaccaattggccgcactgaacccctctgcttatttccagcagcaaatactactaccatttggccagctagctacaacaagccccacttcctttttgaaacaacaacaattgcttccgttctaccagcagtttgtggctaaccccgcaaccctcttacaactgcaacagttgctgccctttgtccaacttgctttgacaaacccagcagccttctaccaacaacacatcattggcggtgccatcttttagattgcttattagttgtaattcaataatgaagttttttggctgatgtatgt

SEQ ID NO: 11648 - DNA, 605 bp, Zea mays
  unsure (1)..(605): unsure at all n locations; Clone ID: LIB3061-121-Q6-K6-G1
attgaggccaactagcaacatagnaaagcacaatagtgtaccaacaatggcagccaaaatattttgcttccttatgctccttggtctttctgcaagtgctgctaccgcaaccattttcccacaatgctcacaagctcctatagcttcctttcttcccccatacctctcaccagcggtgtcttcagtatgtgaaaacccaattcttcaaccctacaggatccaacaggcaatcgcagcaggcatcttacctttatcacccttgttcctccaacaaccgtcagccctattacagcagttacctttggtgcatttgttggcacaaaacatcaaggcacaacaactacaacaacttgtgctaggaaaccttgctgcctactctcagcaacagcagtttcttccattcaaccaactggctgcattgaactctgctgcttatttgcaacaacaactaccattcagtcagctagctgctgcctacccccagcaatttcttccattcaaccaactggcagcattgaactctgctgcttatttacaacagcaacagctaccaccattcagccagctagctgatgtgagccctgttgccttcttgacacaacaac

SEQ ID NO: 11649 - DNA, 604 bp, Zea mays
  Clone ID: LIB3061-121-Q6-K6-G10
gaccgttacagttgattcagcaataatgctggaggatgatgtggaagttccagtttcatctgcaaatgaagctccaaatgatactatgaagatggacacagatgatgcaccaagtgatcctgctgttgcatctgatgtgaatatgcaggagcctaaaagcgctgataccgctgaggctgctcatgcagctgaaaatggaccacaagatactgaggaaaaatctgttccgatggaaactgatgcaaaggttgagccgtcaaaaaagaaagttaagaaaattactgttccggtccatgagttggtctatggggccttggctgcggctgacctgcagaaggctgtagagaaagagtatgagatggctcttcaagacagagtaatggaagaaacaaaggagaagaagaatgctgttgaagcttatgtgtatgacatgcgtaacaagctatatgacaagtacagtgattttgtcacgtctgaggacaaggaaggtttgattgctaagcttcaggaggttgaagactggctctatgaagatggcgaggatgaaactaaaggggtttatattgctaagctagaagaactaaaaaagttggtgatcctattg

SEQ ID NO: 11650 - DNA, 522 bp, Zea mays
  Clone ID: LIB3061-121-Q6-K6-G11
ctctcccaacccgactagtcggactcgcagctccgccccaagtccaggtccaagcatggaagtcgcggcggcgtcggcgaggcccgtcctgcgcgtggctgccatctgcggctccctccgcaaggcctccttcaaccgcggcctcctccgcgccgccgcggaggtgtgcgaggactccatcccggggctccgcatcgacgagctcgacatctccgacctgcccatcatcaacaccgaccttgagaccggcagcggcagcggcaccgtcttcccgcccgccgtcgaggccttccgcgccaaggtctgccaggccgactgcttcctcttcggcgcgcccgagtacaactactccatcggcacccccctgaagaacgcgcttgactgggcctctagaggaaagaactgttgggcagacaaacctgctgcgatcgtgagtgcaggcggcggctttggaggagggaggtcgcagtaccatcccccgcaggtcggggggttccctggatctccatttcatcaacaagc

SEQ ID NO: 11651 - DNA, 540 bp, Zea mays
  Clone ID: LIB3061-121-Q6-K6-G12
tctaatgggagctgttggtttagcaatatgggtcccatctgttgtaaatcaatctggtagcaaagaacattcgaggcaacatcacctcgtcatggctattcgtcattgttacctcccacagataggaatgagacagattggaggcgacaagatggagacgatgtggaactcacaattctagacgttgatccctaccactatggtagtaacaatgaggagatgcttcttgatgacttgaaggtatcacaagcaatgacaaagcattatgtgaaggtcacacctacattcaccatcgaggagacaacaaggcttatgcaagagaagcagcaaagctgtgttgttgttgtagataatgaagattttcttgagggaattgtaacattaggtgaccttcgtcgtaaaggatttgtgccaagtgaaaactctgatagtacccaggcaaattcatcgaccgtggatgcaaattcttctcttgtgtcatcgtgccttactcgaggttttcagttccatggcaatgaaagaggtctggtgacctgcttt

SEQ ID NO: 11652 - DNA, 586 bp, Zea mays
  Clone ID: LIB3061-121-Q6-K6-G2
ttcacgtctgatttccctcatgtcgaggggtatttctggaccatggttaaccagcctaacttcaagaaggtcattggtgaggtcaagcaggcagagtctgcacctcctattccgaaaaagctgctccttctaaggagccaaaggcaaaggatgtcaagaaggaggctccaaaggaggcccccaagccaaaggtggttgaggcaccagcagaagaggaagcaccaaagccaaagccaaagaatcctcttgacttgctgccaccaagcaagatggtccttgatgactggaagaggctatactcaaacacaaagactaacttccgggaggttgccatcaaaggtttctgggacatgtacgacccagagggctactctttgtggttctgtgactacaagtacaatgatgagaacaccgtctcctttgtgaccctgaacaaggttggtggattcctgcagcggatggacctgtgccgcaagtacgcctttgggaagatgctcgtgataggctctgagccacccttcaagctgaagggcctttggctcttccgtggccaggatgttcccaagtttgtaatggacgaggtcta

SEQ ID NO: 11653 - DNA, 563 bp, Zea mays
  Clone ID: LIB3061-121-Q6-K6-G3
caagatggacttctattgccacatactacaaccgaccaagagcttcagcatctgaggaattgcttgcctgatcaagtggtggttcagcgcattgatgagaggttatctgcccttggcaattgcatagcctgcaatgaccatgttgcacttacgcaccctgaccttgacaaggagactgaggagttcattgcagatgtgcttggggtcgaggtgtttaggcagactattgctggaaatatccttgtggggagttactgcgccttctctaacaggggtggtttggttcatccccatacatccgttgaagaccttgacgagctctccacgctcctccaagttcctcttgtcgcaggaactgtgaacagaggaagcgaggtcattgctgcaggcatgacagtgaacgactggactgccttttgtggctcggacacgacagccaccgagctctcagtcatcgaaagcgtcttcaagctgagagaagggcagcccactgcgattgtggaggacatgaggaagtctctgatagacagttacgtgtaactggggggccagcagatgtgggt

SEQ ID NO: 11654 - DNA, 533 bp, Zea mays
  Clone ID: LIB3061-121-Q6-K6-G4
cagcactcacatacgcagccagcatcgatgaaacagcagccattcccgcaaggccatttcttcatatccaacacgtacgctcctccggctccgggagccggaggtgctgctgccctaggcctctaccagaagcgaccaggcgacaagacgcagcagcagcagcagcagcaggcatcgcaccagcagagcgccatgtcagctgccggcggcaataacgtgaaagcactccatccttcatccggcgggtttatgcatctcgcagcccagtctgcaggtggcatggcgcacacccacgtgtcggcggggcaactgactttcggaacaatgccgacgcctttaaaaccgtcaagcgaccagaagcctgctgccggaaaataaacagtccagacgaccatgcatcggagtggtaaacctgaactggtttttgcctgttcagcggaagcccaaatggcagaatcgcaacaacagtagcagcggcagctcaaaagaacccgcatggaagctcaaatggcccgcttggttgctggtgatga

SEQ ID NO: 11655 - DNA, 653 bp, Zea mays
  Clone ID: LIB3061-121-Q6-K6-G5
cttctatcagtaccatcaatcatcattcatcttagtagtataggcaccaaatcaaatctgcaacatcaattatctaactccaaaaaccatgaagctggtgcttgtggttcttgctttcattgctttagtatcaagtgtttcttgtacacagacaggcggctgcagctgtggtcaacaacaaagccatgagcagcaacatcatccacaacaacatcatccacaaaaacaacaacatcaaccaccaccacaacatcaccagcagcagcaacaccaacaacaacaagttcacatgcaaccacaaaaacatcagcaacaacaagaagttcatgttcaacaacaacaacaacaaccgcagcaccaacaacaacaacaacaacaacagcaccaacaacaacatcaatgtgaaggccaacaacaacatcaccaacaatcacaaggccatgtgcaacaacacgaacagagccatgagcaacaccaaggacagagccatgagcaacaacatcaacaacaattccagggtcatgacaagcagcaacaaccacaacagcctcagcaatatcagcagggcccaggaaaaaatcacacagcaaccatgtcattgccaggagcagcaacagactacaaggtgcagctataactactatagcagtagc

SEQ ID NO: 11656 - DNA, 547 bp, Zea mays
  Clone ID: LIB3061-121-Q6-K6-G6
agctcctatagcttcccttcttcccccatacctctcaccagcggtgtcttcaatgtgtgaaaccccaattgttcaaccctacaggatccaacaggcaatcgcaacaggcatcttaccattatcacccttgttcctccaacaaccgtcagccctattacagcagttacctttggtccatttggtggcacaaaacatcagggcacaacaactacaacaacttgtgctagcaaaccttgctgcatactctcagcaacatcagtttcttccattcaaccaactggctgcattgaactctgctgcttatttgcaacaacaattaccattcagccagctagttgctgcctacccccagcaatttcttccattcaaccaactagcagcattgaactctgctgcttatttacagcagcaacaactactaccattcagccagctagctgatgtgagccctgctgccttcttgacacaacaacagttgttgccgttctacctgcacgctatgcctaacgctggcaccctcttacaactgcaacaattgctgccattc

SEQ ID NO: 11657 - DNA, 582 bp, Zea mays
  Clone ID: LIB3061-121-Q6-K6-G7
cagaaacacaccaagcgaagcgcactagcaacgacctaacaacaatggctaccaagatattagccctccttgcgcttcttgccctttttgtgagcgcaacaaatgcgttcattattccacaatgctcacttgctcctagtgccattattccacagttcctcccaccagttacttcaatgggcttcgaacacctagctgtgcaagccaacatgcaacaacaagcgcttgcggcgagcgtcttacaacaaccaattgcccaattgcaacaacaatccttgccacatctaacaatacaagccatcacaacgcaacagcaacaacagttcctaccagcactgagccacctagccatggtgaaccctgccgcctacttgcaagagcagctgcttgcatccaacccacttgctctggcgaacgtagttgcaaaccagcaacaacaacagctacaacagtttctgccaacgctcagtcaactagccatggtgaaccctgccgcctacgtacaacaacaacaactgctttcatctagcccgctcgctgtgggcaatgcacctacatacctgcaaaaacaattgttgcaac

SEQ ID NO: 11658 - DNA, 474 bp, Zea mays
  Clone ID: LIB3061-121-Q6-K6-G8
gcaagaagaattcgagcgcatgctcatgagcgccgaggagaagttcccaggcaaggtgcgcgccgtggtcaagttcaacgcggcgctggcgcaccacatcatggccggcgccgacgtgctcgccgtcaccagccgcttcgagccctgcggcctcatccagctgcaggggatgcgatacggaacgccctgcgcctgcgcgtccaccggtggactcgtcgacaccatcatcgaaggcaagaccgggttccacatgggccgcctcagcgtcgactgtaacgtcgtggagccggcggacgtcaagaaggtggccaccacattgcagcgcgccatcaaggtggtcggcacgccggcgtacgaggagatggtgaggaactgcatgatccaggatctctcctggaagggccctgccaagaactgggagaacgtgctgctcagcctcggggtcgccggcggcgagccaggggtcgaaggcga

SEQ ID NO: 11659 - DNA, 583 bp, Zea mays
  unsure (1)..(583): unsure at all n locations; Clone ID: LIB3061-121-Q6-K6-G9
ttcagaaacacacctagcgaacgcactagcaacgacctaacaacaatggctaccaagatattatccctctttgcgcttcttgccctttttgtgagcgcaacaaatgcgttcattattccacaatgctcacttgctcctagtgccattattccacagttcctccctccagttacttcaatgggcttcgaacacccagctgtgcaagcctacaggctacaacaagcgcttgcggcgagcgtcttacaacaaccaattgcccaattacaacaacaatccttggcacatctaaccatacaaaccatcgcaacgcaacagcaacaacaatttctaccagcactgagccaactagctgtggtgaaccctgtcgcctacttgcaacagcagttgcttgcatccaacccacttgctctggcaaacatagttgcataccaacaacaacaacaattgcaacagtttctaccagcgctcagtcaactagccatggtgaaccctgccgnctacctacaacagcaacaactgatttcatctagccctctcgctgtggttaatgcacctacatacctgcaacaacagttgctgcaac

SEQ ID NO: 11660 - DNA, 564 bp, Zea mays
  unsure (1)..(564): unsure at all n locations; Clone ID: LIB3061-121-Q6-K6-H1
nganaaacacaatagtgtaccaacaatggcagccaaaaattttgcttccttatgctccttggtctttctgcaagtgttgctaccgcaaccattttcccacaatgctcacaagctcctatagcttcccttcttcccccatacctctcaccagcggtgtcttcaatgtgtgaaaccccaattgttcaaccctacaggatccaacaggcaatcgcaacaggcatcttaccattatcacccttgttcctccaacaaccgtcagccctattacagcagttacctttggtccatttggtggcacaaaacatcagggcacaacaactacaacaacttgtgctagcaaaccttgctgcatactctcagcaacatcagtttcttccattcaaccaactggctgcattgaactctgctgcttatttgcaacaacaattaccattcagccagctagttgctgcctacccccagcaatttcttccattcaaccaactagcagcattgaactctgctgcttatttacagcagcaacaactactaccattcagccagctagctgatgtgagccctgct

SEQ ID NO: 11661 - DNA, 638 bp, Zea mays
  Clone ID: LIB3061-121-Q6-K6-H10
cagaaaccaccaagcgaagctacctagcaacgacttaacaacaatggctaccaagatattagccctccttgcgcttcttgccctttttgtgagcgcaacaaatgcgttcattattccacaatgctcacttgctcctagtgccattataccacagttcctccgaccagttacttcaatgggcttcgaacacctagctgtgcaagcctacaggctacaacaagcgcttgcggcgagcgtcttacaacaaccaattaaccaattgcaacaacaatccttggcacatctaaccatacaaaccatcgcaacacaacagcaacaacagttcctaccagcactgagccaactagatgtggtgaaccctgtcgcctacttgcaacagcaggtgcttgcatccaacccacttgctctggcaaacgtagctgcataccaacaacaacaacaattgcaacagtttctgccagcgctcagtcaactagccatggtgaaccctgccgcctacctacaacagcaacaactgctttcatctagccctctcgttgtgggtaatgcacctacatacctgcaacaacaattgctgcaacagattgtaccagctctgactcagctagctgtggcaaaccctgctgcctacttgcaac

SEQ ID NO: 11662 - DNA, 627 bp, Zea mays
  Clone ID: LIB3061-121-Q6-K6-H11
ccgcaacgctctatctctttcgccgagctcctcgaaaccctaggagcgtgcttgaccggcggcggcgaggtgatggcgatggaccctgacgcggtagcgaaggccttcgtggagcattactaccgaacgttcgacaccaaccgcgcggcgctggttgggctgtaccaggagacctccatgctcaccttcgagggccagaagttccagggcccctccgccattgccggcaagctcggatctctccctttccaggcctgcgagcatcagatcgtcaccgtagactgccagccatcgggtccccagggaggcatgctcgtcttcgtctccggttccatacgcaccggccccgaggagcaccccatcaagttctcccaggcattccatttgctgccggccgctgggtccttcttcgtgcagaatgacatgttccgcctgaactatggctaaagacacccgatactcttgtgatgaaggaattgattaagggtttcatgttgaaacgatgaatacttaatgttgccgctactctgggctcttttgtatcttctttggtggctgcttcactgtattacaagggattgctagacttggattatttcagttgttttgaatcatgtactgggtgca

SEQ ID NO: 11663 - DNA, 562 bp, Zea mays
  unsure (1)..(562): unsure at all n locations; Clone ID: LIB3061-121-Q6-K6-H12
ttctagatcgcgacggccgccctttttttttttttttttatgtagttgaaagactaatcaacacgcagtttaaccatgagcaagctttgtttaattattacagtctacgagtacttattcaggcagatcactctgaggttgtgcctactgttgggcgctgccagcttgaccttgttggtagctgccactgccagcaggagtaagcacagccagctcatgcttcctaccgttcttgagctctgcagcttcctccatggagatggcatacgagctggcgatgacggcggccggcaagtcgctcaggacggagttcttcccggcgacgtggctgaccatggtgtcagggttcgtctcgaaggcgatgtactggaagccttctccctgcgccttggtggcgacgaggtagccctggggtacgatgagcagctgccccgcacggagcacgtcgncgaacaccgtggtcccgttgtcgctggcgacctggacccttgcactgcccctgatgcccgtacatggcgcgtgtgggcgtttgaagttccagaacggggacatgatgggcgtc

SEQ ID NO: 11664 - DNA, 560 bp, Zea mays
  Clone ID: LIB3061-121-Q6-K6-H2
cgcgacgtcgacaggcacaacgtctgcgccatggaggtgaggcacagcgtcgaacggctggaccaggccgacgtctacagccctggggctgggaggatcacacgcctcaccagccacaagttccccgtcctcaacctcgtacagatgagcgcggtgcgggtagacctgtaccaggacgccatcatgtcgccgttctggaacttcaacgcccacagcgccatgtacggcatcaggggcagtgcaagggtccaggtcgccagcgacaacgggaccacggtgttcgacgacgtgctccgtgcggggcagctgctcatcgtaccccagggctacctcgtcgccaccaaggcgcagggagaaggcttccagtacatcgccttcgagacgaaccctgacaccatggtcagccacgtcgccgggaagaactccgtcctgagcgacttgccggccgccgtcatcgccagctcgtatgccatctccatggaggaagctgcagagctcaagaacggtaggaagcatgagctggctgtgcttactcctgctggcagtggcagttaccaaca

SEQ ID NO: 11665 - DNA, 387 bp, Zea mays
  Clone ID: LIB3061-121-Q6-K6-H3
cagctagctactgcctactctcagcaacaacaacttcttccatttaaccaattggccgcactgaaccccgctgcttatttgcagcagcaaatactactgccatttagcgagctagctgcagcaagtcgtgcttccttcttgacacagcaacagttgctgcctttctacaagcagtttgcggctaaccccgcaaccctcttacaactacaacaattgttgccctttgtccaacttgctttgacaaacccagcagcctcctaccaacaacacatcattggtggtgccctcttttagattgattattagttgtaattcaataataaagttttttggatgatgtatgtggccaaccagaaataagaagttacatttccagattctaatgtg

SEQ ID NO: 11666 - DNA, 504 bp, Zea mays
  unsure (1)..(504): unsure at all n locations; Clone ID: LIB3061-121-Q6-K6-H4
gccagagccagagccagccagccagacacacaacctcggtcggcgcggcggctcaacccaatggctccttcctccctccgcccgccgcgccaccacccgtctcccctcgtcgtcctcgccatcgccgtcctcctcgtcttgcgcaccgccgatgggctgccggaggcgggaggaggaggaggaggcggcggtctgtaccgggagattctcagggacgagaccgtgcagaggctcaaggagctgggcaagatatctgatggggatggctaccttgaaaggacgtttctgagtccggcctctatcagagccactggtgtcatcgtcagctggatgaaagacgctgggcttacgacgtgggtcgatcagatggggaatattcatggtcgatatgagccggcaaattctaccagagatgccttgttgattggatctcatatggacactgtcgttgatgctgggatgtacgatggagccttgngtattattttagcaatctcagcactg

SEQ ID NO: 11667 - DNA, 551 bp, Zea mays
  unsure (1)..(551): unsure at all n locations; Clone ID: LIB3061-121-Q6-K6-H6
gcaacaacctaacaacaatggctaccaagnaattatccctccttgcgcttcttgcgctttttgcgagcgcaacaaatgcgttcattattccacaatgctcacttgctccaagttccattattacacagttcctcccaccagttacttcaatgggcttcgaacacccagctgtgcaagcctataggctacaacaagcaattgcggcgagcgtcttacaacaaccaatttcccagttgcaacaacaatccttggcacatctaacaatacaaaccatcgcaacgcaacagcaacaacaattcctaccagcactgagccacctagccatggtgaaccctgccgcctacttgcaacagcagttgcttgcatcaaacccacttgctctggcaaacgtagttgcaaaccagccacaacaacagctgcaacagtttctgccagcgctcagtcaactagccatggtgaaccctgccgcctacctacaacagcaacaactgctttcatctagcccgctcgctgtggccaatgcacctacatacctgcaacaacaattgttg

SEQ ID NO: 11668 - DNA, 577 bp, Zea mays
  Clone ID: LIB3061-121-Q6-K6-H7
ctccgaagcaacatagaaagtggaatccagtagcaacaatagagcaacaatggcgaccaagatactttccctccttatgctccttgctctttctgcatgtgttgctaacgcgacaattttccctcaatgctcacaagctcctatagcttcccttcttcccccataccttccatcaatgatagcttcagtatgtgaaaacccagctcttcaaccctataggctccaacaagcaatcgcagcaagcaacatacctttatcacccttgtttcaacaatcgccagccctatctttggtgcagtcattggtacaaaccatcaaggcacagcagctgcagcaactcgtgctacctgtgatcaaccaagtagctctggcaaacctttctccctactatcagcaacaacaatttcttccattcaaccaactatctacactgaaccctgctgcttatttgcagcaacaactattaccattcagccagctagctactgcctactctcatcaacaacaacttcttccatttaaccaattggccgcactgaacctcgctgcttatttgcagcagcaaatattactacca

SEQ ID NO: 11669 - DNA, 521 bp, Zea mays
  Clone ID: LIB3061-121-Q6-K6-H8
ggtgtatttacctagtaggaatgatgggttctggaaaaatactgtggggaagattatgtctgaagtcttgggttattcgttctttgatagtgacaagttagtggagcaagctgttggaatgccatcagttgcccaaatattcaaggtccatagtgaagccttctttcgggataatgagagtagtgtcttgagagatttgtcctccatgcgacgattagttgttgccaccggaggtggtgctgttatccgaccaattaactggagatatatgaagaggggcctatctgtttggttagatgtgcccttggatgctcttgctaggcgtattgctaaagtgggaactgcctctcgtcctcttctggaccaaccatctggtgatccgtacgcaatggccttttctaagctcagcatgcttgcacagcaaaggggtgatgcttatgcaaatgcagatgtaagggtttctctggaagagattgcatgtaaacaaggtcatgatgatgtctttaaactgacacctactg

SEQ ID NO: 11670 - DNA, 593 bp, Zea mays
  Clone ID: LIB3061-121-Q6-K6-H9
attttcagcattcaaaaacacaccaagcgaagcgcactagcaacgacctaacaccaatggctaccaagatattagccctccttgcgcttcttgcccttttagtgagcgcaacaaatgcgttcattattccacagtgctcacttgctcctagtgccagtattccacagttcctcccaccagttacttcaatgggcttcgaacatccagccgtgcaagcctacaggctacaactagcgcttgcggcgagcgccttacaacaaccaattgcccaattgcaacaacaatccttggcacatctaaccctacaaaccattgcaacgcaacaacaacaacaacagtttctgccatcactgagccacctagccgtggtgaaccctgtcacctacttgcaacagcagctgcttgcatccaacccacttgctctggcgaacgtagctgcataccagcaacaacaacagctgcaacagtttatgccagtgctcagtcaactagccatggtgaaccctgccgtctacctacaactactttcatctagcccgctcgcggtgggcaatgcacctacgtacctacaacaacagttgctgcaacaaaat

SEQ ID NO: 11671 - DNA, 686 bp, Zea mays
  unsure (1)..(686): unsure at all n locations; Clone ID: LIB3061-079-01-K6-A1
gccaccaccattccttccccaactctgcaggctgctcgtcgccctccctccacgccggacgcgccccgatccagatccaggggcgtaacatggcatcaaaacgtatcctcaaggaattaaaggacctgcaaaaggaccctccaacgtcatgcagtgctggtcctgctggtgaggatatgttccactggcaggcaaccatcatgggtcctcctgatagtccatatgctggaggtgttttcttagtgaacattcatttccccccggactaccctttcaagcctccaaaggtatcttttaagacgaaggtcttccatccaaacatcaatagtaatggaagcatatgtctcgacattcttaaggagcagtggagccctgctttgacaatctctaaggttttgctttctatctgctccctgcttactgatcccaacccagacgatcctcttgtccctgagattgctcacatgtacaagacggatcggcctaagtacgaggcaacagcccgcagctggacccagaaatatgccatgggatgaaaatgaaatgaagtcgaaactccatattcggcattactgcttaaatgcagacgattgtggtgttgccccatgaaactntntgtggngacgtatgttcttccattccttgtcgcccgtatgcattctgatccatctaagnatcgagtgcta

SEQ ID NO: 11672 - DNA, 684 bp, Zea mays
  Clone ID: LIB3061-079-01-K6-A10
ataaatggaatccagtagcaacaatagagcaacaatggcgaccaagatattttccctccttatgctccttgctctttctacatgtgttgctaacgcgacaattttccctcaatgctcacaagctcctatagcttcccttcttcccccataccttccatcaattatagcttcaatatgtgaaaacccagctcttcaaccatataggcttcaacaagcaatcgcagcaagcaacatacctttatcgcccttgttgtttcaacaatcgccagccctatctttggtgcagtcattggtacaaaccatcagggcacaacagctgcagcaactcgtgctacctctgatcaaccaagtagctctggcaaacctttctccctactctcagcaacaacaatttcttccattcaaccaactgtctacactgaaccctgctgcttatttgcagcaacaactattaccatttagccagctagctactgcctactctcagcaacaacaacttcttccatttaaccaattggccgcactgaaccccgctgcttatttgcagcagcaaatactactaccatttagccagctagctgcagcaaaccgtgcttccttcttgcacagcacagttgctgccttttaccagcagtttgcggctaaccccgcaacctcttacactacaacaattgttgccctttg

SEQ ID NO: 11673 - DNA, 723 bp, Zea mays
  unsure (1)..(723): unsure at all n locations; Clone ID: LIB3061-079-01-K6-A11
cctcgcttgcgttgtcctctccgcggcctcgccctgattcggttcccccgttcctcgcctctgtcatcgtctcctctgacccaaattgagccaagcgaagccgtggccgtgatccggtccatgcgcggagcgtggtagccggattctatcgccgtcgcctccccttcgccgctattttccagtcgccgggatcagccgagttggatctcgaggcataaagcgttgcgggcgcccggcgaggatacgatgcctgcggtgctcgccgcatacgctacccttcgagccgccgctgccatcgcctccggagactcctccttcccctgttcccatcgtctcaagcatcgttttagtagtagtaattttagtagtagtaattgtcattaacctttgcgttccctccgtcgcgcacgctcctcggctcggtcctcaccttcgcatttcggttttggtctggttgtgctcgatccgaggcttactttggctttgcggcttctctccttgtcgaagcttgttgtctggattcgacctgcagatcggaaggaaacaaggtggtcattatcacctacaagataagagaaatttctctttgtaatttgngatcaagcttgtggattggacgaaccctcgtggacttcagtgctgaaagtgttagcagcagatcagttctctgccaaagcacctgtttaaatnnctgttgtaagcatgaccgtgcttgctgggaag

SEQ ID NO: 11674 - DNA, 642 bp, Zea mays
  Clone ID: LIB3061-079-01-K6-A12
atcattcctgataactggcgatggcaatactgactacggtgaacaagatgtacatgcccataaggcagtagccccagaacctgggcacccgaaacctagcccaggtgaccaccaacagggtgcccatcaggctcaggagcaggaacacaaacgcgacgacgatcccaacgtggaactcgagcacaaaagctccgggatacaccctcgccgtctgtaccacaagggcggttcccagcccgaccagcatgttgaacatggggccagcgaagcagccggcgacggcgatcgtaggctgcccagccctggccagcgccacgtccgcgacgaggtcgcccacggagttcccccacgccaggaccgtcatgccgagaatggcgggagggaagtccatgatggctccgaccgcggcgaggcagctcaggagctctccggccgtggtcgagatccagaagacgctcatgatgaaggagatgatggtgctcgcgatggtctctgtttcgggggcttctttctcgaggaggtagtgggagagggctaggcacaggctggcgaagagcacgacggaccatagagggaagcggacttgcgggaggaggaatcactattcggtgtctagagggatgaacgagctgaaggagtaca

SEQ ID NO: 11675 - DNA, 697 bp, Zea mays
  unsure (1)..(697): unsure at all n locations; Clone ID: LIB3061-079-01-K6-A2
gagcaacactaaggcagccggggaggcggccagcgaaacacgaaaacctcagatagtaatagtggcaaaaaggttgtgatctctgcgcctgctgccacaattaaacaaagtgagaaaacttcacttcctgacgctgttcaagctgctgcaaatgctgcactggctgcagaaaagagagaaaaggagaaggcaaaagagattaaattggcctcaaaaaatagtctcatagctaataagaagaagatgagcaatgtcctagctatgtggaagcaaaggaatcaagaagggcaggccgcacgaattgtccttgatgacaaagaaccagcaaattctgatgataaatttagtcattcacgtagtggaactggattctctttgaaaagcaagccaaattctgaccttgaaaatgctatgggcaattctcttggccaaggaatgacatcgactcaaacattggattctgttgtaaagcctagacctgtcagtaacagcttagggactacagttatgggtgtcataagaggttctgctagaggagtgatcaagtcagatactacgtttcacgcattatctgatgctggtagcactgattcccgcaccactataaccacaagagcaagtgggttaatgacaagttctgaggcacttataactnctgcacccttaaaactgatgtgtctgccttagtctctatact

SEQ ID NO: 11676 - DNA, 654 bp, Zea mays
  unsure (1)..(654): unsure at all n locations; Clone ID: LIB3061-079-01-K6-A3
gcgnnccgaaccancgcaacgcagcagcaacaagcacggagccaccnagccgnggngaacccnancgccnacnngcaacaacagcngcnngcanccaacccacnngcnnnggcaaacgnagcngcanaccaacaacaacaacagnngcaacagnnncngccagcgcncagncaacnagccanggngaaccctatcgcctacctacaacagcaacaacttctttcatctagcccgctcgctatgggcaatgcacctacatacctgcaacaacagttgttgcaacaacagttgctgcaacaaattgtaccagctcttactcagctagctgtggcaaaccctgctgcctacttgcaacaactacttccattcaaccaactgactgtgtcgaactctgctgcgtacctacaacagcgacaacagttacttaatccactagcggtggctaacccattggtcgctgccttcctacagcagcaacaattgctgccatacaaccagttctctttgatgaaccctgccttgtcgtggcagcaacccatcgttggtggtgccatcttttagattacatatgagatgtactcgataatggtgccctcatagcggcatgtgtttcctaaaaataataaatattgattgagatttatctcgatataa

SEQ ID NO: 11677 - DNA, 663 bp, Zea mays
  Clone ID: LIB3061-079-01-K6-A5
tttctccttgcgtcaattcgcggcggcgtacgtgtgcaggatagtgattaacataccaggaggaacagatgctactaaaggtgagttttttttaaaagaaagtgactcatgaattatataccaaatagcaaatttaagtgtatagtatgtatttatatatgcttgtcctcataaatatataaagaaaaaaagaaacgaccctcaaaactaatatagtatagtaatgtttcgtttcagttatagtatccggattaatgctctaatattatcacacaaattgaggtgataaaccaaggagatagatgaaaacacatgcatgtgtatatactatttcttattctcttaattccaacttattataaattatcctgacttttcgcattggttttgctttattaatataatatgtatctagatataatctatatgttagacataatgtatatatatctactaggtttgtatagcaaaagcaattatctagaatagctatcacgacttataatttgaaaatggaaggagtggtacatatataacttcttcacttttgttttactcaagctttctaaggagttagggcagcactaagaattatgtgaaatatatattgcttcattcgtcctaaatacatggtatatattaaaagttcaaattttcgcccta

SEQ ID NO: 11678 - DNA, 375 bp, Zea mays
  unsure (1)..(375): unsure at all n locations; Clone ID: LIB3061-079-01-K6-A6
ttgaactttggttnttatttggagcagcagcggcggccattcagccagctacctgctgcctacccccagcaatttcttccattcaaccaactggcagcattgaactctcctgcttatttacagcggcaacaactactaccattcagccagctagctggtgtgagccctgctaccttcttgatacaaccacagttggtgccgttctaccagcacgctgcgcctaacgctggcaccctcttacaactgcaacaattgctgccattcaaccaacttgctttgacaaacccagcagcgttctaccaacaacccatcattggtggtgccctctgtgagatttcttatgagttatagttcaataataaagttgcttgtctg

SEQ ID NO: 11679 - DNA, 624 bp, Zea mays
  Clone ID: LIB3061-079-01-K6-A7
attcggcccaactccaactcgtctcgctctcctcccccgaggccccgattatccaaaactaaccaaaatacggaatcttccccgtggatcccaactctcacccgatctcctcgataggtttttccgtttttgcctccaaggccgcgtcttccaacaagattcctcccctcctctctccgataacgctagcatccgccgccgccggcgacgaatccggtgttttgagtttctgttgccagtgcagccatgtccatgttcaacaggatcttcgggaagcccaaggagcaggccaactccagtgccttggccactctcgacaagttaaatgagactcttgatatgctggagaagaaagagaaggtgctggacaaaaaagcagccgctgagcttgagagagccaaggagttctccaaagctaagaataaaagagcggctatccaatccttgaagaggaaaaaactttatgaacaacaaattgagcaactcggaaattttcagttgagaattcatgatcagatgatcatgttagaagcagctaaagctacaacagagactgttgatgcgttgagaactggagctgcagctatgaaagcaatgcaaaaagcaacaaacattgatgatgtc

SEQ ID NO: 11680 - DNA, 623 bp, Zea mays
  unsure (1)..(623): unsure at all n locations; Clone ID: LIB3061-079-01-K6-A8
tctcagnttttgaaatgatatcctaggaaagttaaagtgtgtgcattccatggcttgtcggtctttgacacgtgtggagtcggaccctcgcttcgtggaagcttgctgcagcccggtagtactatttgattgggaactttntagggtcatatccctgttttgttcccatgccttgaaattgatggtncttcatttttgttgggtgtgtgacacaaagtcataaaccgcgatgggagggtgctttaagttgtgcgagcatgattgtcgggtctttgaatttcttcttccaaatgtncgtcttcacgcccaccgcggaggggtggtgaccgaagagatagtggcaaaggcgtcccttgtgggctctgctcctatctcgcggattgggctgacatgttactaaggatgtatgtaagatggggagagaagcagcgttataagacacgagtagttgagaaatcacctggtgaacaggccggtgtaaaatcagcaactgttgaactagaggggagatatgcttatggctatctctctggcgagaaagggacacacaggattgttcgtcaatcaccatttaatgctaaagggcttcggcagacaagctctgctcgtgttgaggttatgcc

SEQ ID NO: 11681 - DNA, 689 bp, Zea mays
  unsure (1)..(689): unsure at all n locations; Clone ID: LIB3061-079-01-K6-A9
gaccaactagcaacatagnaaagcacaatagtgtaccaacaatggcagccaaaatattttgcctccttatgctccttggtctttctgcaagtgctgctacggcgaccattttcccgcaatgctcgcaagctcctatagcttcccttcttcccccgtacctctcaccagcggtgtcttcggtatgtgaaaacccaattcttcaaccctacaggatccaacaggcaatcacagctggcatcttacctttatcacccttgttcctccaacaatcatcagccctattacatcagttacctttggtgcatttattggcacaaaacatcagggcacaacaactacaacaacttgtgctagcaaaccttgctgcctactctcagcaacagcagtttcttccattcaaccaactagctgcattgaactctgcttcttatttgcaacaacaacaactaccattcagccagctacctgctgcctacccccagcaatttcttccattcaaccaactggcagcattgaactctcctgcttatttacagcagcaacaactactaccattcagccagctagctggtgtgagccctgctaccttcttgatacaaccacagttgttgccgttctaccagcacgctgcgcctaaacgctgcaccctcttacactgcaacattgctgccattcaccaacttgctttg

SEQ ID NO: 11682 - DNA, 626 bp, Zea mays
  unsure (1)..(626): unsure at all n locations; Clone ID: LIB3061-079-01-K6-B1
accaaggccaaggagcacagcaccccgnccgnccccagcaggagagcgagagacagaaggctgngcgaagggaaagaagagacggngggagaggagggcgacatggagaggccggcaccggtgaggaagtctcacacgtcgacggcggacctgctgatctggccggagggggcgccgcaggagtcgcccgccggggccacgccgccatccaaccgccggccgcatcagccgtcggaggcgctcaggaaggtggtgttcggcgggcaggtgacggaggaggaggccgagagcctcaacaagaggaaaccatgctctgctcccaagtggaaggagatgacaggaagcggcatatttgctgctgggggcgaggctgaagaagatgaatctgccaatgcctctgcaactcccatccgaaccgctccaaagaattatcaggcaattagcactataagccacatctcattttccgaggaagaaagcatttctccgaagaagccgacttcgatagcagaggtggcgaagcagcgcgagctgagcggcacacttctgagcgagnacgacagcaagatgaagaagcagatatcggacctgaaatccaagnagctgnagcgccacgacatctttgc

SEQ ID NO: 11683 - DNA, 597 bp, Zea mays
  unsure (1)..(597): unsure at all n locations; Clone ID: LIB3061-079-01-K6-B10
ngagattctgatggtttccttcagcctcatgaaatggaagcatatattagaggactcatccccaatttggcgcaattgcgcgatatgcccactgcatttgttcagatgtactgccgcatagctgcacgcaagttctttttcttctgtgatccacacagacgggggaaagcatgcataaagaaagtgttgctgagcaattgtcttcaggagctaatggaactacatcaggagagtgaggaagaggtaaccgataccgagcaggcagaaaactggttttccttaacttcagctcagcgcatatgtgacatgtttcttgcactagataaggatacgaacggtacactgagcaaacaagagctcaaggaatatgcagatggcacgttgactgagattttcattgaaagagttttcgatgagcatgttcgccggagcaaagttggaggtggaaacagtcgtgagatggactttgaaagctttcttgattttgttttggctctagaaaacaaagatacccctgaaggcttgacatatttatttaggtgccttgatctcaatggaaggggtttccttacaactgcagatattcatactctattt

SEQ ID NO: 11684 - DNA, 646 bp, Zea mays
  Clone ID: LIB3061-079-01-K6-B11
ccgcatttccaaacagcccgagcgagctagagctagcagagcggcaggcacctccctcctcaaggaacatggcccgcacgcagcagttggcagtagtggcgaccgccgtggtggccttggtgctgctggcggcggcggcgacctcggaggcggccatcagctgcgggcaggtggcgtcggccatcgcgccctgcatctcctacgcgcgcggccagggctcggggccctccgccggctgctgcagcggcgtcaggagcctcaacaacgccgcccgcaccaccgccgaccgccgcgccgcctgcaactgcctcaagaacgccgccgccggcgtcagcggcctcaacgccggcaacgccgccagcatcccctccaagtgcggcgtcagcatcccctacaccatcagcacctccaccgactgctccagggtgaactgaaccctaaacgacgacgacgggcgacggcggccacctgaagacgatccatatctatcccgccgtacgtcggcgcccgcggatcggaccgtcatgaccatatctagctacctacgcatgatcgtcacgacttgcatgtctactactgctacgtgtactactactgaataaaaaccctctccgcgcacgtcgtccttgtgtttgtgtgtgtgttg

SEQ ID NO: 11685 - DNA, 556 bp, Zea mays
  unsure (1)..(556): unsure at all n locations; Clone ID: LIB3061-079-01-K6-B3
cgcccggcgnnccgcccggcggngccgggcgcgncgccgcccccgccggccgccccggccgccggccccgccgcggcncgcccccgngggcggcgcgcggggcggcgcgggngggncggcgcggggcggggcgccgccggngccgccgcggcggcggccgagcccgaccggccgcgccggcggcgccgcggactccagcgagggcacctacagggccggcacagggggccagacgcgcaccgctgggcgatggggnggacttggcggcaacgtccggaagctcgatcttggcgacgctgaatacgtcaaggaagtttctgaaacgtacggcgcattcgaaagtgcgactacccttacctcgtacaggattgtcaccagcaccgccagagcttgggggccatggggcatcaagagcggcacacgtttctgcatgaccgcgcccatcggcagcagcatcgtggaattctatggacgcgcgaagaccaggctcgacactgcgatcggtgtctatctgcgccaactttaaactggttacaccaagcagaacgggtactac

SEQ ID NO: 11686 - DNA, 735 bp, Zea mays
  unsure (1)..(735): unsure at all n locations; Clone ID: LIB3061-079-01-K6-B4
accggtccggccctnccgggtttnagcattcaaaaacacaccaagcgaagcgcactagcaacgacctaacaccaatggctaccaagatattagccctccttgcgcttcttgcccttttagtgagcgcaacaaatgcgttcattattccacagtgctcacttgctcctagtgccattattccacagttcctcccaccagttacttcaatgggcttcgaacatccagccgtgcaagcctacaggctacaactagcgcttgcggcgagcgccttacaacaaccaattgcccaattgcaacaacaatccttggcacatctaaccctacaaaccattgcaacgcaacaacaacaacaacaacagtttctgccatcactgagccacctagccgtggtgaaccctgtcacctacttgcaacagcagctgcttgcatccaacccacttgctctggcgaacgtagctgcataccagcaacaacaacagctgcaacagtttatgccagtgctcagtcaactagccatggtgaaccctgccgtctacctacaactactttcatctagcccgctcgcggtgggcaatgcacctacgtacctacaacaacagttgctgcaacaaattgtaccagctctgactcagctagctgtggcaaaccctgctgcctacttacaacagttgcttccattcaaccaactggctgtgtcaaactctgctgcgtacctacacagcgacacagttactt

SEQ ID NO: 11687 - DNA, 632 bp, Zea mays
  unsure (1)..(632): unsure at all n locations; Clone ID: LIB3061-079-01-K6-B5
cagctgcagcaactcgtgctacctgtgatcaaccaagtagctctggcaaacctttctccctactctcagcaacaacaatttcttccattcaaccaactgtctacactgaaccctgctgcttatttgcagcaacaactattaccatttagccagctagctactgcctactctcagcaacaacaacttcttccatttaaccaattggccgcactgaaccccgctgcttatttgcagcagcaaatactactgccatttagcgagctagctgcagcaagtcgtgcttccttcttgacacagcaacagttgctgcctttctacaagcagtttgcggctaaccccgcaaccctcttacaactacaacaattgttgccctttgtccaacttgctttgacaaacccagcagcctcctaccaacaacacatcattnggtggtgccctcttttagattgattattagttgtaattcaataataaagttttttggatgatgtatgtggccaaccagaaataagaagttacatttccagattctaatgtgatattggtctccaaaggtgttcgataattacttttcctaaattngngagtaacaagctntaaatatccttnacagtgtgataaccgattcatga

SEQ ID NO: 11688 - DNA, 618 bp, Zea mays
  unsure (1)..(618): unsure at all n locations; Clone ID: LIB3061-079-01-K6-B6
ccacttccgagcacacgaggaagctgttaaccagcgccgccacttccaccgagtccctcgtggcgcttgagccgctgtctctccccccgctgtcgaggctcgcgccggctagagtccacgctcccccccccccnacccncccaaaaataggttccttccccaagaacctaaaggaagggggttaccggggcttcgggaggaactccacacccaaccggaattctcggaaaacgaagcccgatcccgatccaccctctttgccttattcgagcttctggggctcgcagataaaggggccgaccgggtcgctggagccctcctaccacgaggccctgtggcccgatgaagaggccggcgtcgacccggcggaagccgcgcccgcggaagcggacgatggcatcgaagtctgctgcttcgacaatcgcggggtcggccacagcttcgtgctccccaacaaattctactacttgacggcaattatggggaccgatgccttggccttgatggatcatttgggggggaaaaaagctcacgtttttcgccactccatgggtgccatgattgcttgcaagctagatgtgatggcacctcacaagctatgttcgctggcattgctta

SEQ ID NO: 11689 - DNA, 654 bp, Zea mays
  unsure (1)..(654): unsure at all n locations; Clone ID: LIB3061-079-01-K6-B7
gagcattcagaaaacacaccaagcgaacgcactagcaacaacctaacaacaatggctaccaagatattatccctccttgcgcttcttgcgctttttgcgagcgcaacaaatgcgtccattattccacaatgctcacttgctcctagttccattattccacagttcctcccaccagttacttcaatggccttcgaacacccagctgtgcaagcctataggctacaacaagcgattgcggcgagcgtcttacaacaaccaattgcccaattgcaacaacaatccttggcacatctaacaatacaaaccatcgcaacgcaacagcaacaacagttcctaccagcactgagccacctagccatggtgaaccctgtcgcctacttgcaacagcagctgcttgcatccaacccacttgctctagcaaacgtagttgcaaaccagcaacaacaacaactgcaacagtttctgccagcgcttagtcaactagccatggtgaaccctgccgcctacctacaacagcaacaactgctttcatctagcccgctcgctgtggccaatgcacctacatacctgcaacaagnaaattgttgcaacagattgtaccagctctaactcagctagctgtggcaaaacctgttgcctacttgcacagctgct

SEQ ID NO: 11690 - DNA, 601 bp, Zea mays
  unsure (1)..(601): unsure at all n locations; Clone ID: LIB3061-079-01-K6-B8
ccaacaagcaacatagaaagtggnaatccagtagcaacaatagagcaacaatggcgaccaagnaattttccctccttatgctccttgctctttctacatgtgttgctaacgcgacaattttccctcaatgctcacaagctcctatagcttcccttcttcccccataccttccatcaattatagcttcaatatgtgaaaacccagctcttcaaccatataggcttcaacaagcaatcgcagcaagcaacatacctttatcgcccttgttgtttcaacaatcgccagccctatctttggtgcagtcattggtacaaaccatcagggcacaacagctgcagcaactcgtgctacctctgatcaaccaagtagctctggcaaacctttctccctactctcagcaacaacaatttcttccattcaaccaactgtctacactgaaccctgctgcttatttgcagcaacaactattaccatttagccagctagctactgcctactctcagcaacaacaacttcttccatttaaccaattggccgcactgaaccccgctgcttatttgcagcagcaaatactactaccatttagccagctagctgcagc

SEQ ID NO: 11691 - DNA, 678 bp, Zea mays
  unsure (1)..(678): unsure at all n locations; Clone ID: LIB3061-079-01-K6-B9
ctcttctcaccggtgtcgcatccggcatagctttccgtctcgcggcatggagacctgtgcagctcctaatgacctcaaaaatgggtctcttcaccaccctcttcctcctcatcggaggttccctggcctaccacgccgccacatcaagcatcctccggttgttcaatcgcaaaaggtcttccgtgaacgtgatcgcgtcatcctccggcctctctctcagtgccctcacagtgcagtcccttcttgcctgtggcgccgtattccttcacgcatatgctgaagggcttgcgctcggtgtcgcggctcgcaaggcctatggcctcggccgctacatggttctcccagcctccctccacggtcttccacgtggcgctgccgcggcgagctgcgtgtatggtgccacagatagctggcgtggagcccttgccgctgccgctttgacagggctcgcagcgccgagcgccgccatcagtgcaatccttgcgaagatcgactatgatgggcttgactactggatggtcatagcgtgcggggctctgatccccagctttggccgcgtcttcaggcgctcactgcggttggacgtgcggaagagcgtcgttggcctgctggtaggtgttgccttcgcctncgtgtgcttgatgtcgactagattcatctgtctgcacactccttact

SEQ ID NO: 11692 - DNA, 342 bp, Zea mays
  unsure (1)..(342): unsure at all n locations; Clone ID: LIB3061-079-01-K6-C1
ngaaaaaaaaaaaataaaaaaaaaaaaaaaaaaaaaaaaaaaaaaaaaaccaaaaaaaaaaaaaaaaaaaaaaaaaaaaaaaaaaaaaaaatttnaaaaaaaaaaaaaaaaaaaaaaaaaattttaaaaaaaaaaaaaaaaaaaaaaaaaaaaaaaaaaaaaaaaaaaaaaaaaaggggggggccggttttgggggtcccaggtttcctccccggggttggcacggttttgctttttttttggggcccccaaattaaatttccggggcggggttttccaaccgcggggcggggaaaacccgggggttccccaattttatggccttgggggaaatcccccttt

SEQ ID NO: 11693 - DNA, 518 bp, Zea mays
  Clone ID: LIB3061-079-01-K6-C10
ctcattgcgatgctatcagtcagcaaatcagaacattcatccagatgaggactaacctgaaggtggtcgataactccggggccaagcgggtgatgtgcatccagtccctgagggggaagaaaggagcaaggctcggggacatgatcatcggatccgtaaaggaggcccagcctcgtggcaaggtcaagaaaggagacgtagtctacggcgtggtcgtccgtgccgccatgaagaaaggacgcagcgatggcagcgaggtccagttcgacgacaacgcggtggtcctcgtgaacaagaagggcgagctgatcggcacccgcgtctttggccccgtcccccacgagctgaggaagaagaagcacctcaagatcctggccctggctgaacacattgtttgaggtgtgtcgcatagccaagtgtttgtgggaatgtttttttttgtgtgttctctgtttgaataatgcattgtgaaacgatagcatggaccgtttgaactattttgatgacattgctcgtcc

SEQ ID NO: 11694 - DNA, 660 bp, Zea mays
  unsure (1)..(660): unsure at all n locations; Clone ID: LIB3061-079-01-K6-C11
ttcgccgccgctccagcntcccttgcagccccaatcccccacggcgaccatggccggcgcgcaggagtccctctccctggtgggcacgatgcgcggccataacggcgaggtgacggcgatcgcgaccccgatcgacaactcgcctttcatcgtctcctcctcccgggacaagtccgtgctggtgtgggacctgaccaacccggtccactccaccccggaatccggcgtcaccgccgactacggcgtccccttccgccgcctcaccggccactcccacttcgtccaggacgtcgtccttagttccgacggccagttcgcactctctggctcctgggacggcgagctccgcctttgggacctctccaccggcctcaccacccgccgcttcgtcggccacgagaaggacgtcatctccgtcgccttctccgtcgacaaccgtcagatcgtctccgcgtcccgcgacaagaccatcaagctctggaacactctcggcgagtgcaagtacaccatcggcggcgacctcggcggcggcgagggccacaacgggtgggtctcctgcgttaggttctccccaaacaccttccagcccaccattgtctccggatcctgngaccgttccgtcaaggtttggaccttaccaactgcaagctgcgctggact

SEQ ID NO: 11695 - DNA, 724 bp, Zea mays
  Clone ID: LIB3061-079-01-K6-C12
cgggctccggggttcggtttcgtgggtgagcggatcgagatggcggcgtcggatgttgagtaccgctgcttcgtcggcggcctcgcctgggccacggacgaccactccctccacaacgccttcagcacctacggcgaggtcctcgagtccaagatcatcctcgatcgggagacgcagaggtcccgcggcttcggcttcgtcaccttctccacggaggaggcgatgcggaacgccatcgagggcatgaacggcaaggagctggacggccgcaacatcaccgtcaacgaggcccagtcccgcggcggccgtggaggcggcggcggcggcgggtacggtggtggccgtggaggcggcggctacggcggtggcgggcgccgtgatggcggcggcggctacggcggtggcggcggctacggtggtggcggcggcggctacggtggtggtggcggcggctacggcggtggcaaccgtggcggcggctacggcaactccgacgggaactggaggaactgagcggtggggcccgcgcggccaagttatcctgttcgctaccgtgttgtttaccctagtccagagtgtttatcttcgttcgtctcgtgtttgttgttgcccatctgtgtttttgattgaaggtcgctctgtgtcagttgttagtgctgtgttcatcctcggctccagcagacccatgcatcaaccagcatggactgcggatcgatgggtgctg

SEQ ID NO: 11696 - DNA, 678 bp, Zea mays
  unsure (1)..(678): unsure at all n locations; Clone ID: LIB3061-079-01-K6-C3
accaactagcaacatagnaagcacaatagtgtaccaacaatggcagccaaaatttttgcttccttatgctccttggtctttctgcaagtgctgctaccganaccattttcccacaatgctcacaagctcctatagcttcctttcttcccccatacctctcaccagcggtgtcttcagtatgtgaaaacccaattcttcaaccctacaggatccaacaggcaatcgcagcaggcatcttacctttatcacccttgttcctccaacaaccgtcagccctattacagcagttacctttggtgcatttgttggcacaaaacatcaaggcacaacaactacaacaacttgtgctaggaaaccttgctgcctactctcagcaacagcagtttcttccattcaaccaactggctgcattgaactctgctgcttatttgcaacaacaactaccattcagtcagctagctgctgcctacccccagcaatttcttccattcaaccaactggcagcattgaactctgctgcttatttacaacagcaacagctaccaccattcagccagctagctgatgtgagccctgttgccttcttgcacaacaacagttgttgccgttctacctgcacgctgcgcctaacgctggcaccctcttacactgcacaattgctgccattcaacaacttgc

SEQ ID NO: 11697 - DNA, 500 bp, Zea mays
  Clone ID: LIB3061-079-01-K6-C5
ctgcttacctccagcaacaacaattgctgccattcaaccaacttgctttgacaaactcaacagtgttctaccaacaacccatcattggtggtgccctcttttagattgcttatgagttatagttcaataatgaagttttttggatgatgtttgtggcgtcccagaaataagaaagtacatttctaaaaaaaaaaaacaaaaaaaaaaaaaaaaaaaaaaaaaaaaaaaaaaaaaaaaggaaaaaaaaaaaataaaaaacaacaaaacacaaaaaaacacacacaaaaactacttaagaacaagacaacttgaaaaaaaatatacccggcggggcgggctgcatcatactcaatgcgtctagtccccgaccgcagacccttaaacgttctttgtgtgcaccacctaaaaccataacctggtgtgtataaaaaaaagagacacgtgaaaacctcccttcttccccaaatactgcatgtccaacacaaccccccttattgcgc

SEQ ID NO: 11698 - DNA, 526 bp, Zea mays
  unsure (1)..(526): unsure at all n locations; Clone ID: LIB3061-079-01-K6-C6
caacaatcatcacccctattacatcagttacctttggtgcatttattggcacaaaacatcagggcacaacaactacaacaacttgtgctagcaaaccttgctgcctactctcagcaacagcagtttcttccattcaaccaactagctgcattgaactctgcttcttatttgcaacaacaacaactaccattcagccagctacctgctgcctacccccagcaatttcttccattcaaccaactggcagcattgaactctcctgcttatttacagcagcaacaactactaccattcagccagctagctggtgtgagccctgctaccttcttgatacaaccacagttgttgccgttctaccagcacgctgcgcctaacgctggcaccctcttacaactgcaacaattgctgccattcaaccaacttgctttgacaaacccagcagcgttctaccaacaacccatcattnggtggtgccctcttttagatttcttatgagttatagttcaataataaagttttttgtctg

SEQ ID NO: 11699 - DNA, 603 bp, Zea mays
  Clone ID: LIB3061-079-01-K6-C7
caccaagctgagcgcactaactaccacctaacaacaatcgctgccaacctattaaccctccttgcgctcgctgcccttcctgtgagcgcaccaaacgcgtgcattattccacacagatcacttgctcctagcgccatccttccacagacactcccaccagttacttcaatgggctggcaacacccacctgtgcaagccagcctgcaacacccagcgctcgcggggagcgtgcgacaacaaccaaccgcccaatcgcaacaacaatccttgccacatctaacaatacatgccatcacaacgcaccagccacaacagtccctaccatcaatgacccacctaaccatggtgaaccctgccgtctacttgcaagagcaagtgcttgcatgcaacccacttgctctggcgaacgtacttgcaaaccagccacaaccacagctacaacagtcactgccaacgctcactcaactaaccatggagaaccatgcctgctacgtacaacaacaacaactgatttcatctatcccgctcgctgtgggcaatgcacctacatacctgcatcaacaatcggtgcaacagactgtaccagctctgactcaactagct

SEQ ID NO: 11700 - DNA, 625 bp, Zea mays
  Clone ID: LIB3061-079-01-K6-C8
cgggttctcagataagaatgaatcatagaaagttaatgtgtgcatccatggttgtggtcttgacacggtggagcggacctcgctcgggaagctgctgcagccggtagactattgattggaacttttaggtcaatccctgttttgttcccatgcttgaaattgatggtcttcattttgttggttgtgacaaaagtcaaaaccggatggaggtgtttagttgtggagcagattgcgggttttgaatttcttttccaaatgtcgtcttcacgcccaccgcggaggggtggtgaccgaagagatagtggcaaaggcgtcccttgtgggctctgctcctatctcgcggattgggctgacatgttactaaggatgtatgtaagatggggagagaagcagcgttataagacacgagtagttgagaaatcacctggtgaacaggccggtataaaatcagcaactgttgaactagaggggagatatgcttatggctatctctctggcgagaaagggacacacaggattgttcgtcaatcaccatttaatgctaaagggcttcggcagacaagctttgctggtgttgaggttatgcctcttctaccagaggaaccatggctgtggacatacctga

SEQ ID NO: 11701 - DNA, 650 bp, Zea mays
  Clone ID: LIB3061-079-01-K6-C9
tggactgcttgctccctgttgaccattgggtattctgaaccatcgagccatggctgccaagctgactcgcctccacagtcttcgcgaacgccttggtgccaccttctcctcccatcccaatgaactgatagcactcttttccaggtatgttcaccagggcaagggaatgcttcagcgccatcagctgcttgcggagtttgatgccctgtttgatagtgacaaggagaagtatgcaccctttgaagacattcttcgtgctgctcaggaagcaattgtgctccccccatgggttgcacttgctatcaggccaaggcctggtgtctgggattacattcgggtgaatgtaagtgagctggctgtggaggagctgagtgtttctgagtacttggcattcaaggaacagctggtggatggacaatccaacagcaactttgtgcttgagcttgattttgagcccttcaatgcctcctttcctcgtccttccatgtcgaagtccatcggaaatggagtgcaattccttaaccgacacctgtcgtccaagttgttccaggacaaggagagtttgtaccccttgctgaacttcctcaaggctcataactacaagggcacgacgatgatgttgaatgacagaatccaaagccttcgtggtc

SEQ ID NO: 11702 - DNA, 615 bp, Zea mays
  Clone ID: LIB3061-079-01-K6-D1
cagatgccctgcccctgcgcggggctgcagggcttgtacggcgctggcgccggcctgacgacgatgatgggcgccggcgggctgtacccctacgcggagtacctgaggcagccgcagtgcagcccgctggcggcggcgccctactacgccgggtgtgggcagccgagcgccatgttccagccgctccggcaacagtgctgccagcagcagatgaggatgatggacgtgcagtccgtcgcgcagcagctgcagatgatgatgcagcttgagcgtgccgctgccgccagcagcagcctgtacgagccagctctgatgcagcagcagcagcagctgctggcagcccagggtctcaaccccatggccatgatgatggcgcagaacatgccggccatgggtggactctaccagtaccagctgcccagctaccgcaccaacccctgtggcgtctccgctgccattccgccctactactgattcatgatatttgggaaatctcctctatccatctctctctatctatatatgtaataatgcagtaagacgacacacattatcatgtgtggtatgaccaataatatatgcatggtcataataaagttttggttttaatgaatc

SEQ ID NO: 11703 - DNA, 609 bp, Zea mays
  Clone ID: LIB3061-079-01-K6-D11
ctttcgggataatgagagtagtgtcttgagagatttgtcctccatgcgacgattagttgttgccaccggaggtggtgctgttatccgaccaattaactggagatatatgaagaggggcctatctgtttggttagatgtgcccttggatgctcttgctaggcgtattgctaaagtgggaactgcctctcgtcctcttctggaccaaccatctggtgatccgtacgcaatggccttttctaagctcagcatgcttgcacagcaaaggggtgatgcttatgcaaatgcagatgtaagggtttctctggaagagattgcatgtaaacaaggtcatgatgatgtctctaagctgacacctactgatattgcaattgagtcacttcataagatcgagagcttcgtcatcgagcacactgctgatagttcagctagcgacgcgcaagctgagtcgcagatccagaggatacagaccttgtagaaccttaatccctttgtttgccacatagagcatcgttgagttatttgtaaaggaatggaagaagggagctaataatccgaatgtgccgttggctgaaaatcgcctgtcttcatcctggctctgcttctgttcgc

SEQ ID NO: 11704 - DNA, 677 bp, Zea mays
  unsure (1)..(677): unsure at all n locations; Clone ID: LIB3061-079-01-K6-D3
gtttcttgccgacacgagcggcgggaactccgacgagcttgccgtggaggttctctgcccggtgttccgcccggcggcgtttggctcatcgtcgtcacagccagcagcaaaggacatcagctccaccgtcgtcgtcaccaaggtcggagtgtggggtggagagggagggtcggcgcaggacatcgcgacgacggagccgccgaggcgtctgcagagcctgaccgtccgcgccggcgttgccgtggactccatcgagttcacctacagtaccgacacaggtggtcagacgcgcaccgctgggcgatggggtggacttggcggcaacgtccggaagctcgatcttggcgacgctgaatacgtcaaggaagtttctggaacgtacggcgcattcgaaggtgcgactacccttacctcgttcaggattgtcaccagcaccgccagagcttgggggccatggggcatcgagagcggcacacgtttctgcatcaccgcgcccatcggcagcagcatcgtgggattctatggacgcgcgacgaccaggctcgtcgctgcgatcggtgtctacctgcgccaactntagtctggtttcagcagcaggacgggtactacagatatgctagataaaggtcttatatatgtcatatgacctatcatggtcttatatgttcgatcgtcgt

SEQ ID NO: 11705 - DNA, 648 bp, Zea mays
  Clone ID: LIB3061-079-01-K6-D5
atcagtaccatcaatcatcattcatcttagtagtataggcaccaaatcaaatctgcaacatcaattatctaactccaaaaaccatgaagctggtgcttgtggttcttgctttcattgctttagtatcaagtgtttcttgtacacagacaggcggctgcagctgtggtcaacaacaaagccatgagcagcaacatcatccacaacaacatcatccacaaaaacaacaacatcaaccaccaccacaacatcaccagcagcagcaacaccaacaacaacaagttcacatgcaaccacaaaaacatcagcaacaacaagaagttcatgttcaacaacaacaacaacaaccgcagcaccaacaacaacaacaacaacaacagcaccaacaacaacatcaatgtgaaggccaacaacaacatcaccaacaatcacaaggccatgtgcaacaacacgaacagagccatgagcaacaccaaggacagagccatgagcaacaacatcaacaacaattccagggtcatgacaagcagcaacaaccacaacagcctcagcaatatcagcagggccaggaaaaatacaacagcaacaatgtcattgccaggagcagcaacagactacaaggtgcagctataactactatagcagtagctc

SEQ ID NO: 11706 - DNA, 688 bp, Zea mays
  Clone ID: LIB3061-079-01-K6-D6
ccaacaagcaacatagaaagtggaatccagtagcaacaacagagcaacaatggcgaccaagatattttccctccttatgctccttgctctttctgcatgtgttgctaacgcgacaattttccctcaatgctcacaagctcctatagcttcccttcttcccccataccttccatcaatgatagcttcagtatgtgaaaacccagctcttcagccctataggctccaacaagcaatcgcagcaagcaacatacctttatcacccttgttgtttcaacaatcgccagccctatctttggtgcagtcattggtacaaaccatcagggcacagcagctgcagcaactcgtgctacctgtgatcaaccaagtagctctggcaaacctttctccctactctcagcaacaacaatttcttccattcaaccaactgtctacactgaaccctgctgcttatttgcagcaacaactattaccattcagccagctagctactgcctactctcagcaacaacaacttcttccatttaaccaattggccgcactgaaccccgctgcttatttgcagcagcaaatactactaccatttagccagctagctgcagcaaaccgtgcttccttcttgcacagcaacagttgctgcctttctaccagcagtttgcggctaaccccgcaaccctcttacactacaaca

SEQ ID NO: 11707 - DNA, 139 bp, Zea mays
  Clone ID: LIB3061-079-01-K6-D7
tccagcggtgtcttcagtatgtggaaaacccaattcttcaaccctacaggatccaacaggtaagatgcctgctgcgattgcctgttggatcctgtagggttgaagaattgggttttcacctactgaagacaccgctggt

SEQ ID NO: 11708 - DNA, 533 bp, Zea mays
  unsure (1)..(533): unsure at all n locations; Clone ID: LIB3061-079-01-K6-D8
gcaagnagctggacggccgcaacatcaccgtcaacgaggcccagtcccgcggcggccgtggaggcggcggcggcggctacggtggtggccgtggaggcggcggctacggcggtggcgggcgccgtgatggcggcggcggctacggcggtggcggcggcggctacggtggcggcggtggctacggtggtggtggtggcggctacggcggtggcaaccgtggcggcggctacggcaactccgacgggaactggaggaactgagcggtggggcccgcgcggccaagttatcctgttcgctaccgtgatgtttaccctagtccagagggtttatcttcgttcgtctcgtttgttgttgcccatctgtgtttttgattgcaaggtcgctctgtgtcagttgttagtgctgtgttcatcctcggctccagcagacccatgcatcaaccagcatggactgtggatcgatggatgctgttactcctgtcaggatttgttctaagttaatcctaaggaaaaaatggtgcttcttggtgctgc

SEQ ID NO: 11709 - DNA, 672 bp, Zea mays
  unsure (1)..(672): unsure at all n locations; Clone ID: LIB3061-079-01-K6-D9
acttcaatgagtattttggctttgccaccgatgtagatgcagtggtttacttgatgctggtaaatgatctaattcatggactttatcctgaggctgtaaccattggtgaagatgttagtggaatgcctacatttgcccttcctgttcacgatggtggggtaggttttgactatcggatgcatatggctgtggctgacaaatggattgaccttctcaagcaaagtgatgaaacttggaagatgggtgatattgtgcacacactgacaaataggaggtggttagagaagtgtgtaacttatgctgaaagtcatgatcaagcattagtcggcgacaagactattgcgttttggttgatggacaaggatatgtatgatttcatggccctcgatagaccttcaactcctaccattgatcgtgggatagcattacataagatgattagacttatcacaatgggtttaggaggagagggctatcttaatttcatgggaaatgagtttggacatcctgaatggatagattttccaagaggtccgcaaagacttccaagtggtaagtttattccagggaataacaacagttatgacaaatgtcgtcgaagatttgacctgngtgatgcagactatcttaggtatcatggtatgcaagagtttgatcaggcaatgcaacatc

SEQ ID NO: 11710 - DNA, 505 bp, Zea mays
  Clone ID: LIB3061-079-01-K6-E1
gcacaacacctacaacaacttgtgctaggaaaccttgctgcctactctcagcaacagcagttccttccattcaaccaactggctgccttgaactctgctgcttgtttgcaacaacaactgccattcagccagctagctgctgcctacccccagcagttgcttccattcaaccaactggcagcattgaactctgctgcttatttacaacagcaacagctgccaccattcagccagctagctgatgtgagccctgttgccttcttgacacaacaacagttgttgccgttctacctgcacgctgcgcctaacgctggcaccctcttacaactgcaacaattgctgccattcaaccaacttgctttgacaaacccaacagcgttctaccaacaacccatcattggtggtgccctcttttagattgcttatgagttatacttcaataatgaagttttttggatgatgtttgaggcttcccagaaataagaaagtacatttctagattctt

SEQ ID NO: 11711 - DNA, 709 bp, Zea mays
  Clone ID: LIB3061-079-01-K6-E10
gcattcagaaacacaccaagcgaagcgcactagcaacgacctaacaacaatggctaccaagatattagccctccttgcgcttcttgccctttttgtgagcgcaacaaatgcgttcattattccacaatgctcacttgctcctagtgccattattccacagttcctcccaccagttacttcaatgggcttcgaacacctagctgtgcaagccaacatgcaacaacaagcgcttgcggcgagcgtcttacaacaaccaattgcccaattgcaacaacaatccttgccacatctaacaatacaagccatcacaacgcaacagcaacaacagttcctaccagcactgagccacctagccatggtgaaccctgccgcctacttgcaagagcagctgcttgcatccaacccacttgctctggcgaacgtagttgcaaaccagcaacaacaacagctacaacagtttctgccaacgctcagtcaactagccatggtgaaccctgccgcctacgtacaacaacaacaactgctttcatctagcccgctcgctgtgggcaatgcacctacatacctgcaacaacaattgttgcaacagattgtaccagctctgactcaactagctgtggcaaaccctgttgcctacttgcaacagctgcttccattcaaccaactgactctgtcgaactctgctgcgtacctacaacagcgacaacag

SEQ ID NO: 11712 - DNA, 661 bp, Zea mays
  unsure (1)..(661): unsure at all n locations; Clone ID: LIB3061-079-01-K6-E11
cgcgccgccgccacagcaacccttgcagccccaatcccccacggcgaccatggccggcgcgcaggagtccctctccctggtgggcacgatgcgcggccataacggcgaggtgacggcgatcgcgaccccgatcgacaactcgcctttcatcgtctcctcctcccgggacaagtccgtgctggtgtgggacctgaccaacccggtccactccaccccggaatccggcgtcaccgccgactacggcgtccccttccgccgcctcaccggccactcccacttcgtccaggacgtcgtccttagttccgacggccagttcgcactctctggctcctgggacggcgagctccgcctttgggacctctccaccggcctcaccacccgccgcttcgtcggccacgagaaggacgtcatctccgtcgccttctccgtcgacaaccgccagatcgtctccgcgtcccgcgacaagaccatcaagctctggaacactctcggcgagtgcaagtacaccatcggcggcgacctcggcggcggcgaagggccacaacgggtgggtctcctgcgttaggttctccccaaacaccttccagcccaccattgtctnncggatcctgngaccgcaccgtcaaggtctggaaccttaccactgcagctgcgctgactc

SEQ ID NO: 11713 - DNA, 701 bp, Zea mays
  unsure (1)..(701): unsure at all n locations; Clone ID: LIB3061-079-01-K6-E2
aagccttcantgctcaagattttagggagcatgtcagcaagacgtccatcttggatgacttcgccttctatgagagtcgccagaagctgatgcaggataagaggtcgaaacagcagcaggtccaaaagcaggtctgggacagtaggacccccatttctgtcactggaagcgagcaacagcaggaagctgctaatgggaagcccaatccgtctgtaccaaacggtgtccctgcagaggtgaaggcggcgaaggcttctgcagagaacggcaccgtcactccagctatttcctacgcggcaaaggtggcccaagcagcaacagagaaacctgtgctcgccaacggagacgctaagaccggttagctggaccgcccaaccgatgctccatagctagccgcgagcgacggtcgacgtccccaagagctcgaccgaatcgctgtacaagggaactggtgaccaaccaaggcaggctgtggaactgggcaggcatggcgccctagagcgttgcggctccatctcgtcgctgctggagagcagctggctagctgttagcgttttccctagtttctctctctctctctgtcgctgtgttccccgtttcagtttacttatagcccgaagattttctgtagtattggaatgccagagacctttnngccgacaagagaatttgcgaagccgtctgctgggtgtgttgcgtcg

SEQ ID NO: 11714 - DNA, 664 bp, Zea mays
  unsure (1)..(664): unsure at all n locations; Clone ID: LIB3061-079-01-K6-E3
nncgtccgtaaaaatcaatgaccatagcagcagaagcggcgaaacttccaccccaccttcacctccttgcttatatatactcgccccgccgccccggggccggctcccacctcgctccagtctagacggcggtttgactttccgaccggggaatcggcgctgcgtttgatttgaggaggcgacacgagacgggacgggagggatctcttcgctggagcgttgcccgattcgtcgcggttctcggacaagggagggagggcacacctcgggctccgatcgaagagctttgttaacattagagattaaaaggtagcgccgtagcaaaatgaaggcaccatcactactggttcagtgtttccctggcttgcttcccagcaaggccactagttgcgtgccaattgtatctgagaaggatctgcagctaccatcaccagctgttgaaataatcccctcaaagagtgttcatccatacaaatatgctggagagaaggttgatgtgcaaggtcttaatattttcaagggtaaagtcagtgtagcagatatgatagttatctcgccttctgaagtagcatcatcaaaatatgatggaactctgaaaactgngagagttccattacccttgtcgacattcttaaaaatgagatccgtgatgggcagttgagct

SEQ ID NO: 11715 - DNA, 375 bp, Zea mays
  unsure (1)..(375): unsure at all n locations; Clone ID: LIB3061-079-01-K6-E4
ctcaggctcgccaccggngggatgcatctgccgngatacgcgctggcgggggggcgtgagcggatggaacgcggcggtgctggaggcggccatggcgttcgggctcatgtacgcctactttgcgacggtgatggacaaagcgcggagggtccgcgccggcgccggagcgctggcggcgccgctcgccgtggggctcctggcgggggctaacgtgctggcctgcggcgcgctggaggcgccgtgatgaatccgcgcgcgcgttcgggcccgccgtcgtgggctcccgtcgctggagacaccaatgggtgtactgngtggggcccatgggtcgcgccggcctctccggcgtcgtctacgagcacctcgtcgccggcc

SEQ ID NO: 11716 - DNA, 690 bp, Zea mays
  unsure (1)..(690): unsure at all n locations; Clone ID: LIB3061-079-01-K6-E5
cgaatccagtagcaacaacagagcaacaatggcgaccaagatattttccctccttatgctccttgctctttctgcatgtgttgctaacgcgacaattttccctcaatgctcacaagctcctatagcttcccttcttcccccataccttccatcaatgatagcttcagtatgtgaaaacccagctcttcagccctataggctccaacaagcaatcgcagcaagcaacatacctttatcacccttgttgtttcaacaatcgccagccctatctttggtgcagtcattggtacaaaccatcagggcacagcagctgcagcaactcgtgctacctgtgatcaaccaagtagctctggcaaacctttctccctactctcagcaacaacaatttcttccattcaaccaactgtctacactgaaccctgctgcttatttgcagcaacaactattaccattcagccagctagctactgcctactctcagcaacaacaacttcttccatttaaccaattggccgcactgaaccccgctgcttatttgcagcagcaaatactactaccatttagccagctagctgcagcaaaccgtgcttccttcttgaccagcaacagttgctgcctttctaccagcagtttgcggctaaccccgcaaccctcttacactacaacaattgttgccctntgtccaactgc

SEQ ID NO: 11717 - DNA, 692 bp, Zea mays
  unsure (1)..(692): unsure at all n locations; Clone ID: LIB3061-079-01-K6-E6
attttcagcattcaaaaacacaccaagcgaagcgcactagcaacgacctaacaccaatggctaccaagatattagccctccttgcgcttcttgcccttttagtgagcgcaacaaatgcgttcattattccacagtgctcacttgctcctagtgccattattccacagttcctcccaccagttacttcaatgggcttcgaacatccagccgtgcaagcctacaggctacaactagcgcttgcggcgagcgccttacaacaaccaattgcccaattgcaacaacaatccttggcacatctaaccctacaaaccattgcaacgcaacaacaacaacaacaacagtttctgccatcactgagccacctagccgtggtgaaccctgtcacctacttgcaacagcagctgcttgcatccaacccacttgctctggcgaacgtagctgcataccagcaacaacaacagctgcaacagtttatgccagtgctcagtcaactagccatggtgaaccctgccgtctacctacaactactttcatctagcccgctcgcggtgggcaatgcacctacgtacctacaacaacagttgctgcaacaaattgtaccagctctgactcagctagctgtggcaaaccctgctgcctacttacaacagttgcttncattcaaccactggctgtgtcaaactttgctgcgt

SEQ ID NO: 11718 - DNA, 629 bp, Zea mays
  unsure (1)..(629): unsure at all n locations; Clone ID: LIB3061-079-01-K6-E7
ngaacacacctagcgaacgcactagcaacgacctaacaacaatggctaccaagatattatccctctttgcgcttcttgccctttttgtgagcgcaacaaatgcgttcattattccacaatgctcacttgctcctagtgccattattccacagttcctccctccagttacttcaatgggcttcgaacacccagctgtgcaagcctacaggctacaacaagcgcttgcggcgagcgtcttacaacaaccaattgcccaattacaacaacaatccttggcacatctaaccatacaaaccatcgcaacgcaacagcaacaacaatttctaccagcactgagccaactagctgtggtgaaccctgtcgcctacttgcaacagcagttgcttgcatccaacccacttgctctggcaaacatagttgcataccaacaacaacaacaattgcaacagtttctaccagcgctcagtcaactagccatggtgaaccctgccgcctacctacaacagcaacaactgatttcatctagccctctcgctgtggttaatgcacctacatacctgcaacaacagttgctgcaacagattgtaccagctctgactcagctagctgtggcaaaccctgctgcctac

SEQ ID NO: 11719 - DNA, 672 bp, Zea mays
  Clone ID: LIB3061-079-01-K6-E8
gcgttcattattccacaatgctcacttgctcctagtgccattataccacagttcctccgaccagttacttcaatgggcttcgaacacctagctgtgcaagcctacaggctacaacaagcgcttgcggcgagcgtcttacaacaaccaattaaccaattgcaacaacaatccttggcacatctaaccatacaaaccatcgcaacacaacagcaacaacagttcctaccagcactgagccaactagatgtggtgaaccctgtcgcctacttgcaacagcaggtgcttgcatccaacccacttgctctggcaaacgtagctgcataccaacaacaacaacaattgcaacagtttctgccagcgctcagtcaactagccatggtgaaccctgccgcctacctacaacagcaacaactgctttcatctagccctctcgttgtgggtaatgcacctacatacctgcaacaacaattgctgcaacagattgtaccagctctgactcagctagctgtggcaaaccctgctgcctacttgcaacagctgcttccattcaaccaactgactgtgtcgaactctgctgcgtacctacaacagcgacaacagttacttaatccactagcagtgcctaacccattggtcactgccttcctacagcagcaacaattgctaccatac

SEQ ID NO: 11720 - DNA, 659 bp, Zea mays
  unsure (1)..(659): unsure at all n locations; Clone ID: LIB3061-079-01-K6-E9
gagaccagcaagcaacatagaaagtagaatccattagcaacaatagagcaacaatggcgaccaagatattttccctccttatgctccttgctctttctacatgtgttgctaacgcgacaattttccctcaatgctcacaagctcctatagcttcccttcttcccccataccttccatcaattatagcttcagtatgtgaaaacccagctcttcaaccatataggcttcaacaagcaatcgcagcaagcaacatacctttatcgcccttgttgtttcaacaatcaccagccctatctttggtgcagtcattggtacaaaccatcagggcacaacagctgcagcaactcgtgctacctgtgatcaaccaagtagctctggcaaacctttctccctactctcagcaacaacaatttcttccattcaaccaactgtctacactgaaccctgctgcttatttgcagcaacaactattaccatttagccagctagctactgcctactctcagcaacaacaacttcttccatttaaccaattggccgcactgaaccccgctgcttatttgcagcagcaaatactactgccatttagcgagctagctgcagcaagtcgtgcttncttcttgacacagcacagttgctgcctttctacaagcagtttg

SEQ ID NO: 11721 - DNA, 633 bp, Zea mays
  unsure (1)..(633): unsure at all n locations; Clone ID: LIB3061-079-01-K6-F1
nncatttcagccatcacancgcaccagcnncancngntcctaccagcactgngccacctagccatggtgaaccctgccgcctacttgcaagagcagctgcttgcatccaacccacttgctctggcgaacgtagttgcaaaccagcaacaacaacagctccaacagtttctgccaacgctcagtcaactagccatggtgaaccctgccgcctacgtgcaacaacaacaactgctttcatctagcccgctcgctgtgggcaatgcacctacatacctgcaacaacaattgttgcaacagattgtaccagctctgactcaactagctgtggcaaaccctgttgcctacttgcaacagctgcttccattcaaccaactgactctgtcgaactctgctgcgtacctacaacagcgacaacagttacttaatccattggtagtggctaacccattggtcgccgccttcctacagcagcaacaattgctgccatacaaccagttctctttgatgaatcctgtcttgtcgaggcagcaacccatcgttggaagtgccatcttttagattacatatgagatgtactcgataatggtgccctcataccgacgtgtgtttcctaggaataatcaatatattgat

SEQ ID NO: 11722 - DNA, 701 bp, Zea mays
  Clone ID: LIB3061-079-01-K6-F10
attttgagcattcagaacacaccaagcgaagcgcactagcaacaacctaacaacaatggctaccaagatattatccctccttgcgcttcttgcgctttttgcgagcgcaacaaatgcgtccattattccacaatgctcacttgctcctagttccattattccacagttcctcccaccagttacttcaatggccttcgaacacccagctgtgcaagcctataggctacaacaagcgattgcggcgagcgtcttacaacaaccaattgcccaattgcaacaacaatccttggcacatctaacaatacaaaccatcgcaacgcaacagcaacaacagttcctaccagcactgagccacctagccatggtgaaccctgtcgcctacttgcaacagcagctgcttgcatccaacccacttgctctagcaaacgtagttgcaaaccagcaacaacaacaactgcaacagtttctgccagcgcttagtcaactagccatggtgaaccctgccgcctacctacaacagcaacaactgctttcatctagcccgctcgctgtggccaatgcacctacatacctgcaacaagaattgttgcaacagattgtaccagctctaactcagctagctgtggcaaaccctgttgcctacttgcaacagctgcttccattcaaccaactaactatgtcgaactctgttgcgtacctac

SEQ ID NO: 11723 - DNA, 486 bp, Zea mays
  unsure (1)..(486): unsure at all n locations; Clone ID: LIB3061-079-01-K6-F11
gttcgaccttgaggaactccatcccaaaatctattgtttattgccaagtgcgagaggccaagcgctcgctgctcgatcacttcttcactgaactgggagcaagagagatgaagcaactttccaagcttctcgacgaagatccagcagtcatggaacgcagaactaaccttgcaaagaggctggagctgtaccggagtgcccaatcggaaatcgatgcagtcgcatggtccaaatagccctgatggctaagatatctgttcttacatgttctttatccctcgtctggcgattgtctcccctattctggggcatatatagctgatttttgtctgttgtaggtcaggtcattctatagattaccgcagctgtacggtgtcgtttagttgtgcttttgttccttgtacttgagggtctaggggacaccaggctgctgtacgcttgcatcacggacaagttcataaattgtgtttttgttaccatgcanna

SEQ ID NO: 11724 - DNA, 642 bp, Zea mays
  unsure (1)..(642): unsure at all n locations; Clone ID: LIB3061-079-01-K6-F12
ctacaaaccattgcaacgcaacaacaacaacaacaacagtttctgccatcactgagccacctagccgtggtgaaccctgtcacctacttgcaacagcagctgcttgcatccaacccacttgctctggcgaacgtagctgcataccagcaacaacaacagctgcaacagtttatgccagtgctcagtcaactagccatggtgaaccctgccgtctacctacaactactttcatctagcccgctcgcggtgggcaatgcacctacgtacctacaacaacagttgctgcaacaaattgtaccagctctgactcagctagctgtggcaaaccctgctgcctacttacaacagttgcttccattcaaccaactggctgtgtcaaactctgctgcgtacctacaacagcgacaacagttacttaatccattggcagtggctaacccattggtcgctaccttcctgcagcagcaacaacaattgctgccatacaaccagttctctttgatgaaccctgccttgcagcaacccatcgttggaggtgccatcttttagattacatatgagatgtactcgacaatggtgccctcataccgacatgtgtttcctagnaataatcaatatattgattgagatntatctcgatat

SEQ ID NO: 11725 - DNA, 600 bp, Zea mays
  unsure (1)..(600): unsure at all n locations; Clone ID: LIB3061-079-01-K6-F2
gccgcctccgnnncttctgccgccgcagcagcagccgcngccccggcnnnaccccacncaaccaccgcagctaagcccgtgccagcagttcggatcctgcggcgtcggcagcgtcggcagcccgttcctgggccagtgcgtcgagttcctgaggcaccagtgcagcccggcggcgacgccctacggctcgccaaagtgccaggcgctgcagcagcagtgctgccaccagatcaggcaggtggagccgctgcaccggtaccaggcgacatacggtgtggtcctgcagtccttcctgcagcagcagccgcagggcgagctcgcggcgctgatggcggcccaggtagcgcagcagctgacggcgatgtgcggcctgcagctgcagcagccaggtccctgcccttgcaacgcagctgccggcggtgtctactactgaggaaactatgtactgtagtaataatgtaatggagccgctgactagctacctagctcgctagtttactcatttagcggcgatgagtaacgtagtgtcacccatcaccatggnntgcagtgtgagcaatgacctgaatgaaccattgaaatgnaaagnaataatatata

SEQ ID NO: 11726 - DNA, 700 bp, Zea mays
  unsure (1)..(700): unsure at all n locations; Clone ID: LIB3061-079-01-K6-F3
ccgggtcgcccagcgtccgttgcttcttgtnnggccaatngtgtcccatccctggcngccaaaatttttgcctccttatgctccttggtctttctgcaagtgctgctacggcgaccattttcccacaatgctcacaagctcctatagcttcccttcttcccccgtacctctcaccagcggtgtcttcggtatgtgaaaacccaattcttcaaccctataggatccaacaggcaatcgcagctggcatcttacctttatcacccttgttcctccaacaatcatcagccctattacagcagttacctttggtgcatttattggcacaaaacatcagggcacaacaactacaacaacttgtgctagcaaaccttgctgcctactctcagcaacaacagtttcttccattcaaccaactagctgcattgaactctgcttcttatttgcaacaacaacaactaccattcagccagctatctgctgcctacccccagcaatttcttccattcaaccaactgacagctttgaactctcctgcttatttacagcagcaacaactactaccattcagccagctagcttgtgtgagccctgctaccttcttgacacaaccacaattgttgccgttctaccagcacgctgcgcctaaacgctgcaccctcttacaactgcacaattgctgccattcaaccaacttgctttg

SEQ ID NO: 11727 - DNA, 99 bp, Zea mays
  Clone ID: LIB3061-079-01-K6-F5
ctctcttcccccctctttcctacgcttcgcgccggctatgaggtccacgtcttcatcacctcctgccttcaccggcattcttgttttttttccaggctg

SEQ ID NO: 11728 - DNA, 678 bp, Zea mays
  unsure (1)..(678): unsure at all n locations; Clone ID: LIB3061-079-01-K6-F6
gcgtccggcagatctttgtgaagacactcactggcaagacaatcacccttgaggtggagtcttcggataccattgacaatgtcaaggccaagatccaggacaaggagggcatcccacccgaccagcagcgcctcatcttcgccggcaagcagctggaggatggccgcaccctggcggattacaacatccagaaggagagcactctccacctggtgctccgcctcaggggtggcatgcagatttttgtgaagacattgactggcaagaccatcaccttggaggtggagagctctgacaccattgacaatgtgaaggccaagatccaggacaaggagggcattcccccagaccagcagcgtctgatctttgcgggcaagcagctggaggatggccgcactctcgcggactacaacatccagaaggagagcacccttcaccttgttctccgcctcagaggtggtatgcagatctttgtaaagaccctgactggaaaaaccataaccctggaggttgagagctcggacaccatcgacaatgtgaaggcgaagatccaggacaaggagggcatccccccggaccagcagcgtctgatcttcgccggcaaacagctggaggatggccgcaccctagcagactacaacatccaaaagnagagcaccctccaaccttgtgctcgtc

SEQ ID NO: 11729 - DNA, 664 bp, Zea mays
  Clone ID: LIB3061-079-01-K6-F7
gcggcgtattggatatggcagtgcatcgactactcttcgactccatgtctttctctctacctagtcttgtgcctaacaacttcttaggaatcaacattgtatgtccaaaaaaaacatttggagcaaagcaagggatcaaagttgccaaatcgatcactgctgtcatgcatgcacgctagatatataaacggttaacatgtctgtgggattcgaatcagagagaaacttgtggaactggaatcagataagcgataagtattcgaaactgaatcactttacacgtatgtactgtgtggaaacttgctctgttagtaactacacgctatatatatatgagatcacatttttggctctgtgtgtacgtggagtactgtttcgttctattagcttaactttccagcatttcgttttgtatcatgtacaggtgtatatggtatgttagtaactgcatatgcgtttctgttgtgtacgtagaaattaaaaaaagaggcttcagctatatacaataatttcagaatctcatccatgcttttagaatataccatgtaataataataagtacaaattttatcactgtgtacaggtgtattgtatggttttggcaactgatcgattgcgtttccatcgagcaaataaaaaaggaaccttaatatattacttgtgg

SEQ ID NO: 11730 - DNA, 119 bp, Zea mays
  unsure (1)..(119): unsure at all n locations; Clone ID: LIB3061-079-01-K6-G1
taccggtccgcattcccggnaagaaactaaaagaggcaccaccaatgatgggttatagttcaataataaagttttttatctgatgttagtggcttcccagaataagaaagtcatttctg

SEQ ID NO: 11731 - DNA, 670 bp, Zea mays
  unsure (1)..(670): unsure at all n locations; Clone ID: LIB3061-079-01-K6-G10
ngaaagcacaatagtgtaccaacaatggcagctaaaatttttgcctccttatgctccttggtctttctgcaagtgctgctacggcgaccattttcccacaatgctcacaagctcctatagcttcccttcttcccccgtacctctcaccaacggtgtcttcggtatgtgaaaacccaattcttcaaccctacaggatccaacaggcaatcgcagctggcatcttacctttatcacccttgttcctccaacaatcatcagccctattacagcagttacctttggtgcatttattggcacaaaacatcagggcacaacaactacaacaacttgtgctagcaaaccttgctgcctactctcagcaacagcagtttcttccattcaaccaactagctgcattgaactctgcttcttatttgcaacaacaacaactaccattcagccagctatctgctgcctacccccagcaatttcttccattcaaccaactgacagcattgaactctcctgcttatttacagcagcaacaactactaccattcagccagctagctggtgtgagccctgctaccttcttgacacaaccacagttgttgccgttctaccagcacgctgcgcctaaacgctgcaccctcttacaactgcaacaattgctgccattcaaccaacttgc

SEQ ID NO: 11732 - DNA, 678 bp, Zea mays
  unsure (1)..(678): unsure at all n locations; Clone ID: LIB3061-079-01-K6-G11
aacatagnaagcacaatagtgtaccaacaatggcagccaaaatattttgcctccttatgctccttggtctttctgcaagtgctgctacggcgaccattttcccacaatgctcacaagctcctatagcttcccttcttcccccgtacctctcaccagcggtgtcttcggtatgtgaaaacccaattcttcaaccctataggatccaacaggcaatcgcagctggcatcttacctttatcacccttgttcctccaacaatcatcagccctattacagcagttacctttggtgcatttattggcacaaaacatcagggcacaacaactacaacaacttgtgctagcaaaccttgctgcctactctcagcaacaacagtttcttccattcaaccaactagctgcattgaactctgcttcttatttgcaacaacaacaactaccattcagccagctatctgctgcctacccccagcaatttcttccattcaaccaactgacagctttgaactctcctgcttatttacagcagcaacaactactaccattcagccagctagctggtgtgagccctgctaccttcttgacacaaccacaattgttgccgttctaccagcacgctgcgcctaaacgctgcaccctcttacaactgcaacaattgctgccattcaaccaacttgctt

SEQ ID NO: 11733 - DNA, 449 bp, Zea mays
  unsure (1)..(449): unsure at all n locations; Clone ID: LIB3061-079-01-K6-G2
gtggccgnggaggcggcggctacggcggnggcgggcgccgngatggcggcggcggctacggcggtggcggcggcggctacggtggcggcggtggctacggtggtggtggtggcggctacggcggtggcaaccgtggcggcggctacggcaactccgacgggaactggaggaactgagcggtggggcccgcgcggccaagttatcctgttcgctaccgtgatgtttaccctagtccagagggtttatcttcgttcgtctcgtttgttgttgcccatctgtgtttttgattgcaaggtcgctctgtgtcagttgttagtgctgtgttcatcctcggctccagcagacccatgcatcaaccagcatggactgtggatcgatggatgctgttactcctgtcaggatttgttctaagttaatcctaaggaaaaaatggtgcttcttggtgctgc

SEQ ID NO: 11734 - DNA, 656 bp, Zea mays
  unsure (1)..(656): unsure at all n locations; Clone ID: LIB3061-079-01-K6-G3
gtgctcacaaacttctggggcatgaattttaccaccgataagctcagatctctagtaaagaagtggcagacattgattgaagcccatgttgatgtcaagacaaccgacaactacatgctgcgtttgttctgcattggttttaccaagaggcgcccaaaccaggtcaagagaacctgctatgctcaggcatcccagattcggcagattcgccgcaagatggttgagattatgatcaaccaggcttctacatgtgaccttaaagaacttgtttctaagttcattccggaagttattggcaaagagattgagaagtctacctccagcatcttcccacttcaaaacgtcttcatccgcaaggtgaagatactcaaggcccccaagtttgatctcgggaagttgatggaggttcatggcgactacaaagaggacgttggtgtgaagcttgagaggcctgtcgagggtgatgaggctatgcaggaggttgctgctgccgagtagtttatttgctacttctttatctagacgaatctggacaggaggtcccttatgacgcgaacttcataaaattgtctggcgacatgttttcttctgtccctgccctaaactctaaacccaaaggttattcgtaacaagtgttttaagattaaaaaanaaaa

SEQ ID NO: 11735 - DNA, 659 bp, Zea mays
  unsure (1)..(659): unsure at all n locations; Clone ID: LIB3061-079-01-K6-G4
caatctcccaagacagtcctgatgtactacgccaatttcctttcctcgccagagggctacttccacacggtcatctgcaacgtgccggagttccgcaacaccacagtcaaccacgacctgcatttcatttcctgggacaacccaccgaagcagcaccctcactacctcacgctcgctgacttcgacggcatggttaacagcaacgcgccctttgcaaggaagttcgggagagaagaccccgtgctggacaagatcgaccaggagctactgggccgccggcctgatgggtttgtgcccggtggatggacgtatctactgaatgcgacgagtgaggaagggagacccttcgccgttgagcgcgtgcaggatctccgcccagggcctggtgtggatagattgaagaaactcgtcacgggcttgctcacacaagaaggctttgatgacaagcactgcctgtgagactgccccccagtaagatgattctggctgggggcggtagattacacggtcaaatctgagggcattggagccattttctgggaatatgcctactggctgaagaagcacacatagtatcatgtgatgtacgcgtggatgcaagaacggtaagataggtgctcttacgacacaccgnctgagttgactactaccgacagcag

SEQ ID NO: 11736 - DNA, 524 bp, Zea mays
  unsure (1)..(524): unsure at all n locations; Clone ID: LIB3061-079-01-K6-G5
tgttgctgcaactttttanacacccgttgcctctggtgcttttattggcccaaagcgtcggggcgcatcaactacaacaacttgtgctagcaaaccttgctgcctactctcagcaacagcagtttcttccattcaaccaactagctgcattgaactctgcttcttatttgcaacaacaacaactaccattcagccagctacctgctgcctacccccagcaatttcttccattcaaccaactggcagcattgaactctcctgcttatttacagcagcaacaactactaccattcagccagctagctggtgtgagccctgctaccttcttgatacaaccacagttgttgccgttctaccagcacgctgcgcctaacgctggcaccctcttacaactgcaacaattgctgccattcaaccaacttgctttgacaaacccagcagcgttctaccaacaacccatcattggtggtgccctcttttagatttcttatgagttatagttcaataataaagttttttgtctg

SEQ ID NO: 11737 - DNA, 617 bp, Zea mays
  Clone ID: LIB3061-079-01-K6-G7
cttacctttatcacccttgttcctccaacaatcatcagccctattacatcagttacctttggtgcatttattggcacaaaacatcagggcacaacaactacaacaacttgtgctagcaaaccttgctgcctactctcagcaacagcagtttcttccattcaaccaactagctgcattgaactctgcttcttatttgcaacaacaacaactaccattcagccagctacctgctgcctacccccagcaatttcttccattcaaccaactggcagcattgaactctcctgcttatttacagcagcaacaactactaccattcagccagctagctggtgtgagccctgctaccttcttgatacaaccacagttgttgccgttctaccagcacgctgcgcctaacgctggcaccctcttacaactgcaacaattgctgccattcaaccaacttgctttgacaaacccagcagcgttctaccaacaacccatcattggtggtgccctcttttagatttcttatgagttatagttcaataataaagttttttgtctgatgtttgtggcttcccagaaataagaaaagtcatttctagaaaaaaaaaaaatagggcggccggtct

SEQ ID NO: 11738 - DNA, 716 bp, Zea mays
  unsure (1)..(716): unsure at all n locations; Clone ID: LIB3061-079-01-K6-G8
ccggnngtcgaccccaacgcgnntccgcatactagcaacatagnaaagcacaatagtgtaccaacaatggcagccaaaatttttgcctccttatgctccttggtctttctgcaagtgctgctacggcgaccattttcccgcaatgctcgcaagctcctatagcttcccttcttcccccgtacctctcaccagcggtgtcttcggtatgtgaaaacccaattcttcaaccctacaggatccaacaggcaatcgcagctggcatcttacctttatcacccttgttcctccaacaatcatcagccctattacaacagttacctttggtgcatttattggcacaaaacatcagggcacaacaactacaacaacttgtgctagcaaaccttgctgcctactctcagcaacagcagtttcttccattcaaccaactaggttcattgaactctgcttcttatttgcaacaacaacaactaccattcagccagctacctgctgcctacccccagcaatttcttccattcaaccaactagcagcattgaactctcctgcttatttacagcagcaacaactactaccattcagccagctagctggtgtgagccctgctaccttcttgacacaaccacagttgttgccgttctaccagcacgttgcgcctaacgctggcaccctcttacaactgcaacaattgctgccattcaaccaacttgctttg

SEQ ID NO: 11739 - DNA, 719 bp, Zea mays
  unsure (1)..(719): unsure at all n locations; Clone ID: LIB3061-079-01-K6-H1
cccggtcngccccgcgtccgnngngnnnagagatcgtctgnggggcnggggggggccgggcnggggtcccacaccatccgggcgcggctgtcaccgggcacggcgttcgtggtgcccgcgggccacccgttcgtcgcggtggcgtcccgggacagcaacctccagatcgtgtgcttcgaggtccacgccgacaggaacgagaaggtgttcctggccggcgccgacaacgtgctgcagaagctcgaccgggtcgccaaggcgctgtcattcgcctccaaggcggaggaggtggacgaggtgctcggctcgcggcgcgagaaggggttccttcctggccccaaggagagcggcggccacgaggagcgggagcaagaggaggaggaggaacgcgaagaacgccacggcggccgtggggagagggaacgccacggacgtgaggagcgggagaaagaggaggaggaacgcgaaggacgccacggccgcgggcgccgcgaggaggtggcggagacgctcatgaggatggttaccgccaggatgtgaggccgccgcgctcgccaaaacgagcaagaagcaacaagagggtggcgcgcgaccgacgtgcgtacgtagcatgagcctgagtggagacgttggacgtgtatgtatatacctctctgcgtgttaactatgtacgtaagcgggcagcagtgcaataagtgtggctctgtagtatgtacgtg

SEQ ID NO: 11740 - DNA, 685 bp, Zea mays
  unsure (1)..(685): unsure at all n locations; Clone ID: LIB3061-079-01-K6-H10
ggcagctagnacagaggtcttaaaagctggcaatggcaatggttacagcaactgtatgttagagggatttcaagggcaatacaaatatggcgacaattcatttgaagcatctgcttcaccttctggtgctagttattcaaaatgcaaggatgatgcagtgaaagctcttaaggttgatgaagcatgcacccacatgaagtgttcttttggtggcatttggaatggtggtggtggtgctggacagaataatctctttgtagcatcctttttcttcgatagggctgctgaggctggatttgtgaacgccaatgcacctgttgctaaggttaaaccctcagacttcagacaagctgctgagcgcgcttgctctttgagtgtgaagaacgccgaggctacctttcctggtgtccaaaaggataacattccatatatctgcatggaccttgtttatcagtacacattacttgtgcacggattcggcgttgatccagaccatgagatgaccttggtaaagaaggtcccctacagtggtgcatatgtcgaagccgcatggcctcttggcagtgccatcgaggtggcatcttcatcatagcaaggagacacagtttagcaaggtaacatcggacggcattgttgtcatgaaagtttagcgttgggagtccccccccccctgaccgcttactga

SEQ ID NO: 11741 - DNA, 78 bp, Zea mays
  Clone ID: LIB3061-079-01-K6-H11
cgcccatcgactacttccaccgcacctacgggcccacctactacatctgccgcttccaggagcctggtgtcgcagaga

SEQ ID NO: 11742 - DNA, 703 bp, Zea mays
  unsure (1)..(703): unsure at all n locations; Clone ID: LIB3061-079-01-K6-H12
ccacaatgctcacttgctccgagtgccattattccacagttcctccctccagttacttcaatgggcttcgaacacccagctgtgcaagcctataggctacaacaagcgcttgcggcgagcgtcttagaacaaccaattgcccaattacaacaacaatccttggcacatctaaccatacaaaccatcgcaacgcagcagcaacaagcactgagccacctagccgtggtgaaccctatcgcctacttgcaacaacagctgcttgcatccaacccacttgctttggcaaacgtagctgcataccaacaacaacaacagttgcaacagtttctaccagcgctcagtcaactagccatggtgaaccctatcgcctacctacaacagcaacaacttctttcatctagcccgctcgctatgggcaatgcacctacatacctgcaacaacagttgttgcaacaacagttgctgcaacaaattgtaccagctcttactcagctagctgtggcaaaccctgctgcctacttgcaacaactacttccattcaaccaactgactgtgtcgaactctgctgcgtacctacaacagcgacaacagttacttaatccactagcngtggctaacccattggtcgctgccttcctacagcagcaacaattgctgccatacaaccagttctctttgatgaaccctgccttgtcgtggcagc

SEQ ID NO: 11743 - DNA, 693 bp, Zea mays
  unsure (1)..(693): unsure at all n locations; Clone ID: LIB3061-079-01-K6-H2
actccctgggctgcaaanagggccatgactgcaacttcctcggtcccttcctatttgctgctatcatggcgctcatggtgttttcactaatccagatctttttcccgctgggtaagatgtctgtgatgatctacggcgggttggcatcacttatcttttgtggctacatcgtctatgacacggacaatgtcatcaagcgctacacctacgatgaatatatatgggctgctgtttcactctacctcgacatcatcaacctgttactgtctctgctgcagctgctgcaggcacccgatagctgagcttggcaagctttcacttggatctagcacttacatacatttgtgtatatcacaaactctgtaatgtttatagatactccaatttataactatactcaactaggggctttgtactctacttattatttgcaacaacaacaactaccattcagccagctacctgctgcctacccccagcaatttcttccattcaaccaactagcagcattgaactctcctgcttatttacagcagcaacaactactaccattcagccagctagctggtgtgagccctgctaccttcttgacacaaccacagttgttgccgttctaccagcacgttgcgcctaacgctggcaccctcttacaactgcaactattgctgccattcaaccaacttgctttgacaa

SEQ ID NO: 11744 - DNA, 671 bp, Zea mays
  Clone ID: LIB3061-079-01-K6-H4
acgtcagcctagcaattagctcatcgactccagattggagaactcgacaccatgaaggtgctgatcgttgcccttgctctcctggcgctcgctgcgagcgccgcctccagtacaagcggcggctgtggctgccagacaccaccgtttcatctaccgcctccgttctatatgccgcctccgttctatctgccgccgcagcagcagccgcagccatggcaataccccactcaaccaccgcagctaagcccgtgccagcagttcggatcctgcggcgtcggcagcgtcggcagcccgttcctgggccagtgcgtcgagttcctgaggcaccagtgcagcccggcggcgacgccctacggctcgccacagtgccaggcgctgcagcagcagtgctgccaccagatcaggcaggtggagccgctgcaccggtaccaggcgacatacggtgtggtcctgcagtccttcctgcagcagcagccgcagggcgagctcgcggcgctgatggcggcccaggtagcgcatcagctgacggcgatgtgcggtctgcagctgcagcagccagatccctgcccttgcaacgcagctgccggcggtgtctactactgaggaaactatgtactgtcgtaataatgtaatggagccgctgactagctacctatagggctatagctagt

SEQ ID NO: 11745 - DNA, 332 bp, Zea mays
  unsure (1)..(332): unsure at all n locations; Clone ID: LIB3061-079-01-K6-H5
ttcctccgncgcacacgaggtaagctgttaaccagcgccgccacttccaccgagtccctcgtggcgcttgaggcccgctgtctctccccccgctgtcgaggctcgcgccggctagaggtccacgctccccccgcctcttgttcacagacaggcggttgtttctgtggtcaacaccgggggcgggggcggcgtcttcgtccacagcaacatcttccactgaatcagcaccgtcgaccaccaccacatcgtcaccagcggctgctgcactctttccagcatgttcgcgtgcttcctccctcacgtccgcctcgcctcgatgttcctgttccaca

SEQ ID NO: 11746 - DNA, 591 bp, Zea mays
  Clone ID: LIB3061-079-01-K6-H6
aacaccgtaacagcaggattatttactccaccactacaggtccatttatttactcgcaatataaaattaccgatcggtacttaactacacacgcaagcaattagttcatgcgcttattaggttgtgccactggccaccactacactacattacactagcacaagcaagcagctacacatacttgtccatatcacataaacgaaacagcatatataagaagatgtcccaacatctttgcaccacgcgcgagatcaggggccctgcaggccgaactcttcagggcgcggccacgttctccttggcgagcggcgcgatctcctcgccttcgacccctggctcgccgccggcgaccccgaggctgaacagcacgttctcccagttcttgacagggcccttccaggagagatcctggatcatgcagttcctaaccatttcctcgtacgccggcgtgccgaccaccttgatggcgcgctgcaatgtggtggccaccttcttgacgtccggcggctccacgacgttacagtcgacgctgaggcggcccatgtagaacccggtcttgccttcgatgatggtgtctacgagtccaccggt

SEQ ID NO: 11747 - DNA, 674 bp, Zea mays
  unsure (1)..(674): unsure at all n locations; Clone ID: LIB3061-079-01-K6-H7
cacactagcaacatatnaaagcacaatagtgtaccaacaatggcagccaaatattctgcctccttatgctccttggtctttctgcaagtgctgctacggcgaccattttcccgcaatgctcgcaagctcctatagcttcccttcttcccccgtacctctcaccagcggtgtcttcggtatgtgaaaacccaattcttcaaccctacaggatccaacaggcaatcgcagctggcatcttacctttatcacccttgttcctccaacaatcatcagccctattacaacagttacctttggtgcatttattggcacaaaacatcagggcacaacaactacaacaacttgtgctagcaaaccttgctgcctactctcagcaacagcagtttcttccattcaaccaactaggttcattgaactctgcttcttatttgcaacaacaacaactaccattcagccagctacctgctgcctacccccagcaatttcttccattcaaccaactagcagcattgaactctcctgcttatttacagcagcaacaactactaccattcagccagctagctggtgtgagccctgctaccttcttgacacaaccacagttgttgccgttctaccagcacgttgcgcctaacgctggcaccctcttacaactgcaacaattgctgccattc

SEQ ID NO: 11748 - DNA, 56 bp, Zea mays
  Clone ID: LIB3061-079-01-K6-H8
ggattaatcaatggagtttcatacaaagtataatgaatgattatccttttggctgg

SEQ ID NO: 11749 - DNA, 696 bp, Zea mays
  Clone ID: LIB3061-079-01-K6-H9
caacatagaagtggaatccagtagcaacaatagagcaacaatggcgaccaagatattttccctccttatgctccttgctctttctacatgtgttgctaacgcgacaattttccctcaatgctcacaagctcctatagcttcccttcttcccccataccttccatcaattatagcttcaatatgtgaaaacccagctcttcaaccatataggcttcaacaagcaatcgcagcaagcaacatacctttatcgcccttgttgtttcaacaatcgccagccctatctttggtgcagtcattggtacaaaccatcagggcacaacagctgcagcaactcgtgctacctctgatcaaccaagtagctctggcaaacctttctccctactctcagcaacaacaatttcttccattcaaccaactgtctacactgaaccctgctgcttatttgcagcaacaactattaccatttagccagctagctactgcctactctcagcaacaacaacttcttccatttaaccaattggccgcactgaaccccgctgcttatttgcagcagcaaatactactaccatttagccagctagctgcagcaaaccgtgcttccttcttgacacagcaacagttgctgcctttctaccagcagtttgcggctaaccccgcaaccctcttacactacaacaattgttgccctttgtc

SEQ ID NO: 11750 - DNA, 631 bp, Zea mays
  unsure (1)..(631): unsure at all n locations; Clone ID: LIB3061-082-01-K6-A1
gacaatttcttcctttcaaccaactggcagcattgaactctcctgcttatttacagcagcaacaactactaccattcagccagctagctggtgtgagccctgctaccttcttgacacaaccacagttgttgccgttctaccagcacgctgcgcctaacgctggcaccctcttacaactgcaacaattgctgccattcaaccaacttgctttgacaaacctagcagtgttctaccaacaacccatcattggtggcgccctcttttagatttcttatgagttatagttcaataataaagtcctttgactgatgtttgtggcttcccagaaataagaaagtacattggtcgattctaaataaaaataacaaattcacaaaaaacgcaggtgtacccaaacttgcaacaccagaaggagctgttgtagttcatctaacaattgcatacttttgctttgtacgtcaatattctatgggccatgaatacattttctgttaagtacaatggtcaatgttcacacttcactcgtggtttcattgttgatgagaaaaaaatnanagactgtaatatgtgtacattgtatttgngtatggnctattatttgtatgcccatggggtgtgttactacctgctg

SEQ ID NO: 11751 - DNA, 597 bp, Zea mays
  unsure (1)..(597): unsure at all n locations; Clone ID: LIB3061-082-01-K6-A10
ggtgggcaggagccctacttgttgtagacacagatgtgtgggcgcatttggtattggtgtatgctgtgacatccgtttccaggaactagcattgttntgtgctgcaagaggtgctcatttgttgtgctatcctggtgcattcaacatgactactggacgcactgcattgggagttgctgcaaagggcgagggctgcagacaatcagctgtttgttgcaacatgcgctccagctcgagataccagtgcaggctatgttgcttggggacactccactcttgttggacctttcggagaggtgattgctacaacggagcatgaggaggcgaccataatagcagatattgactactcactgattgagcagaggaggcaatttcttcctctgcaacaccagcggcgtggcgatctctatcagctggtagatgtccagagactgggttctcagtagcgagcctggatgcggctgtgtgcccgctctgcaggcttgctcgtcctacttcgttcatgagatgcatgtctctgggtttcttgagatcggtcaacatgatgagtgaaggccgcgaggacgcaataaggcgactgtcgttgtaccttca

SEQ ID NO: 11752 - DNA, 671 bp, Zea mays
  unsure (1)..(671): unsure at all n locations; Clone ID: LIB3061-082-01-K6-A11
cccagctcttcaaccatataggcttcaacaagcaatcgcagcaagcaacatacctttatcgcccttgttgtttcaacaatcaccagccctatctttggtgcagtcattggtacaaaccatcagggcacaacagctgcagcaactcgtgctacctgtgatcaaccaagtagctctggcaaacctttctccctactctcagcaacaacaatttcttccattcaaccaactgtctacactgaaccctgctgcttatttgcagcaacaactattaccatttagccagctagctactgcctactctcagcaacaacaacttcttccatttaaccaattggccgcactgaaccccgctgcttatttgcagcagcaaatactactgccatttagcgagctagctgcagcaagtcgtgcttccttcttgacacagcaacagttgctgcctttctacaagcagtttgcggctaaccccgcaaccctcttacaactacaacaattgttgccctttgtccaacttgctttgacaaacccagcagcctcctaccaacaacacatcattnggtggtgccctcttttagattgattattagttgtaattcaataataaagttttttggatgatgtatgtggccaaccagaaataagaagntacatttccagattctaatgtgaaa

SEQ ID NO: 11753 - DNA, 636 bp, Zea mays
  Clone ID: LIB3061-082-01-K6-A12
agggagggcaggcgggccgacgaatgcacagtcccggagaatattggtgaagcaataacttgatatagggttctagaccaaagaagcaatggaaaaggaatcatctgccacatacgagccaaaaaggaacagtgaaataagggtttttgagagttcagatgagatttcaacggatcttgctgagtatatctcacaagtttcagaaatttctgtcaaagaaaggggatactttgccatcgccttatctggaggtcccctagtcagttttttggggaaactttgtgaagctccatacaacaagacactggattggtccaaatggtacatcttctggtctgatgaacgtgctgtggcaaaaaaccatgcagagagtaactataggttaacaaaagaaggattcctcgccaaggtacctattctgaatggccatgtctactccataaatgacaatgccacagtggaggatgcagcaacagactatgaattcatgatcaggcagctggttaaggtccgcacaataggagtctcagagagaaacgactgtcccaagttcgatctcatccttctcaccatgggctccgatgggcatgtggcctcgcttttcccgaacaccctgccatggagctgaaagagact

SEQ ID NO: 11754 - DNA, 648 bp, Zea mays
  Clone ID: LIB3061-082-01-K6-A2
gagaccagcaagcaacatagaaagtagaatccattagcaacaatagagcaacaatggcgaccaagatattttccctccttatgctccttgctctttctacatgtgttgctaacgcgacaattttccctcaatgctcacaagctcctatagcttcccttcttcccccataccttccatcaattatagcttcagtatgtgaaaacccagctcttcaaccatataggcttcaacaagcaatcgcagcaagcaacatacctttatcgcccttgttgtttcaacaatcaccagccctatctttggtgcagtcattggtacaaaccatcagggcacaacagctgcagcaactcgtgctacctgtgatcaaccaagtagctctggcaaacctttctccctactctcagcaacaacaatttcttccattcaaccaactgtctacactgaaccctgctgcttatttgcagcaacaactattaccatttagccagctagctactgcctactctcagcaacaacaacttcttccatttaaccaattggccgcactgaaccccgctgcttatttgcagcagcaaatactactgccatttagcgagctagctgcagcaagtcgtgcttccttcttgacacagcacagttgctgcctttcta

SEQ ID NO: 11755 - DNA, 700 bp, Zea mays
  unsure (1)..(700): unsure at all n locations; Clone ID: LIB3061-082-01-K6-A3
ctcaggggaggcatgcagatcttcgtgaagaccctgaccggcaagactatcaccctcgaggtggagtcttcagacaccatcgacaacgtcaaggccaagatccaggacaaggagggcattcccccagaccagcagcggctcatctttgctggaaagcagcttgaggacgggcgcacgcttgccgactacaacatccagaaggagagcaccctccacttggtgctgcgcctcaggggaggcatgcagatcttcgtgaagaccctgaccggcaagactatcaccctcgaggtggagtcttcagacaccatcgacaatgtcaaggccaagatccaggacaaggagggcatcccaccggaccagcagcgtttgatcttcgctggcaagcagctggaggatggccgcacccttgcggattacaacatccagaaggagagcaccctccacctggtgctccgtctcaggggtggtatgcagatctttgtgaagacactcactggcaagacaatcacccttgaggtggagtcttcggataccattgacaatgtcaaggccaagatccaggacaaggagggcatcccacccgaccagcagcgcctcatcttcgccggcaagcagctggaggatggccgcaccctggcggattacaacatccagaangagagcactctccnacctgtgctccngctcaggggtggcatgc

SEQ ID NO: 11756 - DNA, 677 bp, Zea mays
  unsure (1)..(677): unsure at all n locations; Clone ID: LIB3061-082-01-K6-A4
agctgccattgccatctactgacctgtgacctccgcatttccaaacagcccgagcgagctagagctagcagagcggcaggcacctccctcctcaaggaacatggcccgcacgcagcagttggcagtagtggcgaccgccgtggtggccttggtgctgctggcggcggcggcgacctcggaggcggccatcagctgcgggcaggtggcgtcggccatcgcgccctgcatctcctacgcgcgcggccagggctcggggccctccgccggctgctgcagcggcgtcaggagcctcaacaacgccgcccgcaccaccgccgaccgccgcgccgcctgcaactgcctcaagaacgccgccgccggcgtcagcggcctcaacgccggcaacgccgccagcatcccctccaagtgcggcgtcagcatcccctacaccatcagcacctccaccgactgctccagggtgaactgaaccctaaacgacgacgacgggcgacggcggccacctgaagacgatccatatctatcccgccgtacgtcggcgcccgcggatcggaccgtcatgaccatatctagctacctacgcatgatcgtcacgacttgcatgtctactactgctacgtgtactactactgaataaaaacctctncgcgcacgtcgtccttgtgtttgtgtgtgtgttg

SEQ ID NO: 11757 - DNA, 651 bp, Zea mays
  Clone ID: LIB3061-082-01-K6-A5
gtcaaatctgtatatgcccaatatgtgacgctgcaggcgacagcccggacgaggtgaaggcgaggctcaagtactgggcgcaggcggtggcgtgcaccgtcaggctctgcagctagctgatcaacggcgtggcagtggcggtggcggtggcggtggcgccaccatcaatcaatcttggcacaagagatgagagttgagacgagcacgcaagaagggaaatccattccgtctccgcccagccagcacagggcatctggtggtcggcatacaggcaggaaccgtggcaccaccgccggaccaaccagccagccagccgtcaaagttcaacgtaaacgaacacagacaggagcatcgtcccattcccatacatgcgctccatccagatcaagatggcctggactagcatcgtagcgtcaccatggccagcattcatccgtcaggagcacacaggagtcgtgaattcgaatttcgctccaagattttgcttgagatatgtggtagggacggaaggaggagggagaatcgcgtagttaattccatgccgtcctttatgtttttttttttttttttgtctctgttcaagctttgacatgatacaatctgccggctagctgccaccaccttgcctttgccttaccggggaggcttaat

SEQ ID NO: 11758 - DNA, 616 bp, Zea mays
  Clone ID: LIB3061-082-01-K6-A6
ctgagccacctagccgtggtgaaccctatcgcctacttgcaacaacagctgcttgcatccaacccacttgctttggcaaacgtagctgcataccaacaacaacaacagttgcaacagtttctaccagcgctcagtcaactagccatggtgaaccctatcgcctacctacaacagcaacaacttctttcatctagcccgctcgctatgggcaatgcacctacatacctgcaacaacagttgttgcaacaacagttgctgcaacaaattgtaccagctcttactcagctagctgtggcaaaccctgctgcctacttgcaacaactacttccattcaaccaactgactgtgtcgaactctgctgcgtacctacaacagcgacaacagttacttaatccactagcggtggctaacccattggtcgctgccttcctacagcagcaacaattgctgccatacaaccagttctctttgatgaaccctgccttgtcgtggcagcaacccatcgttggtggtgccatcttttagattacatatgagatgtactcgataatggtgccctcatagcggcatgtgtttcctaaaaataatcaatatattgattgagatttatctcgat

SEQ ID NO: 11759 - DNA, 633 bp, Zea mays
  Clone ID: LIB3061-082-01-K6-A7
gtgggttggcttctcctccccctccggttcgggttcgggttcgtgaggttctccggggttcggtttcgtgggtgagcggatcgagatggcggcgtcggatgttgagtaccgctgcttcgtcggcggcctcgcctgggccacggacgaccactccctccacaacgccttcagcacctacggcgaggtcctcgagtccaagatcatcctcgatcgggagacgcagaggtcccgcggcttcggcttcgtcaccttctccacggaggaggcgatgcggaacgccatcgagggcatgaacggcaaggagctggacggccgcaacatcaccgtcaacgaggcccagtcccgcggcggccgtggaggcggcggcggcggcgggtacggtggtggccgtggaggcggcggctacggcggtggcgggcgccgtgatggcggcggcggctacggcggtggcggcggctacggtggtggcggcggcggctacggtggtggtggcggcggctacggcggtggcaaccgtggcggcggctacggcaactccgacgggaactggaggaactgagcggtggggcccgcgcggccaaattatcctgttcgctaccgtgttgtttaccctagtccagagtgtttatcttc

SEQ ID NO: 11760 - DNA, 521 bp, Zea mays
  Clone ID: LIB3061-082-01-K6-A8
cgcctcgccgcggctggcgcgttggcttccaagatgttgtgcctccttgcgcttcttgcgctttgtgcgggcgctgctgtgcgtccattgttccacattgctcacttgctcctagttccattgttccgccgttccttccaccggctccttcattgggggggggggcgggccgctgctgctgcctctcggctcccttctgcggttgcggcgagcgtcttacagcctccaattgcccgattggctcagctgtccttggcgcatctgacagttcggaccatcgcagcgcatcggcgaccgctgttcctaccagcactgagctcccttgccctggtgaaccctgtcgccttcttgcagcttcggctggttgcatcctacccacttgctgtctgcaacgtggttgcgaaccagctccgtcggctgctgcgacagttcctgccagtgcttagttccctggtcctggtgaaccctgccggttgcctacggccgcttcctctgctctcatgtagccgccttgctgtggc

SEQ ID NO: 11761 - DNA, 700 bp, Zea mays
  unsure (1)..(700): unsure at all n locations; Clone ID: LIB3061-082-01-K6-A9
gctccgttcgatcataagcaacacaacacccttccgtttgcgtcgctcctccggcctcccctccctggtcggtcgatcgcgaggatgacgccggcgagcgtggtcgccgcgcccaggagcgtcggggcgttgcccttggcggcgttcccggcgcccgcgagggccggggtgcggaggaacggccggtcctcgaggcccgcggcgtgcggcggggacgaccagcagccgccgtccatggccgcgatgccggcgtcgctgcgcgccatccaggccaggaggaagcaggaggcggcgcagcgcggggtgccgcgggcgacggccacgagcgcggccgggtgcgccgtggcggccctcgtcaaggccgtggaggccgtccagggcgcggcggccgggggcgccgcggaggccgcgcgcggcgccggggacgccgtggcgtgggtgttcagcaaggtccacctccagtcgcccgacctcgccgtcgggctgctcgggatggtcgcctgctgcctcggcacgatcgtggaggcggagaggtgccgcgtggaggcgaggaagcccgaggcggcgccggcgggcaacgcgggggccgaccgccccgacggcaacggggcccccgcggaggagaatcgagaccacgacatgccgcannctgtggaggcngatgtggagaatgcgctgtgggcccagatcggcatcttgc

SEQ ID NO: 11762 - DNA, 672 bp, Zea mays
  unsure (1)..(672): unsure at all n locations; Clone ID: LIB3061-082-01-K6-B1
caactagcaacatagnaagcacaatagtgtaccaacaatggcagccaaaatattttgcctccttatgctccttggtctttctgcaagtgctgctacggcgaccattttcccacaatgctcacaagctcctatagcttcccttcttcccccgtacctctcaccagcggtgtcttcggtatgtgaaaacccaattcttcaaccctataggatccaacaggcaatcgcagctggcatcttacctttatcacccttgttcctccaacaatcatcagccctattacagcagttacctttggtgcatttattggcacaaaacatcagggcacaacaactacaacaacttgtgctagcaaaccttgctgcctactctcagcaacaacagtttcttccattcaaccaactagctgcattgaactctgcttcttatttgcaacaacaacaactaccattcagccagctatctgctgcctacccccagcaatttcttccattcaaccaactgacagctttgaactctcctgcttatttacagcagcaacaactactaccattcagccagctagctggtgtgagccctgctaccttcttgacacaaccacaattgttgccgttctaccagcacgctgcgcctaacgctggcaccctcttacactgcaacattgctgccattca

SEQ ID NO: 11763 - DNA, 655 bp, Zea mays
  Clone ID: LIB3061-082-01-K6-B10
gcacaatagtgtaccaacaatggcagccaaaaattttgcctccttatgctccttggtctttctgcaagtgctgctacggcgaccattttcccgcaatgctcgcaagctcctatagcttcccttcttcccccgtacctctcaccagcggtgtcttcggtatgtgaaaacccaattcttcaaccctacaggatccaacaggcaatcacagctggcatcttacctttatcacccttgttcctccaacaatcatcagccctattacatcagttacctttggtgcatttattggcacaaaacatcagggcacaacaactacaacaacttgtgctagcaaaccttgctgcctactctcagcaacagcagtttcttccattcaaccaactagctgcattgaactctgcttcttatttgcaacaacaacaactaccattcagccagctacctgctgcctacccccagcaatttcttccattcaaccaactggcagcattgaactctcctgcttatttacagcagcaacaactactaccattcagccagctagctggtgtgagccctgctaccttcttgatacaaccacagttgttgccgatctaccagcacgctgcgcctaacgctggcaccctcttacagctgcaacaattgctgccattca

SEQ ID NO: 11764 - DNA, 508 bp, Zea mays
  unsure (1)..(508): unsure at all n locations; Clone ID: LIB3061-082-01-K6-B11
cccgcgtcctttttttccggcgcgtcgtcttctgggcggtggggggggcgtgccgcctacctacttcggcggcagctggttttgtcttgccctctcgctgtggttgttgctccttctttcctgcgtcatctgttgctgctcctgattgtccccgctctgactcagcttgctgtggcaaaccctgctgtgtgggtgggggcagctgcttccattcaaccaactgactgtgtcgtactctgctgcgttcctacatcagcgacttctgttacttaatccactagcggtggctaacccattggtcgctgccttcctacagcagcaacaattgctgccatacaaccagttctctttgatgaaccctgccttgttgtggcagcaacccatcgttggaggtgccatcttttagattacatatgagatgtactcgttaatggtgccctcatagcggcatgtgtttcctagaaataatcaatatattgnttgagatttatctcgatatatttctgag

SEQ ID NO: 11765 - DNA, 335 bp, Zea mays
  Clone ID: LIB3061-082-01-K6-B2
ctgcagacgattccaagttccaacgattatcaattagtattagtagctattcatctacacagtcaacgaaaacatgggcctggcaactggccgggtgatggctgtgacctcctatcatatcattgagcctgtagtgggcagttcctggaggagaattctactgttcttttttgtttttccggacatctacacggatagacagtagggattgtttgtgtgaagcacggttggcttatgccgagatttagcactggtagatgtttctatttgttttggaaatgctatagaaacatgtgaggattcaacaatgatacgctctgttaagtttgttgtgt

SEQ ID NO: 11766 - DNA, 700 bp, Zea mays
  Clone ID: LIB3061-082-01-K6-B3
agcacagcaaagcggcagtgcgtagagaggatcgtcgaacagaacagcatgaagatggtcatcgttctcgtcgtgtgcctggctctgtcagctgccagcgcctctgcaatgcagatgccctgcccctgcgcggggctgcagggcttgtacggcgctggcgccggcctgacgacgatgatgggcgccggcgggctgtacccctacgcggagtacctgaggcagccgcagtgcagcccgctggcggcggcgccctactacgccgggtgtgggcagacgagcgccatgtaccagccgctccggcaacagtgctgccagcagcagatgaggatgatggacgtgcagtccgtcgcgcagcagctgcagatgatgatgcagcttgagcgtgccgctgccgccagcagcagcctgtacgagccagctctgatgcagcagcagcagcagctgctggcagcccagggtctcaaccccatggccatgatgatggcgcagaacatgccggccatgggtggactctaccagtaccagtaccagctgcccagctaccgcaccaacccctgtggcgtctccgctgccattccgccctactactgattcatgatatttgggaaatctcctctatccatccctctctatctatatatgtaataatgcagtaagacgacacacattatcatgtgtggtatgaccaatatatatgcat

SEQ ID NO: 11767 - DNA, 608 bp, Zea mays
  Clone ID: LIB3061-082-01-K6-B4
atcgcatcaggcatcttaccattatcacccttgttcctccaacaaccgtcagccctattacagcagttacctttggtccatttggtggcacaaaacatcagggcacaacaactacaacaacttgtgctagcaaaccttgctgcatactctcagcaacatcagtttcttccatgcaaccaactggctgcattgaactctgctgcttatttgcaacaacaattaccattcagccagctagttgctgcctacccccagcaatttcttccattcaaccaactagcagcattgaactctgctgcttatttacagcagcaacaactactaccattcagccagctagctgatgtgagccctgctgccttcttgacacaacaacagttgttgccgttctacctgcacgctatgcctaacgctggcaccctcttacaactgcaacaattgctgccattcaaccaacttgctttgacaaactcaacagtgttctaccaacaacccatcattggtggtgccctcttttagattgcttatgagttatagttcaataatgaagttttttggatgatgtttgtggcgtcccagaaatagaagtacatttctagattcttatg

SEQ ID NO: 11768 - DNA, 673 bp, Zea mays
  Clone ID: LIB3061-082-01-K6-B5
attgagaccaactagcaacataggaaagcacaatagtgtaccaacaatggcagccaaaatttttgcctccttatgctccttggtctttctgcaagtgctgctacggcgaccattttcccgcaatgctcgcaagctcctatagcttcccttcttcccccgtacctctcaccagcggtgtcttcggtatgtgaaaacccaattcttcaaccctacaggatccaacaggcaatcgcagctggcatcttacctttatcacccttgttcctccaacaatcatcagccctattacaacagttacctttggtgcatttattggcacaaaacatcagggcacaacaactacaacaacttgtgctagcaaaccttgctgcctactctcagcaacagcagtttcttccattcaaccaactaggttcattgaactctgcttcttatttgcaacaacaacaactaccattcagccagctacctgctgcctacccccagcaatttcttccattcaaccaactagcagcattgaactctcctgcttatttacagcagcaacaactactaccattcagccagctagctggtgtgagccctgctaccttcttgacacaaccacagttgttgccgttctaccagcacgttgcgcctaacgctggcaccctcttacactgcaacattgctg

SEQ ID NO: 11769 - DNA, 673 bp, Zea mays
  unsure (1)..(673): unsure at all n locations; Clone ID: LIB3061-082-01-K6-B6
agnatatcgtcagctagcagagagagtgcgtagcaactagcaatggcggagaaccctgctccgagttccccgctagtgacttctcccgacgccgctgcgccgcctctgccagcggagttcaccaagctcaccttccgtagcctgtacatccgtcggacaggtccaggcagccgggagatgactgtggacgggaggccgtctgaccagctgggacgacggttcgtgagcgactttcccatatacgatggccgtggctccggcgcccacctcgtcgctcgcttgcagggagtcactgtccaaatcggcagctcgcaccagctagtcagcatcgtcttcgaggccgagaggcttaagggctccacgctgctcaccaacggagtgataacggatgggtcagacgagtgggccatctacggtggcaccggggtgttcgccatggccaccggtgtcatacgaagaaggtttctcgccggtagcaacgacgggaactctgatgagcttaccagcatcgaagttttctgcccggcgtttggctcggcacaacaacagccaaacaagcaggactccgtctctgtcaccaagattggggtatggggtggaggtggagggtcggcgcaggacatcacgacgacggagccaccacagcgtctgcacagcctctccgttcgaactg

SEQ ID NO: 11770 - DNA, 152 bp, Zea mays
  unsure (1)..(152): unsure at all n locations; Clone ID: LIB3061-082-01-K6-B7
cttgtcacatagtaagcacaatagtgtaccaacagtggcagccnaaatattttgcctgcttatgctccttggtgtttctgcgcgtgctgctgcggcggccgttttcccgctgtgctgtcaggctgctatggctgccctggttgccccgcgcc

SEQ ID NO: 11771 - DNA, 513 bp, Zea mays
  unsure (1)..(513): unsure at all n locations; Clone ID: LIB3061-082-01-K6-B8
gtgggcttgtcgcggctgctttgggcgagctgctcacgtgcgtttgttggctggttttttgcttgctgcctctcatgggtgggggggggggtgtgtgcttccccggcttttccaccctgttggctcctgcgcgctgtcgctgggcgcggcgtgccttggtcacccttggcttgctgtcgccgggcctgtcttgggtgctcggcctggctctcgccatgttggcgcatcctctgcttcatctcgtgcggcgtgtggtcaaccatggtggctttggtcgcacctttgctgcctgctgtgctgcgacagcatttacttctattgagccntctgtgtgcactgaaccctgctggttatttgccgcgccttctatgtaccattcagccagctcgctgctgcctactttcttcaacaacaacttcttgcatgtaaccaattggtcgctctgaacctcgctgcttatttgctgcaggggttcttactaccatttagcctgctagctgcaacaagccgtgc

SEQ ID NO: 11772 - DNA, 686 bp, Zea mays
  Clone ID: LIB3061-082-01-K6-B9
tattttgagcattcagaaaccaccaagcgaagcgcactagcaacgacctaacaacaatggctaccaagatattagccctccttgcgcttcttgccctttttgtgagcgcaacaaatgcgttcattattccacaatgctcacttgctcctagtgccattattccacagttcctcccaccagttacttcaatgggcttcgaacacctagctgtgcaagccaacatgcaacaacaagcgcttgcggcgagcgtcttacaacaaccaattgcccaattgcaacaacaatccttgccacatctaacaatacaagccatcacaacgcaacagcaacaacagttcctaccagcactgagccacctagccatggtgaaccctgccgcctacttgcaagagcagctgcttgcatccaacccacttgctctggcgaacgtagttgcaaaccagcaacaacaacagctacaacagtttctgccaacgctcagtcaactagccatggtgaaccctgccgcctacgtacaacaacaacaactgctttcatctagcccgctcgctgtgggcaatgcacctacatacctgcaacaacaattgttgcaacagattgtaccagctctgactcaactagctgtggcaaaccctgttgcctacttgcaacagctgcttccattcaaccaactgactctgtcgaac

SEQ ID NO: 11773 - DNA, 611 bp, Zea mays
  Clone ID: LIB3061-082-01-K6-C1
aagcacatacctttatcacccttgttgtttgctgcgattgcttgttggagcctatagggctgaagagctgggttttcacatactgaagctatcattgatggaaggtatgggggaagaagggaagctataggagcttgtgagcattgagggaaaattgtcgcgttagcaacacatgcagaaagagcaaggagcataaggagggaaaatatctttatcacccttgttgtttcaacaatcgccagccctatctttggtgcagtcattggtacaaaccatcagggcacagcagctgcagcaactcgtgctacctgtgatcaaccaagtagctctggcaaacctttctccctactctcagcaacaacaatttcttccattcaaccaactgtctacactgaaccctgctgcttatttgcagcaacaactattaccattcagccagctagctactgcctactctcagcaacaacaacttcttccatttaaccaattggccgcactgaaccccgctgcttatttgcagcagcaaatactactaccatttagccagctagctgcagcaaaccgtgcttccttcttgcacagaacagttgctgcctttctacagcagtttg

SEQ ID NO: 11774 - DNA, 574 bp, Zea mays
  unsure (1)..(574): unsure at all n locations; Clone ID: LIB3061-082-01-K6-C10
ctttcaaggaatcaaanactcttactgctgggcagagccctactgttgtagacacagatgttgggcgcattggtattggtatatgctatgacatccgtttccaggaactagcaatgttatatgctgcaagaggtgctcatttgttgtgctatcctggtgcattcaacatgactactggaccactgcattgggagttgctgcaaagggcgagggctgcagacaatcagctgtttgttgcaacatgcgctccagctcgagataccagtgcaggctatgttgcttggggacactccactcttgttggacctttcggagaggtgattgctacaacggagcatgaggaggcgaccataatagcagatattgactactcactgattgagcagaggaggcaatttcttcctctgcaacaccagcggcgtggcgatctctatcagctggtagatgtccagagactgggttctcagtagcgagcctggatgcgngctgtgtgcccgctctgcaggcttgctcgtactacttcgttcatgagatgcatgtctatgggttctagagatcgatcaaatgatgagtg

SEQ ID NO: 11775 - DNA, 686 bp, Zea mays
  unsure (1)..(686): unsure at all n locations; Clone ID: LIB3061-082-01-K6-C11
canagcggcagtgcgtagagaggatcgtcgaacagaacagcatgaagatggtcatcgttctcgtcgtgtgcctggctctgtcagctgccagcgcctctgcaatgcagatgccctgcccctgcgcggggctgcagggcttgtacggcgctggcgccggcctgacgacgatgatgggcgccggcgggctgtacccctacgcggagtacctgaggcagccgcagtgcagcccgctggcggcggcgccctactacgccgggtgtgggcagccgagcgccatgttccagccgctccggcaacagtgctgccagcagcagatgaggatgatggacgtgcagtccgtcgcgcagcagctgcagatgatgatgcagcttgagcgtgccgctgccgccagcagcagcctgtacgagccagctctgatgcagcagcagcagcagctgctggcagcccagggtctcaaccccatggccatgatgatggcgcagaacatgccggccatgggtggactctaccagtaccagctgcccagctaccgcaccaacccctgtggcgtctccgctgccattccgccctactactgattcatgatatttgggaaatctcctctatccatctctctctatctatatatgtaataatgcagtaagacgacacacattatcatgtgtggtatgaccaatatatatgca

SEQ ID NO: 11776 - DNA, 654 bp, Zea mays
  unsure (1)..(654): unsure at all n locations; Clone ID: LIB3061-082-01-K6-C2
ggactttgttcagagtcatcggcaaagaggtgcaggcatcagcatctgttgtttgccaattgatggcagccgggcatctgattttggcctaatgaagatagacgacactggaagggtaatttcattcagtgagaaaccaaaaggagacgaattaaaggcaatgcaagttgacaccacagtgcttggcttatcaaaggaggaagcagaaaacaaaccttatatagcttcaatggggatctatatttttaagaaagacatactcctaaaccttctaagatggcgttttcccactgcaaatgattttggttctgaaataattcctgcttcagcaaaagaaatcgatgtaaaggcttatcttttcaatgattactgggaagatattggaactattaagtccttctttgaggcaaaccttgctcttgctgaacagcctccaaggttcagtttctacgatgctgacaaaccaatgtatacatcacggagaaacctaccaccatctatggtcaacaataatcactgattcaatcatttcccacggatgtttcttggataactgcaggatagaacatagtgttgttggagttcgttctcggataggctccaatgtgcacctcaaggatactgtnatgctntgcgctgattattatgaaactg

SEQ ID NO: 11777 - DNA, 651 bp, Zea mays
  unsure (1)..(651): unsure at all n locations; Clone ID: LIB3061-082-01-K6-C3
caacagcacatagaagtggaatccagtagcaacaatagagcaacaatggcgaccaagatactttccctccttatgctccttgctctttctgcatgtgttgctaacgcgacaattttccctcaatgctcacaagctcctatagcttcccttcttcccccataccttccatcaatgatagcttcagtatgtgaaaacccagctcttcaaccctataggctccaacaagcaatcgcagcaagcaacatacctttatcacccttgtttcaacaatcgccagccctatctttggtgcagtcattggtacaaaccatcaaggcacagcagctgcagcaactcgtgctacctgtgatcaaccaagtagctctggcaaacctttctccctactatcagcaacaacaatttcttccattcaaccaactatctacactgaaccctgctgcttatttgcagcaacaactattaccattcagccagctagctactgcctactctcatcaacaacaacttcttccatttaaccaattggccgcactgaacctcgctgcttatttgcagcagcaaatattactaccatttagccagctagctgcagcaagccgtgcttncttcttgacacagcacagttgctgcctttctcccagcagtttgcgg

SEQ ID NO: 11778 - DNA, 596 bp, Zea mays
  unsure (1)..(596): unsure at all n locations; Clone ID: LIB3061-082-01-K6-C4
agtgtatcgtcagctagcagagagagtgcgtagcaactagcaatggcggagaaccctgctccgagttccccgctagtgacttctcccgacgccgctgcgccgcctctgccagcggagttcaccaagctcaccttccgtagcctgtacatccgtcggacaggtccaggcagccgggagatgactgtggacgggaggccgtctgaccagctgggacgacggttcgtgagcgactttcccatatacgatggccgtggctccggcgcccacctcgtcgctcgcttgcagggagtcactgtccaaatcggcagctcgcaccagctagtcagcatcgtcttcgaggccgagaggcttaagggctccacgctgctcaccaacggagtgataacggatgggtcagacgagtgggccatctacggtggcaccggggtgttcgccatggccaccggtgtcatacgaagaaggtttctcgccggtagcaacgacgggaactctgatgagctntaccagcatcgaagttttctgcccggcgtttggctcggcacaacaacagccaaacaagcaggactccgtctctgtcaccaaaatggggtatgggt

SEQ ID NO: 11779 - DNA, 598 bp, Zea mays
  unsure (1)..(598): unsure at all n locations; Clone ID: LIB3061-082-01-K6-C5
cagcacggnagcactcatcagtcatcactactacttcactagctagctagcagtactcctactcgctaagtagtggagatcgacatgagccaggggcagccgaggaggcggcagggcgaggagggcatgcacgcgcaggacaatcccgtcaagttcggcgacgtgctcgacgtctcaggcgagctggccgaccagcccgtggctcccaagggacgccgcgcggctgcaggccgcggagcagtccgtgctcggcgggacgcagagggcgggcccgccgccgtcctgcagtccgccgcgacggtcaacgcgcgagcgggccacgtaggcagggcccagacggcgtgccccgtcgccgacgccggcgccaccgtcaccgagaccgagctcgcgggccgccgcgtcgtcaccgagtccgtcggcgggcaggtggtggggaaggatggtgaccccggcgccggtggcgatgacggacccgccgggcgcgctggagaaggacgccgtcacgatcggccgcgcgctggaagctgtgggcgcgatggtcggggacaggggccgtcgagcagagcgacgcggcggccgtccaggtcgcgaagctgtg

SEQ ID NO: 11780 - DNA, 694 bp, Zea mays
  unsure (1)..(694): unsure at all n locations; Clone ID: LIB3061-082-01-K6-C6
ccttctatcagtaccatcaatcatcattcatcttagtagtataggcaccaaatcaaatctgcaacatcaattatctaactccaaaaaccatgaagctggtgcttgtggttcttgctttcattgctttagtatcaagtgtttcttgtacacagacaggcggctgcagctgtggtcaacaacaaagccatgagcagcaacatcatccacaacaacatcatccacaaaaacaacaacatcaaccaccaccacaacatcaccagcagcagcaacaccaacaacaacaagttcacatgcaaccacaaaaacatcagcaacaacaagaagttcatgttcaacaacaacaacaacaaccgcagcaccaacaacaacaacaacaacaacagcaccaacaacaacatcaatgtgaaggccaacaacaacatcaccaacaatcacaaggccatgtgcaacaacacgaacagagccatgagcaacaccaaggacagagccatgagcaacaacatcaacaacaattccagggtcatgacaagcagcaacaaccacaacagcctcagcaatatcagcagggccaggaaaaanacaacagcaacaatgtcattgccaggagcagcaacagactacaaggtgcagctataactactatagcagtagctcaaatctaaaaaattgtcatgaattcctaaggcagcagtgc

SEQ ID NO: 11781 - DNA, 678 bp, Zea mays
  unsure (1)..(678): unsure at all n locations; Clone ID: LIB3061-082-01-K6-C7
gcgagcgagagagagggaacaaaaaggagggcgaggaggacagggagccgagcgcaagagctgaggcttcgccgcgaaaccccagacctcgcgccgccccttcccctccgcggcgtcgtcctcgcacgctctccgatccaagatgtataagctggggagaggaaaccgcgacaaggtgcagcagttcatgaccattaccggcgccagtgagaaggttgcccttcaggcactgaaagctagtgattggcacttggaaggagcttttgacttcttctatagccaacctcaggtttctgtggtcaatactcggcatcttgaagatattttcaacagatataaagaacctgatgctgatatgataatggtggaaggaatatctcaattttgcaatgatctgcaggttgatcctcaggatattgtcatgcttgtcatatcatggcacatgaaagccgccacaatgtgtgaatttactcgtcaggaattcattggtggactgcagtcaattggggtagattcaatcgagaagtttcgtggaaaataccatcattacgagctgagctaaaagatgacaataaattccgtgatatatacaactttgcattcacttgggcaagggaaaaggtcaaaagtctctctcactggagactttatgggatgtngcagttgctatttgctgaa

SEQ ID NO: 11782 - DNA, 660 bp, Zea mays
  unsure (1)..(660): unsure at all n locations; Clone ID: LIB3061-082-01-K6-C8
ngaacacaccaagcgaacgcactagcaacaacctaacaacaatggctaccaagatattatccctccttgcgcttcttgcgctttttgcgagcgcaacaaatgcgtccattattccacaatgctcacttgctcctagttccattattccacagttcctcccaccagttacttcaatggccttcgaacacccagctgtgcaagcctataggctacaacaagcgattgcggcgagcgtcttacaacaaccaattgcccaattgcaacaacaatccttggcacatctaacaatacaaaccatcgcaacgcaacagcaacaacagttcctaccagcactgagccacctagccatggtgaaccctgtcgcctacttgcaacagcagctgcttgcatccaacccacttgctctagcaaacgtagttgcaaaccagcaacaacaacaactgcaacagtttctgccagcgcttagtcaactagccatggtgaaccctgccgcctacctacaacagcaacaactgctttcatctagcccgctcgctgtggccaatgcacctacatacctgcaacangnaattgttgcaaccagattgtaccagctctaactcagctagctgtggcaaaccctgttgcctacttgcacagctgcttcattcaacactaact

SEQ ID NO: 11783 - DNA, 670 bp, Zea mays
  unsure (1)..(670): unsure at all n locations; Clone ID: LIB3061-082-01-K6-D10
caactagcaacatagnaaagcacaatagtgtaccaacaatggcagccaaaatttttgcctccttatgctccttggtctttctgcaagtgctgctacggcgaccattttcccacaatgctcacaagctcctatagcttcccttcttcccccgtacctctcaccagcggtgtcttcggtatgtgaaaacccaattcttcaaccctataggatccaacaggcaatcgcagctggcatcttacctttatcacccttgttcctccaacaatcatcagccctattacagcagttacctttggtgcatttattggcacaaaacatcagggcacaacaactacaacaacttgtgctagcaaaccttgctgcctactctcagcaacaacagtttcttccattcaaccaactagctgcattgaactctgcttcttatttgcaacaacaacaactaccattcagccagctatctgctgcctacccccagcaatttcttccattcaaccaactgacagctttgaactctcctgcttatttacagcagcaacaactactaccattcagccagctangctggtgtgagccctgctaccttcttgacacaccacaattgttgccgttctacagcacgctgcgcctaacgctggcaccctcttacactgcaacattgctgccattc

SEQ ID NO: 11784 - DNA, 492 bp, Zea mays
  Clone ID: LIB3061-082-01-K6-D11
tttctaccagcgctcagtcaactagccatggtgaaccctgccgcctacctacaacagcaacaactgatttcatctagccctctcgctgtggttaatgcacctacatacctgcaacaacagttgctgcaacagattgtaccagctctgactcagctagctgtggcaaaccctgctgcctacttgcaacagctgcttccattcaaccaactgactgtgtcgaactctgctgcgtacctacaacagcgacaacagttacttaatccactagcggtggctaacccattggtcgctgccttcctacagcagcaacaattgctgccatacaaccagttctctttgatgaaccctgccttgttgtggcagcaacccatcgttggaggtgccatcttttagattacatatgagatgtactcgataatggtgccctcatagcggcatgtgtttcctagaaataatcaatatattgattgagatttatctcgatatatttct

SEQ ID NO: 11785 - DNA, 625 bp, Zea mays
  Clone ID: LIB3061-082-01-K6-D2
aaaccatcgcaacgcaacagcaacaacaatttctaccagcactgagccaactagctgtggtgaaccctgtcgcctacttgcaacagcagttgcttgcatccaacccacttgctctggcaaacatagttgcataccaacaacaacaacaattgcaacagtttctaccagcgctcagtcaactagccatggtgaaccctgccgcctacctacaacagcaacaactgatttcatctagccctctcgctgtggttaatgcacctacatacctgcaacaacagttgctgcaacagattgtaccagctctgactcagctagctgtggcaaaccctgctgcctacttgcaacagctgcttccattcaaccaactgactgtgtcgaactctgctgcgtacctacaacagcgacaacagttacttaatccactagcggtggctaacccattggtcgctgccttcctacagcagcaacaattgctgccatacaaccagttctctttgatgaaccctgccttgttgtggcagcaacccatcgttggaggtgccatcttttagattacatatgagatgtactcgataatggtgccctcatagcggcatgtgtttcctagaaataatcaatatattga

SEQ ID NO: 11786 - DNA, 626 bp, Zea mays
  Clone ID: LIB3061-082-01-K6-D3
ggcactaggagcaagtgagtcactgtggaataattccacagttcctcccaccagttacttcaatgggcttcgaacatccagccgtgcaagcctacaggctacaactagcgcttgcggcgagcgccttacaacaaccaattgcccaattgcaacaacaatccttggcacatctaaccctacaaaccattgcaacgcaacaacaacaacaacaacagtttctgccatcactgagccacctagccgtggtgaaccctgtcacctacttgcaacagcagctgcttgcatccaacccacttgctctggcgaacgtagctgcataccagcaacaacaacagctgcaacagtttatgccagtgctcagtcaactagccatggtgaaccctgccgtctacctacaactactttcatctagcccgctcgcggtgggcaatgcacctacgtacctacaatttgttgcagcaacaaattgtaccagctctgactcagctagctgtggcaaaccctgctgcctacttacaacagttgcttccatttcaaccaactggctgtgtcaaactctgctgcgtacctacaacagcgacaacagttacttaatccattggcagtggctaacccattggtcgcta

SEQ ID NO: 11787 - DNA, 597 bp, Zea mays
  unsure (1)..(597): unsure at all n locations; Clone ID: LIB3061-082-01-K6-D4
caggcaatcgcaacagcatcttaccattatcaccctnntgttcctccaacaaccnngtcagcccttattttacagcagtntnnacctttgnngtccatttgnngtggcacaaaacatcagggcacaacaactacaacaacttgtgctagcaaaccttgctgcatactctcagcaacatcagtttcttccattcaaccaactggctgcattgaactctgctgcttatttgcaacaacaattaccattcagccagctagttgctgcctacccccagcaatttcttccattcaaccaactagcagcattgaactctgctgcttatttacagcagcaacaactactaccattcagccagctagctgatgtgagccctgctgccttcttgacacaacaacagttgttgccgttctacctgcacgctatgcctaacgctggcaccctcttacaactgcaacaattgctgccattcaaccaacttgctttgacaaactcaacagtgttctaccaacaacccatcatntggtggtgccctcttttagattgcttatgagttatagttcaataatgaagttttttggatgatgtttgtggcgtccc

SEQ ID NO: 11788 - DNA, 614 bp, Zea mays
  unsure (1)..(614): unsure at all n locations; Clone ID: LIB3061-082-01-K6-D5
gcatttttacgggctattgggaggatgttggaacaatcaatcattctttgatgcaaacttggccctcactgagcagccttccaagtttgatttttatgatccaaaaacacctttcttcactgcaccccgatgcttgcctccgacgcaattggacaagtgcaagatgaaagatgcatttatctcagatggttgcttactgagagaatgcaacatcgagcattctgtgattggagtctgctcacgtgtcagctctggatgtgaactcaaggactccgtgatgatgggagcggacacctatgaaactgaagaagaagcttcaaagctactgttagctgggaaggtcccagttggaataggaaggaacacaaagataaggaactgtatcattgacatgaatgctaggattgggaagaacgtggtgatcacaaacagtaagggcatccaagaggctgatcacccggaaaaagggtactacataaggtctggaatcgtggtgatcttgaagaatgaaccatcaacgatgggtctgtcatatagatcgnctgcgtttgcgtctacaaaacaagaaccacaatggtattgcatcgatggaatcgtgtaaccttggtatggta

SEQ ID NO: 11789 - DNA, 683 bp, Zea mays
  unsure (1)..(683): unsure at all n locations; Clone ID: LIB3061-082-01-K6-D7
ctagcaacatagnaaagcacaatagtgtaccaacaatggcagccaaaatattttgcctccttatgctccttggtatttctgcaagtgctgctacggcgaccattttcccgcaatgctcacaagctcctatagcttcccttcttcccccgtacctctcaccagcggtgtcttcggtatgtgaaaacccaattcttcaaccctacaggatccaacaggcaatcgcagctggcatcttacctttatcacccttgttcctccaacaatcatcagccctattacagcagttacctttggtgcatttattggcacaaaacatcagggcacaacaactacaacaacttgtgctagcaaaccttgctgcctactctcagcaacagcagtttcttccattcaaccaactagctgcattgaactctgcttcttatttgcaacaacaacaactaccattcagccagctacctgttgcctacccccaacaatttcttccattcaaccaactggcagcattgaactctcctgcttatttacagcagcaacaactactaccattcagccagctagctggtgtgagccctgctaccttcttgacacaaccacagttgttgccgttctaccagcacgctgcgcctaacgctggcaccctcttacactgcaacattgctgccattcaacaacttgctttg

SEQ ID NO: 11790 - DNA, 445 bp, Zea mays
  Clone ID: LIB3061-082-01-K6-D9
cttccattcaaccaactaggttcattgaactctgcttcttatttgcaacaacaacaactaccattcagccagctacctgctgcctacccccagcaatttcttccattcaaccaactagcagcattgaactctcctgcttatttacagcagcaacaactactaccattcagccagctagctggtgtgagccctgctaccttcttgacacaaccacagttgttgccgttctaccagcacgttgcgcctaacgctggcaccctcttacaactgcaacaattgctgccattcaaccaacttgctttgacaaacccagcagtgttctaccaacaacccatcattggtggtgccctcttttagatttcttatgagttatagttcaataataaagttttttatctgatgtttgtggcttcccagaaataagaaagtacatttctagattctt

SEQ ID NO: 11791 - DNA, 699 bp, Zea mays
  unsure (1)..(699): unsure at all n locations; Clone ID: LIB3061-082-01-K6-E1
gaactagcaacatacatagntgaagtacactagcaacatcttagcaccaatggcagccaagatttttgccatccttgccctccttgctctttcagcaagcgttgctaccgcgactattattccacaatgctcacaacaatacctctctccggtgacagccgcgagatttgaatacccaactatacaatcctacaggctacaagaggccatcgcagcaagcatcttacggtcgttagcattgaccgtccaacaaccatatgccctattgcaacaaccatccttaatgaatctatatctccaaagaatcgcagcacaacaactacaacaacagttgcttccaacaatcaatcaagtagttgcagcgaaccttgctgcttacctccagcaacaacaatttcttccattcaatcaactagctggggtgaaccctgctgcttacttgcaggcacaacagctactaccattcaaccaacttgtcaggagccctgctgccttcttactgcagcaacagttgcttccattccatctacaagttgtggcaaacattgctgctttcttgcaacaacaacaacaattgctgccattttaacccacaggttgtgggaaacattaacgccttcttgcacagcaacagttgctaccattctacccacagnatgtggcaaacaatgtcgccttcttacacaacnaacatgctgc

SEQ ID NO: 11792 - DNA, 671 bp, Zea mays
  unsure (1)..(671): unsure at all n locations; Clone ID: LIB3061-082-01-K6-E11
gcaacatagnaaagcacaatagtgtaccaacaatggcagccaaaaattttgcttccttatgctccttggtctttctgcaagtgttgctaccgcaaccattttcccacaatgctcacaagctcctatagcttcccttcttcccccatacctctcaccagcggtgtcttcaatgtgtgaaaccccaattgttcaaccctacaggatccaacaggcaatcgcaacaggcatcttaccattatcacccttgttcctccaacaaccgtcagccctattacagcagttacctttggtccatttggtggcacaaaacatcagggcacaacaactacaacaacttgtgctagcaaaccttgctgcatactctcagcaacatcagtttcttccattcaaccaactggctgcattgaactctgctgcttatttgcaacaacaattaccattcagccagctagttgctgcctacccccagcaatttcttccattcaaccaactagcagcattgaactctgctgcttatttacagcagcaacaactactaccattcagccagctagctgatgtgagccctgctgccttcttgcacaacaacagttgttgccgttctacctgcacgctatgcctaacgctggcaccctcttacactgcacaattgctgccattcaacaacttgc

SEQ ID NO: 11793 - DNA, 619 bp, Zea mays
  Clone ID: LIB3061-082-01-K6-E12
caccaaagtaactgatgtaatagggcacaacaactacaacaacttgtgctagcaaaccttgctgcctactctcagcaacagcagtttcttccattcaaccaactagctgcattgaactctgcttcttatttgcaacaacaacaactaccattcagccagctacctgctgcctacccccagcaatttcttccattcaaccaactggcagcattgaactctcctgcttatttacagcagcaacaactactaccattcagccagctagctggtgtgagccctgctaccttcttgatacaaccacagttgttgccgttctaccagcacgctgcgcctaacgctggcaccctcttacaactgcaacaattgctgccattcaaccaacttgctttgacaaacccagcagcgttctaccaacaacccatcattggtggtgccctcttttagatttcttatgagttatagttcaataataaagttttttgtctgatgtttgtggcttcccagaaataagaaagtacatttctagattcttatgtgcttctagtctccaaatgtggttgatagttattttgctctaagatcgacagtaatgaagtataaatcatcgttgtggtgtaaa

SEQ ID NO: 11794 - DNA, 688 bp, Zea mays
  unsure (1)..(688): unsure at all n locations; Clone ID: LIB3061-082-01-K6-E2
gcatcagcggcaggagctctgggcagcgtgcgcacgtggggtacctagctcgctctgctagcctaccatggctgatcaccaccggggtgcgacgggaggtggcgggggctacggcgacctccagcgcgggggcggcatgcacggcgaggcgcagcagcagcagaagcagggcgccatgatgacggcgctcaaggccgcgacggccgcgaccttcggcgggtcgatgctggtgctgtccgggctgatcctggccggcaccgtgatcgcgctcacggtggccacccccgtgctggtgatcttcagcccggtgctggtgcccggccgccatcgcgctggcgctcatggcggccgggttcgtcacctccggcggcctcggcgtcgctgcgctgtccgtgttctcctggatgtacaagtacctgacgggcaagcacccgccgggcgccgaccagctggaccacgccaaggcgaggctggcgtccaaggcccgcgacatcaaggatgcagcacagcaccgcatcgaccaggcgcaggggtcttgagagaagaacccactcgagcgnaccgcgcgcgcgacctccttgaaccactgcnncgcgcgcggcatatggcccttaaaggcngtggctgctgctacgacgctgccgtagagtctcggtcgccgcgatacttagctagtcgttatgtgtga

SEQ ID NO: 11795 - DNA, 138 bp, Zea mays
  Clone ID: LIB3061-082-01-K6-E3
ggggggggggggtgcaaaaaaaaatcgggggggcaccgtgatcctttccctccttctgctccttgctctttctgcctgtgttgcttccgcgtcgcttttccctcgttgctcacaagctcctattcttttccttcttcc

SEQ ID NO: 11796 - DNA, 653 bp, Zea mays
  unsure (1)..(653): unsure at all n locations; Clone ID: LIB3061-082-01-K6-E4
atatttagccctccttgcgcttcttgccctttttgtgagcgcaacaaatgcgttcattattccacaatgctcacttgctcctagtgccattattccacagttcctcccaccagttacttcaatgggcttcgaacacctagctgtgcaagccaacatgcaacaacaagcgcttgcggcgagcgtcttacaacaaccaattgcccaattgcaacaacaatccttgccacatctaacaatacaagccatcacaacgcaacagcaacaacagttcctaccagcactgagccacctagccatggtgaaccctgccgcctacttgcaagagcagctgcttgcatccaacccacttgctctggcgaacgtagttgcaaaccagcaacaacaacagctacaacagtttctgccaacgctcagtcaactagccatggtgaaccctgccgcctacgtacaacaacaacaactgctttcatctagcccgctcgctgtgggcaatgcacctacatacctgcacaacaattgttgcaacagattgtaccagctctgactaactagctgtggcaaaccctgttgcctacttgcaacagctgcttccattcaaccaactgactctgtcgaacttngctgcgtacctacacagcgacaacagttactta

SEQ ID NO: 11797 - DNA, 610 bp, Zea mays
  unsure (1)..(610): unsure at all n locations; Clone ID: LIB3061-082-01-K6-E5
gaaaaactacccgatcgtcttggggtattgtttgtcatccgccttcctccagttgtcagagttattgcacagacatttcttcaagatacaaaccaacctgactacaagttaaagatgctctgtaaaaaggaaggatcagtttgactatatctttttgctggtagattgcaatatcacatggtatccgtggagatgaggacgacattgcctccaagtctgctccaccggcatccatcgacggtgcaagatccagcagatagattgatggcaaagaggacgactccatgtccaggcgtactccccgccttgcatcgagattgctaggtcataatcgaagggtttacaggngaggagatctgaacatagctcttcaatcccaaagttaacatcgttggttaccataattcttactgcttgcaagcccttttagaatattactgctgcgaggttcttgcaagtccttgatgaagaagtcgaaggtgacgaacgccgaggccgtcatcctgatcgacgccaagaacctcacagcgcacctccttgtgatgctcttttctccaatgtcttctcttatctacatgcaggaaaaaactacatgttgatggcgtggatc

SEQ ID NO: 11798 - DNA, 669 bp, Zea mays
  unsure (1)..(669): unsure at all n locations; Clone ID: LIB3061-082-01-K6-E6
ngaaacacaatagtgtaccaacaatggcagccaaaatttttgcttccttatgctccttggtctttctgcaagtgctgctaccgcaaccattttcccacaatgctcacaagctcctatagcttcctttcttcccccatacctctcaccagcggtgtcttcagtatgtgaaaacccaattcttcaaccctacaggatccaacaggcaatcgcagcaggcatcttacctttatcacccttgttcctccaacaaccgtcagccctattacagcagttacctttggtgcatttgttggcacaaaacatcaaggcacaacaactacaacaacttgtgctaggaaaccttgctgcctactctcagcaacagcagtttcttccattcaaccaactggctgcattgaactctgctgcttatttgcaacaacaactaccattcagtcagctagctgctgcctacccccagcaatttcttccattcaaccaactggcagcattgaactctgctgcttatttacaacagcaacagctaccaccattcagccagctagctgatgtgagccctgttgccttcttgaccaacaacagttgttgccgttctacctgcacgctgcgcctaacgctggcaccctcttacaactgcaacaattgctgccattcaaccaacttgctttg

SEQ ID NO: 11799 - DNA, 657 bp, Zea mays
  unsure (1)..(657): unsure at all n locations; Clone ID: LIB3061-082-01-K6-E8
gttcctattgaccggcaggagcagcggcnagcagaagaggaaggtgatgctgcgaagaataagcggaagcagggttcaggatcggacggggatggctgcagcggcagcgagggagagcagaccaagagggcgaggagggaggagaagcggaggcaggcgaaagggaaagccgtggcgcctcagatcgacacgggcttgttcagcaacgtcccccctgagctgttcctgcagatcttcaagttcctctcctccgaggacctcatctcctgcgctctagtctgccgcttcatgaatgctgccgcgtccgacgagaccctctggcgccgcctgtactgcatgaggtggggactggcctccaatgccaaattcagggagtgcgcttggaagaacctctacatacagagagatagagaggatatggttgaatttgtgaggaatactcctacagagttcaaggagtactatattcagatgcaggctgcaaaaaggagtcaagctccccgtccgtcagaagtcaacgacgacaaggttatgcttgataagacagtagctgaccaggtatctagttggaaaacagccggnggcttactgatgaagctgtcaagggcactcttgttctggaaaacatgctcgtacacccanattggtgatgcttac

SEQ ID NO: 11800 - DNA, 587 bp, Zea mays
  Clone ID: LIB3061-082-01-K6-F1
ctgtcgcctacttgcaacagcagttgcttgcatccaaccccttgctctggcaaacatagttgcataccaacaacaacaacaattgcaacaggttctaccagcgctcagtcaactagccatggtgaaccctgccgtctacctacaacagcaacaactgatttcatctagccctctcgctgtggttaatgcacctacatacctgcaacaacagttgctgcaacagattgtaccagctctgactcagctagctgtggcaaaccctgctgcctacttgcaacagctgcttccattcaaccaactgactgtgtcgaactctgctgcgtacctacaacagcgacaacagttacttaatccactagcggtggctaacccattggtcgctgccttcctacagcagcaacaattgctgccatacaaccagttctctttgatgaaccctgccttgttgtggcagcaacccatcgttggaggtgccatcttttagattacatatgagatgtactcgataatggtgccctcatagcggcatgtgtttcctagcaataatcaatatattgattgagatttatctcgatataaaaaaacaa

SEQ ID NO: 11801 - DNA, 331 bp, Zea mays
  Clone ID: LIB3061-082-01-K6-F11
ctcagctagctgtggcaaaccctgctgcctacttacaacagttgcttccattcaaccaactggctgtgtcaaactctgctgcgtacctacaacagcgacaacagttacttaatccattggcagtggctaacccattggtcgctaccttcctgcagcagcaacaacaattgctgccatacaaccagttctctttgatgaaccctgccttgcagcaacccatcgttggaggtgccatcttttagattacatatgagatgtactcgacaatggtgccctcataccgacatgtgtttcctagaaataatcaatatattgattgagatttatctcg

SEQ ID NO: 11802 - DNA, 124 bp, Zea mays
  Clone ID: LIB3061-082-01-K6-F3
caacaacccatcattggtggtgccctcttttagattgcttatgagttatagttcaataatgaagttttttggatgatgtttgtggcgtcccagaataagaaagtcatttctagattcttatgtg

SEQ ID NO: 11803 - DNA, 638 bp, Zea mays
  unsure (1)..(638): unsure at all n locations; Clone ID: LIB3061-082-01-K6-F4
tggctggtacatgagaagataaaagagagtcaagtcaatttcaagtacttttgtgactttttcaaatgttggggaacttgaagcgaacgatttttatgaagatactctttatgaggatcaccttacgtagttgtatacaagaaacttggacactagagcctgggcatcttactgctttttgcaacacttgcttctcttctgatggaatgtttgtaagttgttgactgtgcttcgctgagaaccatagagggcacagtgaatatttgaatttgatgggagcctcgaggatttgcctttgtagagtttgttgatccttacgatgcctctgaagcccagtatcacatgaatcgccaagttttctttggtcgggaaatagctgttgttcttgctgctgagtcacgaaaaaggccagaagaaatgcgcagcagaactagagtaagaggttactctggtcatgaaggtcgccggtcttcttactatggtcggtctcgttctcgctctcctcgctatcggggccgtcctcggtcgagatcatactctcctgctccaaggcggnggaatgactactctgcctctccaaggagacaggaagcccatcgctcatctcctcccaggcgcctgccaaaggagcatgatga

SEQ ID NO: 11804 - DNA, 682 bp, Zea mays
  unsure (1)..(682): unsure at all n locations; Clone ID: LIB3061-082-01-K6-F6
gcttgctccggtgccattattccacattccncctccattcttcatgggcttcgaacacccagctgtgcaagcctataggctacaacaagcgcttgcggcgagcgtcttagaacaaccaattgcccaattacaacaacaatccttggcacatctaaccatacaaaccatcgcaacgcagcagcaacaagcactgagccacctagccgtggtgaaccctatcgcctacttgcaacaacagctgcttgcatccaacccacttgctttggcaaacgtagctgcataccaacaacaacaacagttgcaacagtttctaccagcgctcagtcaactagccatggtgaaccctatcgcctacctacaacagcaacaacttctttcatctagcccgctcgctatgggcaatgcacctacatacctgcaacaacagttgttgcaacaacagttgctgcaacaaattgtaccagctcttactcagctagctgtggcaaaccctgctgcctacttgcaacaactacttccattcaaccaactgactgtgtcgaactctgctgcgtacctacaacagcgacaacagttacttaatccactagcggtggctaacccattggtcgctgccttcctacagcagcaacaattgctgccatacaaccagttctctntgatgaaccctgccttgtcgtgg

SEQ ID NO: 11805 - DNA, 651 bp, Zea mays
  unsure (1)..(651): unsure at all n locations; Clone ID: LIB3061-082-01-K6-F7
caacaagcacatanaagtggaatccagtagcaacaatagagcaacaatggcgaccaagatactttccctccttatgctccttgctctttctgcatgtgttgctaacgcgacaattttccctcaatgctcacaagctcctatagcttcccttcttcccccataccttccatcaatgatagcttcagtatgtgaaaacccagctcttcaaccctataggctccaacaagcaatcgcagcaagcaacatacctttatcacccttgtttcaacaatcgccagccctatctttggtgcagtcattggtacaaaccatcaaggcacagcagctgcagcaactcgtgctacctgtgatcaaccaagtagctctggcaaacctttctccctactatcagcaacaacaatttcttccattcaaccaactatctacactgaaccctgctgcttatttgcagcaacaactattaccattcagccagctagctactgcctactctcatcaacaacaacttcttccatttaaccaattggccgcactgaacctcgctgcttatttgcagcagcaaatattactaccatttagccagctagctgcagcaagccgtgcttccttcttgcacagcacagttgctgcctttctccagcagtttgcggc

SEQ ID NO: 11806 - DNA, 419 bp, Zea mays
  Clone ID: LIB3061-082-01-K6-G1
cattgccaggagcagcaacagactacaaggtgcagctataactactatagcagtagctcaaatctaaaaaattgtcatgaattcctaaggcagcagtgcagccctttggtaatgccttttctccaatcacgtttgatacaaccaagtagctgccaggtattgcagcaacaatgttgtcatgatcttaggcagattgagccacaatacattcaccaagcaatctacaacatggttcaatccataatccaggaggagcaacaacaacaaccatgtgagttatgtggatctcaacaagctactcaaagtgcggtggcaatcttgacagcagcacaatacctaccatcaatgtgcggcttgtaccactcatactaccaaaataatccatgcagcagcaatgacattagtggtgtttgcaattg

SEQ ID NO: 11807 - DNA, 659 bp, Zea mays
  unsure (1)..(659): unsure at all n locations; Clone ID: LIB3061-082-01-K6-G10
gcaacatagnaaagcacaatagtgtaccaacaatggcagctaaaatattttgcctccttatgctccttggtctttctgcaagtgctgctacggcgaccattttcccacaatgctcacaagctcctatagcttcccttcttcccccgtacctctcaccaacggtgtcttcggtatgtgaaaacccaattcttcaaccctacaggatccaacaggcaatcgcagctggcatcttacctttatcacccttgttcctccaacaatcatcagccctattacagcagttacctttggtgcatttattggcacaaaacatcagggcacaacaactacaacaacttgtgctagcaaaccttgctgcctactctcagcaacagcagtttcttccattcaaccaactagctgcattgaactctgcttcttatttgcaacaacaacaactaccattcagccagctatctgctgcctacccccagcaatttcttccattcaaccaactgacagcattgaactctcctgcttatttacagcagcaacaactactaccattcagccagctagctggtgtgagccctgctaccttcttgacacaaccacagttgttgccgttctaccagcacgctgcgcctaacgctggcaccctcttacactgcaacattgct

SEQ ID NO: 11808 - DNA, 732 bp, Zea mays
  Clone ID: LIB3061-082-01-K6-G11
accggtaccagaccttcccgggccaacaagcaacatagaaagtggaatccagtagcaacaacagagcaacaatggcgaccaagatattttccctccttatgctccttgctctttctgcatgtgttgctaacgcgacaattttccctcaatgctcacaagctcctatagcttcccttcttcccccataccttccatcaatgatagcttcagtatgtgaaaacccagctcttcagccctataggctccaacaagcaatcgcagcaagcaacatacctttatcacccttgttgtttcaacaatcgccagccctatctttggtgcagtcattggtacaaaccatcagggcacagcagctgcagcaactcgtgctacctgtgatcaaccaagtagctctggcaaacctttctccctactctcagcaacaacaatttcttccattcaaccaactgtctacactgaaccctgctgcttatttgcagcaacaactattaccattcagccagctagctactgcctactctcagcaacaacaacttcttccatttaaccaattggccgcactgaaccccgctgcttatttgcagcagcaaatactactaccatttagccagctagctgcagcaaaccgtgcttccttcttgacacagcaacagttgctgcctttctaccagcagtttgcggctaaccccgcaaccctcttacaactacaacaattgttgccctttgtccaac

SEQ ID NO: 11809 - DNA, 693 bp, Zea mays
  unsure (1)..(693): unsure at all n locations; Clone ID: LIB3061-082-01-K6-G2
cccgggnattcagaaacacaccaagcgaagcgcactagcaacgacctaacaacaatggctaccaagatattagccctccttgcgcttcttgccctttttgtgagcgcaacaaatgcgttcattattccacaatgctcacttgctcctagtgccattattccacagttcctcccaccagttacttcaatgggcttcgaacacctagctgtgcaagccaacatgcaacaacaagcgcttgcggcgagcgtcttacaacaaccaattgcccaattgcaacaacaatccttgccacatctaacaatacaagccatcacaacgcaacagcaacaacagttcctaccagcactgagccacctagccatggtgaaccctgccgcctacttgcaagagcagctgcttgcatccaacccacttgctctggcgaacgtagttgcaaaccagcaacaacaacagctacaacagtttctgccaacgctcagtcaactagccatggtgaaccctgccgcctacgtacaacaacaacaactgctttcatctagcccgctcgctgtgggcaatgcacctacatacctgcaacaacaattgttgcaacagattgtaccagctctgactcaactagctgtggcaaaccctgttgcctacttgncacagctgcttccattcaaccaactgactctgtcgaactctgctgcg

SEQ ID NO: 11810 - DNA, 701 bp, Zea mays
  unsure (1)..(701): unsure at all n locations; Clone ID: LIB3061-082-01-K6-G3
gtcgggctggcccaggcagcacggagctgaccgtggagggaaggccatccgaccagctgggcaggagaaacctcactgacagccccgtatttgacggccgtggccctgacgccagcctcgtggctcgcgtacagggagtcgctacccagatgggcgacgtgcgccagttgtacaccgtcgtgttccaggagaggccgctcaagggctccacgctcgtcaccgaaggcgcgatgacagaagggtcagacgagtgggcgatctacggtggaactggagtgttcgcgatggcgagaggcgtcataaggagaacgtttcttgccgacacgagcggcgggaactccgacgagcttgccgtggaggttctctgcccggtgttccgcccggcggcgtttggctcatcgtcgtcacagccagcagcaaaggacatcagctccaccgtcgtcgtcaccaaggtcggagtgtggggtggagagggagggtcggcgcangacatcgcgacgacggagccgccgaggcgtctgcagagcctgaccgtccgcgccggcgttgccgtggactccatcgagttcacctacagtaccgacacaggtggtcagacgcgcaccgctgggcgatggggtggacttggcggncacgtccggaagctcgatcttggcgacgctgaatacgtcaagggagtttctggaacgtacggcgcattc

SEQ ID NO: 11811 - DNA, 605 bp, Zea mays
  Clone ID: LIB3061-082-01-K6-G4
catccattagctttatctactccagagcgcagaagaacccgatcgacaccatgagggtgttgctcgttgccctcgctctcctggctctcgctgcgagcgccacctccacgcatacaagcggcggctgcggctgccagccaccgccgccggttcatctaccgccgccggtgcatctgccacctccggttcacctgccacctccggtgcatctcccaccgccggtccacctgccgccgccggtccacctgccaccgccggtccatgtgccgccgccggttcatctgccgccgccaccatgccactaccctactcaaccgccccggcctcagcctcatccccagccacacccatgcccgtgccaacagccgcatccaagcccgtgccagctgcagggaacctgcggcgttggcagcaccccgatcctgggccagtgcgtcgagtttctgaggcatcagtgcagcccgacggcgacgccctactgctcgcctcagtgccagtcgttgcggcagcagtgttgccagcagctcaggcaggtggagccgcagcaccggtaccaggcgatcttcggcttggtcctccagtccatcctgcagcagcagccgcaa

SEQ ID NO: 11812 - DNA, 613 bp, Zea mays
  unsure (1)..(613): unsure at all n locations; Clone ID: LIB3061-082-01-K6-G6
ngaagcgaacgcactagcaacgacctaacaccaatggctaccaagatattagccctccttgcgcttcttgcccttttagtgagcgcaacaaatgcgttcattattccacagtgctcacttgctcctagtgccattattccacagttcctcccaccagttacttcaatgggcttcgaacatccagccgtgcaagcctacaggctacaactagcgcttgcggcgagcgccttacaacaaccaattgcccaattgcaacaacaatccttggcacatctaaccctacaaaccattgcaacgcaacaacaacaacaacaacagtttctgccatcactgagccacctagccgtggtgaaccctgtcacctacttgcaacagcagctgcttgcatccaacccacttgctctggcgaacgtagctgcataccagcaacaacaacagctgcaacagtttatgccagtgctcagtcaactagccatggtgaaccctgccgtctacctacaactactttcatctagcccgctcgcggtgggcaatgcacctacgtacctacaacaacagttgctgcaacaaattgtaccagctctgactcagctagctgtggcaaaccctgctg

SEQ ID NO: 11813 - DNA, 672 bp, Zea mays
  Clone ID: LIB3061-082-01-K6-G7
agaaaagcacaatagtgtaccaacaatggcagccaaaatttttgcttccttatgctccttggtctttctgcaagtgttgctaccgcaaccattttcccacaatgctcacaagctcctatagcttcccttcttcccccatacctctcaccagcggtgtcttcaatgtgtgaaaccccaattgttcaaccctacaggatccaacaggcaatcgcaacaggcatcttaccattatcacccttgttcctccaacaaccgtcagccctattacagcagttacctttggtccatttggtggcacaaaacatcagggcacaacaactacaacaacttgtgctagcaaaccttgctgcatactctcagcaacatcagtttcttccattcaaccaactggctgcattgaactctgctgcttatttgcaacaacaattaccattcagccagctagttgctgcctacccccagcaatttcttccattcaaccaactagcagcattgaactctgctgcttatttacagcagcaacaactactaccattcagccagctagctgatgtgagccctgctgccttcttgacacaacaacagttgttgccgttctacctgcacgctatgcctaacgctggcaccctcttacaactgcaacaattgctgccattcaaccaacttgctttg

SEQ ID NO: 11814 - DNA, 697 bp, Zea mays
  unsure (1)..(697): unsure at all n locations; Clone ID: LIB3061-082-01-K6-G8
gaccaacaagcacatagaagtggaatcagtagcaaaaatagagcaacaatggcggccaagatattttccatccttatgctccttgctctttctgcatgtgttgctaacgcgaccatttttcctcaatactcacaagctcctatagctgcccttcttcccccataccttccatcaatgaccgctttagtatgtgaaaacccagcccttcaaccctacaggatccagcaagcaatcgcaacaagcaacttacctttatcacacctgttctttcaacaatcgccagccctatctttggtgcagtcattggtacaaaccatcagggcagaacagttgcagcaactcgtgctaccagtgatcagccaagtagctctggcaaacctttccccctactctcagcaacaacaatttcttccattcaaccaactgtctatactgaaccctgctgcttatttgcagcaacaacaactactaccattcagccagctagctactgcctactctcagcagcaacaatttcttccatttaaccaattggccgcactgaacccctctgcttatttccagcagcaaatactactaccatttggccagctagctacaacaagccccgcttncttcttgacacaacaacaagtgcttccgttctaccagcagtttgtggctaaccccgcaaccctcttacaactgcacagttgct

SEQ ID NO: 11815 - DNA, 562 bp, Zea mays
  unsure (1)..(562): unsure at all n locations; Clone ID: LIB3061-082-01-K6-G9
ccctattacatcagttacctttggtgcatttattggcacaaaacatcagggcacaacaactacaacaacttgtgctagcaaaccttgctgcctactctcagcaacagcagtttcttccattcaaccaactagctgcattgaactctgcttcttatttgcaacaacaacaactaccattcagccagctacctgctgcctacccccagcaatttcttccattcaaccaactggcagcattgaactctcctgcttatttacagcagcaacaactactaccattcagccagctagctggtgtgagccctgctaccttcttgatacaaccacagttgttgccgttctaccagcacgctgcgcctaacgctggcaccctcttacaactgcaacaattgctgccattcaaccaacttgctttgacaaacccagcagcgttctaccaacaacccatcattggtggtgccctcttttagatttcttatgagttatagttcaataataaagttttttgtctgatgtttgtggcttcccagaaataagaaagtacatttctagattcttaana

SEQ ID NO: 11816 - DNA, 686 bp, Zea mays
  unsure (1)..(686): unsure at all n locations; Clone ID: LIB3061-082-01-K6-H1
agaacaactagcaacatagnaaagcacaatagtgtaccaacaatggcagccaaaatattttgcctccttatgctccttggtctttctgcaagtgctgctacggcgaccattttcccgcaatgctcgcaagctcctatagcttcccttcttcccccgtacctctcaccagcggtgtcttcggtatgtgaaaacccaattcttcaaccctacaggatccaacaggcaatcgcagctggcatcttacctttatcacccttgttcctccaacaatcatcagccctattacaacagttacctttggtgcatttattggcacaaaacatcagggcacaacaactacaacaacttgtgctagcaaaccttgctgcctactctcagcaacagcagtttcttccattcaaccaactaggttcattgaactctgcttcttatttgcaacaacaacaactaccattcagccagctacctgctgcctacccccagcaatttcttccattcaaccaactagcagcattgaactctcctgcttatttacagcagcaacaactactaccattcagccagctagctggtgtgagccctgctaccttcttgacacaaccacagttgttgccgttctaccagcacgttgcgcctaacgctggcaccctcttacactgcaacattgctgccattcaacaacttgc

SEQ ID NO: 11817 - DNA, 607 bp, Zea mays
  unsure (1)..(607): unsure at all n locations; Clone ID: LIB3061-082-01-K6-H10
ccataaccctggnagttgagagctccgacaccatcgacaacgtgaaggcaaagatccaggacaaagagggcatccccccagaccagcagcgtctgatcttcgctggcaagcagctggaggatggccgcaccctagcagactacaacatccagaaggagagcactctccacctggtgctccgcctccgtggtggtcagtaagccatggttcatttaagctgctgctgtacctgggtatctgcgtcgtctggtgccctctggtgtacctctatatggatgtcgtcgtctaataaacatctgtggtttgtgtgtcatgaatcgtggttgtggcttcgttggtttaatggacctgttgtgtcctctgtgttgtacccaaaactcttctgcagcagtatggcttgaatccttatgaaaaaaaaaaaaaaaaaaaaaaaaaaaaaaaaaaaaaaaaaaaaaaaannaaaaaaaanaaaaaaaaaannanaaanannaaaaaaaaaaaaaaaaaaaaaaaaaaaaaaaaaaaaaggggcgggccgcttttaaaggtccacaattttatttccccgggcttgcagacgtaaaagtttttttattggggccccaaa

SEQ ID NO: 11818 - DNA, 695 bp, Zea mays
  unsure (1)..(695): unsure at all n locations; Clone ID: LIB3061-082-01-K6-H12
gngnaccaacaagcaacatagaaagtggaatccagtagcaacaacagagcaacaatggcgaccaagatattttccctccttatgctccttgctctttctgcatgtgttgctaacgcgacaattttccctcaatgctcacaagctcctatagcttcccttcttcccccataccttccatcaatgatagcttcagtatgtgaaaacccagctcttcagccctataggctccaacaagcaatcgcagcaagcaacatacctttatcacccttgttgtttcaacaatcgccagccctatctttggtgcagtcattggtacaaaccatcagggcacagcagctgcagcaactcgtgctacctgtgatcaaccaagtagctctggcaaacctttctccctactctcagcaacaacaatttcttccattcaaccaactgtctacactgaaccctgctgcttatttgcagcaacaactattaccattcagccagctagctactgcctactctcagcaacaacaacttcttccatttaaccaattggccgcactgaaccccgctgcttatttgcagcagcaaatactactaccatttagccagctagctgcagcaaaccgtgcttccttcttgacacagcaacagttgctgcctttctaccagcagtttgcggctaaccccgcaaccctcttacactacaacaa

SEQ ID NO: 11819 - DNA, 682 bp, Zea mays
  unsure (1)..(682): unsure at all n locations; Clone ID: LIB3061-082-01-K6-H5
ctacagtgtttcaagcaccaccaatgacatgaattcttctgacgggggacgttggcagcaccacgaaagaaatatgtgtccggggatgcacggggttcttatagttccaccaacagtacaccgggcagcaagccaacatatcaggatgcttctgagagagccaagctgctagatgctctccggcactcgcaaacacgtgctagggaagccgagatagctgccaagaaagcgtatgacgagaaggaccatgtcatcaagctactgttccgtcaagcctcacacctcttcgcatgcaagcagtggttgaaaatgctgcagctggaaaacatatgccttcagctcaggttcaaagaacaccagatagcaaccatgttcccggaccttccatggatgttggtgaaggaaaaggtagcaccgtctcaagagcacaatgaaggggctaggaagaaaggcaaaaggccaaacaggaaaggtggcctctgcgatgccgttgcatttgctgttggtgttggtatcgttggtgctggattgcttcttggatggactcttgggtggctactgccctagctggaagttccatcgacttccatgaccgtaaaggtgacaggataaatgcctcctgtgcacactagattgaatggcaatacattgcatggcaataggtaagttncaagtgtgtgct

SEQ ID NO: 11820 - DNA, 697 bp, Zea mays
  unsure (1)..(697): unsure at all n locations; Clone ID: LIB3061-082-01-K6-H6
gcttctctccccgctcccctcctgcccctttccttcgtcctcagatctgccgattccccgtccctgcgcctccgtctcatgatctctgcgcctctgcgggtgccggcgccgaaggctgccgccgggggttcgttcctgctcggcgcgtcctccgtcgagtccaatcccaatcccaagctcaagcccagcagggtccgctgcgccgccgccgccgccgccacgctgtacgaggtcctgggcctgcgcgccggcgcgacgggccgggagatcaaggccgcgtaccggcgcctggcgcgggagcggcacccggacgtggcgcacgcgcccggggccgccgccgagttcgcccgcctgcacgacgcctacgccacgctctccgacccggacagccgcgcgcgctacgacggcggcggcgccgcgcccgcggcggcggtggcgaggcgcccctggagcggcgccgtctacggccggccccgacgccgcacatgggagacggaccagtgctggtagtagagagtagagaggcacagccaagagccccacgcgcttcttgtctgtctgtagaatagttagacctcctgccgccagccatgcggccatggcggctcaccttggactntttttttggtttcggtggccatccatgtagcgtgatttttcgttttccttcctccacttgccctagtacctgtgtgct

SEQ ID NO: 11821 - DNA, 585 bp, Zea mays
  Clone ID: LIB3061-082-01-K6-H7
ctttcagtgtgatgggcctcatcgacacttttttcagaggcttggactggtgatggtgtcttgtttactttgcgcttttcaaactatatttgaacactgttaagtcgatcatacttgaattgtactgcatcttatgtttgtgattgtcatgtaatctgaagatgcctctgtattgtggtggcttgtttctgctgagattccgaccaaaaaaaaaaaaaaaaaaaaaaaaaaaaaaaaaaaaaaaaaaaaaaaaaaaaaaaaaaaaaaaaaaaaaaaaaaaaaaaaaaaaaaaaaaaaaaaaaaaaaaaaaaaaaaaaaaaaaaaaaaaaaaaaaaaggggggccctttttaaaggtccaaattttactacccggtgtttccaacttaaaattttttttttagggcccccaaaataaaatcaatgggccggtttttaaaaccggggggtggggaaaaaccctggggtccccaaattaaatcccttggaaaaaaatccccttttcccaagtggggtaaaaacaaaaaaggcccacccctttcccctttccaaactttggcccatcttaataggaaaagggaaccccc

SEQ ID NO: 11822 - DNA, 689 bp, Zea mays
  Clone ID: LIB3061-082-01-K6-H9
tatcagtaccatcaatcatcattcatcttagtagtataggcaccaaatcaaatctgcaacatcaattatctaactccaaaaccatgaagctggtgcttgtggttcttgctttcattgctttagtatcaagtgtttcttgtacacagacaggcggctgcagctgtggtcaacaacaaagccatgagcagcaacatcatccacaacaacatcatccacaaaaacaacaacatcaaccaccaccacaacatcaccagcagcagcaacaccaacaacaacaagttcacatgcaaccacaaaaacatcagcaacaacaagaagttcatgttcaacaacaacaacaacaaccgcagcaccaacaacaacaacaacaacaacagcaccaacaacaacatcaatgtgaaggccaacaacaacatcaccaacaatcacaaggccatgtgcaacaacacgaacagagccatgagcaacaccaaggacagagccatgagcaacaacatcaacaacaattccagggtcatgacaagcagcaacaaccacaacagcctcagcaatatcagcagggccaggaaaaatacaacagcaacaatgtcattgccaggagcagcaacagactacaaggtgcagctataactactatagcagtagctcaaatctaaaaaatgtcatgaattcctaaggcagcagtgcag

SEQ ID NO: 11823 - DNA, 595 bp, Zea mays
  Clone ID: LIB3061-086-Q1-K6-A1
gcaggcatcttacctttatcacccttgttcctccaacaaccgtcagccctattacagcagttacctttggtgcatttgttggcacaaaacatcaaggcacaacaactacaacaacttgtgctaggaaaccttgctgcctactctcagcaacagcagtttcttccattcaaccaactggctgcattgaactctgctgcttatttgcaacaacaactaccattcagtcagctagctgctgcctacccccagcaatttcttccattcaaccaactggcagcattgaactctgctgcttatttacaacagcaacagctaccaccattcagccagctagctgatgtgagccctgttgccttcttgacacaacaacagttgttgccgttctacctgcacgctgcgcctaacgctggcaccctcttacaactgcaacaattgctgccattcaaccaacttgctttgacaaacccaacagcgttctaccaacaacccatcattggtggtgccctcttttagattgcttatgagttatacttcaataatgaagttttttggatgatgtttgtggcttcccagaaataagaaagtacatttctaa

SEQ ID NO: 11824 - DNA, 623 bp, Zea mays
  Clone ID: LIB3061-086-Q1-K6-A10
ctctggtgagcttcacacccagattaagaacaagaaattgacagttgatgtcaaagcaaactaagaatcagatcttttaacaacaatcactgttgatgagttcgagtcttcagggctaaaatcaattatcaatttgggtgttccagaccagaggtgagggaagcttgaattccaatacctacatgaatatgctggtgtgggtgcaagcgttaggcttaattacaatcctatggctaacctttctggtgcctttggaagcaaagcactctcaaacggcgttgatgtgtcatttgatacagaaactagcgatttgaacaagtacaacgctgccctgagccttaccagtgcagatcttattgctttccttcatttgaataaccacggagataccctggttgcgtgctactaccacctggtgaagaaccattcaggcacttgtgttggagctgatttgtctcacataatgtcgagaaatgagagcactctaatcttcgggtcccagtactctgtggatccccacacgactattaagacacgtttcaacaactactgtatggccagtgcccttgtccatcatgaatggcgtctcaagtgcttcgtcaccatatgtggtgacgttgaca

SEQ ID NO: 11825 - DNA, 377 bp, Zea mays
  Clone ID: LIB3061-086-Q1-K6-A11
gaactctgctgcttatttgcagcaacaacaactactaccattcagccagctagctgctgcctacccccggcaatttcttccattcaaccaactggcagcattgaactctcatgcttatgtacaacaacaacaactactaccattcagccagctagctgctgtgagccctgctgccttcttgacacagcaacatttgttgccgttctacctgcacactgcgcctaacgttggcaccctcttacaactgcaacaattgctgccattcgaccaacttgctttgacaaacccagcagtgttctaccaacaacccatcattggtggtgccctcttttagattgcttatgagttatagttcaataataaagttttttttgctg

SEQ ID NO: 11826 - DNA, 633 bp, Zea mays
  Clone ID: LIB3061-086-Q1-K6-A12
ggctagggttttggcgtccgagaccaaaccaagctctctccggcgacggtgagggctcgatatcggagtccagtaggcggctcctgctgcttcggcggtccctaatccctctctcggcagtgtacagatggcgtccggcggtccggcgctcgagccgctcgtcgaccaggtcatctccgtcatcaccaacgatggccgcaacatcgtgggtacgctcaggggattcgatcaggccaccaacattatactcgacgagtcccatgagagggtctattctagaaaggagggagtccaacaacttgttcttggtctgtacattatcaggggtgacaacataagcgttgtgggcgaggttgatgaagagctggattcaagattggatatgtcgaagctaagggcgcacccactgaagcctgttattcactgaggtccgagtatgtctttgggtaatatgtggactggatgggtcactgtttaatgcaggatgtagcatcatcatggcgaggggactgagtaatatggacatgttgcgtattgtgcatggacgtgttggctgttgggttgcttgcctacgcattctgtaagattgcagttaccattaggaactgaactcaagtcgactgaattaatata

SEQ ID NO: 11827 - DNA, 639 bp, Zea mays
  Clone ID: LIB3061-086-Q1-K6-A2
gagacgcacatctatctgtcaagcgacgccgcggcctcgatcagagtcggaggcgaacacccccatggcggcggctggcggcggcgcaggagggaaggtatccttcaagatcatcctcacctccgaccccaagctccctttcaaagtgttcagcgtgcccgaggcggcgccctttaccgcggtgctcaagtacgccgcggaggagttcaaggtcccgccccagaccagcgccatcatcaccaacgatggaattggcatcaacccccagcaaagtgcaggcaacgtgtttctgaaacatggttcggagctgcgtctcatccctcgcgatagagttggagctgtagtcatgtcttccggttagaggatatatacagtccaatgcataatgagcaaaacttgagagaaataaagctttgatgttggccttgcttggctgtaggatgttgttacaaggataataagcgaaccttaccgtacatgtctcaagttgtatgctctctgtttgtatgtggagagatttctgaaagtgaatccagtatctgaatcgactcaattagccgctttctgtctgcacagagcgatatgatcctgcttcgcgctctgtcagttcaaaagtatagaaatgaggtgttcttccct

SEQ ID NO: 11828 - DNA, 616 bp, Zea mays
  Clone ID: LIB3061-086-Q1-K6-A3
atcaaaccgctgggttgcacagagaatacaagacatgctcgttaacggtatcaagacttgggcaccaattcttccagtaaagagggcagtgattgatttttcatcacctaatattgcaaaggaaatgcatgtgggacatctaaggtctacaattattggagatacattagcacgcatgtttgagttctcgaatgttgatgttctgcgaagaaaccatgtaggagattggggtacacagttcgggatgctaatagaatatctttttgagaaatttccaaattggcaagagattggtagccaggccattggagaccttcagattttctataaagcatccaagcatagatttgacaatgatccagaatttaaagcaagggctcaacaaggagttgttcggctacagggaggagaagagagatatcgagaagcatggaaaaagatttgtgacattagcaggagtgaatttgacttggtctacaaacgcctaaatgtggtgcttgaagaaaagggggagagtttctataatccttatattcctcaagtgttggaggaattgagtagcaaaggcttgatcaaggagagtgagggtgccagagttatatttattcaaggtcat

SEQ ID NO: 11829 - DNA, 642 bp, Zea mays
  unsure (1)..(642): unsure at all n locations; Clone ID: LIB3061-086-Q1-K6-A5
cgagtgcccccggcggcgcggccttagcagcgtcaactggccaggcgcggcggcctcggccctgcggcgggcggccccgttgcgggcgcacaaccccagcgaggctcggcggccatggcgtgcgtgcagccaatatggcgaccatggcgcgcgcgggaccggcggcgctaagccccaacgacgcgcgtggccggcgctcggcgcggcccgcggccaggtcggcgcgcgcggccgacgcacggcgcagcacgcggctgcctcctcggcacaggtggccttaagcagcggccacccccgctgggcggttttccatgccgacgcggcccctggtacgcagtggcacgaacgcgcggctcccctcggcggcggcgcgggcagtagccccgacgcgtgaccctgctgcggcacgggcaggccggtggtcccagcgtgcacgaggtcctttgcgtgggggcagccagggaccaacacagatccagcgtggacttggctggcacaaagacgacatgcagaaaatggagcatgcattgaatgccatgaggaacaatagatatcgtacattacttttgttcttgatgtccaaacctctactgttcctctttctccaacaacaagttctntcttttctggcgagcaaaagtg

SEQ ID NO: 11830 - DNA, 166 bp, Zea mays
  Clone ID: LIB3061-086-Q1-K6-A6
cacaacaatgttctaagtactcagccagtggtatttactggttgacctactgtagtttgcgtcggaatagatatgtttttttactcttcgtggggcagttttgtactggtggattcataaggactctgattatggtgcgttcggaacttataataataagcacatg

SEQ ID NO: 11831 - DNA, 663 bp, Zea mays
  unsure (1)..(663): unsure at all n locations; Clone ID: LIB3061-086-Q1-K6-A7
aacaagcaacatagaaagtggaatacagtagcaacaatagagcaacaatggcggccaagatattttccatccttatgctccttgctctttctgcatgtgttgctaacgcgaccatttttcctcaatactcacaagctcctatagctgcccttcttcccccataccttccatcaatgaccgcttcagtttgtgaaaacccagcccttcaaccctacaggctccaacaagcaatcgcaacaagcaacttacctttatcacccctgttctttcaacaatcgccagccctatctttggtgcagtcattggtacaaaccatcagggcacaacagctgcaacaactcgtgctaccagtgatcagccaagtagctctggcaaacctttctccctactctcagcaacaacaatttcttccattcaaccaactgtctacactgaaccctgctgcttatttacaacaacaacaactactaccattcagccagctagctactgcctactctcagcagcaacaatttcttccatttaaccaattggccgcactgaacccctctgcttatttccagcagcaaatactactaccatttggccagctagctacaacaagccccacttcctttttgaaacaacaacaattgcttncgttctaccagcagtttgtggcta

SEQ ID NO: 11832 - DNA, 360 bp, Zea mays
  unsure (1)..(360): unsure at all n locations; Clone ID: LIB3061-086-Q1-K6-A8
gagagacctgcgcgccggctgttcccaagctcaccggagagggggaagagggcgaccgaaggcggtgatgggtttcatcatggacttcgcggtgaatctgttcctccgtctgttggtggtcccggtcaagcgcgtccaggttcggcgggtgcctgtctgcggggtgaaggagcggtgcgagcgctctaaggcggcgtggagccttcctcctggcccctaccgtttctggaccttagtccgtttgtacttgtngttctcctgggtttccctnctcattctggccttccgcccgtcgttccccttcgactaccccctctccgccctctctggccttttcctcctcttctcttccccctttcc

SEQ ID NO: 11833 - DNA, 638 bp, Zea mays
  Clone ID: LIB3061-086-Q1-K6-A9
aatattttgagcattcagaaacacaccaagcgaagcgcactagcaacaacctaacaacaatggctaccaagatattatccctccttgcgcttcttgcgctttttgcgagcgcaacaaatgcgtccattattccacaatgctcacttgctcctagttccattattccacagttcctcccaccagttacttcaatggccttcgaacacccagctgtgcaagcctataggctacaacaagcgattgcggcgagcgtcttacaacaaccaattgcccaattgcaacaacaatccttggcacatctaacaatacaaaccatcgcaacgcaacagcaacaacagttcctaccagcactgagccacctagccatggtgaaccctgtcgcctacttgcaacagcagctgcttgcatccaacccacttgctctagcaaacgtagttgcaaaccagcaacaacaacaactgcaacagtttctgccagcgcttagtcaactagccatggtgaaccctgccgcctacctacaacagcaacaactgctttcatctagcccgctcgctgtggccaatgcacctacatacctgcaacaagaattgttgcaacagattgtaccagctctaactcagctagctgtggcaaaccct

SEQ ID NO: 11834 - DNA, 212 bp, Zea mays
  unsure (1)..(212): unsure at all n locations; Clone ID: LIB3061-086-Q1-K6-B1
attgagatttatctcgatcaatatcctgattatttttaggaaacncatgccgctntgagggcaccattatcagagtcatctcatatgtaaacaaaaagggggcggccccactgggggctccacgcctacggccgcggccatggcagccctaccccctgctctggggcccccaacggggggggcccgggccgccgtttaccaccggggggccg

SEQ ID NO: 11835 - DNA, 637 bp, Zea mays
  Clone ID: LIB3061-086-Q1-K6-B10
gttctgccaagaggaaaaggacactatccctggaagatgacagggtgataccttataaatctgatcagctacagtaaatcccctgtgcacttataatattcacgcaagccatgcattctatttttctatctattgctgttagaagatcagtaataattgcaacactgcttcacacaattagcttcattctgttcttttgcatggataatcatagtccagcggggcgtaatatccatttgaataactacttaggcttggcatggcattagtttgtttttcttcttcatccttggacttcgattgatttgatgaattattgttatctagcagaaatgactcgatggttattgacatgggcccccctgctgattgggtgaaaataaatgttaggaaaactaaagattgctatgaagtctatgcgttggttcctggccttctgagggaagaggtaagtaaatgcaaaacttttttaatgattgatttttgtccttaaattatgttctcctctttgtgctgcaaaagttggagcgtctgatgcatggtttgatgcaggtacatgttcagtccgacccagctggtcgtttgatagttactggagagcctgagcaattggataacccatggggtgtcactccat

SEQ ID NO: 11836 - DNA, 618 bp, Zea mays
  Clone ID: LIB3061-086-Q1-K6-B12
gtgccacctccggtgcatctcccaccgccggtccacctgccgccgccggtccacctgccaccgccggtccatgtgccgccgccggttcatctgccgcgccaccatgccactaccctactcaaccgccccgggctcagcctcatccccagccacacccatgcccgtgccaacagccgcatccaagcccgtgccagctgcagggaacctgcggcgttggcagcaccccgatcctgggccagtgcgtcgagttcctgaggcatcagtgcagcccgacggcgacgccctactgctcgcctcagtgccagtcgttgcggcagcagtgttgccagcagctcaggcaggtggagccgcagcaccggtaccaggcgatcttcggcttggtcctccagtccatcctgcagcagccgactccatgcccctacgctgctgccggcggtgtcccccactgaagaaactatgtgctgtagtatagccgctggctagctagctagttgagtcatttagcggcgatgattgagtaataatgtgtcacgcatcaccatgggtggcagtgtcagtgtgagcaatgacctgaatgaacaattgaaatgaaaagaaaaaaagtactccatctgttcc

SEQ ID NO: 11837 - DNA, 531 bp, Zea mays
  unsure (1)..(531): unsure at all n locations; Clone ID: LIB3061-086-Q1-K6-B2
gggccctcttggatgatttgatcaagaatcaagaagatctcgtcacctgtctgtccctgccccttccttctcctctctcggggagggagggagggtcagggaggattggttagtcgttggattaggttggggagtgggagtagttaggtaatctgtcctagttcatcaatcaacgaggttttctttttctctttttgggttttcgatggaattgtttttgtccgtccgtccatgcaaccaagaaagaaaagaaatttccaaggcccatggagaatctgtacaaaagagtggctacgtgcaagaggagcgttgagtctgtgagcaggaccaagcagcagcagcagctaggttgttcagtcaggcagtggatgagctgtgtgtgtgagagagagacatctatttgtggcgttttcccttttttcccccttttctctcctgattattgtatgttgtaatatcctgctgtgattgaaatgaaatcaagctgtataatactggtagtaaanaaaanaaaaaaaaaanaaaanaaaa

SEQ ID NO: 11838 - DNA, 477 bp, Zea mays
  Clone ID: LIB3061-086-Q1-K6-B3
ggcacaaaacatcagggcacaacaactacaacaacttgtgctagcaaaccttgctgcctactctcagcaacagcagtttcttccattcaaccaactaggttcattgaactctgcttcttatttgcaacaacaacaactaccattcagccagctacctgctgcctacccccagcaatttcttccattcaaccaactagcagcattgaactctcctgcttatttacagcagcaacaactactaccattcagccagctagctggtgtgagccctgctaccttcttgacacaaccacagttgttgccgttctaccagcacgttgcgcctaacgctggcaccctcttacaactgcaacaattgctgccattcaaccaacttgctttgacaaacccagcagtgttctaccaacaacccatcattggtggtgccctcttttagatttcttatgagttatagttcataataaagttttttatctg

SEQ ID NO: 11839 - DNA, 627 bp, Zea mays
  unsure (1)..(627): unsure at all n locations; Clone ID: LIB3061-086-Q1-K6-B4
cccacgcgtccgcccacgcgtccgcccacgcgtccggaaagagtggtacttcttctaccagaaggaccgcaagtacccgacggggctgagggcgaaccgggccaccgaggccggttactggaaggcgacgggcaaggacaaggaggtctacaacgccgcggaaggagtggcggtactggtcggcatgaagaagacgctcgtcttctacaggggcagggctcccaggggtgacaagacaaactgggtcatgcacgagtacaggctcgaagggcagcggcaggctccccgccggcctcgcgtccgcaaccggctcaaccgccgccaacgccgcggcggccttgaaagcttctgcttataaggatgagtgggtggtatngtcgtgtgttccacaagaccactgggatcaagaagaccaccactgctgcaccggcgtaccaggtggccatggccggcgctgagatggatcagaatcagaacaacatccccttccccatgccgatgcaattttccatgctgcccgacttctccttggacccggtgcccccctactacccgtaccccagcccatgagcttctaccaccagatgggcacggggactgcttgcgctggcgngcttcgatgtttct

SEQ ID NO: 11840 - DNA, 643 bp, Zea mays
  Clone ID: LIB3061-086-Q1-K6-B5
caatatattgattgattatttctaggaaacacatgccggtatgagggcaccattatcgattacatctcatatgtaatctaaaagatggcacctccaacgatgggttgctgccacgacaaggcagggttcatcaaagagaactggctgtatggtagcaattgttgctgctgtaggaaggcagtgaccaatgggttaggcactgctagtggattaagtaactgttgtcgctgttgtaggtacgcagcagagttcgacacagtcagttggttgaatggaagcagctgttgcaagtaggcagcagggtttgccacagctagctgagtcagagctggtacaatctgttgcagcaattgttgttgcaggtatgtaggtgcattacccacaacgagagggctagatgaaagcagttgttgctgttgtaggtaggcggcagggttcaccatggctagttgactgagcgctggcagaaactgttgcaattgttgttgttgttggtatgcagctacgtttgccagagcaagtgggttggatgcaagcacctgctgttgcaagtaggcgacagggttcaccacatctagttggctcagtgctggtaggaactgttgttgctgttgtgttgcgatggtttgtatggttagatgtg

SEQ ID NO: 11841 - DNA, 636 bp, Zea mays
  Clone ID: LIB3061-086-Q1-K6-B6
attttgagcattcagaaacacaccaagcgaagcacattagcaacaacctaacaacaatggctaccaagatattatccctccttgcgcttcttgcgctttttgcgagcgcaacaaatgcgttcattattccacaatgctcacttgctccaagttccattattacacagttcctcccaccagttacttcaatgggcttcgaacacccagctgtgcaagcctataggctacaacaagcaattgcggcgagcgtcttacaacaaccaatttcccagttgcaacaacaatccttggcacatctaacaatacaaaccatcgcaacgcaacagcaacaacaattcctaccagcactgagccacctagccatggtgaaccctgccgcctacttgcaacagcagttgcttgcatcaaacccacttgctctggcaaacgtagttgcaaaccagccacaacaacagctgcaacagtttctgccagcgctcagtcaactagccatggtgaaccctgccgcctacctacaacagcaacaactgctttcatctagcccgctcgctgtggccaatgcacctacatacctgcaacaacaattgttgcaacagattgtaccagctctgactcagctagttgtggcaaaccctg

SEQ ID NO: 11842 - DNA, 684 bp, Zea mays
  Clone ID: LIB3061-086-Q1-K6-B7
ctgcagttttcgggccgacactcccgggtcgacgacgtgctgcgcgcgcgcttcattcgccgacaggctgacggcttcgcgtaccgcgcgctcgccccattcggcattgcgcccacgcaattgcgcgaggccgcggatgtacgcggcggcgtcctgcatcgccttgcggatctcggtcgattgcgtgtcggtcggcagcgcggccggtgtcgcggatgcctccgacgcgcccgacgcgccggccgccggcgctcgcggcgcggcagggttcgcgcccggcggcgtggcgccgccgatgccgagctgcaccggcgacgccgcgccgagattggtgccgggcgccatcgccgcgaagtggctcgcatagacgatgtaggtgcccgcgctcgcggcccgcgcaccgcccggcgcgacgaacgcggcgaccggcacgggcgagccgaggatggccttgatgatctgccgcatcgacgtgtcgaggccgccgggcgtgtcgagctgcaggatcgcgagcggcgcgcgctcgtgtgcggcccgttcgagcgagcgaacaatgaaatcggcgctggccggcccgatcgcaccgttgacggggatcacgatgaccggcggcgcggcggcgggggcagcggcgggcgggggcgcggcgacggccgcgcacacgacgagcagcgccgcgaacag

SEQ ID NO: 11843 - DNA, 642 bp, Zea mays
  unsure (1)..(642): unsure at all n locations; Clone ID: LIB3061-086-Q1-K6-B8
attgagaccaactagcaacatagaaagcacaatagtgtaccaacaatggcagctaaaatattttgcctccttatgctccttggtctttctgcaagtgctgctacggcgaccattttcccacaatgctcacaagctcctatagcttcccttcttcccccgtacctctcaccaacggtgtcttcggtatgtgaaaacccaattcttcaaccctacaggatccaacaggcaatcgcagctggcatcttacctttatcacccttgttcctccaacaatcatcagccctattacagcagttacctttggtgcatttattggcacaaaacatcagggcacaacaactacaacaacttgtgctagcaaaccttgctgcctactctcagcaacagcagtttcttccattcaaccaactagctgcattgaactctgcttcttatttgcaacaacaacaactaccattcagccagctatctgctgcctacccccagcaatttcttccattcaaccaactgacagcattgaactctcctgcttatttacagcagcaacaactactaccattcagccagctangctggtgtgagccctgctaccttcttgaccaaccacagttgttgccgttctacagcacgctgcgcctaacg

SEQ ID NO: 11844 - DNA, 638 bp, Zea mays
  Clone ID: LIB3061-086-Q1-K6-C12
attccacatttcctcccaccagttacttcaatgggcttcgaacatccagccgtgcaagcctacaggctacaactagcgcttgcggcgagcgccttacaacaaccaattgcccaattgcaacaacaatccttggcacatctaaccctacaaaccattgcaacgcaacaacaacaacaacaacagtttctgccatcactgagccacctagccgtggtgaaccctgtcacctacttgcaacagcagctgcttgcatccaacccacttgctctggcgaacgtagctgcataccagcaacaacaacagctgcaacagtttatgccagtgctcagtcaactagccatggtgaaccctgccgtctacctacaactactttcatctagcccgctcgcggtgggcaatgcacctacgtacctacaacaacagttgctgcaacaaattgtaccagctctgactcagctagctgtggcaaaccctgctgcctacttacaacagttgcttccattcaaccaactggctgtgtcaaactctgctgcgtacctacaacagcgacaacagttacttaatccattggcagtggctaacccattggtcgctaccttcctgcagcagcaacaacaattgctgccatacaaccagtt

SEQ ID NO: 11845 - DNA, 423 bp, Zea mays
  unsure (1)..(423): unsure at all n locations; Clone ID: LIB3061-086-Q1-K6-C2
gttcgacggcgcaccaccgagccttctcctccccgccgacgagctgcggcggaagtttcagcacgcaggaatctccctggaccgacccatcgtcgtgacctgcggatccggcgtgactgcctgcatactcgctctggggctgtacaggatcggaaagcgtgatgtgccagtctacgatgggtcctggacggagtgggagggtcagtcggactccgattaccccaaagtcaccgctcctggtacagcttgagcgtctgggactgggagttggcagttttagactgccagcatgatggcattgtgtttgcgacaggctgaaccgattttatcgagcactggaagcattgtattcgctactggtaggcctgctaatggcaaaaattccaacccaaaaaaaaaaaaaaaaanaaaanaaaanaaaaa

SEQ ID NO: 11846 - DNA, 601 bp, Zea mays
  unsure (1)..(601): unsure at all n locations; Clone ID: LIB3061-086-Q1-K6-C3
atttagaccaactagcaacatagaaagcacaatagtgtaccaacaatggcagccaaaatattttgcctccttatgctccttggtatttctgcaagtgctgctacggcgaccattttcccgcaatgctcacaagctcctatagcttcccttcttcccccgtacctctcaccagcggtgtcttcggtatgtgaaaacccaattcttcaaccctacaggatccaacaggcaatcgcagctggcatcttacctttatcacccttgttcctccaacaatcatcagccctattacagcagttacctttggtgcatttattggcacaaaacatcagggcacaacaactacaacaacttgtgctagcaaaccttgctgcctactctcagcaacagcagtttcttccattcaaccaactagctgcattgaactctgcttcttatttgcaacaacaacaactaccattcagccagctacctgttgcctacccccaacaatttcttccattcaaccaactggcagcattgaactctcctgcttatttacagcagcaacaactactaccattcagccagctagcntggtgtgagccctgctaccttcttgaac

SEQ ID NO: 11847 - DNA, 509 bp, Zea mays
  unsure (1)..(509): unsure at all n locations; Clone ID: LIB3061-086-Q1-K6-C4
gcaaacctttctccctactctcagcaacaacaatttcttccattcaaccaactgtctacactgaaccctgctgcttatttgcagcaacaactattaccattcagccagctagctactgcctactctcagcaacaacaacttcttccatttaaccaattggccgcactgaaccccgctgcttatttgcagcagcaaatactactaccatttagccagctagctgcagcaaaccgtgcttccttcttgacacagcaacagttgctgcctttctaccagcagtttgcggctaaccccgcaaccctcttacaactacaacaattgttgccctttgtccaacttgctttgacagaccgagcggcctcctaccaacaacacatcatttggtggtgccctcttttagattgcttattagttgtaattcaataataaagttttttggatgatgtatgtggccaaccagaaataagaagttacatttccagattttaatgtgaaaaaanaaaanaaaa

SEQ ID NO: 11848 - DNA, 680 bp, Zea mays
  unsure (1)..(680): unsure at all n locations; Clone ID: LIB3061-086-Q1-K6-C5
cccggggcaagattgctgagcttctgagataccactccacgaagatcggtgatgagctgaccagcctcaaggattatgtgacgatgatgaaggagggacagaacgacatctactatatcactggtgagatcaagaaggcagtggagaactcccctttcctggagaagctgaagaagaggggctacgaggtcctgtacatggttgatgccattgatgagtatgctgttggtcagctcaaggagtttgagggcaagaagcttgtctcggccaccaaggagggtctgaagcttgatgagaccgaggatgagaagaagaggaaggaggagctgaaggagaagtttgagggtctgtgcaagatcatcaaggaggttctgggcgacaaggttgagaagggttgtggtgtctgaccgtgttgtggactcaccgtgctgccttgtcactggtgagtatggctggacagccaacatggagaggatcatgaaggcgcaggccctgagggactctagcatgtcggggtacatgtcgagcaaaaagactatggaaatcaacccggagaacccaatcatggatgagctccgtaagcgcgccgaggctgacaagaatgacaagtcagtcaaggatcttgtgatgttgctgttcgagacagctctnctgacctccggcttcagcctggatgaccc

SEQ ID NO: 11849 - DNA, 563 bp, Zea mays
  Clone ID: LIB3061-086-Q1-K6-C6
gcgcaagggagcgatgcggcggcggcgggcggcgaggtggaggagacatggcggcgtggctggttgccaagaacaccctcaagatcatgcccttcaagctcccgcccgtcggcccttatgatgtccgcgtgcgcatgaaagcagtggggatttgcggcagcgatgtgcactacctcagggagatgcgcatcgcgcacttcgtggtgaaggagccgatggtgatcgggcacgagtgcgcgggcgtggtcgaggaggtgggcgccggcgtgacccacctgtccgtgggcgaccgcgtggcgcttgagccgggcgtcaactgctggcgctgccgccactgcaagggcgggcggtacaacctgtgcgaggacatgaagttcttcgccaccccgccggtgcacgggtcgctggcgaaccaagtggtgcacccgggcgacctgtgcttcaagctccccgacggggtgagcctgtaggagggcgccatgtgcgagccgctgagcgtgggcgtgcacacgtgccgccgcgcggggggtggggcccgagacaggcgtgctcgtggtgggcgc

SEQ ID NO: 11850 - DNA, 586 bp, Zea mays
  unsure (1)..(586): unsure at all n locations; Clone ID: LIB3061-086-Q1-K6-C7
ctgtcgccaaccccggccacggatcggggatgtcgtctgctgcgggccgcgcgccggcgccgacgccgatgggctccgccgatcgctgtaagatcgacgggatcgtggcggcggagaaagccaccaggagctgcgtcgaatgccgcgccaccaccacgcccatgtggcgcagcggcccgaccgggcccaggtcactttgcaacgcctgtgggatccggtaccgaaaaaagaggaggcaagagcttggcctagaccgcaagctgcagcaacaacaaaataatggcgaggcgaagacggatgaagcaaaagacagctctagcaacagcagcagcgggagcagcaacttgcaggtggtgcagaaacggaggctgctaatgggagtggaggaggctgctctgctgctgatgaccctatcttcttcgcccacatccacgttgcttcatggataaggaccctcctccaacgccagatcagcagtgtacatacaacgtaccccctgcacagtgactgccgaacgattgcaggcctatctcagggttgntgtgatcttgtgattggggcggattattagtgccaagctaatcac

SEQ ID NO: 11851 - DNA, 593 bp, Zea mays
  unsure (1)..(593): unsure at all n locations; Clone ID: LIB3061-086-Q1-K6-C8
gcaagagcgacagagagagagagaccgacgcgccggcagatcccaagctcaccggagagggggaagagggcgaccgaaggcggcgatgggtttcatcatggacttcgcggagaatctgatcctccgtctgatggaggacccggacaagcgcgaccaggttcggcgggagcatgtctacaagatgaaggagcggtgcgagcgcactaaggcggcgtggagcctccctctgcgcccctacggcttctggaccttcgaccgcttcaactcgcagctctcctgggatccccagatcagccaggccgccggccgtcgggacccctacgacgacctcatcgcccgccactctggctcgccgccgtcttcctgaacacccgttccgatccttgcccagaaggtctacttgggcatcaataagaaactctttcccctcaaactgattgtggttccatcctcttctgtctggaaaatgttgtcaccaaactaccctatttcctgttccagtttggcatggaagtataagttgtgtacttctattctcaagttgttgtctttgtattatgaaatgtntccaataatcagcagtttttgatgta

SEQ ID NO: 11852 - DNA, 640 bp, Zea mays
  Clone ID: LIB3061-086-Q1-K6-C9
cccacgcgtccgatttagaccaactagcaacatagaaagcacaatagtgtaccaacaatggcagccaaaatattttgcctccttatgctccttggtatttctgcaagtgctgctacggcgaccattttcccgcaatgctcacaagctcctatagcttcccttcttcccccgtacctctcaccagcggtgtcttcggtatgtgaaaacccaattcttcaaccctacaggatccaacaggcaatcgcagctggcatcttacctttatcacccttgttcctccaacaatcatcagccctattacagcagttacctttggtgcatttattggcacaaaacatcagggcacaacaactacaacaacttgtgctagcaaaccttgctgcctactctcagcaacagcagtttcttccattcaaccaactagctgcattgaactctgcttcttatttgcaacaacaacaactaccattcagccagctacctgttgcctacccccaacaatttcttccattcaaccaactggcagcattgaactctcctgcttatttacagcagcaacaactactaccattcagccagctagctggtgtgagccctgctaccttcttgcacaaccacagttgttgccgttctaccagca

SEQ ID NO: 11853 - DNA, 633 bp, Zea mays
  unsure (1)..(633): unsure at all n locations; Clone ID: LIB3061-086-Q1-K6-D10
cgctgaagccgcaggcctccgtggtgcgcgtcgccgtgtaccgcatggccacggccgccgggaactcctcggaggggcgggccccgccgccgtacacgctcgcggcgagcgcgcggttcacggcgctgctgcacaacccgagcgaccgcgccgtggtgttctacgacggcctcttcgcctacgtgacgtaccgcggggagatggtggcgccccccgcgccgctgcccggggtggcacagggccgcggcgccgacgtggcgctgtcgccgcatttcggccttggcggcgcggtgcccgtgccggtgtcggcagacgcggcgcaagcgctggagggcgactgcgcggcgggccgcgtggagctacgcctcgtcgtcatgggccgggtcaagtacatgagcgggccattcaggaccggatggcgcgggctatacctgcgctgcgatgtcaccgtcggcctctgggtggacgccaccgcgggcgacgacggagccggggacgtgccactgctcgagtaccccaagtgctccgtcgacgcttgagttgatccttgatcggcgcaatgcatgagcgctcagatgatcagattttcagaattctggtggagataaggaattgggaaaaacattnttctgt

SEQ ID NO: 11854 - DNA, 515 bp, Zea mays
  Clone ID: LIB3061-086-Q1-K6-D11
tgcaaaccagcaacaacaacagctacaacagtttctgccaacgctcagtcaactagccatggtgaaccctgccgcctacgtacaacaacaacaactgctttcatctagcccgctcgctgtgggcaatgcacctacatacctgcaacaacaattgttgcaacagattgtaccagctctgactcaactagctgtggcaaaccctgttgcctacttgcaacagctgcttccattcaaccaactgactctgtcgaactctgctgcgtacctacaacagcgacaacagttacttaatccattggtagtggctaacccattggtcgccgccttcctacagcagcaacaattgctgccatacaaccagttctctttgatgaatcctgtcttgtcgaggcagcaacccatcgttggaggtgccatcttttagattacatatgagatgtactcgataatggtgccctcataccgacgtgtgtttcctagaaataatcaatatattgattgagatttatctcgat

SEQ ID NO: 11855 - DNA, 529 bp, Zea mays
  Clone ID: LIB3061-086-Q1-K6-D12
gaaaccaccaaagtatgagcggttcattcgaccaactggtctgcgtttcaccaaagctcatgtgactcacccagaactgaagtgcactttcaaccttgacataatttctgtgaagaaaaacccaaatggtccgatgtacacttctcttggtgttatgacaaggggaacaatcattgaggtaaatgtcagtgagcttggtctggtaactcccgctggaaaagttgtttgggggaaatatgctcaagttacaaacaacccggagaatgatgggtgtatcaatgctgttttgctagtgtagaaccatagtgagattttgtttatggtgatgaatcgtcccatttgtatctgctcttgataagatgctcccttttgaccgatctcatggctattcccaggagtttgttttgcaccgtggtccatgggcgagcattctatatccttgctatgtgcgacaagccgacaaatgacttggctattatagcctgctataaagttgactaatacaaattagcaacatttttcttgagct

SEQ ID NO: 11856 - DNA, 431 bp, Zea mays
  Clone ID: LIB3061-086-Q1-K6-D3
catttaaccaattggcacgcactgaacccctgtggttatttccagcagcaaaatactaactaccatgtaggccagcatagctacaacaagccccacttcctgttttgaaacaacagcaatggctaccggactaccagcagttagtggctaaccccgcaaccctctgacaactgcaacagttgctgcccttagtccaacttgctttgacaaacccagcagccttctacacaacaacacatcattggcggagccatcttttagattgcttattagttgcaattcaataatgaagatttttggctgatgtatgtggcctactagaaataagaagctacattgccaaattctaatgtgctattggcctgcaaggggtgttagataattattttccctaagattgggaagcaagctataaatcatacttatagtgt

SEQ ID NO: 11857 - DNA, 635 bp, Zea mays
  unsure (1)..(635): unsure at all n locations; Clone ID: LIB3061-086-Q1-K6-D4
caaagttgggcttttggacagctgtggtgtgcacggcagctctgtgacttgtgaggaggaagggaggaagaaagcggatccatggcgtcgaagcggatcctcaaggagctcaaggacctgcagaaggatcctcccacctcttgcagcgcaggccctgttgccgaagatatgttctactggcaggcgacgattatggggccatcagatagcccatacgctggtggcgtatttttggtcactattcactttccaccggactacccattcaaaccaccgaaggttgcattcaagacgaaggtttaccatccgaatatcaacagcaacgggagcatctgtcttgatatcttgaaggagcaatggagccctgcactgacagtttctaaggtcctcctctcaatttgttcccttctgacggacccaaaccctgacgatccgttggtcccagagattgctcacttgtacaagactgatcgcgtgaagtacgaatcgactgctaggagctggactcagaaatatgcaatgggctgacaagctattggtctctcgtagacctaaagcacgtactgccttctgtaactgaaaccagatgtctaaattaatttgtncattcgtgcatcgaacttttgatatataat

SEQ ID NO: 11858 - DNA, 472 bp, Zea mays
  Clone ID: LIB3061-086-Q1-K6-D5
ccttgctgcatactctcagcaacatcagtttcttccattcaaccaactggctgcattgaactctgctgcttatttgcaacaacaattaccattcagccagctagttgctgcctacccccagcaatttcttccattcaaccaactagcagcattgaactctgctgcttatttacagcagcaacaactactaccattcagccagctagctgatgtgagccctgctgccttcttgacacaacaacagttgttgccgttctacctgcacgctatgcctaacgctggcaccctcttacaactgcaacaattgctgtcattcaaccaacttgctttgacaaacccaacagtgttctaccaacaacccatcattggtggtgccctcttttagattgcttatgagttatagttcaataatgaagttttttggatgatgtttgtggcgtcccagaataagaaagtacatttctagattctt

SEQ ID NO: 11859 - DNA, 647 bp, Zea mays
  Clone ID: LIB3061-086-Q1-K6-D6
attttgagcattcagaaacacacctagcgaagcgcactagcaacgacctaacaacaatggcttccaagacattatccctccttgcgcttcttgccctttttgtgagtgcaacaaatgcgttcattattccacaatgctcacttgctccgagtgccattattccacagttcctccctccagttacttcaatgggcttcgaacacccagctgtgcaagcctataggctgcaacaagcgcttgcggcgagcgtcttagaacaaccaattgcccaattacaacaacaatccttggcacatctaaccatacaaaccatcgcaacgcagcagcaacaagcactgagccacctagccgtggtgaaccctatcgcctacttgcaacaacagctgcttgcatccaacccacttgctttggcaaacgtagctgcataccaacaacaacaacagttgcaacagtttctaccagcgctcagtcaactagccatggtgaaccctatcgcctacctacaacagcaacaacttctttcatctagcccgctcgctatgggcaatgcacctacatacctgcaacaacagttgttgcaacaacagttgctgcaacaaattgtaccagctcttactcagctagctgtggcaaaccctgctgcctac

SEQ ID NO: 11860 - DNA, 473 bp, Zea mays
  Clone ID: LIB3061-086-Q1-K6-D7
attgagaccaacaagcaacatagaaagtggaatccagtagcaacaacagagcaacaatggcgaccaagatattttccctccttatgctccttgctctttctgcatgtgttgctaacgcgacaattttccctcaatgctcacaagctcctatagctttccttctttccccatacctttcatcaatgatagctttagtatgtgaaaacccagctttttagcccttttgggttcaacaaggaattgcaggaaggaacatacctttattacccttgttggtttaacaattgccagccctatttttgggggagtcattggttcaaaccattaagggacaacagctggaggaactcgtgcttcctgtgatcaaacaaatagctcttggaaaactttcttccttcttttaagaacaacaatttctttcatttaaacaactgtctatactgaaccctgctgcttatttgcagcaacaacta

SEQ ID NO: 11861 - DNA, 635 bp, Zea mays
  Clone ID: LIB3061-086-Q1-K6-D8
ccgcaaccattttcccacaatgctcacaagctcctatagcttcccttcttcccccatacctctcaccagcggtgtcttcaatgtgtgaaaccccaattgttcaaccctacaggatccaacaggcaatcgcaacaggcatcttaccattatcacccttgttcctccaacaaccgtcagccctattacagcagttacctttggtccatttggtggcacaaaacatcagggcacaacaactacaacaacttgtgctagcaaaccttgctgcatactctcagcaacatcagtttcttccattcaaccaactggctgcattgaactctgctgcttatttgcaacaacaattaccattcagccagctagttgctgcctacccccagcaatttcttccattcaaccaactagcagcattgaactctgctgcttatttacagcagcaacaactactaccattcagccagctagctgatgtgagccctgctgccttcttgaccaacaacagttgttgccgttctacctgcacgctatgcctaacgctggcaccctcttacaactgcaacaattgctgccattcaaccaacttgctttgacaacccaacagtgttctaccacacccatcattggtggtgccctct

SEQ ID NO: 11862 - DNA, 623 bp, Zea mays
  Clone ID: LIB3061-086-Q1-K6-D9
ggccgctgagcctggttgccttccggtcggcagcttggcttgctcgctcgggctcgcccgcgacgacggcgtgcttgctcggggcgacggcacggagtctgcgcgcttgcctgcggcagcggctcggcctgctcgctcgggctcgcccgcggcggcgtttcggcgtgcttgctcggggcgacggcacgaagtctgcgcgcttgcctgcggcagcggctcggcctgctcgctcgggctcgctcgcagcggcggttcggcgagcttgctcggggcagtggcacggagcatgcgcgcttgcctgcggcagcggctcggcctgctcgctcgggctcgcccgcggcggcggttcggcgagcttgctcggggcggcggcacggagcctgcgcgcttgcccgcggcagctgctcgggctcgcccgcggcggcggttcggcgagcttgctcggggcggtggcacggagcatgcgcgcttgcctgcggcagctgctcgggcagcgacgtggcctgtaggtcgacttggcccacatctgcatgtagattgcagagcggtgtcgcggtagtttggcctgcttcagctgcggtgtcgcggtggctggcttttgctcgcggctgtggccgcatgct

SEQ ID NO: 11863 - DNA, 626 bp, Zea mays
  Clone ID: LIB3061-086-Q1-K6-E1
attttgagcattcagaaacacaccaagcgaagcgcactagcaacgacctaacaacaatggctaccaagatattagccctccttgcgcttcttgccctttttgtgagcgcaacaaatgcgttcattattccacaatgctcacttgctcctagtgccattattccacagttcctcccaccagttacttcaatgggcttcgaacacctagctgtgcaagccaacatgcaacaacaagcgcttgcggcgagcgtcttacaacaaccaattgcccaattgcaacaacaatccttgccacatctaacaatacaagccatcacaacgcaacagcaacaacagttcctaccagcactgagccacctagccatggtgaaccctgccgcctacttgcaagagcagctgcttgcatccaacccacttgctctggcgaacgtagttgcaaaccagcaacaacaacagctacaacagtttctgccaacgctcagtcaactagccatggtgaaccctgccgcctacgtacaacaacaacaactgctttcatctagcccgctcgctgtgggcaatgcacctacatacctgcaacaacaattgttgcaacagattgtaccagctctgactcaactagctgtg

SEQ ID NO: 11864 - DNA, 629 bp, Zea mays
  Clone ID: LIB3061-086-Q1-K6-E11
attgagaccaactagcaacatagaaagcacaatagtgtaccaacaatggcagccaaaatattttgcttccttatgctccttggtctttctgcaagtgttgctaccgcaaccattttcccacaatgctcacaagctcctatagcttcccttcttcccccatacctctcaccagcggtgtcttcaatgtgtgaaaacccaattgttcaaccctacaggatccaacaggcaatcgcaacaggcatcttaccattatcacccttgttcctccaacaaccgtcagccctattacagcagttacctttggtccatttggtggcacaaaacatcagggcacaacaactacaacaacttgtgctagcaaaccttgctgcatactctcagcaacatcagtttcttccattcaaccaactggctgcattgaactctgctgcttatttgcaacaacaattaccattcagccagctagttgctgcctacccccagcaatttcttccattcaaccaactagcagcattgaactctgctgcttatttacagcagcaacaactactaccattcagccagctagctgatgtgagccctgctgccttcttgaccaacaacagttgttgccgttctacctgcacgct

SEQ ID NO: 11865 - DNA, 636 bp, Zea mays
  Clone ID: LIB3061-086-Q1-K6-E12
ggacaggagcggacacaatcagcctctggtgcaggcaatgtgaacctcaacaccttgatgaacatgttcagtgggcttggtgctggtggtggcctaggtgttccaaatgctcctaatgtgccaccagaagaactgtatgcaacacaattagctcagctccaagaaatgggtttttttgacacacaggagaacatccgagccttggccgccactgctggaaatgttcatgctgcagtggagcgacttcttggaaacatgggccaatagaatatgatgacgaacataactgtgttctgatccatgcgatctgtagttggcattgtgagattatgtctggttcattggttttagacctgagattgagaggcggcatctagattctgtgtttaaggatgaataaagagtgtaccggtggaaccttacatataaatgtgggctggtgtcatggttaaaattgttgttgttggtacattgggttgctgtacatatggatcttttgcaatcttatttgcattgtacatggacaatgttttatgtaagagctgattccgtgaccaggggtcacggagggattggagggcgattgaaagagaaatgaactaatttcccctcaacccctccaatctctttgtgatc

SEQ ID NO: 11866 - DNA, 648 bp, Zea mays
  Clone ID: LIB3061-086-Q1-K6-E2
gtacctttcaggaagttatgataccgaggaaaaagcggccagggcttatgatgttgctgctattaaatactggggcgaaaataccagactgaactttccgatttcacaatacggcaaggagttggaggacataagggatttgtctcgagaggaatgtgtgacatacttgagaaggaggagcagctgcttttcaagaggagcttctatttatagaggagtgacaagaaggcagaaagacgggagatggcaagcacgcataggactggttgctggaactagagacatttacctgggaacattcaaaacagaggaagaagctgcagaggcttatgatattgctgccattgagatacgtggcaaaaacgctgtgaccaattttgaccgaagcaactatgtcgataagggtatgcactgtatagaaggcgaaggcttgaggctgcttgcatccaagccagaagaatgacttccaagttcaatgcagtgattgtcgatcgagcagatttggccagacgtatatgcagcttagttggtacatatacagataggagaaccggttgcagtttgtcaatattcctgctttacatgacttgggattacagttaaatcgacccgctagcaaaaaaagtgtgcaaatgttagtagatttgg

SEQ ID NO: 11867 - DNA, 667 bp, Zea mays
  Clone ID: LIB3061-086-Q1-K6-E3
gagaccaactagcaacatagaaagcacaatagtgtaccaacaatggcagctaaaatattttgcctccttatgctccttggtctttctgcaagtgctgctacggcgaccattttcccacaatgctcacaagctcctatagcttcccttcttcccccgtacctctcaccaacggtgtcttcggtatgtgaaaacccaattcttcaaccctacaggatccaacaggcaatcgcagctggcatcttacctttatcacccttgttcctccaacaatcatcagccctattacagcagttacctttggtgcatttattggcacaaaacatcagggcacaacaactacaacaacttgtgctagcaaaccttgctgcctactctcagcaacagcagtttcttccattcaaccaactagctgcattgaactctgcttcttatttgcaacaacaacaactaccattcagccagctatctgctgcctacccccagcaatttcttccattcaaccaactgacagcattgaactctcctgcttatttacagcagcaacaactactaccattcagccagctagcctggtgtgagccctgctaccttcttgacaaacacagttgttgccgttctccagcacgctgcgcctaacgcttgcaccctcttacaactgcacaattgc

SEQ ID NO: 11868 - DNA, 502 bp, Zea mays
  Clone ID: LIB3061-086-Q1-K6-E4
acgagttgttgtagttgttgtgctagcaaaccttgctgcctactctcagcaacaacagtttctgccattcaaccaactagctgcattgaactctgctgcttatttgcagcaacaacaactactaccattcagccagctagctgctgcctacccccggcaatttcttccattcaaccaactggcagcattgaactctcatgcttatgtacaacaacaacaactactaccattcagccagctagctgctgtgagccctgctgccttcttgacacagcaacatttgttgccgttctacctgcacactgcgcctaacgttggcaccctcttacaactgcaacaattgctgccattcgaccaacttgctttgacaaacccagcagtgttctaccaacaacccatcattggtggtgccctcttttagattgcttatgagttatagttcaataataaagttttttttgctgatatttgtggcttcccagaaataagaaagtacatttct

SEQ ID NO: 11869 - DNA, 654 bp, Zea mays
  unsure (1)..(654): unsure at all n locations; Clone ID: LIB3061-086-Q1-K6-E5
aacacaccaagcgaagcgcactagcaacgacctaacaccaatggctaccaagatattagccctccttgcgcttcttgcccttttagtgagcgcaacaaatgcgttcattattccacagtgctcacttgctcctagtgccagtattccacagttcctcccaccagttacttcaatgggcttcgaacatccagccgtgcaagcctacaggctacaactagcgcttgcggcgagcgccttacaacaaccaattgcccaattgcaacaacaatccttggcacatctaaccctacaaaccattgcaacgcaacaacaacaacaacagtttctgccatcactgagccacctagccgtggtgaaccctgtcacctacttgcaacagcagctgcttgcatccaacccacttgctctggcgaacgtagctgcataccagcaacaacaacagctgcaacagtttatgccagtgctcagtcaactagccatggtgaaccctgccgtctacctacaactactttcatctagcccgctcgcggtgggcaatgcacctacgtacctacaacaacagttgctgcaacaaattgtaccagctctgactcagctagctgtggcanaccctgctgcctacttacaacagttgcttccattcaaccactggct

SEQ ID NO: 11870 - DNA, 145 bp, Zea mays
  unsure (1)..(145): unsure at all n locations; Clone ID: LIB3061-086-Q1-K6-E7
ctcttaatgcggctaaagaggctgaggcattggctgaagcaagagtcaacagtgaagccaaaattgaactggagaatcttttagtagaaagcaggtgagaaaatgcctnaactnctcgattgtnttaatnagnatattttttttt

SEQ ID NO: 11871 - DNA, 643 bp, Zea mays
  Clone ID: LIB3061-086-Q1-K6-E9
gttctcgtcgtgtgcctggctctgtcagctgccagcgcctctgcaatgcagatgccctgcccctgcgcggggctgcagggcttgtacggcgctggcgccggcctgacgacgatgatgggcgccggcgggctgtacccctacgcggagtacctgaggcagccgcagtgcagcccgctggcggcggcgccctactacgccgggtgtgggcagccgagcgccatgttccagccgctccggcaacagtgctgccagcagcagatgaggatgatggacgtgcagtccgtcgcgcagcagctgcagatgatgatgcagcttgagcgtgccgctgccgccagcagcagcctgtacgagccagctctgatgcagcagcagcagcagctgctggcagcccagggtctcaaccccatggccatgatgatggcgcagaacatgccggccatgggtggactctaccagtaccagctgcccagctaccgcaccaacccctgtggcgtctccgctgccattccgccctactactgattcatgatatttgggaaatctcctctatccatctctctctatctatatatgtaataatgcagtaagacgacacacattatcatgtgtggtatgaccaataatatatgcatggtcataataa

SEQ ID NO: 11872 - DNA, 659 bp, Zea mays
  unsure (1)..(659): unsure at all n locations; Clone ID: LIB3061-086-Q1-K6-F1
cacgcgnccganncaaaaacacaccaagcgaagcgcactagcaacgacctaacaccaatggctaccaagatattagccctccttgcgcttcttgcccttttagtgagcgcaacaaatgcgttcattattccacagtgctcacttgctcctagtgccagtattccacagttcctcccaccagttacttcaatgggcttcgaacatccagccgtgcaagcctacaggctacaactagcgcttgcggcgagcgccttacaacaaccaattgcccaattgcaacaacaatccttggcacatctaaccctacaaaccattgcaacgcaacaacaacaacaacagtttctgccatcactgagccacctagccgtggtgaaccctgtcacctacttgcaacagcagctgcttgcatccaacccacttgctctggcgaacgtagctgcataccagcaacaacaacagctgcaacagtttatgccagtgctcagtcaactagccatggtgaaccctgccgtctacctacaactactttcatctagcccgctcgcggtgggcaatgcacctacgtacctacaacaacagttgctgcaacaaattgtaccagctctgactcagctagctgtggcaaaccctgctgcctactacaacagtntgcttcattc

SEQ ID NO: 11873 - DNA, 632 bp, Zea mays
  Clone ID: LIB3061-086-Q1-K6-F10
gaaagcacaatagtgtaccaacaatggcagccaaaatattttgcctccttatgctccttggtatttctgcaagtgctgctacggcgaccattttcccgcaatgctcacaagctcctatagcttcccttcttcccccgtacctctcaccagcggtgtcttcggtatgtgaaaacccaattcttcaaccctacaggatccaacaggcaatcgcagctggcatcttacctttatcacccttgttcctccaacaatcatcagccctattacagcagttacctttggtgcatttattggcacaaaacatcagggcacaacaactacaacaacttgtgctagcaaaccttgctgcctactctcagcaacagcagtttcttccattcaaccaactagctgcattgaactctgcttcttatttgcaacaacaacaactaccattcagccagctacctgttgcctacccccaacaatttcttccattcaaccaactggcagcattgaactctcctgcttatttacagcagcaacaactactaccattcagccagctagctggtgtgagccctgctaccttcttgacacaaccacagttgttgccgttctaccagcacgctgcgcctaacgctggcaccctc

SEQ ID NO: 11874 - DNA, 658 bp, Zea mays
  Clone ID: LIB3061-086-Q1-K6-F11
cccggtcgaccacctccgatgaactcctcaggctgttgaagaagcatgttttgctgatgtgctagatgaggattccttcaatatgccagacatgatcttgaagttaaaaactagcactagatcctcaagcctgccattagattcatctactgatagcgagagaaggaaattatctcctgtgtattgttctcatagcataggagatgattcacaacaatcacatggcgaggcacaagtggatatgttttggcagcagaacgtgccattgtcccccaatggatcaacatttccttcatctccttcaaccaattcagataattatcctgtttcttggttttgtttctctcctaagacgcatggaaccggcacatacattcccaatgtgagttatcaaacatacagggagcgtatcatgcttgaaagagataccatacgagcaagaaaacaaagacagaggttacctggtcgccggtattactcagccgagcaaggattttccggttcacaaaccgaagaagacaccatagctcaaagtgcaacgaaccaatcgcccaagaagcaaaacagtgtgcagcagagtggctattcaggcaagagcacagttccggatgcagatttcgtttgtttcagggagcatgtggcaacagaaggtggaacc

SEQ ID NO: 11875 - DNA, 565 bp, Zea mays
  Clone ID: LIB3061-086-Q1-K6-F12
attgagaaacacaccaagcgaagctacctagcaacgacttaacaacaatggctaccaagatattagccctccttgcgctttttgccctttttgtgagcgcgacaaatgcgttcattattccacaatgctcacttgctcctagtgccattataccacagttcctccgaccagttacttcaatgggcttcgaacacctatctgtgcaagcctacaagctacaacaagcgcttgcggcgagcgtcttacaacaaccaattaaccaattgcaacaacaatccttggcgcatctaaccatacaaaccatcgtaacacaacagcaacaacagttcctaccagcactgagccaactagatgtggtgaaccctgtcgcctacttgtaacagcaggtgcttgtattcaacccacttgctctggcaaacgtagctgtataccaacaacaacaacaattgcaacagtttctgtcagcgctcagtcaactagccatggtgaaccctgccgtctacctacaacaggaacaactgcttttatctagccctctcgttgtgggtgatgcacctacatacct

SEQ ID NO: 11876 - DNA, 666 bp, Zea mays
  unsure (1)..(666): unsure at all n locations; Clone ID: LIB3061-086-Q1-K6-F3
gaccaacaagcaacatagaaagtggaatccagtagcaacaatagagcaacaatggcgaccaagatactttccctccttatgctccttgctctttctgcatgtgttgctaacgcgacaattttccctcaatgctcacaagctcctatagcttcccttcttcccccataccttccatcaatgatagcttcagtatgtgaaaacccagctcttcaaccctataggctccaacaagcaatcgcagcaagcaacatacctttatcacccttgtttcaacaatcgccagccctatctttggtgcagtcattggtacaaaccatcaaggcacagcagctgcagcaactcgtgctacctgtgatcaaccaagtagctctggcaaacctttctccctactatcagcaacaacaatttcttccattcaaccaactatctacactgaaccctgctgcttatttgcagcaacaactattaccattcagccagctagctactgcctactctcatcaacaacaacttcttccatttaaccaattggccgcactgaacctcgctgcttatttgcagcagcaaatattactaccatttagccagctagctgcacnaagccgtgcttccttcttgaccagcaacagttgctgcctttctccagcagtttgcggctaccccgca

SEQ ID NO: 11877 - DNA, 509 bp, Zea mays
  Clone ID: LIB3061-086-Q1-K6-F8
cagggcacaacaactacaacaacttgtgctagcaaaccttgctgcctactctcagcaacagcagtttcttccattcaaccaactagctgcattgaactctgcttcttatttgcaacaacaacaactaccattcagccagctacctgctgcctacccccagcaatttcttccattcaaccaactggcagcattgaactctcctgcttatttacagcagcaacaactactaccattcagccagctagctggtgtgagccctgctaccttcttgatacaaccacagttgttgccgttctaccagcacgctgcgcctaacgctggcaccctcttacaactgcaacaattgctgccattcaaccaacttgctttgacaaacccagcagcgttctaccaacaacccatcattggtggtgccctcttttagatttcttatgagttatagttcaataataaagttttttgtctgatgtttgtggcttcccagaaataagaaagtacatttctagatt

SEQ ID NO: 11878 - DNA, 679 bp, Zea mays
  Clone ID: LIB3061-086-Q1-K6-G1
cggggcttcttgcgctttttgcgagcgcaacaaatgcgttcattattccacaatgctcacttgctccaagttccattattacacagttcctcccaccagttacttcaatgggcttcgaacacccagctgtgcaagcctataggctacaacaagcaattgcggcgagcgtcttacaacaaccaatttcccagttgcaacaacaatccttggcacatctaacaatacaaaccatcgcaacgcaacagcaacaacaattcctaccagcactgagccacctagccatggtgaaccctgccgcctacttgcaacagcagttgcttgcatcaaacccacttgctctggcaaacgtagttgcaaaccagccacaacaacagctgcaacagtttctgccagcgctcagtcaactagccatggtgaaccctgccgcctacctacaacagcaacaactgctttcatctagcccgctcgctgtggccaatgcacctacatacctgcaacaacaattgttgcaacagattgtaccagctctgactcagctagttgtggcaaaccctgctgcctacttgcaacagctgcttccattcaaccaactgactatgtcgaactctgctgcgtacctacaacagcgacaacagttacttaatccactagcagtggctaacccattggtcgctgcctt

SEQ ID NO: 11879 - DNA, 83 bp, Zea mays
  Clone ID: LIB3061-086-Q1-K6-G11
gttcaaagttgggcttttggacagctgtggtgtgcacggcagctctgtgacttgtgaggaggaagggaggaagaaagcggatc

SEQ ID NO: 11880 - DNA, 620 bp, Zea mays
  Clone ID: LIB3061-086-Q1-K6-G12
gagataacaaggcggagaggaggagatggcggtcacgatcacctgggtgaaggcgaggcagatcttcgacagccgcggcaaccccaccgtcgaggtggacgtgggcctcagcgacggcagctacgcgaggggggccgtacccagcggcgcatccactggaatatatgaggccttggagttgagggatggaggatctgattatcttggcaagggtgttcttaaggctgtcagcaacgtaaacaacattattggaccagcgattgttggaaaggaccccactgagcaggttgagattgacaacttcatggtccaacagcttgatggaacctccaatgagtggggctggtgcaaacagaagcttggagcaaatgccatccttgcggtttcacttgctgtgtgcaaagctggagctatggtgaagaagattcctctttaccagcacatcgcaaatcttgctgggaacaaaactctggtgctccctgtacctgcctttaatgtgattaatggagggtcacatgctggaaacaagcttgccatgcaggagttcatgatcctcccaactggtgcctcctcgttcaaggaggccatgaagatgggagttgaggtgtaccacaacctga

SEQ ID NO: 11881 - DNA, 611 bp, Zea mays
  Clone ID: LIB3061-086-Q1-K6-G2
gaccacttgcaacatagaaagtggaatccagtagcaacaacagagcaacaatggcgaccaagatattttccctccttatgctccttgctctttctgcatgtgttgctaacgcgacaattttccctcaatgctcacaagctcctatagcttcccttcttcccccataccttccatcaatgatagcttcagtatgtgaaaacccagctcttcagccctataggctccaacaagcaatcgcagcaagcaacatacctttatcacccttgttgtttcaacaatcgccagccctatctttggtgcagtcattggtacaaaccatcagggcacagcagctgcagcaactcgtgctacctgtgatcaaccaagtagctctggcaaacctttctccctactctcagcaacaacaatttcttccattcaaccaactgtctacactgaaccctgctgcttatttgcagcaacaactattaccattcagccagctagctactgcctactctcagcaacaacaacttcttccatttaaccaattggccgcactgaaccccgctgcttatttgcagcagcaaatactactaccatttagccagctagctgcagcaaaccgtgct

SEQ ID NO: 11882 - DNA, 650 bp, Zea mays
  unsure (1)..(650): unsure at all n locations; Clone ID: LIB3061-086-Q1-K6-G4
attattgagaccaactagcaacatagaaagcacaatagtgtaccaacaatggcagccaaaatattttgcctccttatgctccttggtctttctgcaagtgctgctacggcgaccattttcccgcaatgctcgcaagctcctatagcttcccttcttcccccgtacctctcaccagcggtgtcttcggtatgtgaaaacccaattcttcaaccctacaggatccaacaggcaatcgcagctggcatcttacctttatcacccttgttcctccaacaatcatcagccctattacaacagttacctttggtgcatttattggcacaaaacatcagggcacaacaactacaacaacttgtgctagcaaaccttgctgcctactctcagcaacagcagtttcttccattcaaccaactaggttcattgaactctgcttcttatttgcaacaacaacaactaccattcagccagctacctgctgcctacccccagcaatttcttccattcaaccaactagcagcattgaactctcctgcttatttacagcagcaacaactactaccattcagccagctagcttggtgtgagccctgctaccttcttgacaaaccacagttgttgccgntctaacagcacgttgcgcctaaacgctg

SEQ ID NO: 11883 - DNA, 448 bp, Zea mays
  Clone ID: LIB3061-086-Q1-K6-G8
cgagtttctgaggcatcagtgcagcccgacggcgacgccctactgctcgcctcagtgccagtcgttgcggcagcagtgttgccagcagctcaggcaggtggagccgcagcaccggtaccaggcgatcttcggcttggtcctccagtccatcctgcagcagcagccgcaaagcggccaggtcgcggggctgttggcggcgcaaatagcgcaacaactgacggcgatgtgcggcctgcaacagccgacttcattcccctacgcttctgtcggcggtgtcccccactgaagaaactatgtgctgtagtatagccgctggctagctagctagttgagtcatttagcggcgatgattgagtaataatgtgtcacgcatcaccatgggtggcagtgtcagtgtgagcaatgacctgaatgaacaattgaaatgaaaagaaaaaagtattgttcc

SEQ ID NO: 11884 - DNA, 466 bp, Zea mays
  Clone ID: LIB3061-086-Q1-K6-H10
aatctacaacatggttcaatccataatccaggaggagcaacaacaacaaccatgtgagttatgtggatctcaacaagctactcaaagtgcggtggcaatcttgacagcagcacaatacctaccatcaatgtgcggcttgtaccactcatactaccaaaataatccatgcagcagcaatgacattagtggtgtttgcaattgaagaattgtgtctacctagccgttatactcatataacggtgttaagcaataaagtaccatacatttaaaaaaaaaaaaaaaaaaaaaaaaaaaaaaaaaaaaaaaaaaaaaaaaaaaaaaaaaaaaaaaaaaaattttaaaaaaaaaaaaaaaaaaaaaaaaaaaaaaaaaaaaggggggcccggatttaaaggataaaaatttaattaggaggggttgggattggaaaaaattttttttttgggggacctaaattaaattaaag

SEQ ID NO: 11885 - DNA, 636 bp, Zea mays
  Clone ID: LIB3061-086-Q1-K6-H11
ctccactcctcgcgccgctgccgcatctcctctacaggtaagaaggagagaaagagggcgaaatggtgaagcacaacaacgtcatccccaacgggcacttcaagaagcactggcagaactatgtcaagacatggttcaaccagcccgcccgcaagcagaggcgccgcatcgcacgtcaaaagaaggctgtgaagatattcccacgaccaactgctggccctcttcgtcccattgttcaatgccagactctcaagtacaacatgaagtcaagggctgggagaggctttacccttgaggagttgaaggctgcgggcattccaaaaaggcttgctccaaccattggcatttctgtggatcaccgccgcaagaacaaatcccttgaggggctgcaggccaatgtccagaggcttaagacatacaaggccaagctggttatcttcccaaggcgtgctcgcaaggtcaaggctggtgactctactctggaggagcttaccactgctacccaggtacagggtgactacatgccaattactcgcggtgagaagcgctctgtagaggttgtgaaggtcacagatgagatgaaaggcgtttgcggcctatggcaagctccgccttgagcggatgaacaagaagcac

SEQ ID NO: 11886 - DNA, 637 bp, Zea mays
  Clone ID: LIB3061-086-Q1-K6-H12
cccgggccaactagacaacatacgaaagcacattagtgtaccaacaatggcagccaaaatattttgcctccttatgctccttggtctttctgcaagtgctgctacggcgaccattttcccgcaatgctcgcaagctcctatagcttcccttcttcccccgtacctctcacacagcggtgtcttcggtatgtgaaaacccaattcttcaaccctacaggatccaacaggcaatcacagctggcatcttacctttatcacccttgttcctccaacaatcatcagccctattacatcagttacctttggtgcatttattggcacaaaacatcagggcacaacaactacaacaacttgtgctagcaaaccttgctgcctactctcagcaacagcagtttcttccattcaaccaactagctgcattgaactctgcttcttatttgcaacaacaacaactaccattcagccagctacctgctgcctacccccagcaatttcttccattcaaccaactggcagcattgaactctcctgcttatttacagcagcaacaactactaccattcagccagctagctggtgtgagccctgctaccttcttgatacaaccacagttgttgccgttctaccagcacgctgc

SEQ ID NO: 11887 - DNA, 644 bp, Zea mays
  Clone ID: LIB3061-086-Q1-K6-H2
gaagagtcggcctacaaaaacactgtcgagggcataactgggatcatctcgaaaaccatctcaaagaaagggatgcttgaagtgtacaactctttgagcgaggaaggcaaaaaggagttcaacaaggcttatagcgcatcgttttacccgtgcatggatatactctacgaatgctatgaagatgtggcctctggaagtgaaatccggagcgtggtgttggctgggcggaggttttatgagaaagagggcctcccagcttttccgatgggcaacatcgaccaaactcgcatgtggaaggttggtgaaaaggtgcgctcaacccgtccggaaggtgatcttggcccgctccatgccttcactgctggagtgtacattgccctgatgatggctcagattgagatcctgaggaagaaggggcactcctactctgagatcatcaacgagagcgtgattgagtcggtggactcgctgaacccgttcatgcacgcccgtggggtcgccttcatggtggacaactgctccacaacggctcgcctgggatccaggaagtgggcgcctcgcttcgactacatcctgacgcagcaggccttcgtggcggtggacaaggacgccccgataaccaggacctcatcagcaacttcttg

SEQ ID NO: 11888 - DNA, 650 bp, Zea mays
  Clone ID: LIB3061-086-Q1-K6-H3
gcaacatagaaagcacaatagtgtaccaacaatggcagccaaaatattttgcctccttatgctccttggtatttctgcaagtgctgctacggcgaccattttcccgcaatgctcacaagctcctatagcttcccttcttcccccgtacctctcaccagcggtgtcttcggtatgtgaaaacccaattcttcaaccctacaggatccaacaggcaatcgcagctggcatcttacctttatcacccttgttcctccaacaatcatcagccctattacagcagttacctttggtgcatttattggcacaaaacatcagggcacaacaactacaacaacttgtgctagcaaaccttgctgcctactctcagcaacagcagtttcttccattcaaccaactagctgcattgaactctgcttcttatttgcaacaacaacaactaccattcagccagctacctgttgcctacccccaacaatttcttccattcaaccaactggcagcattgaactctcctgcttatttacagcagcaacaactactaccattcagccagctagctggtgtgagccctgctaccttcttgacacaaccacagttgttgccgttctaccagcacgctgcgcctaacgctggcaccctcttacaactgc

SEQ ID NO: 11889 - DNA, 646 bp, Zea mays
  Clone ID: LIB3061-086-Q1-K6-H4
gagcattcagaaacacacctagcgaagcgcactagcaacgacctaacaacaatggcttccaagacattatccctccttgcgcttcttgccctttttgtgagtgcaacaaatgcgttcattattccacaatgctcacttgctccgagtgccattattccacagttcctccctccagttacttcaatgggcttcgaacacccagctgtgcaagcctataggctacaacaagcgcttgcggcgagcgtcttagaacaaccaattgcccaattacaacaacaatccttggcacatctaaccatacaaaccatcgcaacgcagcagcaacaagcactgagccacctagccgtggtgaaccctatcgcctacttgcaacaacagctgcttgcatccaacccacttgctttggcaaacgtagctgcataccaacaacaacaacagttgcaacagtttctaccagcgctcagtcaactagccatggtgaaccctatcgcctacctacaacagcaacaacttctttcatctagcccgctcgctatgggcaatgcacctacatacctgcaacaacagttgttgcaacaacagttgctgcaacaaattgtaccagctcttactcagctagctgtggcaaaccctgctgcctacttgc

SEQ ID NO: 11890 - DNA, 636 bp, Zea mays
  Clone ID: LIB3061-086-Q1-K6-H5
cccacgcgtccggcttcctggcctccgacggggtgctcagcctcggctacagcaacgtctccttcgcgtcccgcgccgcggcgcgcttcggcggccggttctcctactgcctggtcgaccacctcgccccgcggaacgccaccagctacctcaccttcggccccaacccggccgtgtcctcggcctccgagacggcctgcgggggctcgggctcgggctcggcggcgcccggcgcgcgccagacgccgctgctgcttgaccgccggatgcgcccgttctacgcggtcgccgtcaacggcgtctccgtcgacggggagctcctccggatcccgcgccgcgtctgggacgtcgagaagggcggcggcgccatcctcgactccggcacgagcctcacggtcctcgtgagcccggcgtaccgcgccgtggtggcggcgctgagcaggaagctggccgggctgccccgggtggccatggacccgttcgactactgctacaactggacgtcgccgtccacgggcgaggacctcgccgtggccgtgccggagctggccctgcacttcgcggggtcggcgcggctgcagccgccgcccaagagctacgtcatcgacgcggcgcccggcgtcaagtgcatcggca

SEQ ID NO: 11891 - DNA, 115 bp, Zea mays
  Clone ID: LIB3061-086-Q1-K6-H6
ggaaaactccgcggagggcgaaggaggcgaaccaagggcgacgtatccgccgctggagaaggtagccctcgatccgccgtctcccgcgattcgtttgtcttgcgacagctgggcg

SEQ ID NO: 11892 - DNA, 651 bp, Zea mays
  Clone ID: LIB3061-086-Q1-K6-H7
agaaagcacaatagtgtaccaacaatggcagccaaaatattttgcttccttatgctccttggtctttctgcaagtgctgctaccgcaaccattttcccacaatgctcacaagctcctatagcttcctttcttcccccatacctctcaccagcggtgtcttcagtatgtgaaaacccaattcttcaaccctacaggatccaacaggcaatcgcagcaggcatcttacctttatcacccttgttcctccaacaaccgtcagccctattacagcagttacctttggtgcatttgttggcacaaaacatcaaggcacaacaactacaacaacttgtgctaggaaaccttgctgcctactctcagcaacagcagtttcttccattcaaccaactggctgcattgaactctgctgcttatttgcaacaacaactaccattcagtcagctagctgctgcctacccccagcaatttcttccattcaaccaactggcagcattgaactctgctgcttatttacaacagcaacagctaccaccattcagccagctagctgatgtgagccctgttgccttcttgacacaacaacagttgttgccgttctacctgcacgctgcgcctaacgctggcaccctcttacaactgcaacaattgctg

SEQ ID NO: 11893 - DNA, 409 bp, Zea mays
  Clone ID: LIB3061-086-Q1-K6-H8
gaatgaatgctgggcatactgaatcttctggcagctacctggcggacttggaagatgaaatggcatcgactggtttgctcgctttgtgtagaaaaggggtagtgatatgttcatttttattgccgtttgtttggccttttttaccagataattacaattcataagctactactgttgtggaatgagtagcaaattttatatgtattctcagaagttcaagacttgcaatatgttaggaaaacaaaagactgcactgtatatagtttaatcttttgatgtacggtacgtggacaacttgatgctgctgtcttgtggcacaggcacacagctagatggcattatgtatggtgatcactgatcaaccatgtttttttttgtagaacttgtataatatgtagaagtttcaatc

SEQ ID NO: 11894 - DNA, 653 bp, Zea mays
  unsure (1)..(653): unsure at all n locations; Clone ID: LIB3061-091-Q1-K6-A10
ngaagctatagcaccagcggnaacacgggnaacggcgngaagcaaacaactagaaattccccagcccggttctttgcgtgcggttgatctcgtcggaggcccggccgcggttccccaatccgccatcgaattcgatggcggccaacgccgggaataagatccgcaacgccaagctggttcttcttggagatgtgggcgctggcaaatctagcttggttcttcggtttgttaagggacagtttgttgaattccaggaatcaacaattggagcagccttcttttcccagaccttagcggtcaatgatgagactgttaagtttgaaatctgggatactgccgggcaggagaggtatcatagcttggctcccatgtactataggggtgcagctgctgccattgttgtctatgacatcacaaatccggcctccttcacccgtgccaagaaatgggttcaagaacttcaagctcaaggaaatcagaataccatagtggctcttgctggaaacaaggctgatatgctagatgcgaggcaggtgccagcagaggaagcaaaggcgtatgctcaggagaatgggctcttcttcatggagacatctgctaaaactgcaatcaatgtgaatgacatattttatgagattgcaaagaaattgctt

SEQ ID NO: 11895 - DNA, 635 bp, Zea mays
  unsure (1)..(635): unsure at all n locations; Clone ID: LIB3061-091-Q1-K6-A11
caacaacaacaacaaccgcagcaccaacaacaacaacaacaacaacagcaccaacaacaacatcaatgtgaaggccaacaacaacatcaccaacaatcacaaggccatgtgcaacaacacgaacagagccatgagcaacaccaaggacagagccatgagcaacaacatcaacaacaattccagggtcatgacaagcagcaacaaccacaacagcctcagcaatatcagcagggccagngaaaaatcacaacagcaacaatgtcattgccaggagcagcaacagactacaaggtgcagctataactactatagcagtagctcaaatctaaaaaattgtcatgaattcctaaggcagcagtgcagccctttggtaatgccttttctccaatcacgtttgatacaaccaagtagctgccaggtattgcagcaacaatgttgtcatgatcttaggcagattgagccacaatacattcaccaagcaatctacaacatggttcaatccataatccaggaggagcaacaacaacaaccatgtgagttatgtggatctcaacaagctactcaaagtgcggtggcaatcttgacagcagcacaatacctaccatcaatgtgcggcttgtaccactcatactacc

SEQ ID NO: 11896 - DNA, 378 bp, Zea mays
  Clone ID: LIB3061-091-Q1-K6-A3
tcgtatccctcccagaccaattcattcagcacctcattacaagcagactaccatttggtcgcattctattggcacacaacatcagggcacaacaactacaacaacttgtgctagcgagccctgctaccttcttgacacaaccacagctgttgccgttctaccaccacgctgctcctaacgctggcaccctcttacaactgcaacaatagctgccattcaaccaactagctgtgacaaacctagcagcgttctaccaacaacccatcattggtggtgccctcttttagattacttatgaggaatagtacaataataatagaatttgtctgatgatggtggctgcccaccaataataaaatacatctctagtagaataat

SEQ ID NO: 11897 - DNA, 632 bp, Zea mays
  Clone ID: LIB3061-091-Q1-K6-A4
tgcccttttagtgagcgcaacaaatgcgttcattattccacagtgctcacttgctcctgagtgccattattccacagttcctcccaccagttacttcaatgggcttcgaacatccagccgtgcaagcctacaggctacaactagcgcttgcggcgagcgccttacaacaaccaattgcccaattgcaacaacaatccttggcacatctaaccctacaaaccattgcaacgcaacaacaacaacaacaacagtttctgccatcactgagccacctagccgtggtgaaccctgtcacctacttgcaacagcagctgcttgcatccaacccacttgctctggcgaacgtagctgcataccagcaacaacaacagctgcaacagtttatgccagtgctcagtcaactagccatggtgaaccctgccgtctacctacaactactttcatctagcccgctcgcggtgggcaatgcacctacgtacctacaacaacagttgctgcaacaaattgtaccagctctgactcagctagctgtggcaaaccctgctgcctacttacaacagttgcttccattcaaccaactggctgtgtcaaactctgctgcgtacctacaacagcgacaacagttacttaat

SEQ ID NO: 11898 - DNA, 477 bp, Zea mays
  unsure (1)..(477): unsure at all n locations; Clone ID: LIB3061-091-Q1-K6-A6
caacaacttgtgctaggaaaccttgctgcctactctcagcaacagcagtttcttccattcaaccaactggctgcattgaactctgctgcttatttgcaacaacaactaccattcagtcagctagctgctgcctacccccagcaatttcttccattcaaccaactggcagcattgaactctgctgcttatttacaacagcaacagctaccaccattcagccagctagctgatgtgagccctgttgccttcttgacacaacaacagttgttgccgttctacctgcacgctgcgcctaacgctggcaccctcttacaactgcaacaattgctgccattcaaccaacttgctttgacaaacccaacagcgttctaccaacaacccatcattggtggtgccctcttttagattgcttatgagttatacttcaataatgaagttttttggatgatgtttgtggcttcccagaaataaganngt

SEQ ID NO: 11899 - DNA, 471 bp, Zea mays
  Clone ID: LIB3061-091-Q1-K6-A7
cgggtcgacccagcgtcggtccaacttgctttgacaaacccagcacctcctaccaacaacacatcattggtggtgccctcttttagattgcttattagttgtaattcaataataaagttttttggatgatgtatgtggccaaccagaaataagaagttacatttccagattctaatgtgaaaaaaaaaaaaaaaaaaaaaaaaaaaaaaaaaaaaaaaaaaaaaaaaaaaaaaaaaaaaaaaaaaaaaaaaaaaaaaaaaaaaaaaaaaggggggaagatataaaaaaaaaaaaaaaaaaaaaaaaaaagaaagaaaaaaaaaaaaacttttttattgggtaaaacaaaataaattacccatggtcggtgggttttacaacgatatccactgtgtaaaacacctggggtaccaaattaaatggctttgcggaacacccttctttacacaggtgccgtcttaatgaaaaggg

SEQ ID NO: 11900 - DNA, 304 bp, Zea mays
  unsure (1)..(304): unsure at all n locations; Clone ID: LIB3061-091-Q1-K6-A9
agcaccgcggccgcgccgccagcgcggcagccgggacccggcggccgccccgcggcgcagccccccaggcgaccccccggcccccgcgccccccaccgcgggggcncgangggcgacaacccccaccacacgcgagcgggccgagggcagcgacaacgggaccaaccacaggcgccgccgccccgccagcacgcggcgccccacgcgcggccgccaccacagcggcaacaagggccgccgaccaaccagccaccncggccacaccgaccggcgcgcgcccaccaccccgcccccgggggggccc

SEQ ID NO: 11901 - DNA, 657 bp, Zea mays
  unsure (1)..(657): unsure at all n locations; Clone ID: LIB3061-091-Q1-K6-B1
canaaaaggagacaaanaaaaaaatcatcaggcaaaaggtgacaaagggtaaaggagaatccgttgaagcagttcttcccagcaaggatgatctgaggaagaccattactgaaatcctcaagaaagttgacttcaacacggcaactttcagtgacatccttaagaagcttgacaatcactataaaatggatctggccccaaagaaagaagccatcaaagttatgatccaagacgagttaaccaagttatcagaggaggacgaaggagagggagccggagacaccgagaagaaacagcagcagcctcaggcgaaggagatcgaggcatgaggattcgtggaaccccatagctgtagtagccgctgttaattatcctgtacttaatgtgtttgtttgcgtcgcctgtacaggcatctcgttgattatcgccgcaccaactcgagaacctcacccctgatcgtgtatgttatggggcatgatgtgtaggcagcctccacacctttttagctgactgatcggagagttactcctaggcaactcttgtttctagatttgcaaatggtgtctgaaactctgcgtttgctgcggcagaacgtgtacttaattgttcgtgataggtctgaatacacatggatggtatcagtctgtagcttatttt

SEQ ID NO: 11902 - DNA, 535 bp, Zea mays
  unsure (1)..(535): unsure at all n locations; Clone ID: LIB3061-091-Q1-K6-B10
aaaaaggcaccaccaaagatggctggtgtggtggctccgctttgcgcttggagtcaacaactgcggtgcacctttatacagcactccctgtggtggttgctctcatcgctttaataacatcaacatttcagcttccatcaatcatgcatgactcattnatagcaggaaacaatggcgcggggggtgctggagagaaagcgatcaagtctgtttctcgtgggttgctagatggtgaaggctcaagtcatgctagtactgatgattcagtaagtgtgaggaacagtggtgacttgtatgaagctttaacaactatctcgccctctgggagacgttgtgccccacatcaattttgccaattggaaaatggtggggtggctgtgagacatgccacattcgtgtcacaccatgggatgcccacaaagcaggtcacaagcaggtcttaccactcttttgtagatgcttagtgtcgcagtgagttttcaggaagcttcctgccgccctttgagcataatgcttactctatctgctggctttg

SEQ ID NO: 11903 - DNA, 529 bp, Zea mays
  unsure (1)..(529): unsure at all n locations; Clone ID: LIB3061-091-Q1-K6-B12
gattgatcggacggacgcgcgtctccggtcccgtccgtaataacactgatccgatccacgccggccggcgatggagctcatcaagtccagggcgaccgtgtgcgcgctcctcctggcgctgctcctgctctcacactacgacggcgggacgacgacgacgatggtggcggaggcccgggtgtgcatgggcaagagccagcaccactcgttcccctgcatctccgaccgcctctgcagcaacgagtgcgtcaaggaggacggcgggtggaccgccggctactgccacctccgctactgcaggtgccagaaggcgtgctaagcaaagctcttcaaacacccttggcttgccagaactgaactctagtagtactaagtaacacccttggctagctgtgcacaacctacgtaccgtgcatgcatgtaatgtggtgtcatgtaacgtgacagcaataaatagtattaataataataacacggcatgtagcccnngcnnnnnananannnnnnannnnnnnnnnnnnnnnnnnna

SEQ ID NO: 11904 - DNA, 634 bp, Zea mays
  Clone ID: LIB3061-091-Q1-K6-B2
taatattttgagcattcagaacacacctagcgaagcgcactagcaacgacctaacaacaatggcttccaagacattatccctccttgcgcttcttgccctttttgtgagtgcaacaaatgcgttcattattccacaatgctcacttgctccgagtgccattattccacagttcctccctccagttacttcaatgggcttcgaacacccagctgtgcaagcctataggctacaacaagcgcttgcggcgagcgtcttagaacaaccaattgcccaattacaacaacaatccttggcacatctaaccatacaaaccatcgcaacgcagcagcatacaagcactgagccacctagccgtggtgaaccctatcgcctacttgcaacaacagctgcttgcatccaacccacttgctttggcaaacgtagctgcataccaacaacaacaacagttgcaacagtttctaccagcgctcagtcaactagccatggtgaaccctatcgcctacctacaacagcaacaacttctttcatctagcccgctcgctatgggcaatgcacctacatacctgcaacaacagttgttgcaacaacagttgctgcaacaaattgtaccagctcttactcagctagctgtgg

SEQ ID NO: 11905 - DNA, 620 bp, Zea mays
  Clone ID: LIB3061-091-Q1-K6-B3
ggcatcttacctttatcacccttgttcctccaacaatcatcagccctattacagcagttacctttggtgcatttattggcacaaaacatcagggcacaacaactacaacaacttgtgctagcaaaccttgctgcctactctcagcaacagcagtttcttccattcaaccaactagctgcattgaactctgcttcttatttgcaacaacaacaactaccattcagccagctatctgctgcctacccccagcaatttcttccattcaaccaactgacagcattgaactctcctgcttatttacagcagcaacaactactaccattcagccagctagctggtgtgagccctgctaccttcttgacacaaccacagttgttgccgttctaccagcacgctgcgcctaacgctggcaccctcttacaactgcaacaattgctgccattcaaccaacttgctttgacaaacccagcagcattctaccaacaacccatcattggtggtgccctcttttagatttcttatgagttatagttcaataataaagttttttgtctgatgtttgtggcttcccagaaataagaaagtcatttctagattaaaaaaaaaaaaaaaggcggccc

SEQ ID NO: 11906 - DNA, 638 bp, Zea mays
  unsure (1)..(638): unsure at all n locations; Clone ID: LIB3061-091-Q1-K6-B5
cagcaagcaacatanaagtagaatccattagcaacaatagagcaacaatggcgaccaagatattttccctccttatgctccttgctctttctacatgtgttgctaacgcgacaattttccctcaatgctcacaagctcctatagcttcccttcttcccccataccttccatcaattatagcttcagtatgtgaaaacccagctcttcaaccatataggcttcaacaagcaatcgcagcaagcaacatacctttatcgcccttgttgtttcaacaatcaccagccctatctttggtgcagtcattggtacaaaccatcagggcacaacagctgcagcaactcgtgctacctgtgatcaaccaagtagctctggcaaacctttctccctactctcagcaacaacaatttcttccattcaaccaactgtctacactgaaccctgctgcttatttgcagcaacaactattaccatttagccagctagctactgcctactctcagcaacaacaacttcttccatttaaccaattggccgcactgaaccccgctgcttatttgcagcagcaaatactactgccatttagcgagctagctgcagcaagtcgtgcttccttcttgacacagcaacagttgctgcct

SEQ ID NO: 11907 - DNA, 621 bp, Zea mays
  Clone ID: LIB3061-091-Q1-K6-B6
cgcgttcgtgccggcggagcccgagcgcggggacgacgtgcgcggctggcggcggctggactacggccacgtgtacgcgtccaagaccttcttcgacgcgcgcgggagccggcgcgtgctgtgggcgtgggccaacgagtccgacagccaggccgacgacgtcgccaagggctggtccggcgttcagacgttcccgcggaagctgtggctggacgaggacgggaagcagctgcggcagtggccggtggaggagatcgaaacgctgcggaggaagcgcgtcgtcctgcgccgcggcacggcgctggccaccggaggcatgaacgagatcgtcggcgtcgcgggctcgcaggcggacgtggaggtcgcgttcaaggtctcgagcctggcgggggccgaggcactggaccccaactggctgctggacccgcagaagctgtgcggggagaagggcgcctcggtgcccggcggcgtcgggccgttcgggctcatcgtgatggcctccagcgacctgcgcgagcacaccgctgtcttcttccgcgcgttcaggtaccatggcaggtacaagcttctcatgtgcactgacctgacaaggtcgtccacgagggcaggcgtgtacaagcc

SEQ ID NO: 11908 - DNA, 647 bp, Zea mays
  unsure (1)..(647): unsure at all n locations; Clone ID: LIB3061-091-Q1-K6-B7
gcaacatagnaaagcacaatagtgtaccaacaatggcagccaaaatttttgcctccttatgctccttggtatttctgcaagtgctgctacggcgaccattttcccgcaatgctcacaagctcctatagcttcccttcttcccccgtacctctcaccagcggtgtcttcggtatgtgaaaacccaattcttcaaccctacaggatccaacaggcaatcgcagctggcatcttacctttatcacccttgttcctccaacaatcatcagccctattacagcagttacctttggtgcatttattggcacaaaacatcagggcacaacaactacaacaacttgtgctagcaaaccttgctgcctactctcagcaacagcagtttcttccattcaaccaactagctgcattgaactctgcttcttatttgcaacaacaacaactaccattcagccagctacctgttgcctacccccaacaatttcttccattcaaccaactggcagcattgaactctcctgcttatttacagcagcaacaactactaccattcagccagctagctggtgtgagccctgctaccttcttgacacaaccacagttgttgccgttctaccagcacgctgcgcctaacgctggcaccctcttacaac

SEQ ID NO: 11909 - DNA, 117 bp, Zea mays
  Clone ID: LIB3061-091-Q1-K6-B9
gtcgcccagcgtcgccactgcactagaagccatatgtccacatggcgccaaaattttgcctctagctcttgtcttctgcagtgctgctcggcgaccatttcccacatgctcacagct

SEQ ID NO: 11910 - DNA, 658 bp, Zea mays
  unsure (1)..(658): unsure at all n locations; Clone ID: LIB3061-091-Q1-K6-C1
nncgtccganaaagcacaatagtgtaccaacaatggcagccaaaaattttgcctccttatgctccttggtctttctgcaagtgctgctacggcgaccattttcccgcaatgctcgcaagctcctatagcttcccttcttcccccgtacctctcaccagcggtgtcttcggtatgtgaaaacccaattcttcaaccctacaggatccaacaggcaatcacagctggcatcttacatttatcacccttgttcctccaacaatcatcagccctattacatcagttacctttggtgcatttattggcacaaaacatcagggcacaacaactacaacaacttgtgctagcaaaccttgctgcctactctcagcaacagcagtttcttccattcaaccaactagctgcattgaactctgcttcttatttgcaacaacaacaactaccattcagccagctacctgctgcctacccccagcaatttcttccattcaaccaactggcagcattgaactctcctgcttatttacagcagcaacaactactaccattcagccagctagctggtgtgagccctgctaccttcttgatacaaccacagttgttgccgttctaccagcacgctgcgcctaacgctggcacccttttacaactgcaacaattg

SEQ ID NO: 11911 - DNA, 583 bp, Zea mays
  Clone ID: LIB3061-091-Q1-K6-C10
gcgaaagaaaagagaagtgggatagctcaatctctccttccaccgtctctcagttctcactctagcgctctctctccctcgctctctctctacacatatatatcagtataggatggatgtgcaaacctagcttgctgctgcctttctagctgagaactgagctgtagctgttggtacggttttcctcctcgctcttcttctcctccttcttgctgctggttgccgggagctgagatcgatcgagagcactgctgttgttcgtgcggccggcggcggcggcgcgcggcagtgggcggagacgacgaccgatcggtcagaaggaatgtcgtcggcccaaatcgtgccggcggaccatgtgtgctatgtgcactgcaacttctgcaacacagttctcgcggtgagtgtcccggggaacagcatgctcagcatggtgacagttcggtgtgggcactgcacaaatctactgtcagtgaatctgagagcactcatgcactcaatcccagaacaagatcagctccagcagcaggagaacatcagggtccatggcacgttgcgtgagcatcatcagtgcggcggcggccac

SEQ ID NO: 11912 - DNA, 625 bp, Zea mays
  Clone ID: LIB3061-091-Q1-K6-C2
gttgcccttgctctcctggcgctcgctgcgagcgccgcctccagtacaagcggcggctgtggctgccagacaccaccgtttcatctaccgcctccgttctatatgccgcctccgttctatctgccgccgcagcagcagccgcagccatggcaataccccactcaaccaccgcagctaagcccgtgccagcagttcggatcctgcggcgtcggcagcgtcggcagcccgttcctgggccagtgcgtcgagttcctgaggcaccagtgcagcccggcggcgacgccctacggctcgccacagtgccaggcgctgcagcagcagtgctgccaccagatcaggcaggtggagccgctgcaccggtaccaggcgacatacggtgtggtcctgcagtccttcctgcagcagcagccgcagggcgagctcgcggcgctgatggcggcccaggtagcgcagcagctgacggcgatgtgcggtctgcagctgcagcagccaggtccctgcccttgcaacgcagctgccggcggtgtctactactgaggaaactatgtactgtagtaataatgtaatggagccgctgactagctacctatagggctatagctagttcactcgtttagcggcgatg

SEQ ID NO: 11913 - DNA, 637 bp, Zea mays
  Clone ID: LIB3061-091-Q1-K6-C3
cggtggtgaaccagtgcccgttcaccgtgtgggccgcgtccgtgccggtgggcggcgggcggcagctgaaccgcggcgagagctggcggatcacggcccccgcgggcacgacggccgcgcgcatctgggcgcgcacggggtgccagttcgacgcgagcgggcgcgggagctgccgcacgggggactgcggcggcgtgctgcagtgcactgggtacgggcgcgcgcccaacacgctggcggagtacgcgctgaagcagttcaacaacctcgacttcttcgacatctccctcatcgacggcttcaacgtgcccatgagcttcctcccggacggcgggtccgggtgcagccgcggcccgcgctgcgccgtggacgtgaacgcgcgctgccctgccgagctgcggcaggacggcgtgtgcaacaacgcgtgccccgtgttcaagaaggacgagtactgctgcgtcggctcggcggccaacgactgccacccgaccaactactccaggtacttcaaggggcagtgccccgacgcgtacagctaccccaaggatgacgccaccagcaccttcacctgccccgccggaaccaactacaaggtcgtcttctgcccgtgaggccgctgaactagcatcagcgtgcg

SEQ ID NO: 11914 - DNA, 424 bp, Zea mays
  Clone ID: LIB3061-091-Q1-K6-C4
caactgctttcatctagcccgctcgctgtggccaatgcacctacatacctgcaacaagaattgttgcaacagattgtaccagctctaactcagctagctgtggcaaaccctgttgcctacttgcaacagctgcttccattcaaccaactaactatgtcgaactctgttgcgtacctacaacagcgacaacagttacttaatccattggcagtggctaacccattggtcgctgccttcctacagcagcaacaattgctgccatacaaccggttctctttgatgaatcctgtcttgtcgaggcagcaacccatcgttggaggtgccatcttttagattacatatgagatgtactcgataatggtgccctcataccggcatgtgtttcctagaaataatcaatatattggttgagatttatctcgat

SEQ ID NO: 11915 - DNA, 638 bp, Zea mays
  unsure (1)..(638): unsure at all n locations; Clone ID: LIB3061-091-Q1-K6-C6
cccagcgtccgtagcaacatagnaaagcacaatagtgtaccaacaatggcagccaaaatttttgcctccttatgctccttggtctttctgcaagtgctgctacggcgaccattttcccgcaatgctcgcaagctcctatagcttcccttcttcccccgtacctctcaccagcggtgtcttcggtatgtgaaaacccaattcttcaaccctacaggatccaacaggcaatcacagctggcatcttacctttatcacccttgttcctccaacaatcatcagccctattacatcagttacctttggtgcatttattggcacaaaacatcagggcacaacaactacaacaacttgtgctagcaaaccttgctgcctactctcagcaacagcagtttcttccattcaaccaactagctgcattgaactctgcttcttatttgcaacaacaacaactaccattcagccagctacctgctgcctacccccagcaatttcttccattcaaccaactggcagcattgaactctcctgcttatttacagcagcaacaactactaccattcagccagctagnctggtgtgagccctgctaccttcttgaacaaccacagttgttgccgttctaccagcacgctgcgcct

SEQ ID NO: 11916 - DNA, 567 bp, Zea mays
  Clone ID: LIB3061-091-Q1-K6-C8
caagctcctatagcttcccttcttcccccatacctctcaccagcggtgtcttcaatgtgtgaaaccccaattgttcaaccctacaggatccaacaggcaatcgcaacaggcatcttaccattatcacccttgttcctccaacaaccgtcagccctattacagcagttacctttggtccatttggtggcacaaaacatcagggcacaacaactacaacaacttgtgctagcaaaccttgctgcatactctcagcaacatcagtttcttccattcaaccaactggctgcattgaactctgctgcttatttgcaacaacaattaccattcagccagctagttgctgcctacccccagcaatttcttccattcaaccaactagcagcattgaactctgctgcttatttacagcagcaacaactactaccattcagccagctagctgatgtgagccctgctgccttcttgacacaacaacagttgttgccgttctacctgcacgctatgcctaacgctggcaccctcttacaactgcaacaattgctgccattcaaccaacttgctttgaca

SEQ ID NO: 11917 - DNA, 473 bp, Zea mays
  Clone ID: LIB3061-091-Q1-K6-C9
gcaaaccttgctgcctactctcagcaacagcagtttcttccattcaaccaactagctgcattgaactctgcttcttatttgcaacaacaacaactaccattcagccagctacctgctgcctacccccagcaatttcttccattcaaccaactggcagcattgaactctcctgcttatttacagcagcaacaactactaccattcagccagctagctggtgtgagccctgctaccttcttgatacaaccacagttgttgccgttctaccagcacgctgcgcctaacgctggcaccctcttacaactgcaacaattgctgccattcaaccaacttgctttgacaaacccagcagcgttctaccaacaacccatcattggtggtgccctcttttagatttcttatgagttatagttcaataataaagttttttgtctgatgtttgtggcttcccagaaataagaaagtacatttct

SEQ ID NO: 11918 - DNA, 632 bp, Zea mays
  Clone ID: LIB3061-091-Q1-K6-D1
ccgggatccaggacggcgccgccggcctcaccggtggtggtctgcatggcgcaacaggcatggggacgactaccggtactggcgcgcacggtgccaccggaatgctcgacacgggggtcttgggcggcggagggcacgcggccaccggcatgcccgccggccacggcacgcgtcccggcgccacaggcgtagctggaaccggcggcgcgttcccccatgcagctgagcacaagacgggcggcggcatccttcgccgctccggcagcagctccagctccagcagctcgtcatctgaagacgacggcatgggtgggcgccggaagaagggcctgaaggagaagatcaagagaaaatgccaggaggccacagggaaggccagggccaggcgacggccaccggtgcgtacggcgggacagggtacgtggctgggccgacgaccggaggcccccacgagaagaagggtgtggtggagaagatcaaggagaagatcccaggcggccacaaggactacgaccagcatcagcacaccaccgcggcaaccggtggcggcggtggctatggcggaaccaccgacaccacgtatgggacgacgaccactgaaggcactcacgagaaaaaaggcttcatggaca

SEQ ID NO: 11919 - DNA, 612 bp, Zea mays
  Clone ID: LIB3061-091-Q1-K6-D10
ggcatgataagtcaatgtaccaatggttccttgtctctaggcttggattgcaaaagagtcaacaactgcagtgcacctttatacagcaatccctgtggtgatttctcttatcggtttaataacatcaacatttcagattccatcaatcatgatgactcaataaaacagaaacaatgtaactctattgctggagagaaagcgataaagtctatttctgatgggttgctagatagtgaaggctcaagtcatgctagtactgatgattcagtaagtgtgaggaacagtggtgacttctatgaagctttaacaactatctcgccatctgggagacgttatgccccacatcaattttaccaattagaaaatggtaaggtggttgttagacataacacaaacatgtcacaccatgggatgccaacaaagcagttcacaagcagatcttaccactcttttgaagatgctaagtatcacaatgagttttcaggaagctttctgccacccattgagcataatgcttactcttctgctggctttgttaatgttctggccacctctaactcagcatgtacacatgaaaattcacaacttggtggagccaataataacatcttg

SEQ ID NO: 11920 - DNA, 96 bp, Zea mays
  Clone ID: LIB3061-091-Q1-K6-D11
agaagtcatttctaaaaaaaaaaaaaaaaaaaaaaaaaaaaaaaaaaaaaaaaaaaaaaaaaaaagaaaaaaaaaaaaaaaaaggggccggccgtt

SEQ ID NO: 11921 - DNA, 648 bp, Zea mays
  Clone ID: LIB3061-091-Q1-K6-D12
tgggccgcaagttcttcgttggtggcaactgtgaaatgcattggaaaccgcatatcaggtctgagaagattgtcaaaaccctgaatgaaggaatgttccctcttcagatgttgttgaggtcgttgtcagtcctccttatgtgttcctcccggtggtcaagagccagctgcgccaagagttccaagttgctgctcagaactgctgggtgaagataggaggtgcattcactggtgaaattagtgctgaaatgctcgtcaaccttggcgttccctgcgtcattcttggacactctgaaaggagagctctgctgggagaatcaaatgagtttgttggagacaaggttgcttttgctctgtctcacggactaaaggtcattgcatgtgttggtgagacccttgaggagagggaggctggttcaaccatggatgttgttgctgcacaaacaaaagcaattgctgtagaatatcaaggactggagcaacgtttttcttgcctatgaaccaatctgggctattggaactggcaaagtcgccaccccaactcaagctcaggaagtgcacgcctacctgtaggattgggtaaagatcaatgtcatccctgcagtctctgaatctacaaggatcatctatggaggttcagtaactgctg

SEQ ID NO: 11922 - DNA, 90 bp, Zea mays
  unsure (1)..(90): unsure at all n locations; Clone ID: LIB3061-091-Q1-K6-D2
agnattttttatgctttatactgtaataataaagttctcatactgatatgtgcaacttctcagtaataaaagattagagatctatatttt

SEQ ID NO: 11923 - DNA, 629 bp, Zea mays
  unsure (1)..(629): unsure at all n locations; Clone ID: LIB3061-091-Q1-K6-D3
ccacgccgtccgggnaatccagtagcaacaacagagcaacaatggcgaccaagatattttccctccttatgctccttgctctttctgcatgtgttgctaacgcgacaattttccctcaatgctcacaagctcctatagcttcccttcttcccccataccttccatcaatgatagcttcagtatgtgaaaacccagctcttcagccctataggctccaacaagcaatcgcagcaagcaacatacctttatcacccttgttgtttcaacaatcgccagccctatctttggtgcagtcattggtacaaaccatcagggcacagcagctgcagcaactcgtgctacctgtgatcaaccaagtagctctggcaaacctttctccctactctcagcaacaacaatttcttccattcaaccaactgtctacactgaaccctgctgcttatttgcagcaacaactattaccattcagccagctagctactgcctactctcagcaacaacaacttcttccatttaaccaattggccgcactgaaccccgctgcttatttgcagcagcaaatactactaccatttagccagctagctgcagcaaaccgtgcttccttcttgacacagcaacagttgctg

SEQ ID NO: 11924 - DNA, 525 bp, Zea mays
  unsure (1)..(525): unsure at all n locations; Clone ID: LIB3061-091-Q1-K6-D4
agnacgcgagcggctgcccttttttttttttttttttttttttttttttttttttttatttttttttttatttttttttttttttttttttggttttttttttttctttttttttttttttttttttttttttttttttttttttttttttttttgggaaccaaaccttttttttttcatttcaaatggtcaatacagggggnngctccccccggccccgccccccaggggggcgcggggcccatgcttccccaatcgtcgccccttacagccccaacttgtgtggctccccgggggctttccccaacacaaggttttttccggggggggcaccccccctaaagaaagccggccgcgagctgctcgtttggcacccccaactgcccgtggttttcggatccatttcgcccatgggctatcccagggaggccgctgcttggtgagattccggaaggactgctgtcatgcagacaggaatgaagaaagcgctgacaccttattcctggctcacaaatgctgccaggg

SEQ ID NO: 11925 - DNA, 624 bp, Zea mays
  unsure (1)..(624): unsure at all n locations; Clone ID: LIB3061-091-Q1-K6-D5
gccgcgcctctgcttcctcgccgcgcacgtcatcctgatcgccctcgccacgctcttccgccgcgacgcagcctcgtcctcgccgccgtccgcggaccctcccggctccagcggcgacgcccaggcccagcacccgttcctcgcgctcctgggcccgccgctgccgccggtcgccgaggtggcggagccctccggggaggaggaggcgccgccggatgaggcgctcgacggcaaggaggcggcgcaccacgcgaggacagtgcgcgcccagccgccgcggcgggccatgtcggagaagaccggcggcgcagcgggcggcacggcgagggcggcgtcggcggagctgcggcgtgccaagtcggagagcggcaggcgccggcaacgacgttcggcggcggcggcggcggcggcgccggtggagctggggatggacgacgcagaggcgttccggctggcggtggaggcgttcatcgcgaagcagcagacctggttccaccgcgaggagtcgctgatcgcccgtaccggtaccgccgacaacgccggcgggngaagacggcacggcgatcgccggtgctgcggtggctgtgaagtgagcgagcaacgcagccaccaccggtaccacca

SEQ ID NO: 11926 - DNA, 336 bp, Zea mays
  unsure (1)..(336): unsure at all n locations; Clone ID: LIB3061-091-Q1-K6-D7
cgcaacagcaacaacagttcctaccagcactgagccacctacctggtgaaccctgtcgcctacttgcaacagcagctgcttgcatccaacccacttgctctagcaaacgtagttgcaaaccagcaacaacaacaactgcaacagtttctgccagcgcttagtcaactagccatggtgaaccctgccgcctacctacaacagcaacaactgctttcatctagcccgctcgctgtggccaatgcacctacatacctgcaacaagaattgttgcaacagattgtaccagctctaactcagctagctgtggcaaaccctngtgcctacttgcaacagctg

SEQ ID NO: 11927 - DNA, 82 bp, Zea mays
  Clone ID: LIB3061-091-Q1-K6-D8
ttagattgcttatgagttatagttcaataatgaagttttttggatgatgtttgtggcgtcccagaaaaagaaagtcatttct

SEQ ID NO: 11928 - DNA, 492 bp, Zea mays
  unsure (1)..(492): unsure at all n locations; Clone ID: LIB3061-091-Q1-K6-D9
ctggngcttctcttggcgggtgtcatcgtcctgaaggtgctcggcgtgtggtcgagcccgttcgtgttccgggtccgcatcgtgctcaacctgaatggcctggcgtncgagttcgtggtggggggggtggggcactgagcgcgctccttctggggtccttcccggtgcacaagagcgtgccggtgctcctccacgccgggcgcgccataaacgagtccctggtcatcctgcagttcatcgacgaggtgtgggcggggtcggggccggacgtgctgccggacgacccctacgagcgcgcggtggcgcggttctggggcgcgtacatcgtctacttggtggattcggcgtggctggggatgctgttccggtgctcgatctaggaggagagggctgttgttgtggtgcgcgcctcgtgaggcgctcgacgcgcttggagggcgtcgtttcggactgcttccaggggaaggctttcttctgtgggtgacgacatcg

SEQ ID NO: 11929 - DNA, 642 bp, Zea mays
  Clone ID: LIB3061-091-Q1-K6-E1
gtagaaatccattagcaacaatagagcaacaatggcgaccaagatattttccctccttatgctccttgctctttctacatgtgttgctaacgcgacaattttccctcaatgctcacaagctcctatagcttcccttcttcccccataccttccatcaattatagcttcagtatgtgaaaacccagctcttcaaccatataggcttcaacaagcaatcgcagcaagcaacatacctttatcgcccttgttgtttcaacaatcaccagccctatctttggtgcagtcattggtacaaaccatcagggcacaacagctgcagcaactcgtgctacctgtgatcaaccaagtagctctggcaaacctttctccctactctcagcaacaacaatttcttccattcaaccaactgtctacactgaaccctgctgcttatttgcagcaacaactattaccatttagccagctagctactgcctactctcagcaacaacaacttcttccatttaaccaattggccgcactgaaccccgctgcttatttgcagcagcaaatactactgccatttagcgagctagctgcagcaagtcgtgcttccttcttgacacagcaacagttgctgcctttctacaagcagtttgcggc

SEQ ID NO: 11930 - DNA, 435 bp, Zea mays
  Clone ID: LIB3061-091-Q1-K6-E10
ccgtccgacgaaacccaatcctgcttcgatcccgtcggccggcgatggagggccggcggccgggcgcgcccgtggcgggcctgcccatcggcttccgcttccgccccaccgacgaggagctgctgctgcactacctccgccgcaaggcgctggcctgcccgctccccgccggcgtcatccccgacgccgacctcgcgcgcctccacccgtgggacctcctccccgccgccgcaccagggggatccggagccgacgccgacggggagcgcttcttcttccaccgcccggcgacgcagtgctggcgcaagggcggcggcgcggccagggcggccggcaccggcgtctggaggccgtccggcaaggagaccctcgtcctgtccccgcgctgcaagcgccccgtcggcaccaagcggacgctcgtattctgcccccgcc

SEQ ID NO: 11931 - DNA, 553 bp, Zea mays
  Clone ID: LIB3061-091-Q1-K6-E11
cacagttgttgccgttctacctgcacgctgcgcctaacgctggcaccctcttacaactgcaacaattgctgccattcaaccaacttgctttgacaaacccaacagcgttctaccaacaacccatcattggtggtgccctcttttagattgcttatgagttaaacttcattattgattgagtaataatgtgtcacgcatcaccatgggtggcagtgtcagtgtgagcaatgacctgaatgaacaattgaaatgaaaagaaaaagtattgttccaaaaaaaaaaaaaaaaaaaaaaaaaaaaaaaaaaaaaaaaaaaaaaaaaaaaaaaaaaaaaaaaaaaaaaaaaaaaaaaaaaaaattttaaaaaaaaaaaaaaaaaaaaaaaaaaaaaaaaaaaaaaaaaaaaaaaaaaaaaaaaaaaaggggggggcccttttaaagaaaccaaattttttttcccggggtttggaaagtaaaagtttttttttgggggccccaaaaaaaaattaatgggccgggttttaaaaacggggggctgggaaaaacccgggggt

SEQ ID NO: 11932 - DNA, 641 bp, Zea mays
  unsure (1)..(641): unsure at all n locations; Clone ID: LIB3061-091-Q1-K6-E12
caacagcacatanaagtggaatccagtagcaacaacagagcaacaatggcgaccaagatattttccctccttatgctccttgctctttctgcatgtgttgctaacgcgacaattttccctcaatgctcacaagctcctatagcttcccttcttcccccataccttccatcaatgatagcttcagtatgtgaaaacccagctcttcagccctataggctccaacaagcaatcgcagcaagcaacatacctttatcacccttgttgtttcaacaatcgccagccctatctttggtgcagtcattggtacaaaccatcagggcacagcagctgcagcaactcgtgctacctgtgatcaaccaagtagctctggcaaacctttctccctactctcagcaacaacaatttcttccattcaaccaactgtctacactgaaccctgctgcttatttgcagcaacaactattaccattcagccagctagctactgcctactctcagcaacaacaacttcttccatttaaccaattggccgcactgaaccccgctgcttatttgcagcagcaaatactactaccatttagccagctagctgcagcaaaccgtgcttccttcttgacacagcaacagttgctgcctttcta

SEQ ID NO: 11933 - DNA, 657 bp, Zea mays
  unsure (1)..(657): unsure at all n locations; Clone ID: LIB3061-091-Q1-K6-E2
caactagcaacatagnaaagcacaatagtgtaccaacaatggcagccaaaaattttgcctccttatgctccttggtctttctgcaagtgctgctacggcgaccattttcccgcaatgctcgcaagctcctatagcttcccttcttcccccgtacctctcaccagcggtgtcttcggtatgtgaaaacccaattcttcaaccctacaggatccaacaggcaatcacagctggcatcttacctttatcacccttgttcctccaacaatcatcagccctattacatcagttacctttggtgcatttattggcacaaaacatcagggcacaacaactacaacaacttgtgctagcaaaccttgctgcctactctcagcaacagcagtttcttccattcaaccaactagctgcattgaactctgcttcttatttgcaacaacaacaactaccattcagccagctacctgctgcctacccccagcaatttcttccattcaaccaactggcagcattgaactctcctgcttatttacagcagcaacaactactaccattcagccagctagctggtgtgagccctgctaccttcttgatacaaccacagttgttgccgttctaccagcacgctgcgcctaacgctggcaccctcttacaactgca

SEQ ID NO: 11934 - DNA, 595 bp, Zea mays
  Clone ID: LIB3061-091-Q1-K6-E4
cagaaaaggaccaaatcgaatccgtggtgcactgcccctccccctccctcacaagccgccgccgccgtgaggactccggcgaatggcgtcccgcgtcgcctcgggcctcctccgccgccgcgccgtcgccactctagggctactaaggagtcatacacatgtcagaaactacagcagtcaactttcagctttgattccagctacttctcaatgctcaaatctgacaagaagacgctattacttacctaatccatctctgtaccaagtttggagtaggtcatttgcctcagacagcggagacaagttcgaggctgttgtgcccttcatgggtgaatctgtaactgatggaactcttgctaacttcttaaagaagcctggagacagagtcgaggccgatgaacccatagcgcagattgaaactgataaggtcactatagatgtcgcaagtcctgaagctggtgttattgaaaagctcattgctagtgaaggcgacacagttactccaggcactaaagttgcaatcatatccaagtctgctcaacctgctgaaacacatgttgctccatctgaggaagcaacttcaaaagggtcttct

SEQ ID NO: 11935 - DNA, 640 bp, Zea mays
  unsure (1)..(640): unsure at all n locations; Clone ID: LIB3061-091-Q1-K6-E6
gcccaactagcaacatagnaaagcacaatagtgtaccaacaatggcagccaaaatttttgcctccttatgctccttggtctttctgcaagtgctgctacggcgaccattttcccgcaatgctcgcaagctcctatagcttcccttcttcccccgtacctctcaccagcggtgtcttcggtatgtgaaaacccaattcttcaaccctacaggatccaacaggcaatcgcagctggcatcttacctttatcacccttgttcctccaacaatcatcagccctattacaacagttacctttggtgcatttattggcacaaaacatcagggcacaacaactacaacaacttgtgctagcaaaccttgctgcctactctcagcaacagcagtttcttccattcaaccaactaggttcattgaactctgcttcttatttgcaacaacaacaactaccattcagccagctacctgctgcctacccccagcaatttcttccattcaaccaactagcagcattgaactctcctgcttatttacagcagcaacaactactaccattcagccagctagctggtgtgagccctgctaccttcttgacacaaccacagttgttgccgttctaccagcacgttgcgcctaacgct

SEQ ID NO: 11936 - DNA, 627 bp, Zea mays
  unsure (1)..(627): unsure at all n locations; Clone ID: LIB3061-091-Q1-K6-E7
ggtccggnaatccccggngcaacttagcaacatagnaaagcacaatagtgtaccaacaatggcagccaaaatttttgcttccttatgctccttggtctttctgcaagtgttgctaccganaccattttcccacaatgctcacaagctcctatagcttcccttcttcccccatacctctcaccagcggtgtcttcaatgtgtgaaaccccaattgttcaaccctacaggatccaacaggcaatcgcaacaggcatcttaccattatcacccttgttcctccaacaaccgtcagccctattacagcagttacctttggtccatttggtggcacaaaacatcagggcacaacaactacaacaacttgtgctagcaaaccttgctgcatactctcagcaacatcagtttcttccattcaaccaactggctgcattgaactctgctgcttatttgcaacaacaattaccattcagccagctagttgctgcctacccccagcaatttcttccattcaaccaactagcagcattgaactctgctgcttatttacagcagcaacaactactaccattcagccagctagctgatgtgagccctgctgccttcttgacacaacaacagttgttgccg

SEQ ID NO: 11937 - DNA, 637 bp, Zea mays
  unsure (1)..(637): unsure at all n locations; Clone ID: LIB3061-091-Q1-K6-E8
ngactagcaacatagnaaagcacaatagtgtaccaacaatggcagccaaaatttttgcctccttatgctccttggtatttctgcaagtgctgctacggcgaccattttcccgcaatgctcacaagctcctatagcttcccttcttcccccgtacctctcaccagcggtgtcttcggtatgtgaaaacccaattcttcaaccctacaggatccaacaggcaatcgcagctggcatcttacctttatcacccttgttcctccaacaatcatcagccctattacagcagttacctttggtgcatttattggcacaaaacatcagggcacaacaactacaacaacttgtgctagcaaaccttgctgcctactctcagcaacagcagtttcttccattcaaccaactagctgcattgaactctgcttcttatttgcaacaacaacaactaccattcagccagctacctgttgcctacccccaacaatttcttccattcaaccaactggcagcattgaactctcctgcttatttacagcagcaacaactactaccattcagccagctagctggtgtgagccctgctaccttcttgacaaaccacagttgttgccgttctaccagcacgctgcgcctaacgctg

SEQ ID NO: 11938 - DNA, 528 bp, Zea mays
  unsure (1)..(528): unsure at all n locations; Clone ID: LIB3061-091-Q1-K6-E9
gccagttctcctttcgccggaatctgtccctcctccccgcctctgtgggtactggaccaccgtggagcgggcattcatccaggctaggtccattccttcctttgctcgttctcttctccatcgcggaagctccacccgagttgacgccagaagagaatcggtgccctagggtgttctcgcagaattattttccagaagatttgcagatcgagtcgaaccctatgccccacgttaagcctgccgccggcctgcccccttaccaccaccgggcgctccctggccccgggcagggtccagttcccacgggacatgggatgatgcaccgggaggtccgtgatcagtacgggccgccggggccgaggatgcacctaccaccgctggggcacgggcccgctccgttcccctacgacatgctgcctccgctgcccccaccggaggtcctggagcagaagcttgtggcacagcacgggngaaatgcagaagctggttatagagaaacggccgcttgctgcaagccacgcctcgctg

SEQ ID NO: 11939 - DNA, 622 bp, Zea mays
  Clone ID: LIB3061-091-Q1-K6-F1
tgctcacaagctcctatagcttcccttcttcccccgtcctctcacacggtgtcttcggtatgtgaaaaacccaattcttcaaccgtacaggatccaacaggcaatcgcagctggcatcttacctttatcacccttgttcctccaacaatcatcagccctattacagcagttacctttggtgcatttattggcacaaaacatcagggcacaacaactacaacaacttgtgctagcaaaccttgctgcctactctcagcaacagcagtttcttccattcaaccaactagctgcattgaactctgcttcttatttgcaacaacaacaactaccattcagccagctatctgctgcctacccccagcaatttcttccattcaaccaactgacagcattgaactctcctgcttatttacagcagcaacaactactaccattcagccagctagctggtgtgagccctgctaccttcttgacacaaccacagttgttgccgttctaccagcacgctgcgcctaacgctggcaccctcttacaactgcaacaattgctgccattcaaccaacttgctttgacaaacccagcagcattctaccaacaacccatcattggtggtgccctcttt

SEQ ID NO: 11940 - DNA, 537 bp, Zea mays
  unsure (1)..(537): unsure at all n locations; Clone ID: LIB3061-091-Q1-K6-F10
tatggatgagctcagtgaggatgacaagttgacggtcgctcgtgcaagaaagatcagcgtttcctgagccagcctttcctgtcgctgaagttttcacaggtgctccagggaagtatgtggagctgaaggaaagtgtgaagagtttccagggtgttttggatggcaagtatgatgacctccctgagcagtcattctacatggttggaggcattgaggaagtcattgctaaggccgagaaaatcgccaaggagtctgcttcataaggcggcttcttgcttgttgaatcctgtacaatcaagttccatttttggatttaagcgattgtttatgcttttcgcagttaggcagcacgagttggaggtccatctcctgctgagatgcttgtttttctctttgttgttcaaacactttacacccaaataagcaactgcagtgacattaattttggctgcaccaaagttacatgaactgaagaaacttgtggcctgtgtgacgcggatcaatcagaacataaagttacggcttctggttggtnna

SEQ ID NO: 11941 - DNA, 632 bp, Zea mays
  Clone ID: LIB3061-091-Q1-K6-F11
cgcagtgcgacctctgcgtcttcgaatccaggtctctgcaggaaggtagagaggaggaggaggaggtttgtggcaggatttgaccagcccaatggttccatccgagatggggagcgtcgccaccgccgtcagcacgcctgctgcggacaagctgctccatgggcctatctctggcaagaagtgcaagaaaccaggcccgaggaagattcataaggctgagagggagaagcttaaacgagaccacctaaatgatctctttgttgagctgggtaatatgctagaagcagataggcagaacaatgggaaagcatgcatactgactgacactactcggatactaagagacctgcttgttcaagtagactctcttcgaaaggaacatagcgacctacaaaacgaatctcattatgtaacaatggagagggatgagatgcaggatgaaaacggcgtgctccgcaaagaaatttcagagcttcaaaacgagttgacaatgcgggtttcaggcagtccagcaggttggggccatggcaccgccagatcagatccccctcttcctcactcaacggcagtgttctcgtcggagcaggcgatgcaaccacccaccattgcaagcgttgtattcccgttgcagc

SEQ ID NO: 11942 - DNA, 633 bp, Zea mays
  unsure (1)..(633): unsure at all n locations; Clone ID: LIB3061-091-Q1-K6-F12
agaacaactagcaacatagnaaagcacaatagtgtaccaacaatggcagccaaaatttttgcctccttatgctccttggtctttctgcaagtgctgctacggcgaccattttcccacaatgctcacaagctcctatagcttcccttcttcccccgtacctctcaccagcggtgtcttcggtatgtgaaaacccaattcttcaaccctataggatccaacaggcaatcgcagctggcatcttacctttatcacccttgttcctccaacaatcatcagccctattacagcagttacctttggtgcatttattggcacaaaacatcagggcacaacaactacaacaacttgtgctagcaaaccttgctgcctactctcagcaacaacagtttcttccattcaaccaactagctgcattgaactctgcttcttatttgcaacaacaacaactaccattcagccagctatctgctgcctacccccagcaatttcttccattcaaccaactgacagctttgaactctcctgcttatttacagcagcaacaactactaccattcagccagctagctggtgtgagccctgctaccttcttgacacaaccacaattgttgccgttctaccagcacgctgcgc

SEQ ID NO: 11943 - DNA, 640 bp, Zea mays
  unsure (1)..(640): unsure at all n locations; Clone ID: LIB3061-091-Q1-K6-F2
ccaacagcacatanaagtggaatccagtagcaacaacagagcaacaatggcgaccaagatattttccctccttatgctccttgctctttctgcatgtgttgctaacgcgacaattttccctcaatgctcacaagctcctatagcttcccttcttcccccataccttccatcaatgatagcttcagtatgtgaaaacccagctcttcagccctataggctccaacaagcaatcgcagcaagcaacatacctttatcacccttgttgtttcaacaatcgccagccctatctttggtgcagtcattggtacaaaccatcagggcacagcagctgcagcaactcgtgctacctgtgatcaaccaagtagctctggcaaacctttctccctactctcagcaacaacaatttcttccattcaaccaactgtctacactgaaccctgctgcttatttgcagcaacaactattaccattcagccagctagctactgcctactctcagcaacaacaacttcttccatttaaccaattggccgcactgaaccccgctgcttatttgcagcagcaaatactactaccatttagccagctagctgcagcaaaccgtgcttccttcttgacacagcaacagttgctgcctttc

SEQ ID NO: 11944 - DNA, 319 bp, Zea mays
  unsure (1)..(319): unsure at all n locations; Clone ID: LIB3061-091-Q1-K6-F3
ccctcttacaactgcaacaattgctgccattcaaccaacttgctttgacaaacccagcagcgttctaccaacaacccatcattggtggtgccctcttttagattttttattgnactatttctcatttgaaatctaagagagggcgccccctttgtttggttgttggtngtgcgtcgggggggggggtgtgcttggtgggtgtcgggcggttnttgtggccgttgttgtttggcggtcgcgtgggggggggggtgtttctggtttgggggtttctgtgcgtggtgtttggcgttttttgttttgtgtttttttgggttgt

SEQ ID NO: 11945 - DNA, 602 bp, Zea mays
  unsure (1)..(602): unsure at all n locations; Clone ID: LIB3061-091-Q1-K6-F4
tgctcgcctgnaanaatctaaaccggagaactgttgatgtcttggcatctcgtctgtacttttattactcttatgtgtatgagcttaccaacagccttgctgaaatccgcgggaatctgcttgctctacacagaatggcaactttgcatcgtgacgagctcggccaggaaactctgctgaatcttctcctccgcaattacctccactacaacttgtatgatcaggcagaaaagcttagatcaaaggcacctcgttttgaagcacattccaaccaacaattctgccgatacttgttctacttgggcaaaattaggacaattcagttggagtacactgatgctaaagaaagcctcctgcaagctgctcgtaaggcaccaacaactgcccgtggttttcggatccagtgcaacaaatgggctatcatagtgaggctgctgcttggtgagattccagagaggactgttttcatgcagaaaggaatgaagaaagctctgacaccttattttgagctcacaaatgctgtcagggttggggaccttgaactgttcaggactgtcgctgacaaatttgcaagcacattcagcgcagacaggactcgcaac

SEQ ID NO: 11946 - DNA, 152 bp, Zea mays
  Clone ID: LIB3061-091-Q1-K6-F5
accggtccaaaaactcccggtcgacccagcgtccggtcagtgtgagcaatgaacctgaatgaacaattgaaatgaaaagaaaaaaaaaaaaaaaaaaaaaaaaaaaaaaaaaaaaaaaaaaaaaaaaaaaaaaaaaaaaaaaaggggcggcc

SEQ ID NO: 11947 - DNA, 128 bp, Zea mays
  Clone ID: LIB3061-091-Q1-K6-F8
ctcgccgtggggctcaacaaggacaaggccctcttcaccattgtcgtctccgggaccgactggtgctcaaccaagtcattgagcagctcaataagctcgtcaacgttcatagtgttgaagatctatct

SEQ ID NO: 11948 - DNA, 626 bp, Zea mays
  Clone ID: LIB3061-091-Q1-K6-G10
gatcgccaggcgtggcggagccgcacccgcgcggccgggttcgacgacccggactccgccgtgcacctctgcttcgccgtgaacgcgcggcccatgctgcacgcgtcgctcccgcggggcggcgccgggttctacggcaactgctactacatcatgcgcgtgtcggcgcccgcggggaaggtggcgggcgcctcggtcgcggaggtggtgaggatgatcaaggacgggaagcgccggatgcccgcggagttcgcgcgctgggcggcgggggagctgggcgccggcggcgtcgacccctaccagatcacgtccgactaccgcacgctgctggtgtccgactggacgcgcctcggcttcgcggaggtggactacggatggggcccgcccgcgcacgtcgtgccgctgacaaacctggactacatcgccacgtgcatcctcgtgaagccctgggcccacaagccaggggcgcggctcatcacgcagtgcgtcaccccggaccgcgtcgccgccttccacgaggccatgctcgacaccagctgctgatcggagagaagagatgagtctgggggctctatttgcatgcatcgtctgtgtctgtgtggtgggaagccgccgcctacttacag

SEQ ID NO: 11949 - DNA, 634 bp, Zea mays
  Clone ID: LIB3061-091-Q1-K6-G11
acccgccgaggcgacgcgacagccgccaggaggaaggaataaactcactgccagccagtgaagggggagaagtgtactgctccgtcgaccagtgcgcgcaccgcccggcagggctgctcatctcgtcgacgaccagtggattaatcggcatggcggctctggccacgtcgcagctcgtcgcaacgcgcgccggcctgggcgtcccggacgcgtccacgttccgccgcggcgccgcgcagggcctgaggggggcccgggcgtcggcggcggcggacacgctcagcatgcggaccagcgcgcgcgcggcgcccaggcaccagcagcaggcgcgccgcgggggcaggttcccgtcgctcgtcgtgtgcgccagcgccggcatgaacgtcgtcttcgtcggcgccgagatggcgccgtggagcaagaccggcggcctcggcgacgtcctcggcggcctgccgccggccatggccgcgaacgggcaccgtgtcatggtcgtctctccccgctacgaccagtacaaggacgcctgggacaccagcgtcgtgtccgagatcaagatgggagacgggtacgagacggtcaggttcttccactgctacaagcgcggagtggaccgcgtgttcgttgaccaccc

SEQ ID NO: 11950 - DNA, 358 bp, Zea mays
  unsure (1)..(358): unsure at all n locations; Clone ID: LIB3061-091-Q1-K6-G2
ngacagattgtaccagctctgactcaactagctgtggcaaaccctgttgcctacttgcaacagctgcttccattcaaccaactgactctgtcgaactctgctgcgtacctacaacagcgacaacagttacttaatccattggtagtggctaacccattggtcgccgccttcctacagcagcaacaattgctgccatacaaccagttctctttgatgaatcctgtcttgtcgaggcagcaacccatcgttggaggtgccatcttttagattacatatgagatgtactcgataatggtgccctcataccgacgtgtgtttcctagaaataatcaatatattgattgagatttatctcgat

SEQ ID NO: 11951 - DNA, 210 bp, Zea mays
  Clone ID: LIB3061-091-Q1-K6-G3
ttctcttacaactgcaacaattgctgccgttcagaccgacttgctttgacaaacccagcagcgttctaccaacaacccatcattggtggtgtatttttttggtgtttgcttttccgggtgtgggtgctttttagttgggtcctgggattgtgttttttgttgtggcttctggttgtggggggggggttgtgtctttttgtgtgcttttgg

SEQ ID NO: 11952 - DNA, 677 bp, Zea mays
  Clone ID: LIB3061-091-Q1-K6-G5
tcgcaacatacatagtgaaatacactaccaacatctcatcaccaatggcaggcaacatattgccatccttgcccttcttgctctttatcaagcgttgctaccgtgactcttattccacaatgctcacaacactacctctttccggtgacagccgtgcgcatttgcaataccactaactgtatcagattcctacagtgctgacaagcaggaccatctgcaaacacagcatactgtacggaacgaagacgcatctgcacgcgatcgcaaccaacacacttatgctccatatctgcgaacacacacatatctgtaatgacatctatttctgcaaagaattggagcccaacaactacaacaacagttgcttccaacaatcaatcaactagttgcaaccaaccttgctgcttacctccagcaacaacaatttcttccattcaatcaactagctggggtgaaccctgctgcttacttgctggcacaacagctactaccattcaaccaacttgtaaggagccctgttgtgcttattactgaaaaacagaagcttccattccatctacaaggtgcggcaaacatcgctgttttcttgcaacaacaacaacattagctgccattatacccactagctgagggaaacattaacgccttcttgcacagcaacagttgctaccattcta

SEQ ID NO: 11953 - DNA, 639 bp, Zea mays
  Clone ID: LIB3061-091-Q1-K6-H1
gcgcgcggcgcccgccggccaaggccaaccatgctggcgagggctcctccgccgcggccgtgctccagcggcgtttgcatcgcccgcgcacatccaagagccgccgccgtcgcggccaggccggggacgacgaggacgacgacgacggtcgcggcggcggcggcagaggccgcttctaacgggtcagcggcggcggccgtcgcagggatcagcagcagcagcagcgcgctggtgacctcgaccgtcgggaaatcgacgaacatcctgtggcatgagtgcgccatcgggcagaaggagcgacagggtctgctgaaccagaagggctgcgtcgtgtggatcactggcctaagcggttcaggtgaggtctgcaagagctgatctcttcacatttaattacgaacaaagatccttccttttatatatatatacctgtctgtctgtctgtctgtctgtctgtcttgacttgatcagggaaaagcacgctcgcgatcgcgctgagccgcgagctgcacggcagaggccacctcacgtacgtcctcgacggcgacaacctcaggcacgggctgaacagggacctcagcttcggagcagaggaccgcgccgagaacatccgcagagtagcgatgtcactgctcgttt

SEQ ID NO: 11954 - DNA, 618 bp, Zea mays
  Clone ID: LIB3061-091-Q1-K6-H10
cagaaacacacctagcgaacgcactagcaacgacctaacaacaatggctaccaagatattatccctctttgcgcttcttgccctttttgtgagcgcaacaaatgcgttcattattccacaatgctcacttgctcctagtgccattattccacagttcctccctccagttacttcaatgggcttcgaacacccagctgtgcaagcctacaggctacaacaagcgcttgcggcgagcgtcttacaacaaccaattgcccaattacaacaacaatccttggcacatctaaccatacaaaccatcgcaacgcaacagcaacaacaatttctaccagcactgagccaactagctgtggtgaaccctgtcgcctacttgcaacagcagttgcttgcatccaacccacttgctctggcaaacatagttgcataccaacaacaacaacaattgcaacagtttctaccagcgctcagtcaactagccatggtgaaccctgccgcctacctacaacagcaacaactgatttcatctagccctctcgctgtggttaatgcacctacatacctgcaacaacagttgctgcaacagattgtaccagctctgactcagctagctgtggcaaa

SEQ ID NO: 11955 - DNA, 638 bp, Zea mays
  unsure (1)..(638): unsure at all n locations; Clone ID: LIB3061-091-Q1-K6-H3
cggtaaccaggagctcaagagcgacctcaagnacctttacatcaacggtgctatccagctggatgttgccgggagcaggaaggctgttgtgatccacgtcccataccgcttgcgtaaggccttcaggaagatccatgtcaggatcgtcagggagctggagaagaaattcagcggcaaggatgtggtaattgttgccacaaggaggatcgtgaggccgcccaagaagggttcagctgttcagcgccctcgcaccaggactctgactgctgtccatgatggcatcctggaggatgttgtcttcccagctgagattgtggggaagcgtgtcaggtaccgtctggatggtgccaagatcatcaagatcttcttggacccaaaggagaggaacaacacagaatacaagctggacacctacactacggtctaccgcaggctgtgtgggaaagatgtggtctttgagtaccctatggccgaaaatgcataaatatgacgcccggatatccccattttattttgttgaatctggatgtttctttggggtctcaactagactgctccgtatgtacttcaaaaaccatagttntgatgccaaagttgttgcctaggaatttggtactcgggaattggtagcggacctg

SEQ ID NO: 11956 - DNA, 512 bp, Zea mays
  Clone ID: LIB3061-091-Q1-K6-H5
gtccaaaatcatcctcgacgggagacgcagaggtcccgcggcttcggcttcgtcaccttctccacggaggaggcgatgcggaacgccatcgagggcatgaacggcaaggagctggacggccgcaacatcaccgtcaacgaggcccagtcccgcggcggccgtggagacggcggcggcggctacggtggtggccgtggaggcggcggctacggcggtggcgggcgccgtgatggcggcggcggctacggcggtggcggcggcggctacggtggcggcggtggctacggtggtggtggtggcggctacggcggtggcaaccgtggcggcggctacggcaactccgacgggaactggaggaactgagcggtggggcccgcgcggccaagttatcctgttcgctaccgtgatgtttaccctagtccagagggtttatcttcgttcgtctcgtttgttgttgcccatctgtgtttttgattgcaaggtcgctctgtgtcagttgttagtgctgtgtt

SEQ ID NO: 11957 - DNA, 640 bp, Zea mays
  Clone ID: LIB3061-091-Q1-K6-H6
attagctttatctactccagagcgcagaagaacccgatcgacaccatgagggtgttgctcgttgccctcgctctcctggctctcgctgcgagcgccacctccacgcatacaagcggcggctgcggctgccagccaccgccgccggttcatctaccgccgccggtgcatctgccacctccggttcacctgccacctccggtgcatctcccaccgccggtccacctgccgccgccggtccacctgccaccgccggtccatgtgccgccgccggttcatctgccgccgccaccatgccactaccctactcaaccgccccggcctcagcctcatccccagccacacccatgcccgtgccaacagccgcatccaagcccgtgccagctgcagggaacctgcggcgttggcagcaccccgatcctgggccagtgcgtcgagttcctgaggcatcagtgcagcccgacggcgacgccctactgctcgcctcagtgccagtcgttgcggcagcagtgttgccagcagctcaggcaggtggagccgcagcaccggtaccaggcgatcttcggcttggtcctccagtccatcctgcagcagcagccgcaaagcggccaggtcgcggggctgttggcggcgcagatagcgc

SEQ ID NO: 11958 - DNA, 639 bp, Zea mays
  unsure (1)..(639): unsure at all n locations; Clone ID: LIB3061-091-Q1-K6-H9
ngaccaagcgaacacattagcaacaacctaacaacaatggctaccaagatattatccctccttgcgcttcttgcgctttttgcgagcgcaacaaatgcgttcattattccacaatgctcacttgctccaagttccattattacacagttcctcccaccagttacttcaatgggcttcgaacacccagctgtgcaagcctataggctacaacaagcaattgcggcgagcgtcttacaacaaccaatttcccagttgcaacaacaatccttggcacatctaacaatacaaaccatcgcaacgcaacagcaacaacaattcctaccagcactgagccacctagccatggtgaaccctgccgcctacttgcaacagcagttgcttgcatcaaacccacttgctctggcaaacgtagttgcaaaccagccacaacaacagctgcaacagtttctgccagcgctcagtcaactagccatggtgaaccctgccgcctacctacaacagcaacaactgctttcatctagcccgctcgctgtggccaatgcacctacatacctgcaacaacaattgttgcaacagattgtaccagctctgactcagctagttgtggcaaaccctgctgcctacttgcaacagctgctt

SEQ ID NO: 11959 - DNA, 322 bp, Zea mays
  unsure (1)..(322): unsure at all n locations; Clone ID: LIB3061-094-Q1-K6-A1
ttttgattgaatctcctgattatttacaggagcaacaactactaccattcagccagctagctggtgtgagccctgctaccttnttgacacaaccacagttgttgccgttctaccagnacgttgtgcctaacgctggcaccctnttacaactgcaacaattgctgncattcaaccaagttggtttgacaaacccagcagtgttttaccaacaacctatgattggtggtgccatnttttagattatttatgagttatagttgaataataaagtgttttatgtgaaaaaaaaaaaaaaaaaaaaaaggggggttggtgtagagga

SEQ ID NO: 11960 - DNA, 641 bp, Zea mays
  Clone ID: LIB3061-094-Q1-K6-A10
atcgacaccatgagggtgttgctcgttgccctcgctctcctggctctcgctgcgagcgccacctccacgcatacaagcggcggctgcggctgccagccaccgccgccggttcatctaccgccgccggtgcatctgccacctccggttcacctgccacctccggtgcatctcccaccgccggtccacctgccgccgccggtccacctgccaccgccggtccatgtgccgccgccggttcatctgccgccgccaccatgccactaccctactcaaccgccccggcctcagcctcatccccagccacacccatgcccgtgccaacagccgcatccaagcccgtgccagctgcagggaacctgcggcgttggcagcaccccgatcctgggccagtgcgtcgagttcctgaggcatcagtgcagcccgacggcgacgccctactgctcgcctcagtgccagtcgttgcggcagcagtgttgccagcagctcaggcaggtggagccgcagcaccggtaccaggcgatcttcggcttggtcctccagtccatcctgcagcagcagccgcaaagcggccaggtcgcggggctgttggcggcgcagatagcgcagcaactgacggcgatgtgcggcctgcagcagccgac

SEQ ID NO: 11961 - DNA, 638 bp, Zea mays
  unsure (1)..(638): unsure at all n locations; Clone ID: LIB3061-094-Q1-K6-A11
cgtccctactggcggcagcctagggctttccctaagcttctccatcccanagatcaagatgcctccggngaaagaaggggtcacgatgcatactaaatccccagcgaccaagaaaaatataaagatacccaaccaagtgcaataaatcttttcaaggagatgtattgcggcaagaagaaatgatttagtaaaattgttcagaaagctattgatgatatggaagcaatggtggcagcatcagttgaagttagacaacttgtgatgtcttctacccaagttgtttctcatgtcttgcccagctcaagtaaattccttcacaatgttggccttcagcctgcctccaagacaagctctatttcagcaaaggtgcacgagcttcaatctcaattggagaccaagagacaagaaaaagatggacttaggcaagaaatggaatccttaaaggctacatcacaagaatttatgaccactattgctaatcaaacaattgagatcgagaatttaaagaagtcgctagcagaaaataatagccttcttcgtcagatactaagcaccaatcgaggcatgtctcctccttaagattgttgctatagtcgaccatgccaatgttacatccaacaacactggactactttttt

SEQ ID NO: 11962 - DNA, 574 bp, Zea mays
  unsure (1)..(574): unsure at all n locations; Clone ID: LIB3061-094-Q1-K6-A12
gtccaactagcaacatagnaaagccaatagtgtaccaacaatggcagccaaaatattttgcttccttatgctccttggtctttctgcaagtgttgctaccgcnaccattttcccacaatgctcacaagctcctatagcttcccttcttcccccatacctctcaccagcggtgtcttcaatgtgtgaaaccccaattgttcaaccctacaggatccaacaggcaatcgcaacaggcatcttaccattatcacccttgttcctccaacaaccgtcagccctattacagcagttacctttggtccatttggtggcacaaaacatcagggcacaacaactacaacaacttgtgctagcaaaccttgctgcatactctcagcaacatcagtttcttccattcaaccaactggctgcattgaactctgctgcttatttgcaacaacaattaccattcagccagctagttgctgcctacccccagaaatttcttccattcaaccaactagcagcattgaactctgctgcttatttacagcagcaacaactactaccattcagacagctatctgatgtgagc

SEQ ID NO: 11963 - DNA, 559 bp, Zea mays
  Clone ID: LIB3061-094-Q1-K6-A3
gcgcagaagaacccgatcgacaccatgagggtgttgctcgttgccctcgctctcctggctctcgctgcgagcgccacctccacgcatacaagcggcggctgcggctgccagccaccgccgccggttcatctaccgccgccggtgcatctgccacctccggttcacctgccacctccggtgcatctcccaccgccggtccacctgccgccgccggtccacctgccaccgccggtccatgtgccgccgccggttcatctgccgccgccaccatgccactaccctactcaaccgccccggcctcagcctcatccccagccacacccatgcccgtgccaacagccgcatccaagcccgtgccagctgcagggaacctgcggcgttggcagcaccccgatcctgggccagtgcgtcgagtttctgaggcatcagtgcagcccgacggcgacgccctactgctcgcctaagtgccagtcggtgcggcagcagtgttgccagcaactcatgcaggtggagccgtagcaccggtaccaggcgatcttcggcttggagctgcagtcca

SEQ ID NO: 11964 - DNA, 340 bp, Zea mays
  Clone ID: LIB3061-094-Q1-K6-A5
caagtagctctggcaaacctttctccctactctcagcaacaactactaccattcagccagctagctggtgtgagccctgctaccttcttgatacaaccacagttgttgccgttctaccagcacgctgcgcctaacgctggcaccctcttacaactgcaacaattgctgccattcaaccaacttgctttgacaaacccagcagcgttctaccaacaacccatcattggtggtgccctcttttagatttcttatgagttatagttcaataataaagttttttggctgatgtttgtggcttcctagaaataagaaggtacattacctaaaaaataaaaaaata

SEQ ID NO: 11965 - DNA, 587 bp, Zea mays
  unsure (1)..(587): unsure at all n locations; Clone ID: LIB3061-094-Q1-K6-A6
caactagcaacatagnaaagcacaatagtgtaccaacaatggcagctaaaatattttgcctccttatgctccttggtctttctgcaagtgctgctacggcgaccattttcccacaatgctcacaagctcctatagcttcccttcttcccccgtacctctcaccaacggtgtcttcggtatgtgaaaacccaattcttcaaccctacaggatccaacaggcaatcgcagctggcatcttacctttatcacccttgttcctccaacaatcatcagccctattacagcagttacctttggtgcatttattggcacaaaacatcagggcacaacaactacaacaacttgtgctagcaaaccttgctgcctactctcagcaacagcagtttcttccattcaaccaactagctgcattgaactctgcttcttatttgcaacaacaacaactaccattcaaccagctatctgctgcctacccccagcaatttcttccattcaaccaactgacagcattgaactctcctgcttatttacagcagcaacaactactaccattcagccagctagcttgtgtgagccctgctaccttc

SEQ ID NO: 11966 - DNA, 654 bp, Zea mays
  unsure (1)..(654): unsure at all n locations; Clone ID: LIB3061-094-Q1-K6-A9
attgagaacaactagcaacatagnaaagcacaatagtgtaccaacaatggcagccaaaatttttgcctccttatgctccttggtctttctgcaagtgctgctacggcgaccattttcccacaatgctcacaagctcctatagcttcccttcttcccccgtacctctcaccagcggtgtcttcggtatgtgaaaacccaattcttcaaccctataggatccaacaggcaatcgcagctggcatcttacctttatcacccttgttcctccaacaatcatcagccctattacagcagttacctttggtgcatttattggcacaaaacatcagggcacaacaactacaacaacttgtgctagcaaaccttgctgcctactctcagcaacaacagtttcttccattcaaccaactagctgcattgaactctgcttcttatttgcaacaacaacaactaccattcagccagctatctgctgcctacccccagcaatttcttccattcaaccaactgacagctttgaactctcctgcttatttacagcagcaacaactactaccattcagccagctagctggtgtgagccctgctaccttcttgacacaaccacaattgttgccgttctaccagcacgctgcgcctaacgctggcaccctc

SEQ ID NO: 11967 - DNA, 672 bp, Zea mays
  unsure (1)..(672): unsure at all n locations; Clone ID: LIB3061-094-Q1-K6-B1
gnaaagcacatagtgtaccaacaatggcagccaaaatattttgcttccttatgctccttggtctttctgcaagtgctgctaccgcaaccattttcccacaatgctcacaagctcctatagcttcctttcttcccccatacctctcaccagcggtgtcttcagtatgtgaaaacccaattcttcaaccctacaggatccaacaggcaatcgcagcaggcatcttacctttatcacccttgttcctccaacaaccgtcagccctattacagcagttacctttggtgcatttgttggcacaaaacatcaaggcacaacaactacaacaacttgtgctaggaaaccttgctgcctactctcagcaacagcagtttcttccattcaaccaactggctgcattgaactctgctgcttatttgcaacaacaactaccattcagtcagctagctgctgcctacccccagcaatttcttccattcaaccaactggcagcattgaactctgctgcttatttacaacagcaacagctaccaccattcagccagctagctgatgtgagccctgttgccttcttgacacaacaacagttgttgccgttcttacctgcacgctgcgcctaacgcttgcaccctcttacaactgcaacaattgctgccattcaaccaacttgctttg

SEQ ID NO: 11968 - DNA, 476 bp, Zea mays
  Clone ID: LIB3061-094-Q1-K6-B10
ggcagcaccccgatcctgggccagtgcgtcgagtttctgaggcatcagtgcagcccgacggcgacgccctactgctcgcctcagtgccagtcgttgcggcagcagtgttgccagcagctcaggcaggtggagccgcagcaccggtaccaggcgatcttcggcttggtcctccagtccatcctgcagcagcagccgcaaagcggccaggtcgcggggctgttggcggcgcagatagcgcagcaactgacggcgatgtgcggcctgcagcagccgactccatgcccctacgctgctgccggcggtgtcccccactgaagaaactatgtgctgtagtatagccgctggctagctagctagttgagtcatttagcggcgatgattgagtaataatgtgtcacgcatcaccatgggtggcagtgtcagtgtgagcaatgacctgaatgaacaattgaaatgaaaagaaaaaagtattgttc

SEQ ID NO: 11969 - DNA, 660 bp, Zea mays
  unsure (1)..(660): unsure at all n locations; Clone ID: LIB3061-094-Q1-K6-B11
tcagnattttgatcctaatgcatgtggttgggcttatggaatgaacatgtttgatctggaagaatggaagaagaaagaattactggaatttaccacaaatggcagaacatgaacgagaacaggctgctctggaaactggggacattgccaccagggcttctaactttttacaagctgacacaccctctggacaaatcatggcatgtgcttggcttagggtacaatccaaccattgagcgctcagagatagacaatgctgctgtcatccactacaatggtaacatgaagccctggctggaaattgcaatgataaagtatcggccttactggacaaagtacatcaattatcagcattcctacattcatggatgcaagatcagccaatagaaaccaccctcagatattcttatgtgatgaacattgaagttggatgggactcaaaatgaaatcagtataactatcacatgttctttattcgtgttatattagatttgttagttatcatgtgtatgtagtttcgtcgcccttttgtggtgctttctcccctagctcattgttggttcttgtctctttttgtcatgaaaagacgatgagctctatgattctcatcagctgataaatgtaatgtctgaatttctgtcggtgacaaattaatgatcc

SEQ ID NO: 11970 - DNA, 482 bp, Zea mays
  unsure (1)..(482): unsure at all n locations; Clone ID: LIB3061-094-Q1-K6-B2
attgagaccaactagcaacatagnaaagcacaatagtgtaccaacaatggcagccaaaatattttgcctccttatgctccttggtctttctgcaagtgctgctacggcgaccattttcccgcaatgctcgcaagctcctatagcttcccttcttcccccgtacctctcaccagcggtgtcttcggtatgtgaaaacccaattcttcaaccctacaggatccaacaggcaatcgcagctggcatgttacctttatcacccttgttcctccaacaatcatcagccctattacaacaggtacctttggtgcatttattggcacaaaacatgagggcacaacaactacaacaacttgtgctaacaaaccttgctgactactctcagcaacagcagtttcttccattcaaccaactgaagtcattgcactctgctaatttattacaacaacaacaactaccataacagcagctacctgctgtctacc

SEQ ID NO: 11971 - DNA, 603 bp, Zea mays
  Clone ID: LIB3061-094-Q1-K6-B3
ttccggagtgcatgtaacctgtggagaagtgcttgcgcgacgccaagatggacaagagcagcgtgcacgacgtcgtgctcgtcggtggctccacccgcatccccaaggtgcagcagctgctgcaggacttcttcaacggaaaggaattgtgcaagagcatcaaccccgacgaggctgtggcgtacggcgccgctgtccaggctgccatcctcagcggcgagggcaacgaaaaggtacaagatctgctcctgctcgacgtcacgccactgtctctcggcctggagactgcaggtggcgtcatgacggtgctgatcccgaggaacaccaccatcccgaccaagaaggagcaggtcttctccacgtactccgacaaccagccgggcgtcctgatccaggtgtacgagggtgagcgcgcgaggaccaaggacaacaacctactcggcaagttcgaactctccggcatccctcctgctccccgcggcgtgccccagatcacggataccttcgacatcgatgccaacagcattctcaacgtctctgccgaggacaagaccaccggccagaaagacaagatcacgatcaccaacgacaagggcccggctt

SEQ ID NO: 11972 - DNA, 639 bp, Zea mays
  Clone ID: LIB3061-094-Q1-K6-B4
gttttatccatttgcatgactttgcaaatgcttttagcattttcgaggacatgataaaatcaggtttgcagcctgatcgtgccatatacaatttgctggtagaagcattttgtaagatgggaaatatggatcgagctattcgcatattcgaaagaatgcagaaggaacgaatgcaaccatcaaatagaacattcagacctatcatagaaggatttgcagttgctggagatatgaaaagggctttcgatacccttgacctaatgcggcgaagcggttgtgctcctactgtaatgacttacaatgctctcattcatgggctagttagaaagcaccaggttgaaaaggccgtttctgtacttgacaagatgtctattgctggcattgcaccaaatgagcatacatacacgatcattatgagaggttatgctgctagtggagatattgggaaggcttttgagtatttcaccaaaatcaaagagagtggcctaaagcttgatgtgtacatttacgaaacattgttgagagcatgttgcaaatcaagaagaatgcaaagtgccttagcagttacacgagagatgagctttcagaagatacccgagaaaacatttatatataatattttgattgatggttgggctc

SEQ ID NO: 11973 - DNA, 651 bp, Zea mays
  Clone ID: LIB3061-094-Q1-K6-B7
cacaatagtgtaccaacaatggcagccaaaatttttgcctccttatgctccttggtatttctgcaagtgctgctacggcgaccattttcccgcaatgctcacaagctcctatagcttcccttcttcccccgtacctctcaccagcggtgtcttcggtatgtgaaaacccaattcttcaaccctacaggatccaacaggcaatcgcagctggcatcttacctttatcacccttgttcctccaacaatcatcagccctattacagcagttacctttggtgcatttattggcacaaaacatcagggcacaacaactacaacaacttgtgctagcaaaccttgctgcctactctcagcaacagcagtttcttccattcaaccaactagctgcattgaactctgcttcttatttgcaacaacaacaactaccattcagccagctacctgttgcctacccccaacaatttcttccattcaaccaactggcagcattgaactctcctgcttatttacagcagcaacaactactaccattcagccagctagctggtgtgagccctgctaccttcttgacacaaccacagttgttgccgttctaccagcacgctgcgcctaacgctggcaccctcttacaactgcaacaattgctgccat

SEQ ID NO: 11974 - DNA, 618 bp, Zea mays
  unsure (1)..(618): unsure at all n locations; Clone ID: LIB3061-094-Q1-K6-B8
ctctggtatcccacaccttgtcatccttgatgcaaaactggtgaagtttacaactgaagatggtgttgaattcgtgagtgagtatggcgtggaggcttaccctttcacaccanacggtcatgaactgaagaacaggaaaggcagaaaaggagaatcaaactattcaaagcgtgcttggcacatctactcgagactatctcatttcaaacaagggagacaaggtacccatctctgagcttgaggggaagtatgttggtctttgctttgtggtggatggctttccaccactcgctgaattcactgaggtgcttgctaagatctatgagaaactcaaagaagtgggagagaaatttgaagttgtagctgtatccttggacagtgaagagtcatcatttaatgagagttttgcaaagatgccttggcttgcaattcctcaaggtgacattaagtgtcagacgctggttcgttactttgagcttagttctcttccaacactagttctgattggccctgatgggaagacactgaacaacaatgtcgccgacataattgacgaccatggttttgaggcatgggagggcttccccttcagtgctgagaagctggaaattcttgctg

SEQ ID NO: 11975 - DNA, 447 bp, Zea mays
  Clone ID: LIB3061-094-Q1-K6-B9
ggcggcgatggtgtcggactcggagctggtggagcggctgcaggaggtgctgcggtcgtcggacctcaacaccacgaccaccgctgccctgcgccgccgcctcgaggaggactttggcgccgacctctcccacaaaaaggccctcattcgggagcaggtcgacctcttcctcgccgaggtcgccgccaaggccgagccgcaggagcccaaggaggaggagcccgaggaggcgccggtgcctaaggaggaggagccagaggagctcgagggggtggaggaggagggcgagggggaggacgaagaagaagaagaggaggaggaggaggaggaatgcgaggatgagaatagcagttgcgcccggaagaagcagcggggttatgatggcaaaaagaggggtggtgggttgacaaaattgtgcaggtctataccggcgctacaagagtttgt

SEQ ID NO: 11976 - DNA, 516 bp, Zea mays
  Clone ID: LIB3061-094-Q1-K6-C1
gcctgatcttgagaagaacttgaggacctgtctgaagcaaacccaagcgctgacatggatgagatggtgaaggcaattgtgtccagggtaactgaagtgatgccaaaagctgcatcttttacttcttcccaaatagcaacctcaagcaatggattcgactcctcggttatgtctacgacagcgacaactggaagctctggaagcactgtgaactgaccttggggttgtaggcagaggcgtcaaacgagctagcatcaagccgatctctgccaaacctgttgctaagaaacctgcacttgattcaccatctctccaaggtgacaacagcatcaactctgaggttgttcctgcgacgcagactgatgaatccagctaaagctctacatttgaaacgaacgctttttgacgggggcacggcgataacacgccttgtattctagtatgcttagatagattcaatgtttagcgcaaacgactgatgataagtttagcagttggtcttttaatttggattta

SEQ ID NO: 11977 - DNA, 611 bp, Zea mays
  Clone ID: LIB3061-094-Q1-K6-C10
gtggaatcagtagcaaaaatgagcaacaatggcggccaagatattttccatccttatgctccttgctctttctgcatgtgttgctaacgcgaccatttttcctcaatactcacaagctcctatagctgcccttcttcccccataccttccatcaatgaccgctttagtatgtgaaaacccagcccttcaaccctacaggatccagcaagcaatcgcaacaagcaacttacctttatcacacctgttctttcaacaatcgccagccctatctttggtgcagtcattggtacaaaccatcagggcagaacagttgcagcaactcgtgctaccagtgatcagccaagtagctctggcaaacctttccccctactctcagcaacaacaatttcttccattcaaccaactgtctatactgaaccctgctgcttatttgcagcaacaacaactactaccattcagccagctagctactgcctactctcagcagcaacaatttcttccatttaaccaattggccgcactgaacccctctgcttatttccagcagcaaatactactaccatttggccagctagctacaacaagccccgcttccttcttgacacaacaac

SEQ ID NO: 11978 - DNA, 487 bp, Zea mays
  Clone ID: LIB3061-094-Q1-K6-C11
ggcaaacctttctccctactctcagcaacaacaatttcttccattcaaccaactgtctacactgaaccctgctgcttatttgcagcaacaactattaccattcagccagctagctactgcctactctcagcaacaacaacttcttccatttaaccaattggccgcactgaaccccgctgcttatttgcagcagcaaatactactaccatttagccagctagctgcagcaaaccgtgcttccttcttgacacagcaacagttgctgcctttctaccagcagtttgcggctaaccccgcaaccctcttacaactacaacaattgttgccctttgtccaacttgctttgacagaccgagcggcctcctaccaacaacacatcattggtggtgccctcttttagattgcttattagttgtaattcaataataaagttttttggatgatgtatgtggccaaccagaaataagaagttacatttccagatttt

SEQ ID NO: 11979 - DNA, 333 bp, Zea mays
  Clone ID: LIB3061-094-Q1-K6-C3
tttcaaccaactggcagcattgaactctcctgcttatttacagcagcaacaactactaccattcagccagctagctggtgtgagccctgctaccttcttgatacaaccacagttgttgccgttctaccagcacgctgcgcctaacgctggcaccctcttacaactgcaacaattgctgccattcaaccaacttgctttgacaaacccagcagcgttctaccaacaacccatcattggtggtgccctcttttagatttcttatgagttatagttcaataataaagttttttgtctgatgtttgtggcttcccagaaataagaaagtacatttct

SEQ ID NO: 11980 - DNA, 661 bp, Zea mays
  Clone ID: LIB3061-094-Q1-K6-C4
gcacgaatattgtaccaataatggcagccaaaatttttgcctcattatgctccttggtctttctgcaagtgctgctacggcgagcattttcccgcaatgctcacaagctcctatagcttcccttcttcccccatacctctcaccagcgatgtcttcagtatgtgaaaatccaattcttctaccctacaggatccaacaggcaatcgcagcaggcatcttacctttatcacccttgttcctccaacaatcatcagccctattacagcagttacctttggtgcatttattggcacaaaacatcagggcacaacaactacaacaactcgtgctagcaaaccttgctgcctactctcagcaacagcagttacctttggtgcatttgttggcacaaaacatcagggcacaacaactacaacaactcgtgctagcaaaccttgctgcctactctcagcaacaacagtttctgccattcaaccaactagctgcattgaactctgctgcttatttgcagcaacaacaactactaccattcagccagctagctgctgcctacccccggcaatttcttccattcaaccaactggcagcattgaactctcatgcttatgtacaacaacaaacactactaccattcagccagctagctgctgtgagccctgct

SEQ ID NO: 11981 - DNA, 663 bp, Zea mays
  unsure (1)..(663): unsure at all n locations; Clone ID: LIB3061-094-Q1-K6-C5
ccggngcaacttagcaacatagnaaagcacaatagtgtaccaacaatggcagccaaaaattttgcctccttatgctccttggtctttctgcaagtgctgctacggcgaccattttcccgcaatgctcgcaagctcctatagcttcccttcttcccccgtacctctcaccagcggtgtcttcggtatgtgaaaacccaattcttcaaccctacaggatccaacaggcaatcgcagctggcatcttacctttatcacccttgttcctccaacaatcatcagccctattacaacagttacctttggtgcatttattggcacaaaacatcagggcacaacaactacaacaacttgtgctagcaaaccttgctgcctactctcagcaacagcagtttcttccattcaaccaactaggttcattgaactctgcttcttatttgcaacaacaacaactaccattcagccagctacctgctgcctacccccagcaatttcttccattcaaccaactagcagcattgaactctcctgcttatttacagcagcaacaactactaccattcagccagctagctggtgtgagccctgctaccttcttgacacaaccacagttgttgccgttctaccagcacgttgcgcctaacgctngcaccctcttacaactgc

SEQ ID NO: 11982 - DNA, 635 bp, Zea mays
  unsure (1)..(635): unsure at all n locations; Clone ID: LIB3061-094-Q1-K6-C6
gcaacaacaatccttggcacatctaaccatacaaaccatcgcaacacaacagcaacaacagttcctaccagcactgagccaactagatgtggtgaaccctgtcgcctacttgcaacagcaggtgcttgcatccaacccacttgctctggcaaacgtagctgcataccaacaacaacaacaattgcaacagtttctgccagcgctcagtcaactagccatggtgaaccctgccgcctacctacaacagcaacaactgctttcatctagccctctcgttgtgggtaatgcacctacatacctgcaacaacaattgctgcaacagattgtaccagctctgactcagctagctgtggcaaaccctgctgcctacttgcaacagctgcttccattcaaccaactgactgtgtcgaactctgctgcgtacctacaacagcgacaacagttacttaatccactagcagtgcctaacccattggtcactgccttcctacagcagcaacaattgctaccatacagccagttctctttgatgaaccctgccttgtcgtggcagcaacccatcgttggaggtgccatcttttagatacatatgagatgtaatcgataatggtgccctcanccggcatgtgtttcct

SEQ ID NO: 11983 - DNA, 628 bp, Zea mays
  Clone ID: LIB3061-094-Q1-K6-C7
gcgtaacgcactagcaacgacctaacaccaatggctaccaagatttagccctccttgcgcttcttgcccttttagtgagcgcaacaaatgcgttcattattccacagtgctcacttgctcctagtgccattattccacagttcctcccaccagttacttcaatgggcttcgaacatccagccgtgcaagcctacaggctacaactagcgcttgcggcgagcgccttacaacaaccaattgcccaattgcaacaacaatccttggcacatctaaccctacaaaccattgcaacgcaacaacaacaacaacaacagtttctgccatcactgagccacctagccgtggtgaaccctgtcacctacttgcaacagcagctgcttgcatccaacccacttgctctggcgaacgtagctgcataccagcaacaacaacagctgcaacagtttatgccagtgctcagtcaactagccatggtgaaccctgccgtctacctacaactactttcatctagcccgctcgcggtgggcaatgcacctacgtacctacaacaacagttgctgcaacaaattgtaccagctctgactcagctagctgtggcaaaccctgctgcctacttacaacagttgct

SEQ ID NO: 11984 - DNA, 631 bp, Zea mays
  Clone ID: LIB3061-094-Q1-K6-C8
gtcatgtgtggtccatcttgcaggcactggtgatcacacatttgagcgcaggcttcggctgggtgggcctcttcttaagaacaatattgcaactatggttcttgagagcccctattatggacagcgacgtcctagcatgcagcgtggtgcaaagctccagtgtgttagtgatctgttacttctagggaaagccacaattgatgaagctcgcagtctcctgtactggctgcagaatgaggctggttacggcaagatgggcatatgtgggctcagcatgggtggagtacatgctgcgatggtgggatccctgcatcctactccagttgccacactgccatttctcgctccacactctgctgtggtacctttctgtgaaggggtctacaaatacgccacagcttgggacgctttgagaaaagatgctgcagtattaactcaagatgtaacacttttggcagaagatgctgcacagaaaagcgggatcaccatcgaacaagtcagggataggttacggtcagtgttgtctttgactgatgtcactcgatttccagtcccaaagaacccacaggcggtcatctttgttggtgcaacggacgatggttatattcccagacattcagtgatggagctc

SEQ ID NO: 11985 - DNA, 444 bp, Zea mays
  Clone ID: LIB3061-094-Q1-K6-D1
gtggcacaaaacacagggcacaacaactacaacaacttgtgctagcaaaccttgctgcatactctcagcaacatcagtttcttccattcaaccaactggctgcattgaactctgctgcttatttgcaacaacaattaccattcagccagctagttgctgcctacccccagcaatttcttccattcaaccaactagcagcattgaactctgctgcttatttacagcagcaacaactactaccattcagccagctagctgatgtgagccctgctgccttcttgacacaacaacagatgttgccgtgctacctgcacgctatgcctaacgctggcaccctcttacaactgcaacaattgctgccattcaaccaacttgctttgacaaacccaacagtgttctaccaacaacccatcattggtggtgccctctttttaaattgcttta

SEQ ID NO: 11986 - DNA, 121 bp, Zea mays
  Clone ID: LIB3061-094-Q1-K6-D10
tcccggtcgcccacgcgtcgtttcatttaaccattggagagttgtgtgtggagggcagtagctagctggctaatggtatagttgttgctgaatagcgtgggttatgtgacgtggtggtggg

SEQ ID NO: 11987 - DNA, 665 bp, Zea mays
  Clone ID: LIB3061-094-Q1-K6-D11
cgcgtgaggcgcgcgccgaggccgacgcgcggcgcgccgtggaggagctggctcgggcgcgggacgagcacctcgagaaggcggaggtgaacgcccgctcggccgcggacgagatcgcgcgctcccgcgccgaccgcggtgccgccggtggcggcggcatcctggagagcgtgcaggagggcgccaggtccttggccagcgccgtgggccgcaccttcggtggcgccaaggacgcgaccgtggacaagacctcgcagacggcgcacaccgcgggcgacaagctcggcgagtacagggactacaccgccgacaaggcccgggaggccaacgacagcgtctcgcgtaagacgggcgagacggcggaggccacccggaacaagctgggcgagtacaaggacagcgccgtggagaaggcgagggagaccaaggacgcggtggcgcagaagacgagcgagaccgcggaggcgaccaagaacaagctcggggagtacaaggacgcggcggccggcaaggcgcgggaggccgcggacaccaccgccggcaaggcgagggaggccaaggacgcgaccatgcagaatgcctcagagacgagggacgccaccgccgacaaggcgagggaggcgagagacgtgaccaggcagaatgcgggcgagtacaccgacgcc

SEQ ID NO: 11988 - DNA, 651 bp, Zea mays
  unsure (1)..(651): unsure at all n locations; Clone ID: LIB3061-094-Q1-K6-D12
gagaccaactagcaacatagnaaagcacaatagtgtaccaacaatggcagccaaaatttttgcctccttatgctccttggtctttctgcaagtgctgctacggcgaccattttcccacaatgctcacaagctcctatagcttcccttcttcccccgtacctctcaccagcggtgtcttcggtatgtgaaaacccaattcttcaaccctataggatccaacaggcaatcgcagctggcatcttacctttatcacccttgttcctccaacaatcatcagccctattacagcagttacctttggtgcatttattggcacaaaacatcagggcacaacaactacaacaacttgtgctagcaaaccttgctgcctactctcagcaacaacagtttcttccattcaaccaactagctgcattgaactctgcttcttatttgcaacaacaacaactaccattcagccagctatctgctgcctacccccagcaatttcttccattcaaccaactgacagctttgaactctcctgcttatttacagcagcaacaactactaccattcagccagctagctggtgtgagccctgctaccttcttgacacaaccacaattgttgccgttctaccagcacgctgcgcctaacgctggcaccctc

SEQ ID NO: 11989 - DNA, 336 bp, Zea mays
  Clone ID: LIB3061-094-Q1-K6-D2
attgagaccaacaagcaacataggaagtggaatacagtagcaacaatagagcaacaatggcggccaagatattttccatccttatgctccttgctctttctgcatgtgttgctaacgcgaccatttatcctcaatactcacaagctcctatagctgcccttcttgccccatacctaccatcaatgaccgcttcaggttgtgaaaacccagcccttcaaccctacaggctccaacaagcaatcgcaacaagcaactgaccttaatgacccctgtgctttgaacaatcgtcagacctatgtatggtgcatacattggttcaaaccataagggaacaac

SEQ ID NO: 11990 - DNA, 634 bp, Zea mays
  unsure (1)..(634): unsure at all n locations; Clone ID: LIB3061-094-Q1-K6-D3
ctctcctctctctcccacggacccgatctcgtacctcacttccgtcccgcccagcttcgcttcacggcgcgccgaccggcttggacgcgccgaccggctcgtgatcagctcggtcggatccgacggtcgctcgctgctgcagcgggcgcttgctgtgcgtcgcgtgggctcggccggagcccggagggaggcggagccttccccgggtctcgaagatggcggcgccgccggcgagggcccgggccgactacgactacctcatcaagctgctcctcatcggcgatagcggtgttgggaaaagttgtctccttttgcggttctcagatggctctttcaccactagctttatcaccaccattgggattgacttcaaaataagaacagttgagcttgatggtaagcgcgtaaagttacagatatgggatactgctggtcaagagcggtttcgaactattacaaccgcctactacaggggtgcaatgggaattttgcttgtctatgatgttactgatgagtcatctttcaataatataagaaactggattaggaacatagagcaacatgcttccgacaatgtgaataaaattttggtaggcaacaaagctgacatgnatgaaagcaaacgggctgtgcc

SEQ ID NO: 11991 - DNA, 150 bp, Zea mays
  Clone ID: LIB3061-094-Q1-K6-D5
aaacatgtcgccttcttacaacaacaacaattgctgccatttaaccaacttgctttgacgaatcctaccaccttattgcagcagcccaccattggtggtgccatcttctagatttttttatgctttatactgtaataataaagttctcat

SEQ ID NO: 11992 - DNA, 632 bp, Zea mays
  Clone ID: LIB3061-094-Q1-K6-D6
gtgagtttgcctctatcccgcccacctcaccgtcgttgtctccgccaccaccaccgctcccaccactgccatgcattaacctcaacccttccgcaaactattcactgtcactttgtcatcggcgctccatcgttcactcaaatgtggtctccgatacctggcaccctcatgaggactagttcactccctgctgtcattgaggcttctggcaatgatgactggaagaaacgaaaggaagcacagagcctgaagaggctcgaggttaagaagaagaggattgagaggaggaactctctcacctgcaacacttcaaaagaagctgctgggcagagtccagaagagatgaatgcaaacactgacaaattagtaagttctgatgaaactattgccagcgctaacgaaagtcatagcagtggcaagcatctggtgaaggggcttccaccaaagtaccaggctacaattacatcacaagacagttcgtcagcaatgcgaaagaagccaaactcggccttcaaaggaacagccatcactgaggagcagaactatcatcgtctgttccttcctccggtgaagctataagtagcgtgacggcaccaagtctgcctctgttgtctttggtccccatacagcac

SEQ ID NO: 11993 - DNA, 419 bp, Zea mays
  Clone ID: LIB3061-094-Q1-K6-D7
ctggctgcattgaactctgctgcttatttgcaacaacaattaccattcagccagctagttgctgcctacccccagcaatttcttccattcaaccaactagcagcattgaactctgctgcttatttacagcagcaacaactactaccattcagccagctagctgatgtgagccctgctgccttcttgacacaacaacagttgttgccgttctacctgcacgctatgcctaacgctggcaccctcttacaactgcaacaattgctgccattcaaccaacttgctttgacaaacccaacagtgttctaccaacaacccatcattggtggtgccctcttttagattgcttatgagttatagttcaataatgaagttttttggatgatgtttgtggcgtcccagaaataagaaagtacatttct

SEQ ID NO: 11994 - DNA, 665 bp, Zea mays
  unsure (1)..(665): unsure at all n locations; Clone ID: LIB3061-094-Q1-K6-D8
tagcaacatagnaaagcacaatagtgtaccaacaatggcagccaaaatttttgcctccttatgctccttggtctttctgcaagtgctgctacggcgaccattttcccgcaatgctcgcaagctcctatagcttcccttcttcccccgtacctctcaccagcggtgtcttcggtatgtgaaaacccaattcttcaaccctacaggatccaacaggcaatcacagctggcatcttacctttatcacccttgttcctccaacaatcatcagccctattacatcagttacctttggtgcatttattggcacaaaacatcagggcacaacaactacaacaacttgtgctagcaaaccttgctgcctactctcagcaacagcagtttcttccattcaaccaactagctgcattgaactctgcttcttatttgcaacaacaacaactaccattcagccagctacctgctgcctacccccagcaatttcttccattcaaccaactggcagcattgaactctcctgcttatttacagcagcaacaactactaccattcagccagctagctggtgtgagccctgctaccttcttgatacaaccacagttgttgccgttctaccagcacgctgcgcctaaacgctgcaccctcttacactgcaacaattgctgcca

SEQ ID NO: 11995 - DNA, 464 bp, Zea mays
  unsure (1)..(464): unsure at all n locations; Clone ID: LIB3061-094-Q1-K6-E1
taccggtaccggcacttcccgggnngtctacactgaaccctgctgcttatttgcagcaacaactattaccattcagccagctagctactgcctactctcagcaacaacaacttcttccatttaaccaattggccgcactgaaccccgctgcttatttgcagcagcaaatactactaccatttagccagctagctgcagcaaaccgtgcttccttcttgacacagcaacagttgctgcctttctaccagcagtttgcggctaaccccgcaaccctcttacaactacaacaattgttgccctttgtccaacttgctttgacagaccgagcggcctcctaccaacaacacatcattggtggtgccctcttttagattgcttattagttgtaattcaataataaagttttttggatgatgtatgtggccaaccagaaataagaagttacatttccagattttaatgtg

SEQ ID NO: 11996 - DNA, 662 bp, Zea mays
  unsure (1)..(662): unsure at all n locations; Clone ID: LIB3061-094-Q1-K6-E12
attgagaacaactagcaacatagnaaagcacaatagtgtaccaacaatggcagccaaaatttttgcttccttatgctccttggtctttctgcaagtgttgctaccgcaaccattttcccacaatgctcacaagctcctatagcttcccttcttcccccatacctctcaccagcggtgtcttcaatgtgtgaaaccccaattgttcaaccctacaggatccaacaggcaatcgcaacaggcatcttaccattatcacccttgttcctccaacaaccgtcagccctattacagcagttacctttggtccatttggtggcacaaaacatcagggcacaacaactacaacaacttgtgctagcaaaccttgctgcatactctcagcaacatcagtttcttccattcaaccaactggctgcattgaactctgctgcttatttgcaacaacaattaccattcagccagctagttgctgcctacccccagcaatttcttccattcaaccaactagcagcattgaactctgctgcttatttacagcagcaacaactactaccattcagccagctagctgatgtgagccctgctgccttcttgacacaacaacagctgttgccgttctacctgcacgctatgcctaacgctggcaccctcttacaactgcc

SEQ ID NO: 11997 - DNA, 261 bp, Zea mays
  unsure (1)..(261): unsure at all n locations; Clone ID: LIB3061-094-Q1-K6-E4
acaactgacggcnatgtgcggcctgcancanccnactccatgcccctacnctgctgccggcggtntcccccactgaaaaactatgtnctgtantatanccgctttctagctanctagttnantcattnancnncnatnattgantaataatgtntcacccatcaccatnnntgncannntcannnngagcaataacctnaatnaacaattnaaatnaaaaaaaaaaagtttnntccaaaaaaaaaaaaaaatagtttcgtt

SEQ ID NO: 11998 - DNA, 649 bp, Zea mays
  Clone ID: LIB3061-094-Q1-K6-E6
atcttacggtcgttagcattgaccgtccaacaaccatatgccctattgcaacaaccatccttaatgaatctatatctccaaagaatcgcagcacaacaactacaacaacagttgcttccaacaatcaatcaagtagttgcagcgaaccttgctgcttacctccagcaacaacaatttcttccattcaatcaactagctggggtgaaccctgctgcttacttgcaggcacaacagctactaccattcaaccaacttgtcaggagccctgctgccttcttactgcagcaacagttgcttccattccatctacaagttgtggcaaacattgctgctttcttgcaacaacaacaacaattgctgccattttacccacaggttgtgggaaacattaacgccttcttgcaacagcaacagttgctaccattctacccacaggatgtggcaaacaatgtcgccttcttacaacaacaacaattgctgccatttaaccaacttgctttgacgaatcctaccaccttattgcagcagcccaccattggtggtgccatcttctagatttttttatgctttatactgtaataataaagttctcatactgatatgtgcaacttctcagtaataaaagattagagatctatattttaagttc

SEQ ID NO: 11999 - DNA, 644 bp, Zea mays
  unsure (1)..(644): unsure at all n locations; Clone ID: LIB3061-094-Q1-K6-E7
gttaacttcctctgatcctattgttcaggttgaagctgctaagcgctggacgatgtgggagatgatgactgcgcaacttatccaaaacaatgataacattaaacgaggagaagatgatgaattttcactggcatttgcaaggattgaaaaccactactttgtgaataagggatttttaccctcggactcattcctattggacaatgttgataagatccgacatattaaaggttttattgtacagggacgttatgatgtttgttgccctatgatgtctgcttgggatcttcataaggcttggcctgaagcagaattcaaggtggtagcagatgcagggcactcggccaatgaagttggcatcgctgccgaactgaggtcagccaccgataaactgagagacttgctgcgcaaatgagccggcgaaaggcaacctgcacctctatctgatcatggaactcagaggcccataataattacatagctgtgtaacggttagcactgtgccgttaaacaatgtcattgtcaccatcgatatgttgtttgtttgctcgctggagtgtatgaggaattgaagtttcaagacgggaccagaatgggtggggcgtngttggtttgcgtttttagacctggtctgtctagccagc

SEQ ID NO: 12000 - DNA, 630 bp, Zea mays
  unsure (1)..(630): unsure at all n locations; Clone ID: LIB3061-094-Q1-K6-E8
gggtgaccagaggtggcttcaattcaacagcagcttgcatctttgaaacttaaagatgcgccggtcattggtgcttttaatcctgtgaagggagagatagtcctcgcacaatttagcgttgacaactcctggaacagagctatgattgttaatggacctcgttctgttgaatctccggacgacaagtttgaagtattctatattgactatggcaaccaagaggtggttacctacagtcgtttacgacctgtagacccatctgtttcctcgtctcctgctcttgctcagctatgcagccttgctttcataaaagtgcccagtcttgaggatgactttggtcaggaagcagcagagtatctaagtgaatgtttgctcagtagctcaaagcaataccgggcaatgatcgaagaacatgatacttctggggggaaatcaaaaggacaaggaaccggaaatgttctcattgttactcttgttgatgcggagacagaaagtagcataaacgctaccatgcttgaggaagggcttgcccggctcgaaagaacaagantgggacactagggagaggaagaggctctccaaacctggaacgttccagacaagcaaagaagaaagctgcggtttggcata

SEQ ID NO: 12001 - DNA, 477 bp, Zea mays
  unsure (1)..(477): unsure at all n locations; Clone ID: LIB3061-094-Q1-K6-E9
ttttttcagttggttgttatggaanaaactgtctacacgtgaaccctgctgcttatttgcagcaacaactattaccatttagccagctagctactgcctactctcagcaacaacaacttcttccatttaaccaattggccgcactgaaccccgctgcttatttgcagcagcaaatactactgccatttagcgagctagctgcagcaagtcgtgcttccttcttgacacagcaacagttgctgcctttctacaagcagtttgcggctaaccccgcaaccctcttacaactacaacaattgttgccctttgtccaacttgctttgacaaacccagcagcctcctaccaacaacacatcattggtggtgccctcttttagattgattattagttgtaattcaataataaagttttttggatgatgtatgtggccaaccagaaataagaagttacatttccagcttcnnncnnnnnnnnnt

SEQ ID NO: 12002 - DNA, 358 bp, Zea mays
  Clone ID: LIB3061-094-Q1-K6-F1
tctcgctgtaccggccgatctccccattctcccctcttcgccggtcccaccaccgcgccgatcctgatggcctccgccgcctcatcggccgtcggcgctggcaaatcgctgttccaggggctccgcaggttcctcaagaagccgtgggagatcacaggcccctgcgcctatcccgagtaccgcagcacgctgactggcacgctcgagtaccgagtgaagtgcccggccaccgagcgcgacgaccgagacaaggccatacagcccacatgcgatccggggacagtgtgcgatatgaagtgcttcacccgtgcaccgtcgacttagccgtccgaccgagccgtgcaccctactgcgaaag

SEQ ID NO: 12003 - DNA, 64 bp, Zea mays
  Clone ID: LIB3061-094-Q1-K6-F10
cgtaatgtttctgcacaagttccatgtcgaggacgatgctgatatcactaaatcatgtgctcct

SEQ ID NO: 12004 - DNA, 427 bp, Zea mays
  unsure (1)..(427): unsure at all n locations; Clone ID: LIB3061-094-Q1-K6-F11
cacanatcatccacanagaccatcttccgtgtaagagacaagagagtgggagagaggggggatatatggcagacatcgcgttgctggtgacggagcagttcgacaagaagctgaagcgaggcgcccccggcgaggacatcggcggcggcgccggcgaatataggaggaacttcggggccgtggccaaggtgtggagctcgtgggtggagtccgccgccgccgcgtccggggtgaggttcagcgtcgcggtgcacctggagcccaagaccgcgctcgccctggccgccgccgacggcctcttctccgcctagctagctagctagctactagtgtcgcctagctgcttccaggcccttctcctgagtgagcagcagtagtcgagttcttctggaccatataatacaatgcgcggttcacctgtacattc

SEQ ID NO: 12005 - DNA, 421 bp, Zea mays
  Clone ID: LIB3061-094-Q1-K6-F2
ttcttatttgcagcaacaactattaccattcagccagctagctactgcctactctcagcaacaacaacttcttccatttaaccaattggccgcactgaaccccgctgcttatttgcagcagcaaatactactaccatttagccagctagctgcagcaaaccgtgcttccttcttgacacagcaacagttgctgcctttctaccagcagtttgcggctaaccccgcaaccctcttacaactacaacaattgttgccctttgtccaacttgctttgacagaccgagcggcctcctaccaacaacacatcattggtggtgccctcttttagattgcttattagttgtaattcaataataaagttttttggatgatgtatgtggccaaccagaaataagaagttacatttccagattttaatgtg

SEQ ID NO: 12006 - DNA, 467 bp, Zea mays
  Clone ID: LIB3061-094-Q1-K6-F3
tctacaacaacttgtgctagcaaaccttgctgcctactctcagcaacagcagtttcttccattcaaccaactagcagcattgaactctcctgcttatttacagcagcaacaactactaccattcagccagctagctggtgtgagccctgctaccttcttgacacaaccacagttgttgccgttctaccagcacgttgcgcctaacgctggcaccctcttacaactgcaacaattgctgcctttgtccaacttgctttgacaaacccagcagccttctaccaacaacacatcattggcggtgccctcttttagattgcttattagttgtaattcaataatgaagttttttggctgatgtatgtggcctcctagaaataagaagttatatttccaaaaaaaaaaattaaatgacaaaaaaaaaaaacaacatacaaaaatacaaaacaaaataaaaaaaacaaaaatag

SEQ ID NO: 12007 - DNA, 452 bp, Zea mays
  Clone ID: LIB3061-094-Q1-K6-F4
cgagcgccatgttccagccgctccggcaacagtgctgccagcagcagatgaggatgatggacgtgcagtccgtcgcgcagcagctgcagatgatgatgcagcttgagcgtgccgctgccgccagcagcagcctgtacgagccagctctgatgcagcagcagcagcagctgctggcagcccagggtctcaaccccatggccatgatgatggcgcagaacatgccggccatgggtggactctaccagtaccagctgcccagctaccgcaccaacccctgtggcgtctccgctgccattccgccctactactgattcatgatatttgggaaatctgctctatccatctctctctatctatatatgtaataatgcagtaagacgacacacattatcatgtgtggtatgaccaataatatatgcatggtcataataaagttttggttttaatgaatc

SEQ ID NO: 12008 - DNA, 653 bp, Zea mays
  Clone ID: LIB3061-094-Q1-K6-G1
cagtaaacacaccaagcgaactacctagcaacgacttaacaacaatggctaccaagatattagccctccttgcgcttcttgccctttttgtgagcgcaacaaatgcgttcattattccacaatgctcacttgctcctagtgccattataccacagttcctccgaccagttacttcaatgggcttcgaacacctagctgtgcaagcctacaggctacaacaagcgcttgcggcgagcgtcttacaacaaccaattaaccaattgcaacaacaatccttggcacatctaaccatacaaaccatcgcaacacaacagcaacaacagttcctaccagcactgagccaactagatgtggtgaaccctgtcgcctacttgcaacagcaggtgcttgcatccaacccacttgctctggcaaacgtagctgcataccaacaacaacaacaattgcaacagtttctgccagcgctcagtcaactagccatggtgaaccctgccgtctacctacaacagcaacaactgctttcatctagccctctcgttgtgggtaatgcacctacatacctgcaacaacaattgctgcaacagattgtaccagctctgactcagctagcttgtggcaaccctgctgcctacttgcaacaactgcttccattc

SEQ ID NO: 12009 - DNA, 661 bp, Zea mays
  Clone ID: LIB3061-094-Q1-K6-G10
gaagtttgctgaaaactatagctctatgctcgcagccatttcatcaaagctatagaacttggtgttatattaactctttatgcatcttatggcagtgcatctgggaatacattggtgtatattctgctgacactttcaagttggtttcttgtgtcatcatggattcttgctccattcatttttaatccctctggttttgactggctgaagaattttaatgactttgaggattttctaaactggatatggttccggggtgggatctcagttcagtcagatcaaagctgggagaagtggtgggaggatgaaactgatcatctccggacgacaggtctatggggctgcatcttggaaatcatattagaccttcgatttttcttttttcagtatgcaattgtatatcggcttcacattgctgataatagtagaagcatccttgtctatcttctttcgtggacatgcatcctcctagcttttgtggctcttgtgacagtggcttactttcgagacagatattcagcaaagaagcacatacggtatcgccttgtccaggcaatcattgttgggagcactgtggctgctattgttgtgctgttggaattcacaaagtttcagtttgttgacacttttactagtcttttggcttttctgccgactggct

SEQ ID NO: 12010 - DNA, 413 bp, Zea mays
  Clone ID: LIB3061-094-Q1-K6-G12
tagttctagatcgcggtgggcaatgcacctacgtacctacaacaacagttgctgcaacaaattgtaccagctctgactcagctagctgtggcaaaccctgctgcctacttacaacagttgcttccattcaaccaactggctgtgtcaaactctgctgcgtacctacaacagcgacaacagttacttaatccattggcagtggctaacccattggtcgctaccttcctgcagcagcaacaacaattgctgccatacaaccagttctctttgatgaaccctgccttgcagcaacccatcgttggaggtgccatcttttagattacatatgagatgtactcgacaatggtgccctcataccgacatgtgtttcctagaaataatcaatatattgattgagatttatctcgatcgat

SEQ ID NO: 12011 - DNA, 600 bp, Zea mays
  unsure (1)..(600): unsure at all n locations; Clone ID: LIB3061-094-Q1-K6-G2
ggnaaatgcaatgccagatggtataatgcnacaatggaagttcaagtggtataataaatgacacaccatctggcgatcagttacttaatgctagtaaagacttgcatggccttcatagtcaaatagatgcttcaactagtctacagtcagaccagaatgcaactgctgtgctgtatggtgtagacaacgagacaagcgcaacaataaagaccgagtcttgctactcgagtaatgctgattttgccttctgtgggaacactttcctggaatcatgccagtcgataggtgatgcatctggtggtggatccttcagcagctcagagttgaatgggcaaccactaaacgattcaattttggatatggagtcatcatcatttagcttcttgaaccaaatgccccaaagcttcatgttttcagacctggcagatgatttcaaccaaaatgcagaaataacaccatttctcactcctgagacaaatttctccgattcaacagggggagaccatacaggttgagcgggtcatgcacagcgtaccaaccatttgtacataggcacatgggcagtcgaatctgcattggtgaaaaacttgagaccttttg

SEQ ID NO: 12012 - DNA, 634 bp, Zea mays
  unsure (1)..(634): unsure at all n locations; Clone ID: LIB3061-094-Q1-K6-G4
cccaccccctccgtnnaaacccaactagcaacatannaaagcacaatagtgtaccaacaatggcagccaaaatattttgcctccttatgctccttggtctttctgcaagtgctgctacggcgaccattttcccacaatgctcacaagctcctatagcttcccttcttcccccgtacctctcaccagcggtgtcttcngtatgtgaaaacccaattcttaaaccctatangatccaacaggcaatcgcagctggcatcttacctttatcacccttgttcctccaacaatcatcagcgcctattagancanttacctttggtgcatttattggcacaaaacatcanggcacaacaactacaacaacttgtgctagcaaaccttgctgcctactctcancaacaacagtttcttccattcaaccaactagctgcattgaactctgcttcttatttgcaacaacaacaactaccattcaaccagctatctgctgcctacccccancaatttcttccattcaaccaactgacagctttgaactctcctgcttatttacagcagcaacaactactaccattcanccagctanctggtgtgagccctgctaccttcttgacacaaccaccattgttgccgt

SEQ ID NO: 12013 - DNA, 585 bp, Zea mays
  Clone ID: LIB3061-094-Q1-K6-G5
ctagcagtagcttaaatctaaaaaatgtcatgaattcctaaggcagcagtgcatgcctttggtaatgcctttactccaatcacgtttggtacaaccaagtagctggcaggtgttggagtaacaatgtagtgatgatcttaggcagattgagccccaatacataacaccaagcagatctacaacatggctcaatccataatccatgaggagcgacaacaacaaccatgtgagtcatgtggatctaaacaagctactcaaagtgcggagggaatcttgacagctgcacaatacctaccatcaatgtgcggctcgtaccactcatactactcaaaataatccatgcatgatgaatgacatcagtggtgtctgcaattcgaagaattggtttacctagacgctgtactcatattacggcagttaaccaataaagctccatacattatgatgtgcgtactcattggtcgctaccttcctgcagcagcaacaacaattgctgccatacaaccagttctctttgatgaaccctgccttgcagcaacccatcgttggaggtgccatcttttagataacatatgagatgtactc

SEQ ID NO: 12014 - DNA, 598 bp, Zea mays
  Clone ID: LIB3061-094-Q1-K6-G7
gggagacactctgttcaaccaccagccgagttcgcagcggcactccagggtccaggcccagcagcctcttcggctcttcgttgggggtgcgtggacaccggaaattgcctcggggattgcgttcctgatctaagcccggcatgaagggctgctcagagcgtttgctgctcctgctgctgctggcatcgtcgttgttactgtccgtcgtggttgccgcgcagcagacttgccctgccgacctcgacagcaaatgcgacggtggcgcgcctgatgactgggagggggaattcttccccggcgtcccgaaaatcaagtatgagggtccaacaagcaagaaccctcttgcttataagtggtataacaaggaggaagtcattctcggaaagaagatgaaggactggatgcgcttcagtgttgcgttctggcacacgttccgtggtactggtgctgatccttttggtgcgcctacaaaggtttggccttgggaggacggcacacattcgttggccatggctaagagaagaatgagagctcactttgagttcatggagaagctcggggttgacaaatggggcttccatgatagggatattgcccc

SEQ ID NO: 12015 - DNA, 669 bp, Zea mays
  unsure (1)..(669): unsure at all n locations; Clone ID: LIB3061-094-Q1-K6-G8
ccgtccgattgaaacccaactagcaacatagnaaagcacaatagtgtaccaacaatggcagccaaaatttttgcttccttatgctccttggtctttctgcaagtgttgctaccgcaaccattttcccacaatgctcacaagctcctatagcttcccttcttcccccatacctctcaccagcggtgtcttcaatgtgtgaaaccccaattgttcaaccctacaggatccaacaggcaatcgcaacaggcatcttaccattatcacccttgttcctccaacaaccgtcagccctattacagcagttacctttggtccatttggtggcacaaaacatcagggcacaacaactacaacaacttgtgctagcaaaccttgctgcatactctcagcaacatcagtttcttccattcaaccaactggctgcattgaactctgctgcttatttgcaacaacaattaccattcagccagctagttgctgcctacccccagcaatttcttccattcaaccaactagcagcattgaactctgctgcttatttacagcagcaacaactactaccattcagccagctagctgatgtgagccctgctgccttcttgacacaacaacagttgttgccgttctacctgcacgctatgcctaacgctggcaccctcttacaactgc

SEQ ID NO: 12016 - DNA, 662 bp, Zea mays
  Clone ID: LIB3061-094-Q1-K6-G9
gcaaagcggcagtgcgtagagaggatcgtcgaacagaacagcatgaagatggtcatcgttctcgtcgtgtgcctggctctgtcagctgccagcgcctctgcaatgcagatgccctgcccctgcgcggggctgcagggcttgtacggcgctggcgccggcctgacgacgatgatgggcgccggcgggctgtacccctacgcggagtacctgaggcagccgcagtgcagcccgctggcggcggcgccctactacgccgggtgtgggcagccgagcgccatgttccagccgctccggcaacagtgctgccagcagcagatgaggatgatggacgtgcagtccgtcgcgcagcagctgcagatgatgatgcagcttgagcgtgccgctgccgccagcagcagcctgtacgagccagctctgatgcagcagcagcagcagctgctggcagcccagggtctcaaccccatggccatgatgatggcgcagaacatgccggccatgggtggactctaccagtaccagctgcccagctaccgcaccaacccctgtggcgtctccgctgccattccgccctactactgattcatgatatttgggaaatctcctctatccatctctctctatctatatatgtaataatgcagtaagacgacacacattatcat

SEQ ID NO: 12017 - DNA, 654 bp, Zea mays
  Clone ID: LIB3061-094-Q1-K6-H10
catttaaaagtgaaagcaaaatctcaaactgaaagcaataacattgccaatagtttcgagttggacaatggacatgtcactaaagtacaacctatagattccacagggctgggcctgtctgctgatagttcagctactatcaatgtgcctaaaaatcatcccagagatgcgccagttcctcttgcaacaaaaatgtatcattcacagggcaactaccgtcttcgatttgagcttggccagctttatcgcgaatcatgtgtgcagcatttgagtggccacacaactccaaacgtgtcacatgagaatggattgatggcatcatcacggttttcttcttgtggcaactcagcattgcctactcagaagagccttgttcctcaaacaaagcctctcgcagaccctcagcaattagcagcaagcaggcctaaccagtcacaaggaacaaaaactgatagagcaagtgcacaagcatctgcaattaaaaatgaaggttcacgatccagatgcaataaagctaccattccccattcgagaaacaaaggcagcaagaagacgcaacagcaacctaatggacgtgttcatgcgatcaagttcccagtagagtagcccattcgtaggtaatttattggttaagtggaagtgtctcttctggtg

SEQ ID NO: 12018 - DNA, 649 bp, Zea mays
  unsure (1)..(649): unsure at all n locations; Clone ID: LIB3061-094-Q1-K6-H11
gnaagggatggaaactcacaanagacaatatttaatccaccttggcgacattcgcccgtcgcaataggatcaagatttggggaggcgtttcaagaacctgcttcgtttattgctataaaacctttgttcgaggatgagaggtatattgttacatataacccgacaaaggacaaggtctatgctttgctcaaggaccaagcaaagcctgatgacattctcaaggccgcttttcatgcacatgtgctactganttttatcaatgctacacatgctaaccggaatgcacggaagcgcgcgaactccaatctgtcacaccagtataacccactgaacatggacttcttaccacacatcgaagagtcgtgcaagatcgttatgtcgtcttatggagttttcaagaagaaatcaagagaacagggatggatcatgtctgaatcacttctcaacccaggacgagcaagattgtgtggagtagcaccgcaatgatccaagccttttttattttttttcatgatggagatgatgagttctttcccatacaattggagtccagccctatgtgggtcagcgaaactaactntagtcaacaatcagctcaagtacataaaaatgcaccaaatcgtcatgagcccagaangaacagtacttg

SEQ ID NO: 12019 - DNA, 625 bp, Zea mays
  unsure (1)..(625): unsure at all n locations; Clone ID: LIB3061-094-Q1-K6-H12
gtcggnaggactgtggtataatggcactaggagcaagtgagcattgatggaagcctacaggctacaacaagcgcttgcggcgagcgtcttacaacaaccaattaaccaattgcaacaacaatccttggcacatctaaccatacaaaccatcgcaacacaacagcaacaacagttcctaccagcactgagccaactagatgtggtgaaccctgtcgcctacttgcaacagcaggtgcttgcatccaacccacttgctctggcaaacgtagctgcataccaacaacaacaacaattgcaacagtttctgccagcgctcagtcaactagccatggtgaaccctgccgcctacctacaacagcaacaactgctttcatctagccctctcgttgtgggtaatgcacctacatacctgcaacaacaattgctgcaacagattgtaccagctctgactcagctagctgtggcaaaccctgctgcctacttgcaacagctgcttccattcaaccaactgactgtgtcgaactctgctgcgtacctacaacagcgacaacagttacttaatccactagcagtgcctaacccattggtcactggcttcctacagcagcaacaattgctaccatac

SEQ ID NO: 12020 - DNA, 338 bp, Zea mays
  unsure (1)..(338): unsure at all n locations; Clone ID: LIB3061-094-Q1-K6-H2
ggtgggggggtgggggggggggggggtggggggggggggggggggggtgggggtgggggtgggaggaagtatttagggtnattgatatattggggggggggggggggggggggggttnttagaggggggggggggggggtaggggtttggggggggtggggggggggggtgggggggggggggggggggggggggggggggggggggggggggggggggggagggggggggggggggggggggggggggggggggggggggggtggggggggggagggggtggaggggggggggggggggggtggggggggggggggggggggggggggggggggggg

SEQ ID NO: 12021 - DNA, 631 bp, Zea mays
  unsure (1)..(631): unsure at all n locations; Clone ID: LIB3061-094-Q1-K6-H5
cgcggagnaagagaagagcatgaactcatcaagacccacaacttgttcgggcagttccgctggatctctgcccagacaaacagggcccgtaacggcgagctctatcgctacatcgctgatacccatggtgctttcgtacagccggccttctatgaagcgttcggtctcaccgtcgttgaggccatgacctgtgggcttcctactttcgcgacgctccatggaggtccagctgagatcatagagcatggcgtctcgggcttccacattgacccgtaccaccccgaacaggctgctaatctgatggccgacttcttcgaccggtgcaagcaagacccagatcactgggtgaaaatatctggagcagggctgcagcgcatatacgagaagtacacatggaagatatactcagagaggttgatgacactggccggggtctacggtttctggaagtacgtgtcgaagctcgagaggcgggagacgaggcgctaccttgagatgttctacatactgaagttccgcgagctggcgaagaccgtgccgcttgcaattgaccaaccgcagtagctttgcgcaactgcgactgcgtagcacttggtacaagactgaaacctgaaggaccttcaataattta

SEQ ID NO: 12022 - DNA, 656 bp, Zea mays
  Clone ID: LIB3061-094-Q1-K6-H6
ggacgtcagcctagcaattagctcatcgactccagattggagaactcgacaccatgaaggtgctgatcgttgcccttgctctcctggcgctcgctgcgagcgccgcctccagtacaagcggcggctgtggctgccagacaccaccgtttcatctaccgcctccgttctatatgccgcctccgttctatctgccgccgcagcagcagccgcagccatggcaataccccactcaaccaccgcagctaagcccgtgccagcagttcggatcctgcggcgtcggcagcgtcggcagcccgttcctgggccagtgcgtcgagttcctgaggcaccagtgcagcccggcggcgacgccctacggctcgccacagtgccaggcgctgcagcagcagtgctgccaccagatcaggcaggtggagccgctgcaccggtaccaggcgacatacggtgtggtcctgcagtccttcctgcagcagcagccgcagggcgagctcgcggcgctgatggcggcccaggtagcgcagcagctgacggcgatgtgcggcctgcagctgcagcagccaggtccctgcccttgcaacgcagctgccggcggtgtctactactgaggaaactatgtactgtagtaataatgtaatggagccgctgactagctacct

SEQ ID NO: 12023 - DNA, 669 bp, Zea mays
  Clone ID: LIB3061-094-Q1-K6-H7
tttttgcctccttatgctccttggtctttctgcaagtgctgctacggcgaccattttcccgcaatgctcgcaagctcctatagcttcccttcttcccccgtacctctcaccagcggtgtcttcggtatgtgaaaacccaattcttcaaccctacaggatccaacaggcaatcacagctggcatcttacctttatcacccttgttcctccaacaatcatcagccctattacatcagttacctttggtgcatttattggcacaaaacatcagggcacaacaactacaacaacttgtgctagcaaaccttgctgcctactctcagcaacagcagtttcttccattcaaccaactagctgcattgaactctgcttcttatttgcaacaacaacaactaccattcagccagctacctgctgcctacccccagcaatttcttccattcaaccaactggcagcattgaactctcctgcttatttacagcagcaacaactactaccattcagccagctagctggtgtgagccctgctaccttcttgatacaaccacaattgttgccgttctaccaacacgcttggcctaacgctgggcaccctcttacaactggcaccaattgctggccttcaaccaacctgctttgacaaactcaacagcgttttaccaacaaccc

SEQ ID NO: 12024 - DNA, 66 bp, Zea mays
  Clone ID: LIB3061-094-Q1-K6-H9
gtactctgttgcgtacctacaacaggggcaacagttacttaatacaatgggtgggaacactaacaa

SEQ ID NO: 12025 - DNA, 584 bp, Zea mays
  unsure (1)..(584): unsure at all n locations; Clone ID: LIB3061-095-Q1-K6-A1
gctaacatagnaaagcacaatagtgtaccaacaatggcagccaaaatattttgcctccttatgctccttggtctttctgcaagtgctgctacggcgaccattttcccgcaatgctcgcaagctcctatagcttcccttcttcccccgtacctctcaccagcggtgtcttcggtatgtgaaaacccaattcttcaaccctacaggatccaacaggcaatcacagctggcatcttacctttatcacccttgttcctccaacaatcatcagccctattacatcagttacctttggtgcatttattggcacaaaacatcagggcacaacaactacaacaacttgtgctagcaaaccttgctgactactctcagcaacagcagtttcttgcattaaaccaactagctgcattgaactctgcttattatttgcaacaacaacaactaccattcagccagctacctgctgtctacccccagcaatttcttccattcaaccaactggcagcattgaactctcctgcttatttacagtagcaacaactactaccatttaaccagctagctggtgtgagccctgataccttttt

SEQ ID NO: 12026 - DNA, 632 bp, Zea mays
  Clone ID: LIB3061-095-Q1-K6-A11
cattagctttatctactccagagcgcagaagaacccgatcgacaccatgagggtgttgctcgttgccctcgctctcctggctctcgctgcgagcgccacctccacgcatacaagcggcggctgcggctgccagccaccgccgccggttcatctaccgccgccggtgcatctgccacctccggttcacctgccacctccggtgcatctcccaccgccggtccacctgccgccgccggtccacctgccaccgccggtccatgtgccgccgccggttcatctgccgccgccaccatgccactaccctactcaaccgccccggcctcagcctcatccccagccacacccatgcccgtgccaacagccgcatccaagcccgtgccagctgcagggaacctgcggcgttggcagcaccccgatcctgggccagtgcgtcgagtttctgaggcatcagtgcagcccgacggcgacgccctactgctcgcctcagtgccagtcgttgcggcagcagtgttgccagcagctcatgcaggtggagccgcagcaccggtaccaggcgatcttcggcttggtcctccagtccatcctgcagcagcagccgcaaagcggccaggtcgcggggctgttggcggcgc

SEQ ID NO: 12027 - DNA, 532 bp, Zea mays
  Clone ID: LIB3061-095-Q1-K6-A12
gcgtccttctcttcccgacttcctcgcgttgcatttcttcaccccacccgccccccacgccaatctaacagcaaagtccggaaccttctagccgcacctagggtttggattggcgccgagcatggcgtacgtcgaccacgccttctccatctccgacgaggacgacctcgtcggcggcgccatggggggcccgcgcggggcgcccgtgaaggagatcgccttcgccgccgcgctgctcgccttcggggcgctcggtaccgtcggtggcctgctaatggccgtcaaccgcgtcggaggggaccgcgcgcacggaattttcttcatgatgttgggcattgtaatgttcatccctgggttctactacacaaggatcgcctactatgcttacaaaggttacaagggcttctctttttcgaacatcccaccgatctgaaggagtgtgctgctgcctgctggttatgaagtggtgtcgctggtttaagagtttgacgactctgacgaatggctctgtaaacacccttgttctacatct

SEQ ID NO: 12028 - DNA, 631 bp, Zea mays
  unsure (1)..(631): unsure at all n locations; Clone ID: LIB3061-095-Q1-K6-A2
gcaacatagnaaagcacaatagtgtaccaacaatggcagccaaaaattttgcctccttatgctccttggtctttctgcaagtgctgctacggcgaccattttcccgcaatgctcgcaagctcctatagcttcccttcttcccccgtacctctcaccagcggtgtcttcggtatgtgaaaacccaattcttcaaccctacaggatccaacaggcaatcacagctggcatcttacctttatcacccttgttcctccaacaatcatcagccctattacatcagttacctttggtgcatttattggcacaaaacatcagggcacaacaactacaacaacttgtgctagcaaaccttgctgcctactctcagcaacagcagtttcttccattcaaccaactagctgcattgaactctgcttcttatttgcaacaacaacaactaccattcagccagctacctgctgcctacccccagcaatttcttccattcaaccaactggcagcattgaactctcctgcttatttacagcagcaacaactactaccattcagccagctagctggtgtgagccctgctaccttcttgatacaaccacagttgttgccgttctaccagcacgctgcgcctaacgct

SEQ ID NO: 12029 - DNA, 508 bp, Zea mays
  Clone ID: LIB3061-095-Q1-K6-A3
ccccgcgtccgtgagcattcagaaacacaccaagcgaagcgcactagcaacgacctaacaacaatggctaccaagatattagccctccttgcgcttcttgccctttttgtgagcgcaacaaatgcgttcattattccacaatgctcacttgctcctagtgccattattccacagttcctcccaccagttacttcaatgggcttcgaacacctagctgtgcaagccaacatgcaacaacaagcgcttgcggcgagcgtcttacaacaaccaattgcccaattgcaacaacaatccttgccacatctaacaatacaagccatcacaacgcaacagcaacaacagttcctaccagcactgagccacctagccatggtgaaccctgccgcctacttgcaagagcagctgcttgcatacaacccacttgctctggcgaacgtagttgcaaaccagcaacaacaacagctacaacaggtttctgacaacgctcagtcaactagccatggtgaac

SEQ ID NO: 12030 - DNA, 503 bp, Zea mays
  unsure (1)..(503): unsure at all n locations; Clone ID: LIB3061-095-Q1-K6-A4
ctagcaacatagnaaagcacaatagtgtaccaacaatggcagccaaaatttttgcttccttatgctccttggtctttctgcaagtgctgctaccgcaaccattttcccacaatgctcacaagctcctatagcttcctttcttcccccatacctctcaccagcggtgtcttcagtatgtgaaaacccaattcttcaaccctacaggatccaacaggcaatcgcagcaggcatcttacctttatcacccttgttcctccaacaaccgtcagccctattacagcagttacctttggtgcatttgttggcacaaaacatcaaggcacaacaactacaacaacttgtgctaggaaaccttgctgcctactctcagcaacagcagttacttccattcaaccaactggctgcattgaactctagtgattatttgcaacaacaactaccattcagacagctagctgctgcctaccctcagtaatttcttccattcaaccaactggcagtta

SEQ ID NO: 12031 - DNA, 658 bp, Zea mays
  unsure (1)..(658): unsure at all n locations; Clone ID: LIB3061-095-Q1-K6-B1
gcaacatagnaaagtggatacagtagcaaaaatagagcaacaatggcggccaagatattttccatccttatgctccttgctctttctgcatgtgttgctaacgcgaccatttttcctcaatactcacaagctcctatagctgcccttcttcccccataccttccatcaatgaccgctttagtatgtgaaaacccagcccttcaaccctacaggatccagcaagcaatcgcaacaagcaacttacctttatcacacctgttctttcaacaatcgccagccctatctttggtgcagtcattggtacaaaccatcagggcagaacagttgcagcaactcgtgctaccagtgatcagccaagtagctctggcaaacctttccccctactctcagcaacaacaatttcttccattcaaccaactgtctatactgaaccctgctgcttatttgcagcaacaacaactactaccattcagccagctagctactgcctactctcagcagcaacaatttcttccatttaaccaattggccgcactgaacccctctgcttatttccagcagcaaatactactaccatttggccagctagctacaacaagccccgcttccttcttgacacaacaacaagtgcttncgttctaccagcagtttgtggcta

SEQ ID NO: 12032 - DNA, 640 bp, Zea mays
  unsure (1)..(640): unsure at all n locations; Clone ID: LIB3061-095-Q1-K6-B10
gtaagaacctgaaagaggacttatagcactcgaggaggatcttgttcagctgacagataagcttcaacttgaagctcaaagtattcctaacactacccatccagatgttcctgttgggggtgaggaaagctctgtcctcaggaaagaggtaggcagtcagaggagcttcaattttgcaatcaaagatcatcttcagctggggaaggaacttgatttgtttgactttgatgcagcagccgaggtcagtggttcgaagttctactacttaaagaatgaagctgttttgttggagatggccctagtaaactgggctatttcagaggtctccaagaagggtttcacaccactcataactccagagatcgtaagatcatctgttgttgagaaatgtggctttcagccaagggccaaaaacactcaggtatactcaattgaggacagtgatcagtgtctcataggcacagcggaaattcctgttggaggcatccacatggactcaatacttgccgaatccgctttgcctttaaaatatgtagcatattcacactgttntcgcacagaagcaagtgcagcaggtgctgccactaggggcctctatcgggtacatcaatttagcaaggttgagatgttcatattctgt

SEQ ID NO: 12033 - DNA, 679 bp, Zea mays
  unsure (1)..(679): unsure at all n locations; Clone ID: LIB3061-095-Q1-K6-B11
cttcagtttgtngaaaacccagcccttcaaccctacaggctccaacaagcaatcgcaacaagcaacttacctttatcacccctgttctttcaacaatcgccagccctatctttggtgcagtcattggtacaaaccatcagggcacaacagctgcaacaactcgtgctaccagtgatcagccaagtagctctggcaaacctttctccctactctcagcaacaacaatttcttccattcaaccaactgtctacactgaaccctgctgcttatttacaacaacaacaactactaccattcagccagctagctactgcctactctcagcagcaacaatttcttccatttaaccaattggccgcactgaacccctctgcttatttccagcagcaaatactactaccatttggccagctagctacaacaagccccacttcctttttgaaacaacaacaattgcttccgttctaccagcagtttgtggctaaccccgcaaccctcttacaactgcaacagttgctgccctttgtccaacttgctttgacaaacccagcagccttctaccaacaacacatcattggcggtgccatcttttagattgcttattagttgtaattcaataatgaagttttttggctgatgtatgtggcctcctagaaataagaagttacatttccaaaaa

SEQ ID NO: 12034 - DNA, 497 bp, Zea mays
  unsure (1)..(497): unsure at all n locations; Clone ID: LIB3061-095-Q1-K6-B2
accggtaccgcccttcccgggcttccatcccaaaanaggcactgaacatatttgaacctcgctacagactgatggtacggagaataatggaagggaaccatcggatgggaatggttgctattgattcggcaacgggtactgtagcagattgtggctgtgaggtggaaatttcagagtgtgaaccacttccagatgggcgcttttatttagaggtggaaggcacacgtcggtttcgtatcgtgcgatcatgggatcaagatggatatagagttgctgaagttgaatggttgaaagatatacctctgccagaaggttcacaagggagaagagaactaatggaactggccaatggagcttcatagctggccagggcatatatcagacatgctagagataccgtacggactgcaaggcgaacaagacatctgaatcttgagggcatgcctgggccacaggacccggaaaaattaaagtactggctacccaactagataagt

SEQ ID NO: 12035 - DNA, 184 bp, Zea mays
  Clone ID: LIB3061-095-Q1-K6-B4
tacaggtgtacaaatgaactgtagtctactgaataagatggcgtggtaccgtggtgtgtcacctgcgcttgtaataatagcctgaacatagtttaattgctaatagtatcctaaagaggactacaagtgtacaaatgaactatgtttcaggctattattagcaattaaaaaaatgtttgtgctc

SEQ ID NO: 12036 - DNA, 674 bp, Zea mays
  Clone ID: LIB3061-095-Q1-K6-B8
gctgaggattacaagagccctgtatcaatatggcttccaaggccaccggggggatacgtagctcttgggtgtgttgctgtcccttcattcaaggagcccactcttgactgtgctttctgtgtggatgagagactcgcggaggatgccgcgtatgaggagcaaatcatatgggcctcatcggatgcttacccatggggatgctatatctaccaagttcagagcgcctcaatgcagttcatggcacttcgtgtcccaaaagaacaatctgagctaaggcccaagaagatattggagtcatttctgcagcaagcatcagagactcaaacgtcccgtgcatgaagaagctgcacatgatgcttgtgcgtgcaagagaactcggctgggacaaagggcaagtctcgtgcaagaaagctcgaagaatgccacttctttcggatcactccatttctccgttgtcaaagcatacacagaggacagagccttgcatgccaacactcgggttgacggaagtgttgtatactagaatagtaggttaaaggttgtaaatgtaaagttttgtaacgtttgatatagtttttgtccagctacatttgttaaggcccatgtggacgtgggccatattagttgtggctacatattctactaagaaagtctcaggactaatcatacttttc

SEQ ID NO: 12037 - DNA, 533 bp, Zea mays
  Clone ID: LIB3061-095-Q1-K6-B9
agcttgtattcccactctgtcgcacagcgtcgcccgtcgccgctgagatcctaggaagaaatggagctctctcgcaagctcttcacggccgtcctcctcgtcatgctgctgctgctgtccgcagaggtcgggccggtggcggtggcggaggcgcggacgtgccagtcgcagagccacaggttccggggcccctgcctccgccggtccaactgcgccaacgtctgcaggaccgaggggttccccggcggcaggtgccgcggcttccgccgccgctgcttctgcaccacgcactgccactgattcgctcgcccagcggccggctggcgtcgccgtcgatcgcgtcgcgaccagtccatggctccatgcatgaataacaagggtgtgcgcggtttgtgatgccaaattgtatccgtgtcgcgtgttgaagcgttcgatcgtcggtctagtaatgtgcctgtgagcagcggtgtgctgattgaccttcgtttggctctgtagatccatgtaacgggatttatcatagcaaatgcatg

SEQ ID NO: 12038 - DNA, 514 bp, Zea mays
  Clone ID: LIB3061-095-Q1-K6-C11
catggtctaacaccatgcccgcaccgcaagcatagacgccatattgctcgtcaaaagaaggctgcgaagatattcccccgaccgactgctggtcctctactccccattgttcaatgccatactttaaagtacatacatgtaacatcaagcggctagctacgaggcatttacacctctgatggagctcgaaggcctagttgtgcatcaccaacagatagcttgctcacaacacatctgatagtttctgtctgatacaccgtctgatgaacaaatcccttgagggactgcacgccaatgtccagaggcttaaaacatacaaagtcaatctggttatcttcccaaggcgtgcgcgcaatgtgaacgctggtgactctactccagaggagcttgccaccgttacccaggtgcagggtgactacctgccatttactccaggcgagaaacgttcattccaggttcgcgaaggtcacagatgacatgaagtcatttgctgactatggcaaactccgtcttg

SEQ ID NO: 12039 - DNA, 664 bp, Zea mays
  unsure (1)..(664): unsure at all n locations; Clone ID: LIB3061-095-Q1-K6-C12
gcccgcgagagccgacgagcaacgacgaccatggcgacgatggccgcttcttcctgccacgggcaacttctcctgtttctcctcgtggccgtcgcgtcggcctgcctcggctccgcggcagcgcatcaagccggatctggagagggctacacgatcgctggccgcgtcaagatcgatggcatgagcgtgaagggctttggtcttgcaacaaagacatcaaacacaaaagtgatacttaatggcggccagagggttacatttgccaggccagacggctactttgcattccacaacgtgccagctggaactcatctgattgaggtctcctcaattggttacttcttttccccagttcgagtagatatcagtgcaaggaatcctggttatattcaagcagcattgactgaaactagaagagttctaaatgagcttgtcctggaacctctgaaagaagagcagtactatgaggttagggagcctttctccgtcatgtcacttttgaagagtcccatggggttgatggttggttttatggtcttaatggtctttgtgatgcccaagatgatggagaacatagatcctgaggagatgaagcaagctcaagagcaaatgangaacaaccccgtatcattgtctggcttgctagccagagcgcagggctaga

SEQ ID NO: 12040 - DNA, 594 bp, Zea mays
  unsure (1)..(594): unsure at all n locations; Clone ID: LIB3061-095-Q1-K6-C2
tatttagaaccaaactagcaacatagnaaagcacaatagtgtaccaacaatggcagccaaaatttttgcctccttatgctccttggtatttctgcaagtgctgctacggcgaccattttcccgcaatgctcacaagctcctatagcttcccttcttcccccgtacctctcaccagcggtgtcttcggtatgtgaaaacccaattcttcaaccctacaggatccaacaggcaatcgcagctggcatcttacctttatcacccttgttcctccaacaatcatcagccctattacagcagttacctttggtgcatttattggcacaaaacatcagggcacaacaactacaacaacttgtgctagcaaaccttgctgcctactctcagcaacagcagtttcttccattcaaccaactagctgcattgaactctgcttcttatttgcaacaacaacaactaccattcagccagctacctgttgcctacccccaacaatttcttccattcaaccaactggcagcattgaactctcctgcttatttacagcagcaacaactactaccattcagccagctagctggtgtgagccctgctacc

SEQ ID NO: 12041 - DNA, 579 bp, Zea mays
  unsure (1)..(579): unsure at all n locations; Clone ID: LIB3061-095-Q1-K6-C3
agcaacatagnaaagcacaatagtgtaccaacaatggcagccaaaatttttgcctccttatgctccttggtctttctgcaagtgctgctacggcgaccattttcccgcaatgctcgcaagctcctatagcttcccttcttcccccgtacctctcaccagcggtgtcttcggtatgtgaaaacccaattcttcaaccctacaggatccaacaggcaatcacagctggcatcttacctttatcacccttgttcctccaacaatcatcagccctattacatcagttacctttggtgcatttattggcacaaaacatcagggcacaacaactacaacaacttgtgctagcaaaccttgctgcctactctcagcaacagcagtttcttccattcaaccaactagctgcattgaactctgcttcttatttgcaacaacaacaactaccattcagccagctacctgctgcctacccccagcaatttcttccattcaaccaactggcagcattgaactctcctgcttatttacagcagcaacaactactaccattcagccagctagctggtgtgagccctgctacct

SEQ ID NO: 12042 - DNA, 616 bp, Zea mays
  unsure (1)..(616): unsure at all n locations; Clone ID: LIB3061-095-Q1-K6-C4
cccggtcgacccagcgtccgcacaccttgttcctgaatggctcggctattgcctgatcctcaaaaacagaggaacttgctgatgcatattatacaaatactcgatttaaaagcctacaagaaaacggaggtggaactagctcacaagaggcaaccgtaaaaagaagggaaggggaaagctcctgtcacagaaagcagtgctgctaatgatgtgaatagtgcactagcagataacattctggagactgtaagaaggcttcaatcaaaccagcaggctcgggaaggaggagctgacgtgctgtccaaggatgggtatcgaccttccaagggggtccaaccggcagctggatcttcatctaatctggacagtgatactagttccaactcaaaatcatctggtgcaaaagataacataggcaagggaggaggcaataagcaaccgaagaaaacagcaaagtttctcagagctcgtttaggtgacaactcattagccacacttgatttaagtcgtccaagtgcaagccctgaacgtccagaaagggaattgcaaggccctgagacagggttgccagcgcgaggtgcttggaagaatggggngggcagaaactttttcgagc

SEQ ID NO: 12043 - DNA, 613 bp, Zea mays
  Clone ID: LIB3061-095-Q1-K6-C6
ctgggtcttcagaccattagctttatctactccagagcgcagaagaacccgatcgacaccatgagggtgttgctcgttgccctcgctctcctggctctcgctgcgagcgccacctccacgcatacaagcggcggctgcggctgccagccaccgccgccggttcatctaccgccgccggtgcatctgccacctccggttcacctgccacctccggtgcatctcccaccgccggtccacctgccgccgccggtccacctgccaccgccggtccatgtgccgccgccggttcatctgccgccgccaccatgccactaccctactcaaccgccccggcctcagcctcatccccagccacacccatgcccgtgccaacagccgcatccaagcccgtgccagctgcagggaacctgcggcgttggcagcaccccgatcctgggccagtgcgtcgagtttctgaggcatcagtgcagcccgacggcgacgccctactgctcgcctcagtgccagtcgttgcggcagcagtgttgccagcagctcaggcaggtggagccgcagcaccggtaccaggcgatcttcggcttggtcctccagtccatcctgcagcagcagccgc

SEQ ID NO: 12044 - DNA, 632 bp, Zea mays
  Clone ID: LIB3061-095-Q1-K6-C7
cgcaacgcaacagcaacaacaatttctaccagcactgagccaactagctgtggtgaaccctgtcgcctacttgcaacagcagttgcttgcatccaacccacttgctctggcaaacatagttgcataccaacaacaacaacaattgcaacagtttctaccagcgctcagtcaactagccatggtgaaccctgccgcctacctacaacagcaacaactgatttcatctagccctctcgctgtggttaatgcacctacatacctgcaacaacagttgctgcaacagattgtaccagctctgactcagctagctgtggcaaaccctgctgcctacttgcaacagctgcttccattcaaccaactgactgtgtcgaactctgctgcgtacctacaacagcgacaacagttacttaatccactagcggtggctaacccattggtcgctgccttcctacagcagcaacaattgctgccatacaaccagttctctttgatgaaccctgccttgttgtggcagcaacccatcgttggaggtgccatcttttagattacatatgagatgtactcgataatggtgccctcatagcggcatgtgtttcctagaaatatcaaatattgattgagattatctcgat

SEQ ID NO: 12045 - DNA, 661 bp, Zea mays
  unsure (1)..(661): unsure at all n locations; Clone ID: LIB3061-095-Q1-K6-C9
gngaaccaacaagcaacatagnaagtggaatccagtagcaacaatagagcaacaatggcgaccaagatactttccctccttatgctccttgctctttctgcatgtgttgctaacgcgacaattttccctcaatgctcacaagctcctatagcttcccttcttcccccataccttccatcaatgatagcttcagtatgtgaaaacccagctcttcaaccctataggctccaacaagcaatcgcagcaagcaacatacctttatcacccttgtttcaacaatcgccagccctatctttggtgcagtcattggtacaaaccatcaaggcacagcagctgcagcaactcgtgctacctgtgatcaaccaagtagctctggcaaacctttctccctactatcagcaacaacaatttcttccattcaaccaactatctacactgaaccctgctgcttatttgcagcaacaactattaccattcagccagctagctactgcctactctcatcaacaacaacttcttccatttaaccaattggccgcactaaacctcgctgcttatttgcagcagcaaatattactaccatttagccagctagctgcagcaagccgtgcttccttcttgaacagcaacagttgctgcctttctaccagcagtttgcgga

SEQ ID NO: 12046 - DNA, 213 bp, Zea mays
  Clone ID: LIB3061-095-Q1-K6-D1
gcgctgcctcggcgggcccggcgggcccggctgcggcgccaacgccgccgggaaggggtacgtgctgtgctcgtcggcgcacctgctgcagccggggcgcgggccgttccggtccgacgacgcgctgaagccgggaaccgagtacttgctgctaccgcagtcggtgatccaggtggagtggtgcgtcgtggacctggtgtgcctgatgaaccg

SEQ ID NO: 12047 - DNA, 424 bp, Zea mays
  Clone ID: LIB3061-095-Q1-K6-D11
atctgtttgcaaacttgatgggggcacatgaatatttcctcacctaccttgagcaaggaagacagaagtttcatcggctatacccttcaagttcgaagcgaggaaatctgcaggagggggcaatgaacgctaccgcttgggcctccaaatcattagcatctgtttcgattggagaaccaagtgcgattggaaggacaaactctaccagtgagcttagatgaagtgtaacccttttttctctccacagagatatatgtacagtacagtagagcgatcaggatatggacacccagaatctgttgtaacggctgtattactctttgtatcctctcctccttagaataagtatatccatggttttgcaccttttttttgttgttacatcccaattctttggaggagtaaagtttctggtgtattgtgt

SEQ ID NO: 12048 - DNA, 643 bp, Zea mays
  Clone ID: LIB3061-095-Q1-K6-D12
cttctatcagtaccatcaatcatcattcatcttagtagtataggcaccaaatcaaatctgcaacatcaattatctaactccaaaaaccatgaagctggtgcttgtggttcttgctttcattgctttagtatcaagtgtttcttgtacacagacaggcggctgcagctgtggtcaacaacaaagccatgagcagcaacatcatccacaacaacatcatccacaaaaacaacaacatcaaccaccaccacaacatcaccagcagcagcaacaccaacaacaacaagttcacatgcaaccacaaaaacatcagcaacaacaagaagttcatgttcaacaacaacaacaacaaccgcagcaccaccaccaacaacaacaacaacagcaccaacaacaacatcaatgtgaaggccaacaacaacatcaccaacaatcacaaggccatgtgcaacaacacgaacagagccatgagcaacaccaaggacagagccatgagcaacaacatcaacaacaattccagggtcatgacaagcagcaacaaccacaacagcctcagcaatatcagcagggccaggaaaaacacaacagcaacaatgtcattgccaggagcagcaacagactacaaggtgcagctataactactata

SEQ ID NO: 12049 - DNA, 666 bp, Zea mays
  unsure (1)..(666): unsure at all n locations; Clone ID: LIB3061-095-Q1-K6-D3
catgccttgccttgcctttgcctacctgttgatcgagccgagcgagcagggnagagacacggcaccgagtgaggccgccgcatcctcctcctctccgatccgtacgtttcctcctccctagcaatcgcaacccgttcagccaatcattgccgtctccaccaactccgttcccctattacctagttagtccagtccgcctgctgcctgcctcaacggatcgacgcgacaggagggagggaggaaggagacggtcgatcagagtctgagacggaggccgatccaccaccgcagcgacgagcgggaggagatgaagatcatcattgacacggatcccggcatcgatgacagcgtggccatcctgatggcattccagatgccgggcgtccaggtcctagggctcaccaccatcttcggaaactgcaccacagagcatgccacacgcaacgccttgatcctgtgcgagaaggcaagccatctagaggtcccagtagctgagggcagccatgagcctctcaagggaggaaagccgcacgttgctgacttcgttcatggacctgatggcctcgggaacctagatcttcctgatccactatcaagaaagtgtagaaaatgctaccgacttcttggttgtaaggtctcgcgatttctgggaaggtctctgtgctc

SEQ ID NO: 12050 - DNA, 629 bp, Zea mays
  unsure (1)..(629): unsure at all n locations; Clone ID: LIB3061-095-Q1-K6-D4
cgcaaattgcnaccaanaaatccatcgagaggccgtcgacagggggaattaatggcgtcgtcgtctagcagcagccaccgccgcctcatcctcgcagccgccgtcctgctctccgtgctcgcggctgccagcgccagcgccgggacctcctgcgtgccggggtgggccatcccgcacaacccgctcccgagctgccgctggtacgtgaccagccggacctgcggcatcgggccgcgcctcccgtggccggagctgaagaggagatgctgccgggagctggcggacatcccggcgtactgccggtgcacggcgctgagcatcctcatggacggcgcgatcccgccgggcccggacgcgcagctggagggccgcctagaggacctgccgggctgcccgcgggaggtgcagaggggattcgccgccaccctcgtcacggaggccgagtgcaacctggccaccatcagcggcgtcgccgaatgcccctggattctcggcggcggaacgatgccctccaagtaactgcgaagagcatagtgcatgaggaatgagcttgtagctagctcatatgtctgaataataagcacagcaagaagatgaatgcatttctcggatcgttcatccggaacaat

SEQ ID NO: 12051 - DNA, 175 bp, Zea mays
  Clone ID: LIB3061-095-Q1-K6-D5
cattgttgccctttgtccacttgctttgacagaccgagcggcctcctaccaacaacacatcattggtggtgccctcttttagattgcttattagttgtaattcaataataaagttttttggatgatgtatgtggccaaccagaaataagaagttacatttccagattttaatgtg

SEQ ID NO: 12052 - DNA, 606 bp, Zea mays
  unsure (1)..(606): unsure at all n locations; Clone ID: LIB3061-095-Q1-K6-D6
caagcaacatagnaagtagaatccattagcaacaatagagcaacaatggcgaccaagatattttccctccttatgctccttgctctttctacatgtgttgctaacgcgacaattttccctcaatgctcacaagctcctatagcttcccttcttcccccataccttccatcaattatagcttcagtatgtgaaaacccagctcttcaaccatataggcttcaacaagcaatcgcagcaagcaacatacctttatcgcccttgttgtttcaacaatcaccagccctatctttggtgcagtcattggtacaaaccatcagggcacaacagctgcagcaactcgtgctacctgtgatcaaccaagtagctctggcaaacctttctccctactctcagcaacaacaatttcttccattcaaccaactgtctacactgaaccctgctgcttatttgcagcaacaactattaccatttagccagctagctactgcctactctcagcaacaacaacttcttccatttaaccaattggccgcactgaaccccgctgcttatttgcagcagcaaatactactgccatttagcgagctagctgcagcaagtcgtgct

SEQ ID NO: 12053 - DNA, 667 bp, Zea mays
  Clone ID: LIB3061-095-Q1-K6-D7
taatatcttggtagccattggtgttagccctccttgcgcttcttgcccttttagtgagcgcaacaaatgcgttcattattccacagtgctcacttgctcctagtgccagtattccacagttcctcccaccagttacttcaatgggcttcgaacatccagccgtgcaagcctacaggctacaactagcgcttgcggcgagcgccttacaacaaccaattgcccaattgcaacaacaatccttggcacatctaaccctacaaaccattgcaacgcaacaacaacaacaacagtttctgccatcactgagccacctagccgtggtgaaccctgtcacctacttgcaacagcagctgcttgcatccaacccacttgctctggcgaacgtagctgcataccagcaacaacaacagctgcaacagtttatgccagtgctcagtcaactagccatggtgaaccctgccgtctacctacaactactttcatctagcccgctcgcggtgggcaatgcacctacgtacctacaacaacagttgctgcaacaaattgtaccagctctgactcagctagctgtggcaaaccctgctgcctacttacaacagttgcttccattcaaccaactggctgtgtcaaactctgctgcgtacctacaacagcgacaacagttact

SEQ ID NO: 12054 - DNA, 636 bp, Zea mays
  unsure (1)..(636): unsure at all n locations; Clone ID: LIB3061-095-Q1-K6-D8
nttggagaccaactagcaacatagnaaagcacaatagtgtaccaacaatggcagccaaaatttttgcttccttatgctccttggtctttctgcaagtgttgctaccgcaaccattttcccacaatgctcacaagctcctatagcttcccttcttcccccatacctctcaccagcggtgtcttcaatgtgtgaaaacccaattgttcaaccctacaggatccaacaggcaatcgcaacaggcatcttaccattatcacccttgttcctccaacaaccgtcagccctattacagcagttacctttggtccatttggtggcacaaaacatcagggcacaacaactacaacaacttgtgctagcaaaccttgctgcatactctcagcaacatcagtttcttccattcaaccaactggctgcattgaactctgctgcttatttgcaacaacaattaccattcagccagctagttgctgcctacccccagcaatttcttccattcaaccaactagcagcattgaactctgctgcttatttacagcagcaacaactactaccattcagccagctagctgatgtgagccctgctgccttcttgacacaacaacagttgttgccgttctacctgcacgctatgcc

SEQ ID NO: 12055 - DNA, 655 bp, Zea mays
  Clone ID: LIB3061-095-Q1-K6-D9
cttgctccaagttccattattacacagttcctcccaccagttacttcaatgggcttcgaacacccagctgtgcaagcctataggctacaacaagcaattgcggcgagcgtcttacaacaaccaatttcccagttgcaacaacaatccttggcacatctaacaatacaaaccatcgcaacgcaacagcaacaacaattcctaccagcactgagccacctagccatggtgaaccctgccgcctacttgcaacagcagttgcttgcatcaaacccacttgctctggcaaacgtagttgcaaaccagccacaacaacagctgcaacagtttctgccagcgctcagtcaactagccatggtgaaccctgccgcctacctacaacagcaacaactgctttcatctagcccgctcgctgtggccaatgcacctacatacctgcaacaacaattgttgcaacagattgtaccagctctgactcagctagttgtggcaaaccctgctgcctacttgcaacagctgcttccattcaaccaactgactatgtcgaactctgctgcgtacctacaacagcgacaacagttacttaatccactagcagtggctaacccattggtcgctgccttcctacagcagcaacaattgctgccatacaaccagt

SEQ ID NO: 12056 - DNA, 639 bp, Zea mays
  unsure (1)..(639): unsure at all n locations; Clone ID: LIB3061-095-Q1-K6-E1
cccagcgtccgcggccgcgtgggttttgagcattcagnaaacacaccaagcgtaacgcactagcaacaacctaacaacaatggctaccaagatattatccctccttgcgcttcttgcgctttttgcgagcgcaacaaatgcgtccattattccacaatgctcacttgctcctagttccattattccacagttcctcccaccagttacttcaatggccttcgaacacccagctgtgcaagcctataggctacaacaagcgattgcggcgagcgttttacaacaaccaattgcccaattgcaacaacaatccttggcacatttaacaatacaaaccatcgcaacgcaacagcaacaacagttcctaccagcactgagccacctagccatggtgaaccctgtcgcctacttgcaacagcagctgcttgcatacaacccacttgctctagcaaacgtagttgcaaaccagcaacaacaacaactgcaacagtttctgtcagcgcttagtcaactagccatggtgaaccctgccgtctacctacaacagcaacaactgctttcatctagcccgctcgctgtggccaatgcacctacatccttgcaacaaggattgttgcaacagattggaccagctctaactca

SEQ ID NO: 12057 - DNA, 642 bp, Zea mays
  unsure (1)..(642): unsure at all n locations; Clone ID: LIB3061-095-Q1-K6-E10
tagcaacatagnaaagcacaatagtgtaccaacaatggcagccaaaaattttgcctccttatgctccttggtctttctgcaagtgctgctacggcgaccattttcccgcaatgctcgcaagctcctatagcttcccttcttcccccgtacctctcaccagcggtgtcttcggtatgtgaaaacccaattcttcaaccctacaggatccaacaggcaatcacagctggcatcttacctttatcacccttgttcctccaacaatcatcagccctattacatcagttacctttggtgcatttattggcacaaaacatcagggcacaacaactacaacaacttgtgctagcaaaccttgctgcctactctcagcaacagcagtttcttccattcaaccaactagctgcattgaactctgcttcttatttgcaacaacaacaactaccattcagccagctacctgctgcctacccccagcaatttcttccattcaaccaactggcagcattgaactctcctgcttatttacagcagcaacaactactaccattcagccagctagctggtgtgagccctgctaccttcttgatacaaccacagttgttgccgttctaccagcacgctgcgcctaacgctggcaccctc

SEQ ID NO: 12058 - DNA, 637 bp, Zea mays
  Clone ID: LIB3061-095-Q1-K6-E11
gcgtcgtcgtctagcagcagccaccgccgcctcatcctcgcagccgccgtcctgctctccgtgctcgcggctgccagcgccagcgccgggacctcctgcgtgccggggtgggccatcccgcacaacccgctcccgagctgccgctggtacgtgaccagccggacctgcggcatcgggccgcgcctcccgtggccggagctgaagaggagatgctgccgggagctggcggacatcccggcgtactgccggtgcacggcgctgagcatcctcatggacggcgcgatcccgccgggcccggacgcgcagctggagggccgcctagaggacctgccgggctgcccgcgggaggtgcagaggggattcgccgccaccctcgtcacggaggccgagtgcaacctggccaccatcagcggcgtcgccgaatgcccctggattctcggcggcggaacgatgccctccaagtaactgcgaagagcatagtgcatgaggaatgagcttgtagctagctcatatgtctgaataataagcacagcaagaagatgaatgcatttctcggatcgttcatccggaacaataattaaaggggatccggatttgttcttgtgatataattaacgattcctgttatacttgggtg

SEQ ID NO: 12059 - DNA, 615 bp, Zea mays
  unsure (1)..(615): unsure at all n locations; Clone ID: LIB3061-095-Q1-K6-E12
ngaaaccctacttcgctcgttgcggcggcgagccggcgatggcgaagtctctgcgatccaaacgcgagaagcggcttcggacgttgcgccgggagatagcggagccgttctacgacaagaaggaggccgccaagctcgccgcgcaggccgccgccctagctgctgccccgctcccggtccgcgggcccccgccatcccaggatgccggcagctcccgcgcagctagctcggcctcggctatggatgtggagatgtctgatgcagggaacaacaggtctaagaccttcttgaggccacttggcagcattagcaagaagaaggtgcagcttcatttgaagatcaagaaagacaagagaaaagctaggaagaagggaaagttttcttttaagaagtagaggagtgtatgataaatcatgcagttttgttcccagtttgtaaaacaaacgcactgcagtcatgtcatgtggtgcacctacctaagtccattcgtgggtgacctactattaaatatgttgaaatgggtacgaaaaaagatagtgctgacctatcagctgtttctgttctgcgggtataaatgtcaagtactcaaattgctggagctgnnaccacagnagg

SEQ ID NO: 12060 - DNA, 630 bp, Zea mays
  Clone ID: LIB3061-095-Q1-K6-E2
agcgaaacgcactagcaacgacctaacaccaatggctaccaagatttagccctccttgcgcttcttgcccttttagtgagcgcaacaaatgcgttcattattctacagtgctcacttgctcctagtgccattattccacagttcctcccaccagttacttcaatgggcttcgaacatccagccgtgcaagcctacaggctacaactagcgcttgcggcgagcgccttacaacaaccaattgcccaattgcaacaacaatccttggcacatctaaccctacaaaccattgcaacgcaacaacaacaacaacaacagtttctgccatcactgagccacctagccgtggtgaaccctgtcacctacttgcaacagcagctgcttgcatccaacccacttgctctggcgaacgtagctgcataccagcaacaacaacagctgcaacagtttatgccagtgctcagtcaactagccatggtgaaccctgccgtctacctacaactactttcatctagcccgctcgcggtgggcaatgcacctacgtacctacaacaacagttgctgcaacaaaatgtaccagctctgactcagctagctgtggcaaaccctgctgcctacttacaacagttgctt

SEQ ID NO: 12061 - DNA, 647 bp, Zea mays
  Clone ID: LIB3061-095-Q1-K6-E3
cgctcgctgcgagcgccgcctccagtacaagcggcggctgtggctgccagacaccaccgtttcatctaccgcctccgttctatatgccgcctccgttctatctgccgccgcagcagcagccgcagccatggcaataccccactcaaccaccgcagctaagcccgtgccagcagttcggatcctgcggcgtcggcagcgtcggcagcccgttcctgggccagtgcgtcgagttcctgaggcaccagtgcagcccggcggcgacgccctacggctcgccacagtgccaggcgctgcagcagcagtgctgccaccagatcaggcaggtggagccgctgcaccggtaccaggcgacatacggtgtggtcctgcagtccttcctgcagcagcagccgcagggcgagctcgcggcgctgatggcggcccaggtagcgcagcagctgacggcgatgtgcggtctgcagctgcagcagccaggtccctgcccttgcaacgcagctgccggcggtgtctactactgaggaaactatgtactgtagtaataatgtaatggagccgctgactagctacctatagggctatagctagttcactcgtttagcggcgatgagtaacggagtgtcaccatcaccatgggtggcagtgtgagc

SEQ ID NO: 12062 - DNA, 585 bp, Zea mays
  unsure (1)..(585): unsure at all n locations; Clone ID: LIB3061-095-Q1-K6-E4
ggcgcagntgctccgtggcggggtcatcatggacgtggtgaccccgngacaggcgcgcctcgcggaggaggccggcgcgtgcgccgtgatggcgctggagcgggtccccgccgacatccgcgcgcagggcggcgtggcgcgcatgtcggacccggggctcatccgcgacatcaagcgcgccgtcaccatcccggtcatggccaaggcccgcatcgggcacttcgtggaggcccagatcctggaggccctgggcgtcgactacgtggacgagagcgaggtgctcacccccgccgacgacgcgcaccacatcaacaagcacaacttccgcgtccccttcgtctgcggctgccgcgacctcggcgaggcgctccgcagggtgcgcgagggcgccgccatgatccgcaccaagggggaggccggcacgggcaacgtcgtcgaggccgtgcgccacgtgcgctccgtcatgggcgacgtccgcgcgctccgcagcatggacgacgacgaggtcttcgcctacgccaagcgcatcgccgcgccctacgacctcgtcatgcagaccaagcagctgggccgcctccccgtcgt

SEQ ID NO: 12063 - DNA, 344 bp, Zea mays
  unsure (1)..(344): unsure at all n locations; Clone ID: LIB3061-095-Q1-K6-E6
gttgngcgccgtgcggtgctggtggtggtgggggctggttttctggtccggtggtgctgcttagtttggaacctttggtgttctggtccagtattgttcgggcctactcggggtgacctggggccgttgtgggcctggttgttttcacttntgatgacggtggggcgtggggtggccaagggttaattagtttttgtggtgagggtggtgacctgccctgaggacgtggggggtgtgcacgcggttgtcggttttcttgctggagtgaggtggggttgaccttccatgccgtcgtggtggcgcgcggggtggggaaagtgttgtgttttggggtgttctgggat

SEQ ID NO: 12064 - DNA, 660 bp, Zea mays
  Clone ID: LIB3061-095-Q1-K6-E7
gccttgttgagcgccgtgcggcgatcaagaggtagagccaggccacctggaccagcttctccatcctcagtttgagaacccatcggcgtacaaggaccaagtcattgccacgggcctaccggcgtcacctggggccgctgtgggccaggttgtattcactgctgaggacgctgaaacatggcattcccaagggaaatcagttattctggtgagggcggagaccagccctgaggacgtcggcggcatgcacgcggctgccggaatcctcacagaaagaggtggcatgacctcccatgccgccgtggtggcacgcgggtggggaaaatgctgtgtctcgggatgctctgggattcgtgtaaatgacgcagagaaggttgtgaagattggaggcaatgtgctgcgcgaaggtgagtggctatcgctgaatggatcgaccggcgaagtgatcctcggaaagcagccgctctccccaccagccctcagtggcgatctgggaacattcatgtcctgggtggatgacgttagaaagctcaaggtcctggcaaacgcggatacccctgaggatgcattggctgcgcggaacacggggcagaaggaatcgggttatgccggacagagcacatgttcttcgcttccgatgagaggattaagctgtgaggc

SEQ ID NO: 12065 - DNA, 647 bp, Zea mays
  Clone ID: LIB3061-095-Q1-K6-E8
gcgttctttacgaactagcaacatacaatagtgaatacactagcaacatcttagcaccaatggcagccaagatttttgccatccttgccctccttgctctttcagcaagcgttgctaccgcgactattattccacaatgctcacaacaatacctctctccggtgacagccgcgagatttgaatacccaactatacaatcctacaggctacaagaggccatcgcagcaagcatcttacggtcgttagcattgaccgtccaacaaccatatgccctattgcaacaaccatccttaatgaatctatatctccaaagaatcgcagcacaacaactacaacaacagttgcttccaacaatcaatcaagtagttgcagcgaaccttgctgcttacctccagcaacaacaatttcttccattcaatcaactagctggggtgaaccctgctgcttacttgcaggcacaacagctactaccattcaaccaacttgtcaggagccctgctgccttcttactgcagcaacagttgcttccattccatctacaagttgtggcaaacattgctgctttcttgcaacaacaacaacaattgctgccattttacccacaggttgtgggaaacattaacgccttcttgcacagcaacagttgc

SEQ ID NO: 12066 - DNA, 654 bp, Zea mays
  unsure (1)..(654): unsure at all n locations; Clone ID: LIB3061-095-Q1-K6-E9
gtaggggaanaagggnnagggaagcaagtggaactgtgctagctgttgcggtattctccggaacaatctctcccaggcagcagagcaggtgtgctcagaatatgcagtcatctgcgatggcgttcttccctagcgttgccacggcgaagctggagctgaactctctgtacaggaagtacgtggacatgttcggtgtatcatcaaacaactctaccgttggctctcacaccatccacaagatgtcgcaccttcctgtcctgctggtcgatcgtacattcttcagcaccggtactgctattcagagcattgccatcagctatggagctcttattcgtaggtggttactgggcggaacttctgttgcacagcacacgaacacgatgatatcccgtgctgctatgaactcgcttccttgctgtggcttcctgccattctttgccagcgttggtgctctaatgaccaagctctgtggctgcactatgattccagaccgtttttctggttggcaatctatccttagacaaagtgctaacctccgtggagaaccagttctggtcgtggacaataatgagctgggcaatgatcagatattatcgagctttcttgggcgcaagcgagattacgtcggtctagtgcttcgatgcatctgttact

SEQ ID NO: 12067 - DNA, 489 bp, Zea mays
  unsure (1)..(489): unsure at all n locations; Clone ID: LIB3061-095-Q1-K6-F1
ggcttattattccttattactccaggcaagnatcggagttgctctgaattgactgaaccatggcggcgacaatggcagtgacgacgatggtgaccaggagcaaggagagctggtcgtcattgcaggtcccggcggtggcattcccttggaagccacgaggcggtggcaagaccggcggcctcgagttccctcgccgggcgatgttcgccagcgtcggcctcaacgtgtgcccgggcgtcccggcggggcgcgacccgcgggagcccgatcccaaggtcgtacgggccgccgacaactgcgacatcgcgcgccagcttggcgccgccgttcccgggcagcaggccccctgggaggcggaggaagaggcatccaacaggaggaagcagaagggcggttgcagcaagaagcgcatcagctgggcgatctgagcctgaggaaggtcagggtcaatattcacaacccgcacctgcggcatctggttagcgacgc

SEQ ID NO: 12068 - DNA, 653 bp, Zea mays
  Clone ID: LIB3061-095-Q1-K6-F10
cccgtacctctcaccagcggtgtcttcggtatggtgaaaacccaattcttcaaccctacaggatccaacaggcaatcacagctggcatcttacctttatcacccttgttcctccaacaatcatcagccctattacatcagttacctttggtgcatttattggcacaaaacatcagggcacaacaactacaacaacttgtgctagcaaaccttgctgcctactctcagcaacagcagtttcttccattcaaccaactagctgcattgaactctgcttcttatttgcaacaacaacaactaccattcagccagctacctgctgcctacccccagcaatttcttccattcaaccaactggcagcattgaactctcctgcttatttacagcagcaacaactactaccattcagccagctagctggtgtgagccctgctaccttcttgatacaaccacagttgttgccgttctaccagcacgctgcgcctaacgctggcaccctcttacaactgcaacaattgctgccattcaaccaacttgctttgacaaacccagcagcgttctaccaacaacccatcattggtggtgccctcttttagatttcttatgagttatagttcaataataaagttttttgtctgatgtttgtggcttcc

SEQ ID NO: 12069 - DNA, 391 bp, Zea mays
  Clone ID: LIB3061-095-Q1-K6-F11
aaaaaaaaaagggggggggggggggtttttttttttggggggggccccattcttttaaaaaaaatttttttttgggttcccccccttaataaaaaaaaaaagggggggcccttttgggggtaaaaatttcttggcgggggggggggaaattaattttttttttttggggccccaaaaaaaaaattagggggcggggttttcaaacccggggggggggaaaacccggggggcccccaaaaaaaagggtgggagaaaaaccccctttttgcccgggggggaaaaaaaaaagggggcccccccaatcctccttttaaaatattggcgccccttagggggggagggggcccccccttgggggggattataaacgggggggggggggggtgtcccc

SEQ ID NO: 12070 - DNA, 509 bp, Zea mays
  Clone ID: LIB3061-095-Q1-K6-F2
ctctcctgtctctcttctctctctctctctgtctgtctgtctggcaaagggcactgacggccgcggcggtgtcgatggagtggtggcagaaggcggtggtggtgccggtgaagcgcgcgtggatcgccgccgccgcccggctgacgacgcgacataagaaagaagacggcggccacggcgtcctggtgaagctccacgacgacgtccagacgtgcgcgtacgaggacgtgcaggtgatgtgggagatgctgcatcgggccgagacggagaggctggcgcgcgagccctctccaaagggcgcgcgcgcgctcgtctggctgcgccgtcaccacaagatggacccgcgccggctctgctgaggaggaggacgacgacgacaccctgatgctgttccttcctgctgctgccccttcagctttgcttgccagctgccgtgccaccctgtgcagccttgccctgtgatgctagagcctgtcatctgctgctgtgtgtacatattacatgctaca

SEQ ID NO: 12071 - DNA, 648 bp, Zea mays
  unsure (1)..(648): unsure at all n locations; Clone ID: LIB3061-095-Q1-K6-F3
canaaacacaccaagcgaacgcactagcaacgacctaacaacaatggctaccaagatattagccctccttgcgcttcttgccctttttgtgagcgcaacaaatgcgttcattattccacaatgctcacttgctcctagtgccattattccacagttcctcccaccagttacttcaatgggcttcgaacacctagctgtgcaagccaacatgcaacaacaagcgcttgcggcgagcgtcttacaacaaccaattgcccaattgcaacaacaatccttgccacatctaacaatacaagccatcacaacgcaacagcaacaacagttcctaccagcactgagccacctagccatggtgaaccctgccgcctacttgcaagagcagctgcttgcatccaacccacttgctctggcgaacgtagttgcaaaccagcaacaacaacagctacaacagtttctgccaacgctcagtcaactagccatggtgaaccctgccgcctacgtacaacaacaacaactgctttcatctagcccgctcgctgtgggcaatgcacctacatacctgcaacaacaattgttgcaacagattgtaccagctctgactcactagctgtggcaaaccctgttgcctacttgcaacagctgctttca

SEQ ID NO: 12072 - DNA, 630 bp, Zea mays
  unsure (1)..(630): unsure at all n locations; Clone ID: LIB3061-095-Q1-K6-F4
ttggnagttcaagtgatgaagaggctgatgatgagtggactgacaagagtgctaaggaaccagcatccagtgcttcaggtagggcagcatctggcatgtcaagtgatgaaaagaaccagcgtcagagagatgctcgagttcttatgccgccaccacgctcattagccccaaatagaggcagacatgcagataaacgtgcgatatccagctcgagcagtacttcaaacagcacaagcggcgaatcatttaaaaatagaagagtaccaaatcgtcccggggataataacagtaatctgagctcaaattctgatgttcataaaccacggcgcaaaaggaggcataagaagaaaagaaagctgcaggcatgatgaatattcccaaagcgcgtgaactgtgggggtccggtggaaattcagattcccagcgaagtttggactttgagcatggccaatttggagaagttgaaaaaaaaatagacacagcatgtgcgatgtgtctgagcaagttgattgattctgtatcctcactcctaaaacgactgtacatccatctgttcatggatatcacttgcggtaccgaatgcttgtccatcatttccgccgtgaaattatgtatgtttttttctctctc

SEQ ID NO: 12073 - DNA, 581 bp, Zea mays
  Clone ID: LIB3061-095-Q1-K6-F6
attcagaaacacaccaagcgaactacctagcaacgacttaacaacaatggctaccaagatattagccctccttgcgcttcttgccctttttgtgagcgcaacaaatgcgttcattattccacaatgctcacttgctcctagtgccattataccacagttcctccgaccagttacttcaatgggcttcgaacacctagctgtgcaagcctacaggctacaacaagcgcttgcggcgagcgtcttacaacaaccaattaaccaattgcaacaacaatccttggcacatctaaccatacaaaccatcgcaacacaacagcaacaacagttcctaccagcactgagccaactagatgtggtgaaccctgtcgcctacttgcaacagcaggtgcttgcatccaacccacttgctctggcaaacgtagctgcataccaacaacaacaacaattgcaacagtttctgccagcgctcagtcaactagccatggtgaaccctgccgcctacctacaacagcaacaactgctttcatctagccctctcgttgtgggtaatgcacctacatacctgcaacaacaattgctgc

SEQ ID NO: 12074 - DNA, 493 bp, Zea mays
  Clone ID: LIB3061-095-Q1-K6-F8
gcagcttctgcttgctctggggggaaggagagagagagagcgagagagagagagagatctagtagagaggctagtaggtggtcctcgaacgaagatgttggcggtgttcagcgggcaggtggtggaggtgccggcggagctggtggcggcgggcagccggacgccgtcgcccaagtacgaaggcgtcgcagctcgtggggcgcttcctggccgcgtccgagccggccgtgtccgtgcagctcggcgaccacggccacctcgcctactcccacaccaaccaggcgctcctccgccccaggtcgttcgcggccaaggacgaggtgttctgcctgttcgaaggggtgctggacaacctgggtcggctgagccagcagcacgggctgtcaagcaagggcgccaacgaggtgctcctcgtcatcgaggcctacaaaacgctgcgcgaccgcgcgccctacccggccagcttcatgctcgcccagctcaccggctacta

SEQ ID NO: 12075 - DNA, 566 bp, Zea mays
  unsure (1)..(566): unsure at all n locations; Clone ID: LIB3061-095-Q1-K6-G1
tctgcctctcttctcgttctgcttcttcaggtgtggtgctcagcttggtggggatttgggatcctcgaaccaggcccttgatgggattcttgggttcggccagtcggattcgtcgatgctatcgcagttggctgctgctcgtagagtgaggaagatttttgctcactgcttggacactgtgcgtggtggtggcattttcgctatcgggaatgtggtacagcccaaagtaaagacgacgccgttggtgcccaacgtgacacactacaatgtcaatctgcaaggaatttgtgttggtggtgctacacttnagcttncaacaagtacttttgattcgggtgacagtaaaggcactattattgacagtgggacaacactggcatattttncgagggaagtttataggactatgttggttgnggtctttgataagtaccaagatctggccttacataattatgaagactttgtgtgttttcaattttntggaagtatagatgatggattttccgtgattacctttagttttgagggagaccttacactgaatgtttaaacagatgattacc

SEQ ID NO: 12076 - DNA, 648 bp, Zea mays
  unsure (1)..(648): unsure at all n locations; Clone ID: LIB3061-095-Q1-K6-G10
gggnaacgtcaactgcatgatatttcattacaatttgttcatgaaagatgagcaccttcatttcatctcagaaagatctcctcatttaaaacggttggttatgccagcatggaaccgcatcaccaaagtgggaatatgtaatgctatccaaaggtggcaggcgctggagtccttgacaatgcctaccatcggacatcctccatatattatggaagagatagcaaggagctgcaagaatttcacagaacttaagatcatgggctcatttgatcaacaatttgcctcggcgattttgcagttccttccaaagctgaaagtgctgagccttcgttgctcgaaggtgtccatggatgcactgcaatgtttgctgaactcgatggagtatcttgaggttctgaatatttcacactgcctgctgttggttgtggcggcaaatgggcggaagcaagtggttcatgaactggacagccaaattctcgagagagcttcacggctgcgtgaattccactactgccaaagtaggttgtgcgtcgcgtgccagcggatggtggtggatgaaggcatcatgcgctggtacaggtacgaggattggttttggcgtcgggatgaggtgaggtcccttgatctgcaagatatgggaagctgttt

SEQ ID NO: 12077 - DNA, 640 bp, Zea mays
  Clone ID: LIB3061-095-Q1-K6-G11
gtccacacatcgaggtggatctatgggcagatatatattccagaaataaattggattcttatggttctttgcgtcgctgtcactattgcatttcgtgatactactcttattggcaatgcctacggtattgcatgcatgactgttatgcttgttactaccttcttgatggcattaatagtcatctttgtttggcaaaggaacataatattttccctagttttcctggttttctttggatccattgaagctgtatatctttcgtcatctctcatgaaggttcctcagggaggatgggtgcctcttgtgcttgcattcatattcatgtcagtcatgtacatctggcactatgggtcaaggaggaagtaccagtttgacctacagaacaaagtatcaatgagatccatcctatctctcggtccaagccttggcatagttcgggttcctggtgttggattgatttacacagagctggtcactggtgtaccctccatcttctcccattttgtcacgaatctccctgccttccatgaagttctagtctttctctgtgtgaagtcagtgccagtgccatatgtttcaccagatgagcgataccttgtgggtaggattggacctaaaaatatcggatgtaccgttgcat

SEQ ID NO: 12078 - DNA, 659 bp, Zea mays
  unsure (1)..(659): unsure at all n locations; Clone ID: LIB3061-095-Q1-K6-G12
ngtatctactgagtgttcctcaagacactccctactcggagttcaaccataggttccaagagcttggcttggagaagggttggggtgacactgcgaagcgtgtactcgacacactccacttgcttctcgaccttctggaggcccctgatcctgccaacttggagaagttccttggaactataccaatgatgttcaacgttgttatcctgtctcctcatggctacttcgcccagtccaatgtgcttggataccctgacactggcggtcaggttgtgtacattctggatcaggtccgtgctttggagaatgagatgcttctgaggattaagcagcaaggccttgatatcactccgaagatcctcattgttaccaggctgttgcctgatgctgctgggactacgtgcggtcagcggctggagaaggtcattggtactgagcacacagacatcattcgcgttcccttcagaaatgagaatggcatcctccgcaagtggatctctcgttttgatgtctggccatacctggagacatacactgaggatgtttccagtgaaataatgaaagaaatgcaggccaagcctgaccttatcattggcaactacagcgatggcaacctagtcgccactctgctcgcgcacaagttgggagtcactcagtgt

SEQ ID NO: 12079 - DNA, 528 bp, Zea mays
  Clone ID: LIB3061-095-Q1-K6-G2
cgtcctccctcgccttcgcctcgccggcaggagatttccaccaccaccgccggaccaccccgaccctccttccctctcgcgctatggcccagactgttgtgctcaaggttggcatgtcctgtgagggctgtgttggagctgtcaagcgggtcctgggcaagatggaaggcgtcgagtcctacgacgtagacatcatggaacagaaggtcaccgtgaagggcaatgtgacacctgacgccgtcctgcaaactgtttccaagactggcaagaagacttcgttctgggaggctgaggccgtgacaagtgaatccgccacacctgccggcgccaccgcctgacaggttcgatgatctggaagtgcccagcaaaaaaatgtgaatgtatttagcttggatctgttacaaataattgcaaactgctagctcggtctgtacattttacagttgctatttgtatactgtgatgttctcgtatgtttgtggaggcgataaaccaatatttgtatgatatatgtgtcgtgttcctttt

SEQ ID NO: 12080 - DNA, 595 bp, Zea mays
  Clone ID: LIB3061-095-Q1-K6-G3
ctggaagttcaagtgatgaagaggctgatgatgagtggactgacaagagtgctaaggaaccagcatccagtgcttcaggtagggcagcatctggcatgtcaagtgatgaaaagaaccagcgtcagagagatgctcgagttcttatgccgccaccacgctcattagccccaaatagaggcagacatgcagataaacgtgcgatatccagctcgagcagtacttcaaacagcacaagcggcgaatcatttaaaaatagaagagtaccaaatcgtcccggggataataacagtaatctgagctcaaattctgatgttcataaaccacggcgcaaaaggaggcataagaagaaaagaaagctgcaggcatgatgaatattcccaaagcgcgtgaactgtgggggtccggtggaaattcagattcccagcgaagtttggactttgagcatggccaatttggagaagttgaaaaaaaaatgacacagcatgtgcgatgtgtctgagcaagttgattgattctgtatcctcactcctaaaacgactgtacatccatctgttcatgaatatgacttgcggtcccgaatgctagtccatcattt

SEQ ID NO: 12081 - DNA, 592 bp, Zea mays
  Clone ID: LIB3061-095-Q1-K6-G4
gcaacaatagaagcacaatagtgtaccaacaatggcagccaaaaattttgcctccttatgctccttggtctttctgcaagtgctgctacggcgaccattttcccgcaatgctcgcaagctcctatagcttcccttcttcccccgtacctctcaccagcggtgtcttcggtatgtgaaaacccaattcttcaaccctacaggatccaacaggcaatcgcagctggcatcttacctttatcacccttgttcctccaacaatcatcagccctattacaacagttacctttggtgcatttattggcacaaaacatcagggcacaacaactacaacaacttgtgctagcaaaccttgctgcctactctcagcaacagcagtttcttccattcaaccaactaggttcattgaactctgcttcttatttgcaacaacaacaactaccattcagccagctacctgctgcctacccccagcaatttcttccattcaaccaactagcagcattgaactctcctgcttatttacagcagcaacaactactaccattcagccagctagctggtgtgagccctgctaccttcttgacacaaccac

SEQ ID NO: 12082 - DNA, 647 bp, Zea mays
  unsure (1)..(647): unsure at all n locations; Clone ID: LIB3061-095-Q1-K6-G6
gngaaccaacaagcaacatagnaaagtggnaatccagtagcaacaatagagcaacaatggcgaccaagatactttccctccttatgctccttgctctttctgcatgtgttgctaacgcgacaattttccctcaatgctcacaagctcctatagcttcccttcttcccccataccttccatcaatgatagcttcagtatgtgaaaacccagctcttcaaccctataggctccaacaagcaatcgcagcaagcaacatacctttatcacccttgtttcaacaatcgccagccctatctttggtgcagtcattggtacaaaccatcaaggcacagcagctgcagcaactcgtgctacctgtgatcaaccaagtagctctggcaaacctttctccctactatcagcaacaacaatttcttccattcaaccaactatctacactgaaccctgctgcttatttgcagcaacaactattaccattcagccagctagctactgcctactctcatcaacaacaacttcttccatttaaccaattggccgcactgaacctcgctgcttatttgcagcagcaaatattactaccatttagccagctagctgcagcaagccgtgcttccttcttgacacagcaacagttgctgcctttc

SEQ ID NO: 12083 - DNA, 627 bp, Zea mays
  unsure (1)..(627): unsure at all n locations; Clone ID: LIB3061-095-Q1-K6-G7
gcaacatagnaaagcacaatagtgtaccaacaatggcagccaaaatattttgcctccttatgctccttggtctttctgcaagtgctgctacggcgaccattttcccgcaatgctcgcaagctcctatagcttcccttcttcccccgtacctctcaccagcggtgtcttcggtatgtgaaaaacccaattcttcaaccctacaggatccaacaggcaatcgcagctggcatcttacctttatcacccttgttcctccaacaatcatcagccctattacaacagttacctttggtgcatttattggcacaaaacatcagggcacaacaactacaacaacttgtgctagcaaaccttgctgcctactctcagcaacagcagtttcttccattcaaccaactaggttcattgaactctgcttcttatttgcaacaacaacaactaccattcagccagctacctgctgcctacccccagcaatttcttccattcaaccaactagcagcattgaactctcctgcttatttacagcagcaacaactactaccattcagccagctagctggtgtgagccctgctaccttcttgacacaaccacagttgttgccgttctaccaacacgttgcgcct

SEQ ID NO: 12084 - DNA, 584 bp, Zea mays
  unsure (1)..(584): unsure at all n locations; Clone ID: LIB3061-095-Q1-K6-G8
caagnaattccctcccctagccgccgccgccgccgctcgtctccctgagaggtgccgggaccgaggaactggccgagtactaggtagagaatcggtttttcttgtctcagcccggggtctgctgcgtctggtggtggtgaaggggagaaattcgtgagatctgttccggatcaggcgtgcgagctcgggaatcaggggtttcacacatagcttcgtcgatttgaatttgatgtactaatggagtctaagggtggcaaaaagtctagcagtagtcgttctatgatgtatgaagctccccttggctacagcattgaggacgttcgacctgccggaggcgtgaagaagttccagtctgctgcttactccaactgcgcgaagaagccatcctgatatcccttttggcttcctcattctagtagtttaggatttcttttctgacactttgattctgaccaatctctctggcctgctgcttcctgataatcgaccagttccccagtcttgctccttgcactcctccctccatcttcagcattgtgttctgattcacctgctccaatagctgttctttctgctgctgatgc

SEQ ID NO: 12085 - DNA, 259 bp, Zea mays
  Clone ID: LIB3061-095-Q1-K6-H1
tacagcacgaatctcgtttaggagaagcggagcgcccaatcggtgcaagcatcatggagtacggtcagcaggggcagcgcggccacggcgccactggccatgtcgaccagtacggcaacccagtcggcggcgtcaagcacggcaccggcggaatgaggcacggcacgggaaccggcggcggcatgggccaaatgggtgagcacggcggagctggcatgggtggaaggcagatacagcctgcgagggaggagtacaagac

SEQ ID NO: 12086 - DNA, 664 bp, Zea mays
  unsure (1)..(664): unsure at all n locations; Clone ID: LIB3061-095-Q1-K6-H10
gcaacatagnaaagcacaatagtgtaccaacaatggcagccaaaatttttgcctccttatgctccttggtctttctgcaagtgctgctacggcgaccattttcccgcaatgctcgcaagctcctatagcttcccttcttcccccgtacctctcaccagcggtgtcttcggtatgtgaaaacccaattcttcaaccctacaggatccaacaggcaatcacagctggcatcttacctttatcacccttgttcctccaacaatcatcagccctattacatcagttacctttggtgcatttattggcacaaaacatcagggcacaacaactacaacaacttgtgctagcaaaccttgctgcctactctcagcaacagcagtttcttccattcaaccaactagctgcattgaactctgcttcttatttgcaacaacaacaactaccattcagccagctacctgctgcctacccccagcaatttcttccattcaaccaactggcagcattgaactctcctgcttatttacagcagcaacaactactaccattcagccagctagctggtgtgagccctgctaccttcttgatacaaccacagttgttgccgttctaccagcacgctgcgcctaacgctggcaccctcttacaactgcaacaattgctgcca

SEQ ID NO: 12087 - DNA, 636 bp, Zea mays
  unsure (1)..(636): unsure at all n locations; Clone ID: LIB3061-095-Q1-K6-H11
nccagctatggttatcttggaagtgtagaagctggtaaaaaatgatgacaagaatgattcaactgtgcagctaaatgtttcaactgaatctcgagttttcgaagaacaaaaggaagtacaaagttgatattcttcgatgtgagagcttaacctcacttgccccggctacattagaacggctattccttcgggactatgacattattgtgtcgatggttcctcttccttcttcatcagttcttccaggcccttcaggcccaattcattttggaccaccatcttattcctccatgacaccttggatgaagctagtactgtatacagcaggacattgtggaccagtatctgctgtgttcatgaaagggctacgttttagattgctgcctgaaccattagctggttgtgagaaggcactgctatggtcttgggatggctctgtggtgggtggattatggggaaagtttgaagggaacttactgaagggcaacttattgttacactgcttgaattcgatgctgaaacaatctgctgtactggtgcaaccacttagtatacatgatcttgatacgtaggaaaccttgtcactgtggatatccctttacccctaaaaaatgatgatcagtcaattgaatctgt

SEQ ID NO: 12088 - DNA, 655 bp, Zea mays
  Clone ID: LIB3061-095-Q1-K6-H12
gtagcaaagcacaatagtgtaccaacaatggcagctaaaatattttgcctccttatgctccttggtctttctgcaagtgctgctacggcgaccattttcccacaatgctcacaagctcctatagcttcccttcttcccccgtacctctcaccaacggtgtcttcggtatgtgaaaacccaattcttcaaccctacaggatccaacaggcaatcgcagctggcatcttacctttatcacccttgttcctccaacaatcatcagccctattacagcagttacctttggtgcatttattggcacaaaacatcagggcacaacaactacaacaacttgtgctagcaaaccttgctgcctactctcagcaacagcagtttcttccattcaaccaactagctgcattgaactctgcttcttatttgcaacaacaacaactaccattcagccagctatctgctgcctacccccagcaatttcttccattcaaccaactgacagcattgaactctcctgcttatttacagcagcaacaactactaccattcagccagctagctggtgtgagccctgctaccttcttgacacaaccacagttgttgccgttctaccagcacgctgcgcctaacgctggcaccctcttacaactgcacattgctg

SEQ ID NO: 12089 - DNA, 404 bp, Zea mays
  unsure (1)..(404): unsure at all n locations; Clone ID: LIB3061-095-Q1-K6-H2
ngaaacagtagcgacagctcgacaaantttgtgagagtgatccggcgctgagaagagaggctaagatcgccgcagccgccgcggcggcggcggcgctgtgcttcgcggccctggtggccgtggccgtctgccaaggcgaggtcgagcggcagaggctcagggacctgcagtgctggcaggaggtccaggagagcccgctcgacgcgtgccgccaggtcctcgaccggcagctaaccggcggcggcgtcagcggcccgttccggtggggcaccgggctccggatgcggtgctgccagcagctccaggacgtgagccgcgagtgccgttgcgccgccatccggagcatggtcaggggctacgaggaggccatgccgtctctggagaaaggctggtggccatggggg

SEQ ID NO: 12090 - DNA, 389 bp, Zea mays
  Clone ID: LIB3061-095-Q1-K6-H3
gatggttcgggctatcgttgcctacccaatgagactgccacccgcgatcctacatgaacatggcttagctacgacaaggatgtacttctaatatctggaaggcctcgctacttgataaaaagaaatcactaccaggtgacacaaggattggagtgtatacaaagtctgtcacagttagtctggttgacacacaaccaagcctgcaatgtgtctaaaaatatcgtcgccacaatgaagaggaaggaaggacaaattaataaagaactttgtacctacgacaatgcagacccggatctacgatgggaacaatagatgatgagcaaagtttaataatatcccatgatgaataacaataccgtcgtgctgatggcatttcagattcatactca

SEQ ID NO: 12091 - DNA, 349 bp, Zea mays
  Clone ID: LIB3061-095-Q1-K6-H4
cataacgttaaccgtaaaaaatttggcaactgcaaagcaaactgagagtgcccagtaatgttgcaggtctatcaccgccaagctattcagctggagtgcagtctgagggactggatgacctttcacattcccataagtttgccgttggtactagagttcaagctgtgtggagtgaagatggagaatggtataatgcaaccgttgaagctttgacaccaaatggatactatgtagcctacgatggctggggaaacagggaagaggtggacccagataatgttaggctgcttgaggaagaagcagctgatgccttgggacaagctgaaaaggaagctaaaacttcaaaaat

SEQ ID NO: 12092 - DNA, 692 bp, Zea mays
  unsure (1)..(692): unsure at all n locations; Clone ID: LIB3061-095-Q1-K6-H5
ccggtaccggcccattcccggngcttagcaacatagnaacgcacaatagtgtaccaacaatggcagctaaaatattttgcctccttatgctccttggtctttctgcaagtgctgctacggcgaccattttcccacaatgctcacaagctcctatagcttcccttcttcccccgtacctctcaccaacggtgtcttcggtatgtgaaaacccaattcttcaaccctacaggatccaacaggcaatcgcagctggcatcttacctttatcacccttgttcctccaacaatcatcagccctattacagcagttacctttggtgcatttattggcacaaaacatcagggcacaacaactacaacaacttgtgctagcaaaccttgctgcctactctcagcaacagcagtttcttccattcaaccaactagctgcattgaactctgcttcttatttgcaacaacaacaactaccattcagccagctatctgctgcctacccccagcaatttcttccattcaaccaactgacagcattgaactctcctgcttatttacaggcagcaacaactactaccattcagccagctagctggtgtgagccctgctaccttcttgacacaaccacaattgttgcctgtctaacaaaactctgcgcctaacgcttgcaccctttttacaactgaaacaattgccta

SEQ ID NO: 12093 - DNA, 600 bp, Zea mays
  unsure (1)..(600): unsure at all n locations; Clone ID: LIB3061-095-Q1-K6-H7
tactccggctgatagactggggtcttgctgaattctatcatcctggcaaggaatataatgtccgtgttgcatccaggtacttcaaggggcctgagcttcttgttgacttgcaagattatgattattctttggacatgtggagtctgggctgcatgtttgctgggatgatttttcgtaaggaaccatttttctacgggcatgacaaccacgatcaacttgttaagatagccaaggtacttgggacagatgggctgaatgcttatttgaacaagtacagaattgagcttgaccctcagcttgaagccctcgttggaaggcatagcaggaaaccctggttaaagtttatgaatgcagataaccagcacctagtgtctcctgaggccatagatttccttgacaagcttttgcgttatgatcatcaggagaggcttactgcacttgaagctatgacgcacccgtacttccaacaagtgagagccgctgagaacagcaggacgcgagcgtgacatgcaaagagcgaagaccatctgctcttttatcagtcagtcaggttgtatgagatgagtagcccttgggtcacttggcagnaaataaacaata

SEQ ID NO: 12094 - DNA, 536 bp, Zea mays
  Clone ID: LIB3061-095-Q1-K6-H8
gcagcttctgcttgctctggggggaaggagagagagagagcgagagagagagagagatctagtagagaggctagtaggtggtcctcgaacgaagatgttggcggtgttcagcgggcaggtggtggaggtgccggcggagctggtggcggcgggcagccggacgccgtcgcccaagacgaaggcgtcgcagctcgtggggcgcttcctggccgcgtccgagccggccgtgtccgtgcagctcggcgaccacggccacctcgcctactcccacaccaaccaggcgctcctccgccccaggtcgttcgcggccaaggacgaggtgttctgcctgttcgaaggggtgctggacaacctgggtcggctgagccagcagcacgggctgtcaagcaagggcgccaacgaggtgctcctcgtcatcgaggcctacaagacgctgcgcgaccgcgcgccctacccggccagcttcatgctcgcccagctcaccggcttctacgccttcgttctcttcgacaagtccaacaacttcctgcttgtcg

SEQ ID NO: 12095 - DNA, 632 bp, Zea mays
  unsure (1)..(632): unsure at all n locations; Clone ID: LIB3061-095-Q1-K6-H9
ctgtacgagggcattgacttctactccaccatcacccgtgccaggtttgaggagctcaacatggacctgttcaggaagtgcatggagcctgttgagaagtgcctgagggatgccaagatggacaagagcagcgtccatgatgttgtccttgttggtggctccactaggatccccagggtgcagcagctgctccaggacttcttcaacggcaaggagctgtgcaagaacatcaatcctgatgaggccgttgcctatggtgctgccgtccaggccgctatcctcagtggtgagggcaacgagaaggtgcaggacctgcttctgcttgacgtcactcctctctctctgggtctggagactgccggaggagtgatgaccgtccttatcccgaggaacaccaccatccccaccaagaaggagcaggtgttctccacctactcggacaaccagcctggtgtgttgatccaggtgtacgagggtgagaggacccggacccgcgacaacaacctgcttgggaagttcgagctctccggcatcccaccggctcctcgtggtgtcccccagatcacggtctgcttcgacatcgacgccaacggcatcctgaacgtgtctgccgaggacagnacgacggggca

SEQ ID NO: 12096 - DNA, 647 bp, Zea mays
  unsure (1)..(647): unsure at all n locations; Clone ID: LIB3061-096-Q1-K6-A1
acaatagtgtaccaacaatggcagccaaaatattttgnctacttatgctccttggtctttttggaagtgctggtacggggaccattttcccgaaatgctcgcaagctcctatagcttaccttcttcccccgtacctattaccagcggtgtcttcggtatgtgaaaacccaattattcaaccctacaggatccaacaggcaataacaggtggaatattacctttataacccttgttccttcaacaataattagtcctattacatcagttacctttggtgcatttattggtacaaaacattagggcacaacaactacaacaacttgtgctagcaaaccttgctgactactgtaagcaacagcagtttctttcattcaaccaactaggtgaattgaactctgtttgttatttgcaacaacaacaactaccattcagccagctacctgctgcctacccccagcaattttttccattcaaccaactggcagcattgaactcttctgcttatttacagtagcaacaactactaccattcagccagctagctggtgtgagccctgctaccttcttgatacaaccacagttgttgccgttctaccagcacgctgcgcctaacgcttgcacccttttacaactgcaacaattgctg

SEQ ID NO: 12097 - DNA, 653 bp, Zea mays
  unsure (1)..(653): unsure at all n locations; Clone ID: LIB3061-096-Q1-K6-A11
attgagaccaactagcaacatagnaaagcacaatagtgtaccaacaatggcagccaaaatttttgcctccttatgctccttggtctttctgcaagtgctgctacggcgaccattttcccacaatgctcacaagctcctatagcttcccttcttcccccgtacctctcaccagcggtgtcttcggtatgtgaaaacccaattcttcaaccctataggatccaacaggcaatcgcagctggcatcttacctttatcacccttgttcctccaacaatcatcagccctattacagcagttacctttggtgcatttattggcacaaaacatcagggcacaacaactacaacaacttgtgctagcaaaccttgctgcctactctcagcaacaacagtttcttccattcaaccaactagctgcattgaactctgcttcttatttgcaacaacaacaactaccattcagccagctatctgctgcctacccccagcaatttcttccattcaaccaactgacagctttgaactctcctgcttatttacagcagcaacaactactaccattcagccagctagctggtgtgagccctgctaccttcttgacacaaccacaattgttgccgttctaccagcacgctgcgcctaacgctggcaccct

SEQ ID NO: 12098 - DNA, 662 bp, Zea mays
  unsure (1)..(662): unsure at all n locations; Clone ID: LIB3061-096-Q1-K6-A12
tacaagcaacatagnaagtggaatacagtagcaacaatagagcaacaatggcggccaagatattttccatccttatgctccttgctctttctgcatgtgttgctaacgcgaccatttttccagtatactcacaagctcctatagctgcccttcttcccccataccttccatcaatgaccgcttcagtttgtgaaaacccagcccttcaaccctacaggctccaacaagcaatcgcaacaagcaacttacctttatcacccctgttctttcaacaatcgccagccctatctttggtgcagtcattggtacaaaccatcagggcacaacagctgcaacaactcgtgctaccagtgatcagccaagtagctctggcaaacctttctccctactctcagcaacaacaatttcttccattcaaccaactgtctacactgaaccctgctgcttatttacaacaacaacaactactaccattcagccagctagctactgcctactctcagcagcaacaatttcttccatttaaccaattggccgcactgaacccctctgcttatttccagcagcaaatactactaccatttggccagctagctacaacaagccccacttcctttttgaaacaacaacaattgctttcgttctaccagcagtttgtggct

SEQ ID NO: 12099 - DNA, 628 bp, Zea mays
  unsure (1)..(628): unsure at all n locations; Clone ID: LIB3061-096-Q1-K6-A2
ccgaggtgagagagcccaggcgatccaattccaccctcgttctcaggcactgtcacacagacacagctgacctgccactgccaggaaagtaggtcgaggatgccccgcagcggcttctcggggtccttcaggtcgcccaagatcgacgtcgtcatcgacatgggaaaccccttcctcaaccgcaccgtcgacggcttcctcaagatcggcgccgtcggcgcctgcaaggtggctgccgaggagaccttcgagtgcctccacaggggggatgtttcgaagcacaaggttgagcatgccctgaggaagatgtgcaaggagggcgcatattggggcactgttgctggagtttatgtgggcatggtgtacggcgtggaaagggtccgtggccgcagtgactggaagaacgcgatgatcgggggcgccttgtccggcgccctgatctccggcgccagcaacagcgacagaggcaaggtcgtcaaggacgccatcaccgccggcgcggtcgccacagccgtcgagttcatcaactgcattacctagccgagcaaggagcaactgcatttgcagtgccattgtcgtgcaaatatgaataanatacttgccatgtccagctcataaaccactccac

SEQ ID NO: 12100 - DNA, 248 bp, Zea mays
  Clone ID: LIB3061-096-Q1-K6-A3
atcttattcaccgacgactactaacagcgtccggcccgtacgccgagcagccaacccagcgggcacgatgcaggcccacggtatacacatccgcgcccgcgggccggtggtggcgacgcaggcctccgtgcgccgacggtaatgccgtatgactgcggcggtggtcggcgcgctcgccgcgcgagcttgtgtgacgcactctatgccggcggagaaggcggatgtgtaccgctcgctggagggatcgg

SEQ ID NO: 12101 - DNA, 680 bp, Zea mays
  Clone ID: LIB3061-096-Q1-K6-A4
cccggtcgacccagcgtccgcttttaagcatttcaatcccatccagactcaagtattcactgtcttgtataacagcgatgacagcgtgttggtcgctgcaccaacaggcagtgggaagacgatatgtgcagagtttgctatactaaggaaccaccagaaggcattgtctggcgagagcaacatgcgggttgtttatatagctcccattgaagctctcgcaaaagaaagatacagggactgggagcggaaatttggagagtttgccaaggtagttgagctcactggtgaaacggcagctgatttgaagtttctggataaaggtgaaatcataatcagtactcctgaaaagtgggatgcattgtctcgccggtggaaacagcgaaagcacatccaacaggtcagcttattcatagttgatgaacttcatctacttggatctgataagggacatgttttggaagtcattgtatctaggatgaggcgtatttccagtcatattggcagtaacatacggatcgtagcactttcagcatcacttgctaatgctaaagatcttggtgaatggattggtgccacctctcatggccttttcaacttccctccagcagtgagacctgtgccactggaaattacatccaggtgtggatatagcgaactttgaggcaagatgcaagcatgac

SEQ ID NO: 12102 - DNA, 639 bp, Zea mays
  unsure (1)..(639): unsure at all n locations; Clone ID: LIB3061-096-Q1-K6-A6
gttgtaacgagagcccattgctacaggaggtgacgagggaggaggcggagtatgaggaggacctcatgatagtggcggacgagatgacaagaggctcgtcgtcgtcgccaccacaaaattagctttgtgtagattgattgtaggtgangaaagacaaggagactatttagtttctcatcattcatctatctcttagctagctacttcatcattgtccatatgaccgattctacgattgaaatgagaggaataggatagattgtcaaagtcactcatcaaatatagtgcaaaacaacaacgatatcctgtcgtggacccaaacaagtaggagtaagccccgctcgaataattacatcacaatgcatgtgcattgtactagtgttccctttatttgaaaccattctcctctcatccttaacaaatgtgattttagggaatatacaacccaattaaatgaggggtcttttgaggggtctatgggggctaagtgaaaaaaactacatgactctctatatacattgtgccttgattgcatttatgatctacatacttagggttatatgttttatcatgtagtcttttagttgtcttttgtactaaactaatctatatcctgcattatatgaatattacaaacct

SEQ ID NO: 12103 - DNA, 653 bp, Zea mays
  unsure (1)..(653): unsure at all n locations; Clone ID: LIB3061-096-Q1-K6-A7
caacagcacatanaagtggaatccagtagcaacaatagagcaacaatggcgaccaagatactttccctccttatgctccttgctctttctgcatgtgttgctaacgcgacaattttccctcaatgctcacaagctcctatagcttcccttcttcccccataccttccatcaatgatagcttcagtatgtgaaaacccagctcttcaaccctataggctccaacaagcaatcgcagcaagcaacatacctttatcacccttgtttcaacaatcgccagccctatctttggtgcagtcattggtacaaaccatcaaggcacagcagctgcagcaactcgtgctacctgtgatcaaccaagtagctctggcaaacctttctccctactatcagcaacaacaatttcttccattcaaccaactatctacactgaaccctgctgcttatttgcagcaacaactattaccattcagccagctagctactgcctactctcatcaacaacaacttcttccatttaaccaattggccgcactgaacctcgctgcttatttgcagcagcaaatattactaccatttagccagctagctgcagcaagccgtgctttcttcttgacacagcaacagttgctgcctttctaccagcagtttgcggc

SEQ ID NO: 12104 - DNA, 629 bp, Zea mays
  unsure (1)..(629): unsure at all n locations; Clone ID: LIB3061-096-Q1-K6-A8
cccataccttccatcaatgatagcttcagtatgtgaaaaacccagctcttcaaccctataggctccaacaagcaatcgcagcaagcaacatacctttatcacccttgtttcaacaatcgccagccctatctttggtgcagtcattggtacaaaccatcaaggcacagcagctgcagcaactcgtgctacctgtgatcaaccaagtagctctggcaaacctttctccctactatcagcaacaacaatttcttccattcaaccaactatctacactgaaccctgctgcttatttgcagcaacaactattaccattcagccagctagctactgcctactctcatcaacaacaacttcttccatttaaccaattggccgcactgaacctcgctgcttatttgcagcagcaaatattactaccatttagccagctagctgcagcaagccgtgcttccttcttgacacagcaacagttgctgcctttctaccagcagtttgcggctaaccccgcaaccctcttacaactacaacaattgttgccctttgtccaacttgctttgacaaacccagcagcctcctaccaacaacacnatcattggtggtgccctcttttagattgcttattagttgta

SEQ ID NO: 12105 - DNA, 661 bp, Zea mays
  unsure (1)..(661): unsure at all n locations; Clone ID: LIB3061-096-Q1-K6-A9
ggcatctcggggccaagcgccgccaaagncagctacgaagaagaagggatcgcgacggcaacgactcagcaggttagccccgtcgaaggcagcggcggagaagaatgtggaccatccacgctcattatttcctttgtgtttctgtttgatttatttttaaaatttctttatcagtttggttagcatccacttgcatccgctcatagtttgattcatgttcgttggatgggcctcaaaattaccagttgcttcgactacactctctgaatttcgcaaatcaagataaaacccgccacaaaggaatagatagcacacanaaaaaatcacagtattatttagtcatattggacacgaataagttaaatttcttaaattttagatccacatttttttattttggtctagactctcaaaaaatcctagaaatgtccctctgcctctcgcgcgtgaattctcctctgccgaagggaagacactcgaagtttctgcaattttttggacgaccgagaggtgctgccgtttatgagtatctttccagtggaaaagcagcatgccacaacaggatggtcagagtttggacattgcatgaagcacttgctggacaattgagaagnaatcataccttcttgcggggctcttaatgtatgaagtacgccatgct

SEQ ID NO: 12106 - DNA, 552 bp, Zea mays
  unsure (1)..(552): unsure at all n locations; Clone ID: LIB3061-096-Q1-K6-B1
cagggcacagcagctgcagcaactcgtgctacctgtgatcaaccaagtagctctggcaaacctttctccctactctcagcaacaacaatttcttccattcaaccaactgtctacactgaaccctgctgcttatttgcagcaacaactattaccattcagccagctagctactgcctactctcagcaacaacaacttcttccatttaaccaattggccgcactgaaccccgctgcttatttgcagcagcaaatactactaccatttagccagctagctgcagcaaaccgtgcttncttcttgacacagcaacagttgctgcctttctaccagcagtttgcggttaaccccgcaaccctcttacaactacaacaattgttgccctttgtccaacttgctttgacagaccgagcggcctcctaccaacaacacatcattggtggtgccctcttttagattgcttattagttgtaattcaataataaagttttttggatgatgtatgtggccaaccagaaataagaagttacatttccagattttaatgtgaaaaa

SEQ ID NO: 12107 - DNA, 664 bp, Zea mays
  unsure (1)..(664): unsure at all n locations; Clone ID: LIB3061-096-Q1-K6-B10
acccacgcgtncggtattcagaaccacaccaagcgaagctacctagcaacgacttaacaacaatggctaccaagatattagccctccttgcgcttcttgccctttttgtgagcgcaacaaatgcgttcattattccacaatgctcacttgctcctagtgccattataccacagttcctccgaccagttacttcaatgggcttcgaacacctagctgtgcaagcctacaggctacaacaagcgcttgcggcgagcgtcttacaacaaccaattaaccaattgcaacaacaatccttggcacatctaaccatacaaaccatcgcaacacaacagcaacaacagttcctaccagcactgagccaactagatgtggtgaaccctgtcgcctacttgcaacagcaggtgcttgcatccaacccacttgctctggcaaacgtagctgcataccaacaacaacaacaattgcaacagtttctgccagcgctcagtcaactagccatggtgaaccctgccgcctacctacaacagcaacaactgctttcatctagccctctcgttgtgggtaatgcacctacatacctgcaacaacaattgctgcaacagattgtaccagctctgactcagctagctgtggcaaaccctgctgcctacttgcaacagctgct

SEQ ID NO: 12108 - DNA, 601 bp, Zea mays
  Clone ID: LIB3061-096-Q1-K6-B11
cagctggcatcttacctttatcacccttgttcctccaacaatcatcagccctattacaacagttaccttttggtgcatttattggcacaaaacatcagggcacaacaactacaacaacttgtgctagcaaaccttgctgcctactctcagcaacagcagtttcttccattcaaccaactaggttcattgaactctgcttcttatttgcaacaacaacaactaccattcagccagctacctgctgcctacccccagcaatttcttccattcaaccaactagcagcattgaactctcctgcttatttacagcagcaacaactactaccattcagccagctagctggtgtgagccctgctaccttcttgacacaaccacagttgttgccgttctaccagcacgttgcgcctaacgctggcaccctcttacaactgcaacaattgctgccattcaaccaacttgctttgacaaacccagcagtgttctaccaacaacccatcattggtggtgccctcttttagatttcttatgagttatagttcaataataaagttttttatctgatgtttgtggcttcccagaaataagaaagtacatttctag

SEQ ID NO: 12109 - DNA, 392 bp, Zea mays
  Clone ID: LIB3061-096-Q1-K6-B2
cccgggtcgcccagcgtccgataaaacctaccgtcgccaccgaacggcctcccagtaagcaagacgtccacccgccgccgccatgaagcgcaatccccgcgtcacgagctctcgccggaagtgccgcaaggcgcacttcacggccccgtcctccgtccgacgagttctcatgtccaccgggctgtcgacggagctccgacacaagtacaacgtgcgctccatcccgatccgcaaggacgacaaggtgcaggtcgtgcgcggcacctacaagggccgagaggggaaggtggtgcaggtgtaccagacagcgatggatcattcacgtcgagcggatcacccaaaaagaaggtgaacatctacaccataaacgtgggcatgcaccaatccaaagt

SEQ ID NO: 12110 - DNA, 663 bp, Zea mays
  Clone ID: LIB3061-096-Q1-K6-B3
cccggtcgacccagcgtccggccacacgtcctatatccccatcactccgcagagattacaagcaggtttggttctgttggcagttcccattcatcaagagacaagagatcaaggtcggggaagggaaaacataacattcgattctctcaactaccatctgatactggtagccagaatggtgacagcggaggtataaagtttagatccaagtacatgtcatctgaagagatcgaatcaatcttaagaatgcagcattctgcaagccacagcagcgatccttatattgttgattactatcatcaagcttgtatggcaaaaaggggtgccacttctaagcaaaagaccaatttctccccaacatcaatgaaagatgtaccatccaagtctcgatccagcagtgatcagcacacatatcttcaggttgatgctcttggaagagtatctttttcttccatacggaggcctcggtctcttcttgaagtcgaccatccttcatctgctgatggctctcatgatcagaagtccactgtgaggcccctggagaaagaaccaatgcttgcagcaagagtcactgttgaagacgccctatgccttgttcttgaagttgatgacactgaccgtctgttgcagtctagccagtcacaggacaacattttcgaactg

SEQ ID NO: 12111 - DNA, 709 bp, Zea mays
  unsure (1)..(709): unsure at all n locations; Clone ID: LIB3061-096-Q1-K6-B8
ccggtaccggaacttcccggngtcgnacccaacgccgtccgtcaactaggcaacatagnaaagcacaatagtgtaccaacaatggcagccaaaatttttgcttccttatgctccttggtctttctgcaagtgctgctaccgcaaccattttcccacaatgctcacaagctcctatagcttcctttcttcccccatacctctcaccagcggtgtcttcagtatgtgaaaacccaattcttcaaccctacaggatccaacaggcaatcgcagcaggcatcttacctttatcacccttgttcctccaacaaccgtcagccctattacagcagttacctttggtgcatttgttggcacaaaacatcaaggcacaacaactacaacaacttgtgctaggaaaccttgctgcctactctcagcaacagcagtttcttccattcaaccaactggctgcattgaactctgctgcttatttgcaacaacaactaccattcagtcagctagctgctgcctacccccagcaatttcttccattcaaccaactggcagcattgaactctgctgcttatttacaacagcaacagctaccaccattcagccagctagctgatgtgagccctgttgccttcttgacacaacaacagttgttgccgttctacctgcacgctgcgcctaaacgctgcaccctcttacaactgcacaattgctgcca

SEQ ID NO: 12112 - DNA, 652 bp, Zea mays
  Clone ID: LIB3061-096-Q1-K6-C1
tcaatcaattcactcaaacctcttccccaaatcttcgattagattctcgttgacagaacctagaaccgaacctgaccatgtcgctgatccgccgcagcaacgtgttcgatcccttctccctcgacctctgggacccctttgagggcttccccttcggctccggcagcagcagcagtctcttcccctcgttcccgcggaccagctcggagaccgcggccttcgctggcgcgcggatcgactggaaggagactccagaggcgcacgtgttcaaggcagacgtaccggggctgaagaaggaggaggtcaaggtggaggtcgaggacggcaacgtccttcagatcagcggcgagcgcaacaaggagcaggaggagaagacggacacctggcaccgtgtggagcggagcagcgggagattcctgcgcaggttccgactgcccgagaacgccaagacggagcagatcagggccgccatggagaacggcgtgcttacagtcactgtgcccaaggaggacgccaagaagcctgaagtgaagtccattcagatctccggctagacctcggtctgcggtcgtcgtacctgcgtggtttgaggaacggcagttcgcctcggtcgttctgtgaaataaaatgggttacaagaattatggcgttt

SEQ ID NO: 12113 - DNA, 652 bp, Zea mays
  unsure (1)..(652): unsure at all n locations; Clone ID: LIB3061-096-Q1-K6-C11
gnaaagcacaatagtgtaccaacaatggcagccaaaatttttgcctccttatgctccttggtctttctgcaagtgctgctacggcgaccattttcccgcaatgctcgcaagctcctatagcttcccttcttcccccgtacctctcaccagcggtgtctacggtatgtgaaaacccaattcttcaaccctacaggatccaacaggcaatcacagctggcatcttacctttatcacccttgttcctccaacaatcatcagccctattacatcagttacctttggtgcatttattggcacaaaacatcagggcacaacaactacaacaacttgtgctagcaaaccttgctgcctactctcagcaacagcagtttcttccattcaaccaactagctgcattgaactctgcttcttatttgcaacaacaacaactaccattcagccagctacctgctgcctacccccagcaatttcttccattcaaccaactggcagcattgaactctcctgcttatttacagcagcaacaactactaccattcagccagctagctggtgtgagccctgctaccttcttgatacaaccacagttgttgccgttctaccagcacgctgcgcctaacgctggcaccctcttacaactgcaacaattgct

SEQ ID NO: 12114 - DNA, 656 bp, Zea mays
  Clone ID: LIB3061-096-Q1-K6-C12
cccagctgtgcaagcctatgagctacaacaagcgcttgcggcgagcgtcttagaacaaccaattgcccaattacaacaacaatccttggcacatctaaccatacaaaccatcgcaacgcagcagcaacaagcactgagccacctagccgtggtgaaccctatcgcctacttgcaacaacagctgcttgcatccaacccacttgctttggcaaacgtagctgcataccaacaacaacaacagttgcaacagtttctaccagcgctcagtcaactagccatggtgaaccctatcgcctacctacaacagcaacaacttctttcatctagcccgctcgctatgggcaatgcacctacatacctgcaacaacagttgttgcaacaacagttgctgcaacaaattgtaccagctcttactcagctagctgtggcaaaccctgctgcctacttgcaacaactacttccattcaaccaactgactgtgtcgaactctgctgcgtacctacaacagcgacaacagttacttaatccactagcggtggctaacccattggtcgctgccttcctacagcagcaacaattgctgccatacaaccagttctctttgatgaaccctgccttgtcgtggcagcaacccatcgttggtggtgccatctttt

SEQ ID NO: 12115 - DNA, 657 bp, Zea mays
  unsure (1)..(657): unsure at all n locations; Clone ID: LIB3061-096-Q1-K6-C2
aactagcaacatagnaagcacaatagtgtaccaacaatggcagccaaaatattttgcctccttatgctccttggtctttctgcaagtgctgctacggcgaccattttcccgcaatgctcgcaagctcctatagcttcccttcttcccccgtacctctcaccagcggtgtcttcggtatgtgaaaacccaattcttcaaccctacaggatccaacaggcaatcacagctggcatcttacctttatcacccttgttcctccaacaatcatcagccctattacatcagttacctttggtgcatttattggcacaaaacatnagggcacaacaactacaacaacttgtgctagcaaaccttgctgcctactctcagcaacagcagtttcttccattcaaccaactagctgcattgaactctgcttnttatttgcaacaacaacaactaccattcagccagctacctgctgcctacccccagcaatttctttcattcaaccaactggcagcattgaactctcctgcttatttacagcagcaacaactactaccattcagccagctagctggtgtgagccctgctaacttcttgaacaaccacagttgttgccgttctaccagcacgctgcgcctaacgctggcaccctcttacaactgcaac

SEQ ID NO: 12116 - DNA, 630 bp, Zea mays
  unsure (1)..(630): unsure at all n locations; Clone ID: LIB3061-096-Q1-K6-C3
gtaanagcagagtacatttcttagccagttggctgcaaagacaattccaaacagcattcactgcttgtctatgcgtttaacaattgattactatntcctgccccttgaggaacggaaattcccaaggagtgaaaatttagaaaacccaaatctctatcactatgcacttttctctgataatgttttggcagcctctgttgttgtgaactcaaccataatgaatgctaaggaaccagagaaacatgttttccatcttgtgactgacaagttaaactttggagccatgaacatgtggtttctgctgaacccacctggcaaggccaccatccatgttgagaatgtggacgaatttaagtggttgaactcatcatactgtcctgtgttgcggcaacttgagtctgctgccatgaaagagtactatttcaaagctgatcgtcccaccactctctcagcaggttcttcgaacctaaagtatcggaaccccaagtacctctctatgctgaaccacttgaggttctatctcccagaggtctatccaaagttggataagatactcttcctcgacgatgacatagttgtgcagaaagatttaacagggctgtgggatgttgatcttaatggaaagtcaat

SEQ ID NO: 12117 - DNA, 464 bp, Zea mays
  unsure (1)..(464): unsure at all n locations; Clone ID: LIB3061-096-Q1-K6-C4
tctgttttggtngaaccttgccgcctacctacaacagcaacaactgctttcatctagcccgctcgctgtggccaatgcacctacatacctgcaacaagaattgttgcaacagattgtaccagctctaactcagctagctgtggcaaaccctgttgcctacttgcaacagctgcttccattcaaccaactaactatgtcgaactctgttgcgtacctacaacagcgacaacagttacttaatccattggcagtggctaacccattggtcgctgccttcctacagcagcaacaattgctgccatacaaccggttctctttgatgaatcctgtcttgtcgaggcagcaacccatcgttggaggtgccatcttttagattacatatgagatgtactcgataatggtgccctcataccggcatgtgtttcctagaaataatcaatatattggttgagatttatctcgaa

SEQ ID NO: 12118 - DNA, 660 bp, Zea mays
  Clone ID: LIB3061-096-Q1-K6-C5
ttttcgacctaacaccaatggctaccaagatattagccctccttgcgcttcttgcccttttagtgagcgcaacaaatgcgttcattattccacagtgctcacttgctcctagtgccattattccacagttcctcccaccagttacttcaatgggcttcgaacatccagccgtgcaagcctacaggctacaactagcgcttgcggcgagcgccttacaacaaccaattgcccaattgcaacaacaatccttggcacatctaaccctacaaaccattgcaacgcaacaacaacaacaacaacagtttctgccatcactgagccacctagccgtggtgaaccctgtcacctacttgcaacagcagctgcttgcatccaacccacttgctctggcgaacgtagctgcataccagcaacaacaacagctgcaacagtttatgccagtgctcagtcaactagccatggtgaaccctgccgtctacctacaactactttcatctagcccgctcgcggtgggcaatgcacctacgtacctacaacaacagttgctgcaacaaattgtaccagctctgactcagctagctgtggcaaaccctgctgcctacttacaacagttgcttccattcaaccaactggctgtgtcaaactctgctgcgtacctac

SEQ ID NO: 12119 - DNA, 388 bp, Zea mays
  Clone ID: LIB3061-096-Q1-K6-C6
caactagctgcattgaactctgcttcttatttgcaataacaacaactaccattcagccagctatctgctgcctacccccagcaatttcttccattcaaccaactgacagctttgaactctcctgatttatttacagcagcaacaactactaccattcagccagctagctggtgtgagccctgctaccttcttgacacaaccacaattgttgccgttctaccagcacgctgcgcctaacgctggcaccctcttacaactgcaacaattgctgccattcaaccaacttgctttgacaaacccaacagcattctaccaacaacccatcattggtggtgccctcttttagatttcttatgagttatagttcaataataaagttttttgtctg

SEQ ID NO: 12120 - DNA, 592 bp, Zea mays
  unsure (1)..(592): unsure at all n locations; Clone ID: LIB3061-096-Q1-K6-C7
cccggtcgacccagcgtccgtttgnaggtngaggccttggcaaagacaagcaaggcataaagggtcatgttagggtgnaaaaacaagcaggacacactaggtgttggtgtagatagccctcataacaaatgggtatacgataccacccaatttgacaacatattgaagaaactgaaagtgcaatcagctaatcctgttcaagaagaggttgcagctgtagaaagtgattcacctgacatcacacccaagaaagacaaatcagcaaaacatgaagttactaaagttactcgacctcaaggaagatacaagaaaagagagagggggaaaagtgtgaactcttattcagcaacagatcttcaaggcatactcgtacgcaaaaatgaagataattccaaagtggatcagaaacttgaaccgacatgcttggatgaacctgatcccatcatctgtttggatgcagtatcccaagctgatgatgtgaactggtgggggcacaagtttggatttttatcaggagggtttctaggagcaaaatcccgtaaaaataaatcttcacaaaaagatcttgctaatgtccgccagacatttgcag

SEQ ID NO: 12121 - DNA, 659 bp, Zea mays
  Clone ID: LIB3061-096-Q1-K6-C8
ttttgagcattcagaaaccacctagcgaagcgcactagcaacgacctaacaacaatggcttccaagacattatccctccttgcgcttcttgccctttttgtgagtgcaacaaatgcgttcattattccacaatgctcacttgctccgagtgccattattccacagttcctccctccagttacttcaatgggcttcgaacacccagctgtgcaagcctataggctacaacaagcgcttgcggcgagcgtcttagaacaaccaattgcccaattacaacaacaatccttggcacatctaaccatacaaaccatcgcaacgcagcagcaacaagcactgagccacctagccgtggtgaaccctatcgcctacttgcaacaacagctgcttgcatccaacccacttgctttggcaaacgtagctgcataccaacaacaacaacagttgcaacagtttctaccagcgctcagtcaactagccatggtgaaccctatcgcctacctacaacagcaacaacttctttcatctagcccgctcgctatgggcaatgcacctacatacctgcaacaacagttgttgcaacaacagttgctgcaacaaattgtaccagctcttactcagctagctgtggcaaaccctgctgcctacttgcaacaactact

SEQ ID NO: 12122 - DNA, 595 bp, Zea mays
  Clone ID: LIB3061-096-Q1-K6-D1
tcccggggttgtttaaacaattgtcagccctatctttggtgcagtcattggtacaaaccatcagggcacaacagctgcagcaactcgtgctacctctgatcaaccaagtagctctggcaaacctttctccctactctcagcaacaacaatttcttccattcaaccaactgtctacactgaaccctgctgcttatttgcagcaacaactattaccatttagccagctagctactgcctactctcagcaacaacaacttcttccatttaaccaattggccgcactgaaccccgctgcttatttgcagcagcaaatactactaccatttagccagctagctgcagcaaaccgtgctttcttcttgacacagcaacagttgctgcctttctaccagcagtttgcgggtaaccccggaaccctgttacaactacaacaattgttgccctttgtccaacttgctttgacagacccagcggccttctaccaacaacacatcattggtggtgccctcttttagattgcttattagttgtaattcaataataaagttttttggatgatgtatgtggccaaccagaaataagaagttacatttcc

SEQ ID NO: 12123 - DNA, 652 bp, Zea mays
  unsure (1)..(652): unsure at all n locations; Clone ID: LIB3061-096-Q1-K6-D10
tacaatcgcaattgcaaattttgagcattattcttctaatccaaaangtttgaactgctgagcagtctgacatatcccacagaaaactgggaaactcttggaagattcacagccgcgaatgcaaaacttgctcaaaatttcacttttcttgaaccaaagtgggctagatatttgaaactgaacttggtaagccattatggttctgagttctactgtactctcagtgtgcttgaagtgtatggaatggatgctgtagaaaagatgcttgaaaacttgattccagttgagaataagaaaacggaacctgatgacaagactaaggaacccattgagaaaatttatttgaaagatcctgctggaggaaaagaattctcacaggaaacccttgatgaagatgaatttgaactagaagatgataaaccaaacggtgattcattgaagaatggtgctaatgatccagtttcagaggcaaggacacttcaggctggcaggattcctggagatacagttcttaaggtgctaatgcagaaagttcaatctcttgatgtgagcttctctgtcttggagaggtacctagtggagttgaacagcagatatgggcaaatatttaaggatttcgatgccgatattgatagcaaagatgtcttgttag

SEQ ID NO: 12124 - DNA, 652 bp, Zea mays
  unsure (1)..(652): unsure at all n locations; Clone ID: LIB3061-096-Q1-K6-D11
gcaacatanaagtggaatccagtagcaacaatagagcaacaatggcgaccaagatattttccctccttatgctccttgctctttctacatgtgttgctaacgcgacaattttccctcaatgctcacaagctcctatagcttcccttcttcccccataccttccatcaattatagcttcaatatgtgaaaacccagctcttcaaccatataggcttcaacaagcaatcgcagcaagcaacatacctttatcgcccttgttgtttcaacaatcgccagccctatctttggtgcagtcattggtacaaaccatcagggcacaacagctgcagcaactcgtgctacctctgatcaaccaagtagctctggcaaacctttctccctactctcagcaacaacaatttcttccattcaaccaactgtctacactgaaccctgctgcttatttgcagcaacaactattaccatttagccagctagctactgcctactctcagcaacaacaacttcttccatttaaccaattggccgcactgaaccccgctgcttatttgcagcagcaaatactactaccatttagccagctagctgcagcaaaccgtgcttccttcttgacacagcaacagttgctgcctttctaccagcagtttgcggc

SEQ ID NO: 12125 - DNA, 650 bp, Zea mays
  Clone ID: LIB3061-096-Q1-K6-D2
gcaacatagaagtggaatccagtagcaacaatagagcaacaatggcgaccaagatattttccctccttatgctccttgctctttctacatgtgttgctaacgcgacaattttccctcaatgctcacaagctcctatagcttcccttcttcccccataccttccatcaattatagcttcaatatgtgaaaacccagctcttcaaccatataggcttcaacaagcaatcgcagcaagcaacatacctttatcgcccttgttgtttcaacaatcgccagccctatctttggtgcagtcattggtacaaaccatcagggcacaacagctgcagcaactcgtgctacctctgatcaaccaagtagctctggcaaacctttctccctactctcagcaacaacaatttcttccattcaaccaactgtctacactgaaccctgctgcttatttgcagcaacaactattaccatttagccagctagctactgcctactctcagcaacaacaacttcttccatttaaccaattggccgcactgaaccccgctgcttatttgcagcagcaaatactactaccatttagccagctagctgcagcaaaccgtgcttccttcttgacacagcaacagttgctgcctttctaccagcagtttgcg

SEQ ID NO: 12126 - DNA, 133 bp, Zea mays
  Clone ID: LIB3061-096-Q1-K6-D3
ttacaattgttgccctttgtccaacttgctttgacagaccgagcggcctcctaccaacaacacatcattggtggtgccctcttttagattgcttattagttgtaattcaataataaagttttttggatgatgt

SEQ ID NO: 12127 - DNA, 90 bp, Zea mays
  unsure (1)..(90): unsure at all n locations; Clone ID: LIB3061-096-Q1-K6-D4
ggggggggggggggggnggngggggggggggnggggggggggggggggggggggggggggggggggggggggggggggggggggggtggg

SEQ ID NO: 12128 - DNA, 634 bp, Zea mays
  Clone ID: LIB3061-096-Q1-K6-D6
cctgatcttgttatgtttgtgacccagttctaggtgatgaaggaaaacttatgttcctcaggagctaatatctgtttatcaacagaaggttgttccagttgcttcaatgcttacacctaaccaatttgaagttgaactacttactggattgaggatcacctccgaagaagatggtttgacagcttgtaataccctccacagtgccggaccacagaaggtggttataactagtgctcttattgaaggcaagctgctccttatcggaagtcacaaaaaaacagaggaacaacagccagaacaatttaagattgagataccaaagatacctgcatatttcacgggaactggagatttgacaactgctctcctactaggatggagtaataaatatcctgatagcctcgagaaagcggcagaactggcagtttccagtttgcaggcacttctgaaaagaactgtggaagactataaaatggccggcttcgacccatcgaccagcagcttagagatcaggttgatccaaagccaggacgagatccgaaacccaactgttacatgcaaggctgtgaagtatggaagctgaatccattagtaccccactgacaaaggtgccaacaataatgagcagtgcctg

SEQ ID NO: 12129 - DNA, 472 bp, Zea mays
  unsure (1)..(472): unsure at all n locations; Clone ID: LIB3061-096-Q1-K6-D7
tcgtaagtgagccgagagccctcgagntaccatcagctagctagataaccagccagcgcgagcatggaggcggcggcggcggcggtcctgcaccggacggtggaggcgaacggcatctcgatgcacgtggcggagtccggccccgacggcgactgcgcgcccgcggtggtgttcctgcacggcttcccggagctctggtactcgtggcgccaccagatggcgcacctggccgcgcggggctaccgctgcgtggcgccggacctccgcggctacggcggcaccgccgcgccgcccgacgtcgcgtcctactccgccttccacgtcgtcggcgacgtcgtcgccctgctcgacgcgctcggcatccacaacaaggtgttcgtggtgggtcacgactggggcgccatcatcgcgtggtacctttgcctgtttcggccggtccgggtggcggcgcttgttaacaccagcgtggcct

SEQ ID NO: 12130 - DNA, 662 bp, Zea mays
  Clone ID: LIB3061-096-Q1-K6-D8
tgtctttcgtcatctcttctccggcgaagaacccccagtcgcccaccagatcacttgttaaactttgttgaggggtgatggcggtttctttcgcaaacctcagctccgaggcagggcttaaaaagcttgatgagtaccttctcactcgcagctacatcactggctaccaagcttccaaggatgacttggctgtctacacttcgttttcgtctgctccctcgtccaagtatatcaacgtagcaaggtggtttaatcacattgatgcgctcgtgaggctgagcggaattactgcagagggccaaggtgtgaaggttgaatcgtcagcagttccttcagccccaactccagatgttgctgaagcacaggccccagttgctgaggaggacgacgacgatgatgttgacctttttggtgaggagaccgaagatgagaagaaggctgctgaagagcgtgctgcagctgccaaggcttctggcaagaagaaagaatctgggaagtcatcagttttacttgatgtgaagccatgggacgatgagactgacatggccaagctcgaggaagctgttaggagtgtccagatggaagggttgctctggggcgcatccaagcttgtcccagttggatatggtatcaagaagctgcaaatcatgatgaccatcgtc

SEQ ID NO: 12131 - DNA, 655 bp, Zea mays
  unsure (1)..(655): unsure at all n locations; Clone ID: LIB3061-096-Q1-K6-D9
ntagcaaatacatagtngaagtacactagcaacatcttagcaccaatgggagccaagattttttccctccttgccctccttgctctttcagcaagcgctgctacctctactattattccacaatgctcacaacaatacctctctccggtgacagccgcgggatttcaacacccaactatacaatcctacatgctacatgaggccatcgtagcaagcatcttacggtcattagcattaaccctccaacagccatatgccctattgcaacaaccatccttagtgcatctgtatctccaaagaatcgcgacacaacaactacaacaacagttgctaccaacaatcaatcaagtagttgcagcgaaccttgctgcttatctccagcaacaacaatttcttccattcaatcaactagctggggtgaaccctgctgtctacttgcaggcacaacaactactaccatttaaccaacttgtcgggagccctgatgccttcttactgcaacaacagcttctgccattccatctgcaagctgtggaaaaattgcttctttcttgcgacaacaacaattgttgccattttacccacaggttgtgggaaacattaatgccttcttgcaacagcaacaattgctgccattctacccacataatgtggc

SEQ ID NO: 12132 - DNA, 646 bp, Zea mays
  unsure (1)..(646): unsure at all n locations; Clone ID: LIB3061-096-Q1-K6-E1
ccggggtcgnncgtacagcacttgcagnaaggccattttcccgcaatgctcgcaagctcctatagcttcccttcttcccccgtacctntcaccagcggtgtcttnggtatgtgaaaacccattcttcaaccctacaggatccaacaggcaatcacagctggcatcttacctttatcacccttgttcctccaacaatcattagccctattacatcagttacctttggtgcatttattggcacaaaacatcagggcacaacaactacaacaacttgtgctagcaaaccttgctgcctactctcagcaacagcagtttcttccattcaaccaactagctgcattgaactctgcttcttatttgcaacaacaacaactaccattcagccagctacctgctgcctacccccagcaatttcttccattcaaccaactggcagcattgaactctcctgcttatttacagcagcaacaactactaccattcagccagctagctggtgtgagccctgctaccttcttgatacaaccacagttgttgccgttctaccagcacgctgcgcctaacgctggcaccctcttacaactgcaacaattgctgccattcaaccaacttgctntgacaaacccagcagcgttctaccaacaac

SEQ ID NO: 12133 - DNA, 363 bp, Zea mays
  unsure (1)..(363): unsure at all n locations; Clone ID: LIB3061-096-Q1-K6-E10
gcaaatgggcaatcgtattgcattcgagaagcaccaccacaatctgggaccgccagcgctcagggtgacttgcttccagtgggggagccactgcgggctgcagcatcagcatcgacatcagctggcagcatcgttgctaccattgccnttgttgcttgtgcttcggctagccctttgactcggggcgcggtcaccccttatgcttctgctttcttctcctctctcactgtgcttgaactgtctggcatggctgctgttgcgttgatgctccgcagctcgtttccatgctgccatttggactacggggcctggttgcttgtcttgtggccccattccgaagtttttcttgcacggtcctgcctt

SEQ ID NO: 12134 - DNA, 663 bp, Zea mays
  unsure (1)..(663): unsure at all n locations; Clone ID: LIB3061-096-Q1-K6-E11
cttcgcgtccttcggcgcgtgcttgctccaaaccaatgcccatgttgtggacgacagcgatgtgatcgtcatctccgtgaagcctcagatcgtgaagcaagttctacttcagctgaggccacggctgtcagaaaaaaacttctcgtgtccattgctgccggcatcaagatgcaagatttgcaggattggtctggtcaacgacgtattattagagtaatgcccaacaccccttcagctgttggacaagctgcatcagtcatgtgtttgggagagatggctactcaggatgatgaaaaccgtgtaagaaaactgttcagtgccattggaaaagtctggacagctgaagagaaatattttgatgctgtaactggtctgagtggtagtggcccggcctatatcttcctagcaatagaggccatggctgatggtggagttgctgctgggcttcctcgggaccttgcccttggtcttgcatctcaaacagttcttggtgctgcaactatggtgagccagacaggcaaacatccagggcaactgaaagatcaggttacttctccagcaggtactaccattgccgggattcatgagctcgaaagggcgcattccgtggaacgctgattagtgctgttgttgctgccgcaaagcgctgncgcgaactgtcat

SEQ ID NO: 12135 - DNA, 638 bp, Zea mays
  Clone ID: LIB3061-096-Q1-K6-E2
gcaacatagaagtagaatccattagcaacaatagagcaacaatggcgaccaagatattttccctccttatgctccttgctctttctacatgtgttgctaacgcgacaattttccctcaatgctcacaagctcctatagcttcccttcttcccccataccttccatcaattatagcttcagtatgtgaaaacccagctcttcaaccatataggcttcaacaagcaatcgcagcaagcaacatacctttatcgcccttgttgtttcaacaatcaccagccctatctttggtgcagtcattggtacaaaccatcagggcacaacagctgcagcaactcgtgctacctgtgatcaaccaagtagctctggcaaacctttctccctactctcagcaacaacaatttcttccattcaaccaactgtctacactgaaccctgctgcttatttgcagcaacaactattaccatttagccagctagctactgcctactctcagcaacaacaacttcttccatttaaccaattggccgcactgaaccccgctgcttatttgcagcagcaaatactactgccatttagcgagctagctgcagcaagtcgtgctttcttcttgacacagcaacagttgctgcctttctac

SEQ ID NO: 12136 - DNA, 613 bp, Zea mays
  Clone ID: LIB3061-096-Q1-K6-E3
atcaaatctgcaacatcaattatctaactccaaaaccatgaagctggtgcttgtggttcttgctttcattgctttagtatcaagtgtttcttgtacacagacaggcggctgcagctgtggtcaacaacaaagccatgagcagcaacatcatccacaacaacatcatccacaaaaacaacaacatcaaccaccaccacaacatcaccagcagcagcaacaccaacaacaacaagttcacatgcaaccacaaaaacatcagcaacaacaagaagttcatgttcaacaacaacaacaacaaccgcagcaccaacaacaacaacaacaacaacagcaccaacaacaacatcaatgtgaaggccaacaacaacatcaccaacaatcacaaggccatgtgcaacaacacgaacagagccatgagcaacaccaaggacagagccatgagcaacaacatcaacaacaattgcagggtcatgacaagcagcaacaaccacaacagcctgagcaatatcagcaggtccagtaaaaatacaacagcaacaatgtcattgccaggagcagcaacagactaacaagtgcagctataactactatagcaggagctcaaatctaaaaa

SEQ ID NO: 12137 - DNA, 645 bp, Zea mays
  unsure (1)..(645): unsure at all n locations; Clone ID: LIB3061-096-Q1-K6-E5
gntttcctcaccaaggagtgcagttcgaggacaggctcttcactctgcaaatatgggacactgctggccaggaaaggtttcagagtctcggcgttgcattctaccggggagcagattgttgtgtcctagtctatgatgttaattctatgaaatcatttgacaacctgaacaactggcgagaagagtttctaattcaggctagcccatcagatcctgataatttcccttttgttctattgggtaacaaagttgatgtagatggtggcaacagccgcgtggtatctgagaaaaaggcaaagcatggtgtgcttccaaagggaacatcccgtactttgagacgtctgctaaggacggaacgaacgtggaagacgccttccagtgtatcgtgaagaacgctctgaagaatgagccagaggaagaactgtatgtgccagataccgtggacgtggcgggtggcaaccgggcccagagatcatccgggtgctgttaaggcacgaggcatcacgaggcgttgtgaccatcatcgtcggttatgcagtgaccaaacaataccttagcattgctgggtttccgtggttatctacgtatccgtattccatttgttacctttccagtctcactgctatgtacccaagggcgcctgtc

SEQ ID NO: 12138 - DNA, 256 bp, Zea mays
  Clone ID: LIB3061-096-Q1-K6-E6
gccgtccccacccggccttcttcaggccgtgagacgagacctccgtcgagctagctagctacctgcctctttcagttcgtcagtgcaaattaagcaccaaatgtcgaccgatgcctctgaataaatttaactgcgaggctagctgctgaacatcgatctgctagtattactacggcgaggctgctgaacagcgctcagttcggaatgtatgtataatctgaacgccaagtttaattttatgttacttctaccgatt

SEQ ID NO: 12139 - DNA, 633 bp, Zea mays
  Clone ID: LIB3061-096-Q1-K6-E7
caacagcacatttaagtggaatccagtagcaacaacagagcaacaatggcgaccaagatattttccctccttatgctccttgctctttctgcatgtgttgctaacgcgacaattttccctcaatgctcacaagctcctatagcttcccttcttcccccataccttccatcaatgatagcttcagtatgtgaaaacccagctcttcagccctataggctccaacaagcaatcgcagcaagcaacatacctttatcacccttgttgtttcaacaatcgccagccctatctttggtgcagtcattggtacaaaccatcagggcacagcagctgcagcaactcgtgctacctgtgatcaaccaagtagctctggcaaacctttctccctactctcagcaacaacaatttcttccattcaaccaactgtctacactgaaccctgctgcttatttgcagcaacaactattaccattcagccagctagctactgcctactctcagcaacaacaacttcttccatttaaccaattggccgcactgaaccccgctgcttatttgcagcagcaaatactactaccatttagccagctagctgcagcaaaccgtgcttccttcttgacacagcaacagttgctg

SEQ ID NO: 12140 - DNA, 624 bp, Zea mays
  unsure (1)..(624): unsure at all n locations; Clone ID: LIB3061-096-Q1-K6-E8
ccataaaccccggccctaaccgcgcccgcaccctcgcccttggctcgccgngagataacgctacagccgtaatcacgtaaattccttttcatggagggtgtgggcgcgcggctagggcgcacttcggcgcgctacgggccggcgacgacgttcacgggccatgtcaggaagtggcgcaaggagtgggtaccagtggtcgccgccgccgccgccgccgccgccaacgccaacaccagcgccaacggtggcacgacgtcctccacggggatgggatctggcggaggatcccgcgggaataatcttctcctgtttaagtggaccccggtgaacggggctaacgggggaggaggggatggggagcagcagcagcaggctgagacggccacgagacgccggcggtatgtgccggtttctttaatggaagagcaaaggcaagaatctaccaaatctgatgatgagaacaaggctaatgatggagatccatcttcgaatgaaactgagccatcaaatggaaagactgatatcaatgatacacctatggatgaatctcangcaacagatgaggatggtcgagattctggtaaaaacggcggtggaacagacctaaatttgaaattaggtttg

SEQ ID NO: 12141 - DNA, 307 bp, Zea mays
  unsure (1)..(307): unsure at all n locations; Clone ID: LIB3061-096-Q1-K6-E9
agttgaactgtggcagtctgtcgttccgcggtggatgggaaatcttggaagattaagttcggaatgcaaacttgctcaaatttgatgttgttgtctttgtgggctgntttttgggggggggttggtggtctttggtgttgagttctactgtctctcagtgtgcttgaaggttggaatgttgctgtggagggtgcttggaaacttgattcagtggagatgtgaatcggaacctggtggcgggctggggacagttgggaaagttgtgtgtgtgatgctggtggggataagatttttcaggaaaccttgg

SEQ ID NO: 12142 - DNA, 668 bp, Zea mays
  unsure (1)..(668): unsure at all n locations; Clone ID: LIB3061-096-Q1-K6-F1
ctctcgcgtcacagctctgcccgttcttatccacaatttcttcgtcccgattcctccgccgacgcccacgctgcggacaaatcagccgccgtcgccctctcgggatcgctggctcccctgcctctgtgcacactcctcaccaggacccaagccagctccgtcgggcgccgtggggaactgctgggaggggcggtcgaccggcggtgcctctgcttcgggttctccgtaccggcgtcggaggggatcggatggcataagctcctgaatgccactggtgtggtacctggaaaggtgataaaatatgtagtagcagcaagaaagcaaggtactgttctgagaaacatcaggcactgcattggcgtactggtcataaaaatgattgcctccagataataagttctgctgcttcaaatttagttctgccagctgtaggaatagggtttgtccgctggtttgctaaggcaagcaacgtacatagactgctcgtcttggatccttcaggaatcataaaagcatatggaggaactatgtataggctacaaagaagcataagaagcattnttatagcagaagccaagtgttctgatgattttgttttttcaattgtgttttctgttattggttcagcatgcgcatatattgacatgatttatggcatggcatctgtc

SEQ ID NO: 12143 - DNA, 159 bp, Zea mays
  Clone ID: LIB3061-096-Q1-K6-F10
cattcaaccaacttgctttgacaaacccaacagcgttctaccaacaacccatcattggtggtgccctcttttagattgcttatgagttatacttcaataatgaagttttttggatgatgtttgtggcttcccagaaataagaaagtacatttctagatt

SEQ ID NO: 12144 - DNA, 652 bp, Zea mays
  unsure (1)..(652): unsure at all n locations; Clone ID: LIB3061-096-Q1-K6-F12
gccaacaacaacatcaccaacaatcacaaggccatgtgcaacaacacgaacagagccatgagcaacaccaaggacagagccatgagcaacaacatcaacaacaattccagggtcatgacaagcagcaacaaccacaacagcctcagcaatatcagcagggccagngaaaaatcacaacagcaacaatgtcattgccaggagcagcaacagactacaaggtgcagctataactactatagcagtagctcaaatctaaaaaattgtcatgaattcctaaggcagcagtgcagccctttggtaatgccttttctccaatcacgtttgatacaaccaagtagctgccaggtattgcagcaacaatgttgtcatgatcttaggcagattgagccacaatacattcaccaagcaatctacaacatggttcaatccataatccaggaggagcaacaacaacaaccatgtgagttatgtggatctcaacaagctactcaaagtgcggtggcaatcttgacagcagcacaatacctaccatcaatgtgcggcttgtaccactcatactaccaaaataatccatgcagcagcaatgacattagtggtgtttgcaattgaagaattgtgtctacctagccgttatactcatataacggtgtta

SEQ ID NO: 12145 - DNA, 331 bp, Zea mays
  Clone ID: LIB3061-096-Q1-K6-F2
gtattatagttcaataataaagttttttgtctgatgtttgtggcttcccagaaataagaaagtacatttctagattcttaaaaaaaaaaaaaaaaaaaaaaaaaaaaaaaaaaaaaaaaaaaaaaaaaaaaaaaaaaaaaaaaaaaaaaaaaaaaaaaaaaaaaaaaaaaaaaaaaaaaaaaaaaaaaatataaaaaaaaaaaaaaaaaaaaaaaaaaaaaaaaataaaaaaaaaaaaaaaaaaaaaaaaaaaaaaaaaaaaaagggggtgtggtgtttaataaagaataaaaaaaaatttaatttttattagaaaaaatatttttttttt

SEQ ID NO: 12146 - DNA, 662 bp, Zea mays
  unsure (1)..(662): unsure at all n locations; Clone ID: LIB3061-096-Q1-K6-F4
gtcctgtgcaagacgttgcagattcttgcagaactggtgctgccactaatgtcatttttggtcttgctcttggatacaagtcagttatcatcccgattttcgctatcgctgttagcatctatgtcagtttctccattgctgcaatgtacggcatcgcagttgccgctcttggtatgctgagcacaattgcaactggtcttgctattgatgcttatggtcccatcagtgacaatgctggtggtattgctgagatggctggaatgagtcacagaatccgtgagagaactgatgctcttgatgctgctggcaacaccactgccgctattggaaagggatttgccattggttcagcagctcttgtgtctctggcgctttttggtgccttcgtcagcagagctggagtgaaggttgtcgatgtcctctcccccaaggttttcattggtttgattgttggagccatgcttccctattggttctctgccatgaccatgaagagtgttggaagtgccgccctaaagatggtggaggaggtccgcagacagttcaacaccattccntggttgatggagggaactgccaaacctgactatgcaacctgtgtgaaagatctccactgatgctttcatcaagnagatgattcctcctggtgctctggtcatgct

SEQ ID NO: 12147 - DNA, 471 bp, Zea mays
  Clone ID: LIB3061-096-Q1-K6-F7
gcgtaacgcactagcaacgacctaacaccaatggctaccaagatattagccctccttgcgcttcttgcccttttagtgagcgcaacaaatgcgttcattattccacagtgctcacttgctcctagtgccattattccacagttcctcccaccagttacttcaatgggcttcgaacatccagccgtgcaagcctacaggctacaactagcgcttgcggcgagcgccttacaacaaccaattgcccaattgcaacaacaatccttggcacatctaaccccgcaaccctcttacaactacaacaattgttgccctttgtccaacttgctttgacaaacccagcagcctcctaccaacaacacatcattggtggtgccctcttttagattgcttattagttgtaattcaataataaagttttttggatgatgtatgtggccaaccagaaataagaagttacatttccagattctt

SEQ ID NO: 12148 - DNA, 475 bp, Zea mays
  unsure (1)..(475): unsure at all n locations; Clone ID: LIB3061-096-Q1-K6-F8
cgtccgctttcctgcagacaagctgtaaatctcgcctagctcgtcgtcggngaaccaagggaaaagagcaagggggggcgcaaaggcttgctggcttgctgcctacctagctcgtcggggccctatgagagatccagcaccaccgggggctgggcaactccaaggttgtcaaggtgcagagcgaggaggcgtgggatctgttcaccgatcaagcgagcaacgaaggccggcccgttgttgcccatttcggggcgtgatggtgcgtgacgtccctgtccatgaactacaagttagaggagctggcgcagacccaccccgaggtcttgttcctctacgtggacgtcaacaatgtccagagtgtttcatccaggtacggagtgaaggccatgccgacgttctttctcatcaagagcaaggaggtggtggggaagatcgtctgtgcgaacccagacgaggtgaaaaagctggtggaatg

SEQ ID NO: 12149 - DNA, 661 bp, Zea mays
  unsure (1)..(661): unsure at all n locations; Clone ID: LIB3061-096-Q1-K6-G1
ttagtagaaatgcagggnaaagatgaggatgtcagtgacatggaagcagattttgctactatagaaatggaagagaaaagaagtgcgaggatagctaggcaggaggacgaagagcaacttcgcttgattgaggaagaagagagacgcgagcaggagaggaagaggcgaaagatggcacgaggccgatagtccaacacgcgtcatatttgggtgttataattgcacagacctgattgcctgaagacgaggcccatggtcgatcatacgggcgcgttgcagacaacaggaaaacttgccacgtggattatatggcggcaaatcaaggaaaacggtaggtgggcaacgctgggcacctgtaacaagcagaatgttaggcgcagtggtttagttgacgaagctgacatagacccatatataagctctcatcagattgtttggatcacacaaggctcccaacgttgcagcgcttcatcagattattctaaattctagccacatgctgattctttctgttaagcctatataaggatgcctaatccaagtagctcctttgttcatttttgtttgggtgtagtgttgtactccctcccatttttttatctgacggttgttagtttaaatatgaactgtccggcgccaaataaaaaataagagtagcaac

SEQ ID NO: 12150 - DNA, 665 bp, Zea mays
  unsure (1)..(665): unsure at all n locations; Clone ID: LIB3061-096-Q1-K6-G10
attgagaccaactagcaacatagnaaagcacaatagtgtaccaacaatggcagccaaaatttttgcttccttatgctccttggtctttctgcaagtgttgctaccgcaaccattttcccacaatgctcacaagctcctatagcttcccttcttcccccatacctctcaccagcggtgtcttcaatgtgtgaaaccccaattgttcaaccctacaggatccaacaggcaatcgcaacaggcatcttaccattatcacccttgttcctccaacaaccgtcagccctattacagcagttacctttggtccatttggtggcacaaaacatcagggcacaacaactacaacaacttgtgctagcaaaccttgctgcatactctcagcaacatcagtttcttccattcaaccaactggctgcattgaactctgctgcttatttgcaacaacaattaccattcagccagctagttgctgcctacccccagcaatttcttccattcaaccaactagcagcattgaactctgctgcttatttacagcagcaacaactactaccattcagccagctagctgatgtgagccctgctgccttcttgacacaacaacagttgttgccgttctacctgcacgctatgcctaacgctggcaccctcttacaactgcaaca

SEQ ID NO: 12151 - DNA, 655 bp, Zea mays
  unsure (1)..(655): unsure at all n locations; Clone ID: LIB3061-096-Q1-K6-G11
gcaacatagnaaagtggnaatccagtagcaacaatagagcaacaatggcgaccaagatattttccctccttatgctccttgctctttctacatgtgttgctaacgcgacaattttccctcaatgctcacaagctcctatagcttcccttcttcccccataccttccatcaattatagcttcaatatgtgaaaacccagctcttcaaccatataggcttcaacaagcaatcgcagcaagcaacatacctttatcgcccttgttgtttcaacaatcgccagccctatctttggtgcagtcattggtacaaaccatcagggcacaacagctgcagcaactcgtgctacctctgatcaaccaagtagctctggcaaacctttctccctactctcagcaacaacaatttcttccattcaaccaactgtctacactgaaccctgctgcttatttgcagcaacaactattaccatttagccagctagctactgcctactctcagcaacaacaacttcttccatttaaccaattggccgcactgaaccccgctgcttatttgcagcagcaaatactactaccatttagccagctagctgcagcaaaccgtgcttccttcttgacacagcaacagttgctgcctttctaccagcagtttgcggc

SEQ ID NO: 12152 - DNA, 652 bp, Zea mays
  unsure (1)..(652): unsure at all n locations; Clone ID: LIB3061-096-Q1-K6-G12
gccagttgtagggaagggccaagggnaaacttcaagatagtatggcgaagaactatcgagagcgccgcttaaagagggcgatgaagatagatgagggagaggacgactttgaagctgattaccaagcattctctaagaagtacgatgagaaggatgagtgccactataagttcatggctttattaccattcaagaatggtcttcctaatgtctcaccgccaacaaaagagaaagttggacttcattttgccatgaaagatgttgtgattagtcaaaaaccaaccaccaccaatgaaggtatcattgtaaggccgaagtgcaagcgaaagaccccatataggggcatccgccgacgcccttggggaaaatgggctgctgaaatccgcgatcctacaaagggtgttcgtgtttggttaggcacgtataaaacaccagaagatgcagctagagcatatgacgctgaggcccgcaagattaggggcaataaagcaaaggtgaatttccctaatgaaccaccaaacatggtgagcaatgcaccaaaactaattgttactgcaatgactacaatggctatcccagcagacaagttgaatgccaatgaattgatgtgccataaaaactactcaaatgaggattgtttctcaatggtgaa

SEQ ID NO: 12153 - DNA, 643 bp, Zea mays
  unsure (1)..(643): unsure at all n locations; Clone ID: LIB3061-096-Q1-K6-G3
caacaagctgccccgcagcaacgaacacgaaccttggcagaacgaagctgaagtagttcgttgtgaacccagtatggcaaacgcgccgaggatcctggccctcggcctgctgctagcgctcctgtgcgctgccgccggcccggccgccgcgcagaactgcggctgccagcctaacttctgctgcagcaagttcggctactgcggcacgaccgacgactactgcggcgacgggtgccagtcgggcccgtgccgctcgggcggcggcggcggcggcggcggaggcggaggcagtggcggtgcgaacgtggctaacgtggtcagcgacgcgttcttcaacggcatcaagaaccaggccgggagcgggtgcgagggcaagaacttctacacccggagcgcgttcctgagcgccgtcaacaagtacccgggcttcgcccatggcgggacggaggtggagggcaagcgcgagatcgccgccttcttcgcgcacgtcacgcacgagaccgnacatttctgctacatcagcgagatcaacaagagcaacgcctactgcgacgcaagcaacaggcagtggccgtgcgcggcggggcagaaatactacgggcgcggcccgctgcagatcttgtggaactacaactaccggccc

SEQ ID NO: 12154 - DNA, 611 bp, Zea mays
  Clone ID: LIB3061-096-Q1-K6-G4
ttgcccagcacacgccgacgcgaccagctggcgaggaaccctagcggagcactgtgcaggcgaccgcggcgcgctatcacttacggggggatacggcggcatcgtccccctcggcccctcctccatccctggtgcggcggcgccagcctgcaggtgttgaatgctgatttgttgtggctgattaatcgggttgatcgtcgattaatcgtgattagtcggctgatcgcccttctggcgatcagaaacgataaggcaatctgaaaacattggccgccaaacctccagagcgactcccgcgagccgtgaccaccatagctaaatcaacgcaccagaagctttcacggagctgtctcgtccacgagtgttccagctgactcctattccctgcgtcaatggcgagctctggcaatgaagggcgtgtggtggtggaccttggctccgcggcggagtcggtggctgctgacgaggaggcgcacgccacgcctctccacgagattgagtccctttgcatgcgctgcggcgagaacggcatcacgaggcttttgctgacgttgatcccgcacttccgggaggtggttctgatggccttcgagtgcccacattgtggtgag

SEQ ID NO: 12155 - DNA, 661 bp, Zea mays
  unsure (1)..(661): unsure at all n locations; Clone ID: LIB3061-096-Q1-K6-G5
gagcccaactagcaacatagnaaagcacaatagtgtaccaacaatggcagccaaaatttttgcctccttatgctccttggtctttctgcaagtgctgctacggcgaccattttcccgcaatgctcgcaagctcctatagcttcccttcttcccccgtacctctcaccagcggtgtcttcggtatgtgaaaacccaattcttcaaccctacaggatccaacaggcaatcgcagctggcatcttacctttatcacccttgttcctccaacaatcatcagccctattacaacagttacctttggtgcatttattggcacaaaacatcagggcacaacaactacaacaacttgtgctagcaaaccttgctgcctactctcagcaacagcagtttcttccattcaaccaactaggttcattgaactctgcttcttatttgcaacaacaacaactaccattcagccagctacctgctgcctacccccagcaatttcttccattcaaccaactagcagcattgaactctcctgcttatttacagcagcaacaactactaccattcagccagctagctggtgtgagccctgctaccttcttgacacaaccacagttgttgccgttctaccagcacgttgcgcctaacgctggcaccctcttacaactgc

SEQ ID NO: 12156 - DNA, 634 bp, Zea mays
  unsure (1)..(634): unsure at all n locations; Clone ID: LIB3061-096-Q1-K6-G6
agcaacatanaagtggaatccagtagcaacaatagagcaacaatggcgaccaagatattttccctccttatgctccttgctctttctacatgtgttgctaacgcgacaattttccctcaatgctcacaagctcctatagcttcccttcttcccccataccttccatcaattatagcttcaatatgtgaaaacccagctcttcaaccatataggcttcaacaagcaatcgcagcaagcaacatacctttatcgcccttgttgtttcaacaatcgccagccctatctttggtgcagtcattggtacaaaccatcagggcacaacagctgcagcaactcgtgctacctctgatcaaccaagtagctctggcaaacctttctccctactctcagcaacaacaatttcttccattcaaccaactgtctacactgaaccctgctgcttatttgcagcaacaactattaccatttagccagctagctactgcctactctcagcaacaacaacttcttccatttaaccaattggccgcactgaaccccgctgcttatttgcagcagcaaatactactaccatttagccagctagctgcagcaaaccgtgcttccttcttgacacagcaacagttgctgcctt

SEQ ID NO: 12157 - DNA, 660 bp, Zea mays
  unsure (1)..(660): unsure at all n locations; Clone ID: LIB3061-096-Q1-K6-G7
gcaacatagnaaagcacaatagtgtaccaacaatggcagccaaaatttttgcctccttatgctccttggtctttctgcaagtgctgctacggcgaccattttcccgcaatgctcgcaagctcctatagcttcccttcttcccccgtacctctcaccagcggtgtcttcggtatgtgaaaacccaattcttcaaccctacaggatccaacaggcaatcgcagctggcatcttacctttatcacccttgttcctccaacaatcatcagccctattacaacagttacctttggtgcatttattggcacaaaacatcagggcacaacaactacaacaacttgtgctagcaaaccttgctgcctactctcagcaacagcagtttcttccattcaaccaactaggttcattgaactctgcttcttatttgcaacaacaacaactaccattcagccagctacctgctgcctacccccagcaatttcttccattcaaccaactagcagcattgaactctcctgcttatttacagcagcaacaactactaccattcagccagctagnctggtgtgagccctgctaccttcttgaccaaccacagttgttgccgttctccagcacgttgcgcctaaacgctgcaccctcttacactgcaacattgctgcc

SEQ ID NO: 12158 - DNA, 650 bp, Zea mays
  unsure (1)..(650): unsure at all n locations; Clone ID: LIB3061-096-Q1-K6-G8
caactagcaacatagnaagcacaatagtgtaccaacaatggcagccaaaatttttgcttccttatgctccttggtctttctgcaagtgctgccaccgcaaccattttcccacaatgctcacaagctcctatagcttcctttcttcccccatacctctcaccagcggtgtcttcagtatgtgaaaacccaattcttcaaccctacaggatccaacaggcaatcgcagcaggcatcttacctttatcacccttgttcctccaacaaccgtcagccctattacagcagttacctttggtgcatttgttggcacaaaacatcaaggcacaacaactacaacaacttgtgctaggaaaccttgctgcctactctcagcaacagcagtttcttccattcaaccaactggctgcattgaactctgctgcttatttgcaacaacaactaccattcagtcagctagctgctgcctacccccagcaatttcttccattcaaccaactggcagcattgaactctgctgcttatttacaacagcaacagctaccaccattcagccagctagctgatgtgagccctgttgccttcttgaccaacaacagttgttgccgttctacctgcacgctgcgcctaacgctggcaccctcttacactgc

SEQ ID NO: 12159 - DNA, 607 bp, Zea mays
  unsure (1)..(607): unsure at all n locations; Clone ID: LIB3061-096-Q1-K6-G9
gcaatcgcagctggcatcttacctttatcacccttgttcctccaacaatcatcagccctattacagcagttacctttggtgcatttattggcacaaaacatcagggcacaacaactacaacaacttgtgctagcaaaccttgctgcctactctcagcaacaacagtttcttccattcaaccaactagctgcattgaactctgcttcttatttgcaacaacaacaactaccattcagccagctatctgctgcctacccccagcaatttcttccattcaaccaactgacagctttgaactctcctgcttatttacagcagcaacaactactaccattcagccagctagctggtgtgagccctgctaccttcttgacacaaccacaattgttgccgttctaccagcacgctgcgcctaacgctggcaccctcttacaactgcaacaattgctgccattcaaccaacttgctttgacaaacccaacagcattctaccaacaacccatcattggtggtgccctcttttagatttcttatgagttatagttcaataataaagttttttgtctgatgtttgtggcttcccagaataagaaagacatttctngna

SEQ ID NO: 12160 - DNA, 466 bp, Zea mays
  Clone ID: LIB3061-096-Q1-K6-H1
gcgtgtctataattttttccatactgagccaatagctgtggtgaaccctgtcgactacttgcaacagcagatgcttgcatgcaacccacttgctctggcaaacatagttgcataccaacaacaacaacaattgcaacagtttgtaccagcgctcagtcaactagccatggtgaaccctgccgtctacctacaacagcaacaactgatttgatctagccctgtgggtgtggttaatgcacctacatacctgcaacaacagttgctgtaacagtattgtaccagctgtgacttaactagctgtggaaaaccctgctgtctacttgaaacaggtggtgccattcaaccaactgactgggtagaactgtggttggtgcctacaacagcaacaacagttacttaatgcactagcggtggctgacccattggtcattggcttgctacagcagaaacaatgggtgtcatacaa

SEQ ID NO: 12161 - DNA, 393 bp, Zea mays
  Clone ID: LIB3061-096-Q1-K6-H10
acaactactaccattcagccagctagctactgcctactctcagcagcaacaatttcttccatttaaccaattggccgcactgaacccctctgcttatttccagcagcaaatactactaccatttggccagctagctacaacaagccccacttcctttttgaaacaacaacaattgcttccgttctaccagcagtttgtggctaaccccgcaaccctcttacaactgcaacagttgctgccctttgtccaacttgctttgacaaacccagcagccttctaccaacaacacatcattggcggtgccatcttttagattgcttattagttgtaattcaataatgaagttttttggctgatgtatgtggcctcctagaaataagaagttacatttcc

SEQ ID NO: 12162 - DNA, 691 bp, Zea mays
  Clone ID: LIB3061-096-Q1-K6-H11
accggtaccggccttcccgggttcagataatgtgttcgtcatccagatccaacacccacgatctcgccttgataggtttgatttagtggtgactcctcgccatgattactatgctttaaccgctagtggacaacaagaagttccacacctgttccgcagatggattactccacaggaaccacccaggagtaatgtggtacttactgttggtgcactacaccaggctgattctgctgcgctacggcttgctgctagcctggcatgatgaactcgcccctttgcctaagccgttgctaattgtcagcattgggggccccaccaggaattgtaaatatggtgtagatcttgccaggcagctcataacttctctgtataatgtgctagatagctgtgggagtgtcagaatctcattctctccgagaacaccatggaagcaggttgctgatactatatttaaagaatttgctggacatcccaaggtctatatttggaatggtgaagaacctaaccctcacatgggacatcttgcatgggctgatgcttttgtcataacagcagactcgataagtatgttaagtgaggcaggtagcacagggaaacctgtttatgttattgggaccgaacactgtaaatggaagttttcggcttttcacaagactctacgggagcgaggggttgttcgcccgttcac

SEQ ID NO: 12163 - DNA, 667 bp, Zea mays
  unsure (1)..(667): unsure at all n locations; Clone ID: LIB3061-096-Q1-K6-H2
caacatagnaaagcacaatagtgtaccaacaatggcagccaaaatattttgcctccttatgctccttggtctttctgcaagtgctgctacggcgaccattttcccgcaatgctcgcaagctcctatagcttcccttcttcccccgtacctctcaccagcggtgtcttcggtatgtgaaaacccaattcttcaaccctacaggatccaacaggcaatcacagctggcatcttacctttatcacccttgttcctccaacaatcatcagccctattacatcagttacctttggtgcatttattggcacaaaacatcagggcacaacaactacaacaacttgtgctagcaaaccttgctgcctactctcagcaacagcagtttcttccattcaaccaactagctgcattgaactctgcttcttatttgcaacaacaacaactaccattcagccagctacctgctgcctacccccagcaatttcttccattcaaccaactggcagcattgaactctcctgcttatgtacagcagcaacaactactaccattcagccagctagctggtgtgagccctgctaccttcttgatacaaccacagttgttgccgttctaccagcacgctgcgcctaaacgctgcaccctcttacaactgcaaacattgctgccattc

SEQ ID NO: 12164 - DNA, 582 bp, Zea mays
  unsure (1)..(582): unsure at all n locations; Clone ID: LIB3061-096-Q1-K6-H3
ttgtaaagccaatagtgtaccaacaatggcagccaaaatattttgcttccttatgctccttggtctttctgcaagtgttgctaccganaccattttcccacaatgctcacaagctcctatagcttcccttcttcccccatacctctcaccagcggtgtcttcaatgtgtgaaaccccaattgttcaaccctacaggatccaacaggcaatcgcaacaggcatcttaccattatcacccttgttcctccaacaaccgtcagccctattacagcagttacctttggtccatttggtggcacaaaacatcagggcacaacaactacaacaacttgtgctagcaaaccttgctgcatactctcagcaacatcagtttcttccattcaaccaactggctgcattgaactctgctgcttatttgcaacaacaattaccattcagccagctagttgctgcctacccccagcaatttcttccattcaaccaactagcagcattgaactctgctgcttatttacagcagcaacaactactaccattcagccagctagctgatgtgagccctgctgccttcttgacacaaca

SEQ ID NO: 12165 - DNA, 257 bp, Zea mays
  Clone ID: LIB3061-096-Q1-K6-H4
tcgttttcaaccaactatctacactgaaccctgctgcttatttgcagcaacaactattaccattcagccagctagctactgcctactctcatcaacaacaacttctccccattaaacaaggtgaaagatttccatcaaaaaaaaaaaaaaaaaaaaaataaaaaaaaaaaaaaaaaaaaaaaagagaaaggatgaaaaaatgggaaaatggatgtggggggtaggtgtggttgggtggtttttttggtggttttgtg

SEQ ID NO: 12166 - DNA, 640 bp, Zea mays
  unsure (1)..(640): unsure at all n locations; Clone ID: LIB3061-096-Q1-K6-H5
gtcagtatatagatgctgatgttcatgctcatccatcaatcttgcatgaccatagtcatatggattgcactcattccagcgagaggggtgattgctctataattgctatctccagaagcaatttatcattggatgagcagcatgatagtcccaaagaatataccaagagacatgaaccttcaagagaaactgataataataagggaggggaagatcacatggcaggctgctcccagcctgttggcaacatggggatgtctcaaggtgcaggcattgcatgtaatggtgataaaaatacgggtgcagcagcttatttccaggataaagatgtctctgcatcttctgctattgaaaatgtagcactgcggcactgcacagcttcatcgctcaagttaaatgtacctccaattgatgttgacaaggtaagatgcatagtaagaaatatcgtgagagattggggtgatgagggtcaaaaggaacgtgatgagtgctataagcccattcttgaggagcttaatcgcctttttcctaaccggagcgatcagaggcctccttcatgtcttgtccctggtgctgggcttgngagattggctcttgatatatcttctctgggttttgtaagccaagggaatgaattctc

SEQ ID NO: 12167 - DNA, 646 bp, Zea mays
  unsure (1)..(646): unsure at all n locations; Clone ID: LIB3061-096-Q1-K6-H6
canaaacacaccaagcgaactacctagcaacgacttaacaacaatggctaccaagatattagccctccttgcgcttcttgccctttttgtgagcgcaacaaatgcgttcattattccacaatgctcacttgctcctagtgccattataccacagttcctccgaccagttacttcaatgggcttcgaacacctagctgtgcaagcctacaggctacaacaagcgcttgcggcgagcgtcttacaacaaccaattaaccaattgcaacaacaatccttggcacatctaaccatacaaaccatcgcaacacaacagcaacaacagttcctaccagcactgagccaactagatgtggtgaaccctgtcgcctacttgcaacagcaggtgcttgcatccaacccacttgctctggcaaacgtagctgcataccaacaacaacaacaattgcaacagtttctgccagcgctcagtcaactagccatggtgaaccctgccgcctacctacaacagcaacaactgctttcatctagccctctcgttgtgggtaatgcacctacatacctgcaacaacaattgctgcaacagattgtaccagctctgactcagctagctgtggcaaaccctgctgcctacttgcaacagctgctt

SEQ ID NO: 12168 - DNA, 670 bp, Zea mays
  unsure (1)..(670): unsure at all n locations; Clone ID: LIB3061-096-Q1-K6-H7
cagaatttgattgtgactataatttgtacccagataaagatgcccagtatcacttcttcaggaattatctacaccctgatagacctagtgaggtggatgcacaagatatggaagtactttatgntggaaacaaacactttcagactagcatcgcacatttactgggcattatgggcccttattcaggcaaaggtatccccaattgactttgactatcttggatacttcttcttgcggtatggtgagtacaagaaacaaagggagtcctgcttctccttggcacaaagctttctctccgagctaaaaaatggctagagcctgagaatctgttcacgagtttatactggtgtacgcatgctcggagcgggtacgcgttgtgatcatcggctgctacccagaaactctattgtagcggttgtagcagatcttcattgttgtatctgatgttaggttcgtcattgcctaaggactagtttgggtactctactattgagcttaatccatgtgtattgagatgattagggtgtaacttaaactaatttacactccaatctacctcaacatatgtggattggtggattggggtcaatactagactacccaaataacagggaagtcgcatgacccgtccaggnagacacagggtggcaaattctgtacttatatttat

SEQ ID NO: 12169 - DNA, 663 bp, Zea mays
  unsure (1)..(663): unsure at all n locations; Clone ID: LIB3061-096-Q1-K6-H8
ctttcctgcagacaagctgtaaatctcgcctagctcgtcgtcggagaccaagggagaagagcaagggggggcgcagaggcttgctggcttgctgcctacctagctcgtcggggccctatggagatccagcaccaccgggggctgggcaactccaaggttgtcaaggtgcagagcgaggaggcgtgggatctgttcaccgatcaagcgagcaacgaaggccggcccgttgttgcccatttcggggcgtcatggtgcgtgacgtccctgtccatgaactacaagtttgaggagctggcgcagacccaccccgaggtcttgttcctctacgtggacgtcgacgatgtccagagtgtttcatccaggtacggagtgaaggccatgccgacgttcttcctcatcaagagcaaggaggtggtggggaagatcgtcggggcgaacccagacgaggtgaagaagctggtggatgcttccgccgagcccttggagactcagatagtcgtggagtagtagtcgtttcagactttttttttgaagagtcgttcgtgtcttccgaaactgctccgcgagactgtgcgaccgtgagtgcttcttggtcagggtctggatcgtcccgnactgtccagtgtcgcccgtgtgtgtgcgcgtgtgatgggtttctgtcgc

SEQ ID NO: 12170 - DNA, 649 bp, Zea mays
  Clone ID: LIB3061-096-Q1-K6-H9
cggacgcgtgggcatgaacacaccaagcgaagcacattagcaacaacctaacaacaatggctaccaagatattatccctccttgcgcttcttgcgctttttgcgagcgcaacaaatgcgttcattattccacaatgctcacttgctccaagttccattattacacagttcctcccaccagttacttcaatgggcttcgaacacccagctgtgcaagcctataggctacaacaagcaattgcggcgagcgtcttacaacaaccaatttcccagttgcaacaacaatccttggcacatctaacaatacaaaccatcgcaacgcaacagcaacaacaattcctaccagcactgagccacctagccatggtgaaccctgccgcctacttgcaacagcagttgcttgcatcaaacccacttgctctggcaaacgtagttgcaaaccagccacaacaacagctgcaacagtttctgccagcgctcagtcaactagccatggtgaaccctgccgcctacctacaacagcaacaactgctttcatctagcccgctcgctgtggccaatgcacctacatacctgcaacaacaattgttgcaacagattgtaccagctctgactcagctagttgtggcaaaccctgctgcctacttgca

SEQ ID NO: 12171 - DNA, 603 bp, Zea mays
  Clone ID: LIB3061-120-Q6-K6-A1
cgatatcttctcttcgcgcttccgcgctgagggttccaccagtatgcagcagccattgcgcaaggcagctgcaattgagaatccacttccagtcggccttgcagatctctacaagggtgtgacaaaaaagatgaaaatctcaagagagactattgatgccagcgggagaatctcaaacacagaggatattctgacaatacaagtaaaggctggttggaagaagggaacaaggattacatttcctgacaagggaaatgaagctccaaatatgaaacctgctgatattgttttcatcattgatgagaagccccatgatgttttcactcgggaggggaatgatcttgtcgtgactgagaagatctcactggtggaagcactgactggctataccgcacgtgtcactacgcttgacgggcggagcctatcactgcacatcaactcaataatccatccaaagtacgaagaggtgatgcctggagagggcatgccaatgcccaaggaccccacaaagaagggaaatctgcggattaagttcaacataatgttcccctctaggctgacttctgatcagaaaggccggatcaagaggctattgggttctta

SEQ ID NO: 12172 - DNA, 596 bp, Zea mays
  Clone ID: LIB3061-120-Q6-K6-A10
ttcacgtctgatttccctcatgtcgaggggtatttctggaccatggttaaccagcctaacttcaagaaggtcattggtgaggtcaagcaggcagagtctgaccctcctattccgaaaaagctgctccttctaaggagccaaaggcaaaggatgtcaagaaggaggctccaaaggaggcccccaagccaaaggtggttgaggcaccagcagaagaggaagcaccaaagccaaagccaaagaatcctcttgacttgctgccaccaagcaagatggtccttgatgactggaagaggctatactcaaacacaaagactaacttccgggaggttgccatcaaaggtttctgggacatgtacgacccagagggctactctttgtggttctgtgactacaagtacaatgatgagaacaccgtctcctttgtgaccctgaacaaggttggtggattcctgcagcggatggacctgtgccgcaagtacgcctttgggaagatgctcgtgataggctctgagccacccttcaagctgaagggcctttggctcttccgtggccaggatgttcccaagtttgtaatggacgaggtctatgacatggag

SEQ ID NO: 12173 - DNA, 650 bp, Zea mays
  unsure (1)..(650): unsure at all n locations; Clone ID: LIB3061-120-Q6-K6-A12
ccggngcacaagggaaacacacaagcacaacccctttccctttttctggcttactgcaagcaaatactctacccaattacttgttggggtcaaatcttacccctattcgggagtttgacttctcgcagttacttcagacacagtcagctacaaagtataacccatctgcggcacctaataatctgccagcaatctccatgcaagagactttaaaaccaggaggctttcccaacactcagtctacgcaacatgttcccaatacgagcataccatcgggtcttcctctcccacaacaattgcctgtatactctcagccaactctgcctcttgggccttttaccagcctggttggctatccatatttgcctcagaactactacctaccatctgcggccttccagcaagcgtactcaagtaatgggcctttccatcaatctggtgctcctgctgtgcctggagctggtatgaagtattcgatgccacaatacaagagcagcccacctgcttcgagcctaccacagccatcatcactctctgngttatggagggttcggaaatgcaaataatattcctggaaatttcagcctaatacagggtgctccctctgcgccctacaactttgggattgatgaagcttaggcacacaattc

SEQ ID NO: 12174 - DNA, 657 bp, Zea mays
  Clone ID: LIB3061-120-Q6-K6-A2
cgccttcggggtaacacacataatcgaagcacgattaacaacaacctaacagcaatggctaccagagtaataatcgctccttgcgctgcttgggctttttgggagcgcaacaaatgcgtacattatacgacagtgctgactcgctccaagttccattattacacaggccctaccaccagctacttcaatgggcttagaacacccagctgggcaagcctataggctacaacaagcaattgcggcgagcgttttacaacaaccaatttcccagttgcaacaacaatccttggcacatctaacaatacaaaccatcgcaacgcaacagcaacaacaattcctaccagcactgagccacctagccatggtgaaccctgccgcctacttgcaacagcagttgcttgcatcaaacccacttgctctggcaaacgtagttgcaaaccagccacaacaacagctgcaacagtttctgccagcgctcagtcaactagccatggtgaaccctgccgcctacctacaacagcaacaactgctttcatctagcccgctcgctgtggccaatgcacctacatacctgcaacaacaattgttgcaacagattgtaccagctctgactcagctagttgtggcaaaccctgctgcctacttgcaacagctgct

SEQ ID NO: 12175 - DNA, 590 bp, Zea mays
  Clone ID: LIB3061-120-Q6-K6-A3
ctgaagttcggagccgccggcccgtccgcctccctctccgcctcccgtccccaaggccaatagttttcaagtggcaatggcggaccaggctaaccaacccactgtccttcataagctcggtggccagttccacctgcgctcgatcatctctgaaggtgtacgggcccgtaacatatgcccatctgtctcatcttatgaaaggagatttgccacaaggaactacatgacccagagcctttggggcccttcaatgtctgttagcggtggcatcaatgtcccagtgatgcagaccccgctctgtgctaatgctcctgctgagaaaggaggcaagaacttcatgattgatttcatgatgggcggtgtttcagctgctgtttcaaagactgctgctgctcccatcgagcgtgtgaagctgcttattcagaaccaagatgagatgattaagtctggtaggctatcagagccgtacaagggtattgttgactgcttcaaacgtaccattaaggatgaaggtttctcttccttgtggaggggtaacactgctaatgttattcgttacttccctactcaggctttgaactttgcattta

SEQ ID NO: 12176 - DNA, 402 bp, Zea mays
  Clone ID: LIB3061-120-Q6-K6-A4
atcagccctattacaacagttacctttggtgcatttattggcacaaaacatcagggcacaacaactacaacaacttgtgctagcaaaccttgctgcctactctcagcaacagcagtttcttccattcaaccaactaggttcattgaactctgcttcttatttgcaacaacaacaactaccattcagccagctacctgctgcctacccccagcaatttcttccattcaaccaactagcagcattgaactctcctgcttatttacagcagcaacaactactaccattcagccagctagctggtgtgagccctgctaccttcttgacacaaccacagttgttgccgttctaccagcacgttgcgcctaacgctggcaccctcttacactgcaacaattgctggca

SEQ ID NO: 12177 - DNA, 169 bp, Zea mays
  unsure (1)..(169): unsure at all n locations; Clone ID: LIB3061-120-Q6-K6-A5
ngagttaattactgataagaaagaaatgagggtttacctgctacagcccttggtttagcagcgcagactgctgtgtcaaagggccatgaaaatgctacagctgaaaatggaccttgngttatcacgttggatgcaccaagctttattcctgttatgcaacatgctcgaa

SEQ ID NO: 12178 - DNA, 296 bp, Zea mays
  unsure (1)..(296): unsure at all n locations; Clone ID: LIB3061-120-Q6-K6-A6
gcacgctgcgcctaacgctggcaccctcttacaactgcaacaattgctgccattcaaccaacttgctttgacaaacccagcagcgttctaccaacaacccatcattggtggtgccctcttttagatttcttatgagttatagttcaataataaagttttttgtctgatgtttgtggcttcccagaaataagaaagtacatttctnanttnaaaaaaaaaaaaaaaaaaaaaaaaaaccaaaaaaaaaaaaagaaagaaaatataaaaagaaacaaaataaaaaaaaaaaaacaaaa

SEQ ID NO: 12179 - DNA, 662 bp, Zea mays
  unsure (1)..(662): unsure at all n locations; Clone ID: LIB3061-120-Q6-K6-A7
gcacaatattgtaccaataatggcagccaaaaattttgcctcattatgctccttggtctttctgcaagtgctgctacggcgagcattttcccgcaatgctcacaagctcctatagcttcccttcttcccccatacctctcaccagcgatgtcttcagtatgtgaaaatccaattcttctaccctacaggatccaacaggcaatcgcagcaggcatcttacctttatcacccttgttcctccaacaatcatcagccctattacagcagttacctttggtgcatttattggcacaaaacatcagggcacaacaactacaacaactcgtgctagcaaaccttgctgcctactctcagcaacagcagttacctttggtgcatttgttggcacaaaacatcagggcacaacaactacaacaactcgtgctagcaaaccttgctgcctactctcagcaacaacagtttctgccattcaaccaactagctgcattgaactctgctgcttatttgcagcaacaacaactactaccattcagccagctagctgctgcctacccncggcaatttcttccattcaaccaactggcagcattgaactctcatgcttatgtacaacaacaacaactactaccattcagccagctagctgctgtgagccctgctgc

SEQ ID NO: 12180 - DNA, 678 bp, Zea mays
  unsure (1)..(678): unsure at all n locations; Clone ID: LIB3061-120-Q6-K6-A8
ttagcaacatacatatgtgaagtacactangcaacatcgttagcaccaatggcgagccaatatttattgccctcctatgccctccttgctcntttcagcaagcgctgctacctcgcacttttattccacaatgctcacaacaatacctctctccggtgacagccgcgggatttcaatacccaactatacaatcctacatggtacaagaggccatccaagcaagcatcttacggtcattagcattaaccctccaacaaccatatgctctattgcaacagccatccttagtgcatctgtatctccaaagaatcgcggcacaacaactacaacaacagttgctaccaacaatcaatcaagtagttgcagcgaaccttgctgcttacctccagcaacaacagtttcttccattcaatcaactagctggggtgaaccctgctatctacttgcaggcacaacagctactaccatttaaccaacttgtcgggagcccttatgccttcttactgcaacaacagcttctgccattccatctgcaagctgtggcaaacattgttgctttcttgagacaacaacatttgttgccattttacccacagttgtgggaaacattaatgccttcttgcaacagcaacaattgctaccattctacccacagaatgtggcaaacattgttgcctt

SEQ ID NO: 12181 - DNA, 658 bp, Zea mays
  unsure (1)..(658): unsure at all n locations; Clone ID: LIB3061-120-Q6-K6-A9
tagcaacatagnaaagcacaatagtgtaccaacaatggcagccaaaatattttgcttccttatgctccttggtctttctgcaagtgctgctaccgcaaccattttcccacaatgctcacaagctcctatagcttcctttcttcccccatacctctcaccagcggtgtcttcagtatgtgaaaacccaattcttcaaccctacaggatccaacaggcaatcgcagcaggcatcttacctttatcacccttgttcctccaacaaccgtcagccctattacagcagttacctttggtgcatttgttggcacaaaacatcaaggcacaacaactacaacaacttgtgctaggaaaccttgctgcctactctcagcaacagcagtttcttccattcaaccaactggctgcattgaactctgctgcttatttgcaacaacaactaccattcagtcagctagctgctgcctacccccagcaatttcttccattcaaccaactggcagcattgaactctgctgcttatttacaacagcaacagctaccaccattcagccagctagctgatgtgagccctgttgccttcttgacaaacaacagttgntgccgttctacctgcacgctgcgcctaacgcntgcaccctcttacactgcaacattgctg

SEQ ID NO: 12182 - DNA, 439 bp, Zea mays
  Clone ID: LIB3061-120-Q6-K6-B1
catggctggggatgggttctatgtatcaacaatcgtcgatacgacgaagggcaccgacgtgtaagacagctgggtgccaatgtcgcaagcggggacggtgctcctgtgtgatctgcacagggcccgctttctctgggccctaccgtgcaagcccgcgcatatctgcataaacagcaacaaccactgtactttcttcaacaggggaatggagagagcacccttgcaaatatagaaccctccattgacctaagaaatatttatgctcccccaacaatatatcatacatctattattaaagttattcctatggccaaaaagcctcaccctttactatttgaaagcgtgcatatttttctaacatatttttttggaagagaacaatctggtacagaagaatcattaagatcccacacgagggctttgtcaaatacaaaatttg

SEQ ID NO: 12183 - DNA, 583 bp, Zea mays
  unsure (1)..(583): unsure at all n locations; Clone ID: LIB3061-120-Q6-K6-B10
ggaaggaggtgtacgacctcgcgccgcgcgagccgccgccgccggcagccgtggccgacggcgagctcgtgttcgagaacaagtggccccaggatctgccgggcttcagagaggcgctggaggagtacgcgaaagcgatggaagagctggcgttcaagctgctggagctgatcgcccggagcctgaagctgaggcccgaccggctgcacggcttcttcaaggaccagacgaccttcatccggctgaaccactaccctccatgcccgagccccgacctggccctcggcgtgggacggcacaaggacgccggcgccctgaccatcctgtaccaggacgacgtcggcgggctcgacgtccggcggcgctccgacggcgagtgggtccgcgtcaggcccgtgcccgactctttcatcatcaacgtcggcgacctcatccaggtgtggagcaacgacaggtacgagagcgcggagcaccgggtgtcagtgaactcggcgagagagaggttctccatgccctacttcttcaacccggcgacctacaccatggtgngagccgtggaggagctggtgagcgaggacgatct

SEQ ID NO: 12184 - DNA, 621 bp, Zea mays
  Clone ID: LIB3061-120-Q6-K6-B11
ggaagccacacacttgatctgtgcgatgctgattgaagtccccaatatggctgccagcacctatgacaagcggagacctatgagcaaaacattccgaaggcttcttgaagtgagtgaaaggcagacatttgttgggccgcccgagaatgtgagggaccatgtaatggctgccacaagagccctcaacaagggtgatcaccaaaaggctttcagtgtcataaattcgttggagatttggaagcttttgaggaacagagagcatgtccttgagatgttgaagcttaagatcaaggaggaagctcttagaacctatctcttttcatactcgtcctcgtacgagtccttaagccttaaccagctcactaccatgtttgatctcagcgagcagcatgcccacagcattgttagcaagatgatgatgcatgaagagcttcatgctagctgggaccagccaacaaagtgcatcgtattccatagtgttgaccaaactaggcttcaggggctactcttccagatggcagataagctctcggtcctggtggagatcaatgagagggcatacgaggcaagaactggtggtgctctcgagggggtaccgcccaggcgcaggggtgagggtca

SEQ ID NO: 12185 - DNA, 664 bp, Zea mays
  unsure (1)..(664): unsure at all n locations; Clone ID: LIB3061-120-Q6-K6-B12
caacatagnaaagcacaatagtgtaccaacaatggcagccaaaaattttgcctccttatgctccttggtctttctgcaagtgctgctacggcgaccattttcccgcaatgctcgcaagctcctatagcttcccttcttcccccgtacctctcaccagcggtgtcttcggtatgtgaaaacccaattcttcaaccctacaggatccaacaggcaatcacagctggcatcttacctttatcacccttgttcctccaacaatcatcagccctattacatcagttacctttggtgcatttattggcacaaaacatcagggcacaacaactacaacaacttgtgctagcaaaccttgctgcctactctcagcaacagcagtttcttccattcaaccaactagctgcattgaactctgcttcttatttgcaacaacaacaactaccattcagccagctacctgctgcctacccccagcaatttcttccattcaaccaactggcagcattgaactctcctgcttatttacagcagcaacaactactaccattcagccagctagnctggtgtgagccctgctaccttcttgatacaaccacagttgttgccgttctaccagcacgctgcgcctaaacgctgcaccctcttacactgcaacaatgctgccatt

SEQ ID NO: 12186 - DNA, 584 bp, Zea mays
  Clone ID: LIB3061-120-Q6-K6-B2
gattttcagatcagatcgggaagtgagatggatagccggataggggtagtcgcaacaaaaagaaaccaaactcggctcaagagagatcgcatcttgcctgcccacccagcttccctttcgttcctcctcgccccagcgacgcggcctcccgtagaccgagcaaggcaacccaccactgagaggcacgcagaggagcaggaagccggagaccaagatgtcgtcggtgttcagcggcgatgagacggcccccttcttcggtttcctcggcgccgccgccgccctcgtcttctcatgcatgggcgcagcgtacgggaccgcgaagagcggcgtcggcgtggcgtcgatgggtgtgatgcggccggagctcgtcatgaagtccatcgtgcccgtggtcatggctggtgtgctcggtatctacgggctcatcatcgccgtcatcatcagcactgggatcaaccccaaggccaagccctactacctttttgatggctacgctcacctttcgtccgggcttgcctgtggccttgctgggcttgcagctggcatggccatcggcattgttggtgatgctgggagtcagggcg

SEQ ID NO: 12187 - DNA, 601 bp, Zea mays
  Clone ID: LIB3061-120-Q6-K6-B3
attgagaccaacaagcacatagaagtggaatccagtagcaacaacagagcaacaatggcgaccaagatattttccctccttatgctccttgctctttctgcatgtgttgctaacgcgacaattttccctcaatgctcacaagctcctatagcttcccttcttcccccataccttccatcaatgatagcttcagtatgtgaaaacccagctcttcagccctataggctccaacaagcaatcgcagcaagcaacatacctttatcacccttgttgtttcaacaatcgccagccctatctttggtgcagtcattggtacaaaccatcagggcacagcagctgcagcaactcgtgctacctgtgatcaaccaagtagctctggcaaacctttctccctactctcagcaacaacaatttcttccattcaaccaactgtctacactgaaccctgctgcttatttgcagcaacaactattaccattcagccagctagctactgcctactctcagcaacacaacttcttccatttaaccaattggccgcactgaaccccgctgcttatttgcagcagcaaatactactaccatttagccagctagctgc

SEQ ID NO: 12188 - DNA, 449 bp, Zea mays
  Clone ID: LIB3061-120-Q6-K6-B4
tgacttccagaggtgcctttggtgcatttatatggcgcaaaaatgagggcacaacaactacaacaacttgtgctagcaaaccttggtgcctacttttagcaacaggagtttcttccattcaaccaacttgggtcattgaactctggttcttatttgcaacaacaacaactaccattcagccaggtacctggtggctacccccagcaatttcttccattcaaccaactagcagcattggactctcctgcttatttacaggagcaaccactactaccattcagccagcttgctggtgtgagccctggttcctttttgacacaaccgcagttggtggcggtctaccaggacggtgggcctaaggcttgcccccttttacaactgtaacaattgctggcattgaagcaacatggtttggcaaaaccagagggtggtaccgacgactcatcaat

SEQ ID NO: 12189 - DNA, 259 bp, Zea mays
  Clone ID: LIB3061-120-Q6-K6-B5
ctggtgtgagccctgctaccttcttgatacaaccacagttgttgccgttctaccagcacgctgcgcctaacgctggcaccctcttacaactgcaacaattgctgccattcaaccaacttgctttgacaaacccagcagcgttctaccaacaacccatcattggtggtgccctcttttagatttcttatgagttatagttcaataataaagttttttgtctgatgtttgtggcttcccagaaataagaaagtacatttct

SEQ ID NO: 12190 - DNA, 383 bp, Zea mays
  Clone ID: LIB3061-120-Q6-K6-B6
aaaaaaaaaaaaaaaaaaaaaaaaaaaaaaaaaaaaaaaaaaaaaaaaaaaaaaaaaaaaaaaaaaaaattaaaaaaaaaaaaaaggggcgggccggttttaggaggatcacaagctttacgtcaccgcgtcgcatcgcaacgttcataagcttcttttttatagtggtacaccttaaaattacaatataactgggcccggtcggtctttacaaacgttcgtggacttgggaaaaaacccttggcggttcacccaactttaaatcgcctttgcgagaacaattccccttttcggccagcttggcggtaatacgcaaaaaggcccggaaccgaatcgccttttccaaacagttgccgcagccttgaatggcagaagtggaacgc

SEQ ID NO: 12191 - DNA, 140 bp, Zea mays
  Clone ID: LIB3061-120-Q6-K6-B7
ttacaacccatcattggtggtgccctcttttagattgctgatgagttatagttcaataataaagtcttttttgctgatctttgtggcttcccagaactaacgaaatacatttttagattcttatcgtgcttctagtctcc

SEQ ID NO: 12192 - DNA, 641 bp, Zea mays
  unsure (1)..(641): unsure at all n locations; Clone ID: LIB3061-120-Q6-K6-B8
nttttcagcattcaaaaacacaccaagcgaagcgcactagcaacgacctaacaccaatggctaccaagatattagccctccttgcgcttcttgcccttttagtgagcgcaacaaatgcgttcattattccacagtgctcacttgctcctagtgccagtattccacagttcctcccaccagttacttcaatgggcttcgaacatccagccgtgcaagcctacaggctacaactagcgcttgcggcgagcgccttacaacaaccaattgcccaattgcaacaacaatccttggcacatctaaccctacaaaccattgcaacgcaacaacaacaacaacagtttctgccatcactgagccacctagccgtggtgaaccctgtcacctacttgcaacagcagctgcttgcatccaacccacttgctctggcgaacgtagctgcataccagcaacaacaacagctgcaacagtttatgccagtgctcagtcaactagccatggtgaaccctgccgtctacctacaactactttcatctagcccgctcgcggtgggcaatgcacctacgtacctacaacaacagttgctgcaacaaattgtaccagctctgactcagctagctgtggcaaaacctgctgcctactta

SEQ ID NO: 12193 - DNA, 623 bp, Zea mays
  Clone ID: LIB3061-120-Q6-K6-B9
aaatggaatccagtagcaacaatagagcaacaatggcgaccaagatattttccctccttatgctccttgctctttctacatgtgttgctaacgcgacaattttccctcaatgctcacaagctcctatagcttcccttcttcccccataccttccatcaattatagcttcaatatgtgaaaacccagctcttcaaccatataggcttcaacaagcaatcgcagcaagcaacatacctttatcgcccttgttgtttcaacaatcgccagccctatctttggtgcagtcattggtacaaaccatcagggcacaacagctgcagcaactcgtgctacctctgatcaaccaagtagctctggcaaacctttctccctactctcagcaacaacaatttcttccattcaaccaactgtctacactgaaccctgctgcttatttgcagcaacaactattaccatttagccagctagctactgcctactctcagcaacaacaacttcttccatttaaccaattggccgcactgaaccccgctgcttatttgcagcagcaaatactactaccatttagccagctagctgcagcaaaccgtgcttccttcttgaccagcaacagttgctgcctt

SEQ ID NO: 12194 - DNA, 635 bp, Zea mays
  unsure (1)..(635): unsure at all n locations; Clone ID: LIB3061-120-Q6-K6-C1
cagcaagcaacatagnaagtagaatccattagcaacaatagagcaacaatggcgaccaagatattttccctccttatgctccttgctctttctacatgtgttgctaacgcgacaattttccctcaatgctcacaagctcctatagcttcccttcttcccccataccttccatcaattatagcttcagtatgtgaaaacccagctcttcaaccatataggcttcaacaagcaatcgcagcaagcaacatacctttatcgcccttgttgtttcaacaatcaccagccctatctttggtgcagtcattggtacaaaccatcagggcacaacagctgcagcaactcgtgctacctgtgatcaaccaagtagctctggcaaacctttctccctactctcagcaacaacaatttcttccattcaaccaactgtctacactgaaccctgctgcttatttgcagcaacaactattaccatttagccagctagctactgcctactctcagcaacaacaacttcttccatttaaccaattggccgcactgaaccccgctgcttatttgcagcagcaaatactactgccatttagcgagctagctgcagcaagtcgtgcttccttcttgacacagcacagttgctg

SEQ ID NO: 12195 - DNA, 624 bp, Zea mays
  Clone ID: LIB3061-120-Q6-K6-C10
caaaacacaccaagcgaagcgcactagcaacgacctaacaccaatggctaccaagatattagccctccttgcgcttcttgcccttttagtgagcgcaacaaatgcgttcattattccacagtgctcacttgctcctagtgccagtattccacagttcctcccaccagttacttcaatgggcttcgaacatccagccgtgcaagcctacaggctacaactagcgcttgcggcgagcgccttacaacaaccaattgcccaattgcaacaacaatccttggcacatctaaccctacaaaccattgcaacgcaacaacaacaacaacagtttctgccatcactgagccacctagccgtggtgaaccctgtcacctacttgcaacagcagctgcttgcatccaacccacttgctctggcgaacgtagctgcataccagcaacaacaacagctgcaacagtttatgccagtgctcagtcaactagccatggtgaaccctgccgtctacctacaactactttcatctagcccgctcgcggtgggcaatgcacctacgtacctacaacaacagttgctgcaacaaattgtaccagctctgactcagctagctgtggcaaaccctgctgccta

SEQ ID NO: 12196 - DNA, 636 bp, Zea mays
  Clone ID: LIB3061-120-Q6-K6-C11
tttcttcccccatacctctcaccagcggtgtcctcagtatggtgaaaacccaattcttcaaccctacaggatccaacaggcaatcgcagcaggcatcttacctttatcacccttgttcctccaacaaccgtcagccctattacagcagttacctttggtgcatttgttggcacaaaacatcaaggcacaacaactacaacaacttgtgctaggaaaccttgctgcctactctcagcaacagcagtttcttccattcaaccaactggctgcattgaactctgctgcttatttgcaacaacaactaccattcagtcagctagctgctgcctacccccagcaatttcttccattcaaccaactggcagcattgaactctgctgcttatttacaacagcaacagctaccaccattcagccagctagctgatgtgagccctgttgccttcttgacacaacaacagttgttgccgttctacctgcacgctgcgcctaacgctggcaccctcttacaactgcaacaattgctgccattcaaccaacttgctttgacaaacccaacaacgttctaccaacaacccatcattggcggtgccctcttttagattgcttatgagttatagttcataatgaagttttt

SEQ ID NO: 12197 - DNA, 260 bp, Zea mays
  Clone ID: LIB3061-120-Q6-K6-C2
gctagccctggcgcggcgcggtccttcggccgccattgctggagctcctgggtccctgctgagcgggcgccgcgacggcgggattagaggtcatacatccggaagccttgcacggggttgccgtgagaagcggggattccgttgacgaaccgccgctgggtgcctgtgctgcccgatggctgtccctggaggtgctcggtgctgctcggggtgcggggttgggggttgtcttttcggggtccttggtggatgtgtccggc

SEQ ID NO: 12198 - DNA, 271 bp, Zea mays
  Clone ID: LIB3061-120-Q6-K6-C3
gatccacctaaacgaacaacataaaccaccactcgcacatataccagattgcctcacacaccagcatcaacaagttcacatgctgctcgcgaaaacgtgagtatcgacagggagtttatgttcagacaactatcaacgagccatgccgtaaaccatacatcatctgcaccttcatcagcaccaactacatcttgattgtgaaggccgacatcttcatctcgatcgatctcatggccatgtgccacagcctggacggttccatgtgcagccc

SEQ ID NO: 12199 - DNA, 595 bp, Zea mays
  unsure (1)..(595): unsure at all n locations; Clone ID: LIB3061-120-Q6-K6-C4
ngattgagaccaactagcaacatagnaaagcacaatagtgtaccaacaatggcagccaaaaattttgcctccttatgctccttggtctttctgcaagtgctgctacggcgaccattttcccgcaatgctcgcaagctcctatagcttcccttcttcccccgtacctctcaccagcggtgtcttcggtatgtgaaaacccaattcttcaaccctacaggatccaacaggcaatcgcagctggcatcttacctttatcacccttgttcctccaacaatcatcagccctattacaacagttacctttggtgcatttattggcacaaaacatcagggcacaacaactacaacaacttgtgctagcaaaccttgctgcctactctcagcaacagcagtttcttccattcaaccaactaggttcattgaactctgcttcttatttgcaacaacaacaactaccattcagccagctacctgctgcctacccccagcaatttcttccattcaaccaactagcagcattgaactctcctgcttatttacagcagcaacaactactaccattcagccagctagcttggtgtgagccctgctacct

SEQ ID NO: 12200 - DNA, 581 bp, Zea mays
  Clone ID: LIB3061-120-Q6-K6-C7
caagctcctatagcttcccttcttcccccataccttccatcaattatagcttcaatatgtgaaaacccagctcttcaaccatataggcttcaacaagcaatcgcagcaagcaacatacctttatcgcccttgttgtttcaacaatcgccagccctatctttggtgcagtcattggtacaaaccatcagggcacaacagctgcagcaactcgtgctacctctgatcaaccaagtagctctggcaaacctttctccctactctcagcaacaacaatttcttccattcaaccaactgtctacactgaaccctgctgcttatttgcagcaacaactattaccatttagccagctagctactgcctactctcagcaacaacaacttcttccatttaaccaattggccgcactgaaccccgctgcttatttgcagcagcaaatactactaccatttagccagctagctgcagcaaaccgtgcttccttcttgacacagcaacagttgctgcctttctaccagcagtttgcggctaaccccgcaaccctcttacaactacaacaattgttgccctttgtccaacttgc

SEQ ID NO: 12201 - DNA, 502 bp, Zea mays
  Clone ID: LIB3061-120-Q6-K6-C9
gtttactaatgggtgctgactactgttagacagatactgaaaataaactacttgccggaaaagtggcattcctattggtattgggcaaaattcatgcatcaggagagcaatcattgacaagaatgctcgaattggagacattgttaagatgctcaatgctgactgtgttcaagaagctgcgatggggacagacgggtacttcatcaaaggtggaattgtcacagtgatctatagatgctttactccctagtggaacagctatatgaagtgaacgtgcgacatgccattgtttgtctctgcattcgacgatgatcagcacctggctacatgcgctatctgcacatcattctgcttgatatcatcggcgcacttatagtgtcatccaaggaattttttctttcttttagctcttttgtgtccttcaatgttgtccggtaaaatgttgttcctgcaaatgttagttacatggtgaatacttattgcgggcctggttttgggggat

SEQ ID NO: 12202 - DNA, 639 bp, Zea mays
  unsure (1)..(639): unsure at all n locations; Clone ID: LIB3061-120-Q6-K6-D1
catcgctggggatgggtacgatgatcaagatcgtcgaacgacgaagggcaccgaggtgttcgtcagcgggttgccaatgtcgaccacggnaaagcatgctcctctctcatctccacaccgtgcagtagctgctgcccgtagcatgtaatgcaatggaataagttatcaaggcaactaacactgaacatagttcttgggctccttggcagcgtcgaggcatggtatctgcccacgccattgtcagggcctcctgagggtacccatgctcgacctacttcatcaaagatgtggtatggacaaatatacatgccactttccagatgaagtgaagagaccaaatgtggatgtcaatcaatctctagatgaaggaatgaaaggaaggagctaagttattgcactggatgtacggggtctagaaaagctagcagtgcaagcatagaacctatgaaacatggatacttggttacaaaattcaactttcagtcaagttttgttcaacaagggtctgattgagacttccatgaaactgatcgatttgtcgttgctgtcatgtatgtgaacttatggtttagaagcagctaagtttccaacatgttacatggtanggaatgtatttgctaacactatttgctagcacta

SEQ ID NO: 12203 - DNA, 629 bp, Zea mays
  Clone ID: LIB3061-120-Q6-K6-D12
ggctctcgctgcgagcgccacctccacgcatacaagcggcggctgcggctgccagccaccgccgccggttcatctaccgccgccggtgcatctgccacctccggttcacctgccacctccggtgcatctcccaccgccggtccacctgccgccgccggtccacctgccaccgccggtccatgtgccgccgccggttcatctgccgccgccaccatgccactaccctactcaaccgccccggcctcagcctcatccccagccacacccatgcccgtgccaacagccgcatccaagcccgtgccagctgcagggaacctgcggcgttggcagcaccccgatcctgggccagtgcgtcgagtttctgaggcatcagtgcagcccgacggcgacgccctactgctcgcctcagtgccagtcgttgcggcagcagtgttgccagcagctcaggcaggtggagccgcagcaccggtaccaggcgatcttcggcttggtcctccagtccatcctgcagcagccgactccatgcccctacgctgctgccggcggtgtcccccactgaagaaactatgtgctgtagtatagccgctggctagctagctagttgagtcatttagcggcgatgattgagt

SEQ ID NO: 12204 - DNA, 650 bp, Zea mays
  Clone ID: LIB3061-120-Q6-K6-D2
ccccgcgtccgcaacaagcaacatagaaagtggaatacagtagcaacaatagagcaacaatggcggccaagatattttccatccttatgctccttgctctttctgcatgtgttgctaacgcgaccatttttcctcaatactcacaagctcctatagctgcccttcttcccccataccttccatcaatgaccgcttcagtttgtgaaaacccagcccttcaaccctacaggctccaacaagcaatcgcaacaagcaacttacctttatcacccctgttctttcaacaatcgccagccctatctttggtgcagtcattggtacaaaccatcagggcacaacagctgcaacaactcgtgctaccagtgatcagccaagtagctctggcaaacctttctccctactctcagcaacaacaatttcttccattcaaccaactgtctacactgaaccctgctgcttatttacaacaacaacaactactaccattcagccagctagctactgcctactctcagcagcaacaatttcttccatttaaccaattggccgcactgaacccctctgcttatttccagcagcaaatactactaccatttggccagctagctacaacaagccccacttcctttttgaaacaacaacaattgctt

SEQ ID NO: 12205 - DNA, 562 bp, Zea mays
  Clone ID: LIB3061-120-Q6-K6-D4
catcaaccctattacaacagttacctttggtgcatttattggcacaaaacatcagggcacaacaactacaacaacttgtgctagcaaaccttgctgcctactctcagcaacagcagtttcttccattcaaccaactagggtcattgaactctgcttcttatttgcaacaacaacaactaccattcagccagctacctgctgcctacccccagcaatttcttccattcaaccaactagcagcattgaactctcctgcttatttacagcagcaacaactactaccattcagccagctagctggtgtgagccctgctaccttcttgacacaaccacagttggtgccggtctaccagcacgttgcgcctaacgctggcaccctcttacaactgcaacaattgctgccattcaaccaacttgctttgacaaacccagcagtggtctaccaacaacccatcattggtggtgccctcttttagatttcttatgagttatagttcaataataaagttttttatctgatgtttgtggcttcccagaaaaagaaagtacatttctagattct

SEQ ID NO: 12206 - DNA, 616 bp, Zea mays
  Clone ID: LIB3061-120-Q6-K6-D5
gccacaaccgtgatgataatgttgacatgaatctggagaacatgatggttatggaagcaatttggcgttccattcagcaggaacaaggacatctagtaaatcctgtttgtggcagctactttcctgtaattgagccaccatcacgtgaaaggcaggcatttcttccggctgctcctctagaaatgcctcatccaggtggatactcttgtgttgcggctttggctgagcaccagccaccaagcatggatttctcttacatggctggcagtagcacatacccagtctttgacatgatccgccgaccgtgcaacatgtctagtggaagcttgtgcagcgtcgagaacagttcactagacacctggagcgggatggcaccaaattgcagcagaggagtggtaagagaggagggagagtgctcaaccgaccactggtcggagggtgcggaggcgggaacaagctatgccggatcggacatcatggtggatgcaggggccatgcaaccgctgcctttcgctgagaatttcaccatggctccaagccacttcagcccggagagcatcgaggagcagatgatgtttttcatgggccgtgtcactagcagaaagtcatcatggta

SEQ ID NO: 12207 - DNA, 624 bp, Zea mays
  Clone ID: LIB3061-120-Q6-K6-D6
aagtggaatccagtagcaacaacagagcaacaatggcgaccaagatattttccctccttatgctccttgctctttctgcatgtgttgctaacgcgacaattttccctcaatgctcacaagctcctatagcttcccttcttcccccataccttccatcaatgatagcttcagtatgtgaaaacccagctcttcagccctataggctccaacaagcaatcgcagcaagcaacatacctttatcacccttgttgtttcaacaatcgccagccctatctttggtgcagtcattggtacaaaccatcagggcacagcagctgcagcaactcgtgctacctgtgatcaaccaagtagctctggcaaacctttctccctactctcagcaacaacaatttcttccattcaaccaactgtctacactgaaccctgctgcttatttgcagcaacaactattaccattcagccagctagctactgcctactctcagcaacaacaacttcttccatttaaccaattggccgcactgaaccccgctgcttatttgcagcagcaaatactactaccatttagccagctagctgcagcaaaccgtgcttccttcttgacacagcaacagttgctgcctt

SEQ ID NO: 12208 - DNA, 630 bp, Zea mays
  Clone ID: LIB3061-120-Q6-K6-D7
ttgccatctactgacctgtgacctccgcatttccaaacagcccgagcgagctagagctagcagagcggcaggcacctccctcctcaaggaacatggcccgcacgcagcagttggcagtagtggcgaccgccgtggtggccttggtgctgctggcggcggcggcgacctcggaggcggccatcagctgcgggcaggtggcgtcggccatcgcgccctgcatctcctacgcgcgcggccagggctcggggccctccgccggctgctgcagcggcgtcaggagcctcaacaacgccgcccgcaccaccgccgaccgccgcgccgcctgcaactgcctcaagaacgccgccgccggcgtcagcggcctcaacgccggcaacgccgccagcatcccctccaagtgcggcgtcagcatcccctacaccatcagcacctccaccgactgctccagggtgaactgaaccctaaacgacgacgacgggcgacggcggccacctgaagacgatccatatctatcccgccgtacgtcggcgcccgcggatcggaccgtcatgaccatatctagctacctacgcatgatcgtcacgacttgcatgtctactactgctacgtgtactactactgaataaaaac

SEQ ID NO: 12209 - DNA, 391 bp, Zea mays
  Clone ID: LIB3061-120-Q6-K6-D8
caactacaacaacttgtgctagcaaaccttgctgcctacccccagcaatttcttccattcaaccaactagcagcattgaactctgctgcttatttacagcagcaacaactactaccattcagccagctagctgatgtgagccctgctgccttcttgacacaacaacagttgttgccgttctacctgcacgctatgcctaacgctggcaccctcttacaactgcaacaattgctgccattcaaccaacttgctttgacaaacccaacagtgttctaccaacaacccatcattggtggtgccctcttttagattgcttatgagttatagttcaataatgaagttttttggatgatgtttgtggcgtcccagaaataagaaagtacatttctag

SEQ ID NO: 12210 - DNA, 667 bp, Zea mays
  unsure (1)..(667): unsure at all n locations; Clone ID: LIB3061-120-Q6-K6-D9
ggcgtttgaacctccttttgacatgagtcagtatatagatgctgatgttcatgctcatccatcaatcttgcatgaccatagtcatatggattgcactcattccagcgagaggggtgattgctctataattgctatctccagaagcaatttatcattggatgagcagcatgatagtcccaaagaatataccaagagacatgaaccttcaagagaaactgataataataagggagggngaagatcacatggcaggctgctcccagcctgttggcaacatggggatgtctcaaggtgcaggcattgcatgtaatggtgataaaaatacgggtgcagcagcttatttccaggataaagatgtctctgcatcttctgctattgaaaatgtagcactgcggcactgcacagcttcatcgctcaagttaaatgtacctccaattgatgttgacaaggtaagatgcatagtaagaaatatcgtgagagattggggtgatgagggtcaaaaggaacgtgatgagtgctataagcccattcttgaggagcttaatcgcctttttcctaaccggagcgatcagaggcctccttcatgtcttgtccctggtgcctggcttgggagattggctcttgatatatcttctctgggttttgtaagccaagggaatgaattctc

SEQ ID NO: 12211 - DNA, 569 bp, Zea mays
  Clone ID: LIB3061-120-Q6-K6-E10
agtacttttgcctcccctatcaatcagaagcactgactttaggcgctgacctagttattcattctgcaacaaagtacattgctggacacaacgatgttattggaggatgcgtcagtggcagagatgagttggtttccaaagtccgtatttatcaccatgtggttggtggtgttctaaacccgaatgctgcgtaccttatccttcgaggcatgaaaacacttcatctccgtgtgcaatgtcagaataacactgctcttcggatggcccagtttttagaggaacatctaaagattgcccgtgtctactatcctggcttgcctagccaccctgaacatcacattgccaagagtcaaatgactggctttggtggtgtggttagttttgaggttgctggagactttgatgccacaaggaaattcatcgattctgttaagataccctatcatgccccttctttcggaggctgtgagagcataattgatcagcctgctatcatgtcctactgggattcaaaggagcagagggacatctatgggatcaaggacaacctgatcaggttcagcattgga

SEQ ID NO: 12212 - DNA, 588 bp, Zea mays
  unsure (1)..(588): unsure at all n locations; Clone ID: LIB3061-120-Q6-K6-E11
ctcaaccttgtgcacctacccctggagctgatcaagaccagggtcaccatcgagaaggacgtatacgacaacgtcgcgcacgcgttcgtgaagatcctacgcgacgagggcccgtcggagctgtaccgtgggctgacacccagcctgatcggcgtggtgccgtacgcggcctgtaacttctacgcctacgagacgctgaagcggctctaccgtcgcgcgaccgggcggcgtcccggcgcggacgtgggccccgtggcgacgctgctcatcgggtcggcggcgggcgccatcgccagctcggccacgttcccgctggaggtggcccgcaagcagatgcaggtgggcgctgtgggcgggaggcaggtgtaccagaacgtcctccacgctatctactgcatcctcaagaaggagggcgccggcggcctgtaccgaggtctcggccctagctgcatcaagctcatgcccgccgccggcatcgccttcatgtgctacgaggcgtgcaagaagatcctcgtcgacaaggagaggatgaggaggaggaggacgngaccggcggcggagaggatgacaagaaaaagttgaatgatc

SEQ ID NO: 12213 - DNA, 559 bp, Zea mays
  Clone ID: LIB3061-120-Q6-K6-E2
cctagccctcgcgccgccgcctccttcgccacccagcgctcgagctcctcgctccctgcgagcgcgcgccgcaacgccaccatgaagttcaacatcgcgaacccttccaccgggtgccaaaagaagctggaaatcgatgacgaccagaagctgcgtgccttttatgaccgaaggatatcccaggaggtcagtggtgatgctctgggtgaggagttcaagggttatgtcttcaagatcatgggtggatgtgacaagcaaggcttcccaatgaagcaaggagttttgacttctggtcgtgttcgtcttctgctccatagggggactccctgcttccgtggttatggcaggcgtaatggtgagcgcaggaggaagtctgtccgtggttgcatcgtgagccaagacctatctgttatcaacttggtgattgtgaagaagggtgagaatgatctgcctggtctgactgacactgagaagccaaggatgaggggtcccaagagggcctccaagatcagaaagctgttcaaccttaacaaggatgatgatgtacgcaagtacgtga

SEQ ID NO: 12214 - DNA, 194 bp, Zea mays
  unsure (1)..(194): unsure at all n locations; Clone ID: LIB3061-120-Q6-K6-E3
gtgggaatctccggnagaatggaggtggggggggacttctcggcgacgggacttacgcagcggaagcgcttcgagacggatgggggggcttgtgcctacgcttcctctgatcgccgcgctattctaggatctgtccctcggagcatatgacagtccagagcctatgctttacaacaacacatggggtgttaaga

SEQ ID NO: 12215 - DNA, 499 bp, Zea mays
  Clone ID: LIB3061-120-Q6-K6-E4
catgaaagtggacatgctattgttgcgctcaacacccagggtgctcaccccatacacaaagcaactatccttcctcgtgggtctgcccttggaatggtcacacaactcccctcacaggatgagacttctattagcaagaaacaactccttgcacgtcttgatgtttgcatgggtgggagggttgctgaagagctgatatttggggaagacaatgttacaactggggcgagaaatgaccttcacactgcaacagagcttgcccagtacatggtatcaaactgcgggatgagtgatgctatcggtcctgtgcatgtgaaagagcgaccaagtgtagagatgcaatcaaggatagatgctgaggtggtgaagctcctaagagaagcttatgggcgggtcaaacgattgcttaagaagcatgagaagcaattacatgctttggcaaatgcgctgctggagcgtgaaacacttactgcagatgagatcacaaagtagttcaccc

SEQ ID NO: 12216 - DNA, 627 bp, Zea mays
  Clone ID: LIB3061-120-Q6-K6-E5
tagaacaaccaattgcccaattacaacaacaatccttggcacatctaaccatacaaaccatcgcaacgcagcagcaacaagcactgagccacctagccgtggtgaaccctatcgcctacttgcaacaacagctgcttgcatccaacccacttgctttggcaaacgtagctgcataccaacaacaacaacagttgcaacagtttctaccagcgctcagtcaactagccatggtgaaccctatcgcctacctacaacagcaacaacttctttcatctagcccgctcgctatgggcaatgcacctacatacctgcaacaacagttgttgcaacaacagttgctgcaacaaattgtaccagctcttactcagctagctgtggcaaaccctgctgcctacttgcaacaactacttccattcaaccaactgactgtgtcgaactctgctgcgtacctacaacagcgacaacagttacttaatccactagcggtggctaacccattggtcgctgccttcctacagcagcaacaattgctgccatacaaccagttctctttgatgaaccctgccttgtcgtggcagcaacccatcgttggtggtgccatcttttagattacatatgagatgtact

SEQ ID NO: 12217 - DNA, 527 bp, Zea mays
  Clone ID: LIB3061-120-Q6-K6-E6
agctgcaacaactcgtgctaccagtgatcagccaagtagctctggcaaacctttccccctactctcagcaacaacaatttcttccattcaaccaactgtctatactgaaccctgctgcttatttgcagcaacaacaactactaccattcagccagctagctactgcctactctcagcagcaacaatttcttccatttaaccaattggccgcactgaacccctctgcttatttccagcagcaaatactactaccatttggccagctagctacaacaagccccgcttccttcttgacacaacaacaagtgcttccgttctaccagcagtttgtggctaaccccgcaaccctcttacaactgcaacagttgctgccctttgtccaacttgctttgacaaacccagcagccttctaccaacaacacatcattggcggtgccctcttttagattgcttattagttgtaattcaataatgaagttttttggctgatgtatgtggcctcctagaaataagaagttatatttcca

SEQ ID NO: 12218 - DNA, 575 bp, Zea mays
  unsure (1)..(575): unsure at all n locations; Clone ID: LIB3061-120-Q6-K6-E7
cacacctagcgaagcgcactagcaacgacctaacaacaatggcttccaagacattatccctccttgcgcttcttgccctttttgtgagtgcaacaaatgcgttcattattccacaatgctcacttgctccgagtgccattattccacagttcctccctccagttacttcaatgggcttcgaacacccagctgtgcaagcctataggctacaacaagcgcttgcggcgagcgtcttagaacaaccaattgcccaattacaacaacaatccttggcacatctaaccatacaaaccatcgcaacgcagcagcaacaagcactgagccacctagccgtggtgaaccctatcgcctacttgcaacaacagctgcttgcatccaacccacttgctttggcaaacgtagctgcataccaacaacaacaacagttgcaacagtttctaccagcgctcagtcaactagccatggtgaaccctatcgcctacctacaacagcaacaacttntttcatctagcccgctcgctatgggcaatgcacctacatacctgcaacaacagttgttgcaacaacagttgctg

SEQ ID NO: 12219 - DNA, 210 bp, Zea mays
  Clone ID: LIB3061-120-Q6-K6-E8
agctgttgctgttgtaaataagcagcagagttcaatgctgccagttggttgaatggaagaaattgctttgacaaacccaacagcgttctaccaacaacccatcattggtggtgccctcttttagattgcttattagttgtaattcaataataaagttttttggatgatgtatgtggccaaccagaaataagaagttacatttccagattt

SEQ ID NO: 12220 - DNA, 438 bp, Zea mays
  unsure (1)..(438): unsure at all n locations; Clone ID: LIB3061-120-Q6-K6-E9
cggacgcgtgggtttcttatgagttatagttcaataataaatctaaaagagggcaccaccaatgatgggttgttggtagaacactgctgggtttgtcaaagcaagttggttgaatggcagcaattgttgcagttgtaagagggtgccagcgttaggcgcaacgtgctggtagaacggcaacaactgtggttgtgtcaagaaggtagcagggctcacaccagctagctggctgaatggtagtagttgttgctgctgtaaataagcaggagagttcaatgctgctagttggttgaatggaagaaattgctgggggtaggcagcaggtagctggctgaatggtagttgttgttgttgctaataagaagcagagttcaatgaacctagttggttgaatggaagaaactgctgttgctgngagttggcagcaaggtttgctag

SEQ ID NO: 12221 - DNA, 336 bp, Zea mays
  Clone ID: LIB3061-120-Q6-K6-F1
gttcctcagtgcatcatagttaggccagtaaggataacgaggacggcgggcgcatgcttctgacacccaaggggccctggtgagagatgcgctcctgcttgtccgaccagtttggcgctaacgtggctgctggtccgagagtcccaggtgtccacccaactgcggtaggcagcccagcagtcagagggaggaaagctagcggaaggcggaatccaggatgtccccaatgcacagaccccattataccgcccccttgttaggctgtcttccagccatcagcgcactcttcttgtcatgcatcagcacagcggtcgttactgtaaagaacagaaaaag

SEQ ID NO: 12222 - DNA, 604 bp, Zea mays
  Clone ID: LIB3061-120-Q6-K6-F11
ctctcttttgaggagtgaggacgactggggcgaacgtcgccgccgccgccctacatcaggtgcccaggtcgttgttcggcccttcgccagctctttttcgggcacttcgccggcgacgaacacccaccagttgctgatgcaaggctttcaaaagattaacagtctcaattgatgcaaaagcaacacaatcacactaaaggtttggattagacatttcagagcatgggttcgcggtttccatcccaccagctaagcaatggcttgtatgtctcgggccgacctgagcaacctaaagagaagtctccagtcatttgctcctcggctatgccgtacactggtggggacataaagaaatctggggagcttggaaagatgtttgatctccatagaaaatctggtccattgggtaatcaaacttcaaggaatacttcctttggtggtgctgcctccaactctggaccagtttctaatgctgtcggtcgctccaactactctggttctatttcgtctgcaattcctaacactggaggatcttctaggacaaaaactaattctggacctctcaataagcatggagaaccaacaaagaggtcatctggccccc

SEQ ID NO: 12223 - DNA, 608 bp, Zea mays
  unsure (1)..(608): unsure at all n locations; Clone ID: LIB3061-120-Q6-K6-F12
ctagcaattagctcatcgactccagattggagaactcgacaccatgaaggtgctgatcgttgcccttgctctcctggcgctcgctgcgagcgccgcctccagtacaagcggcggctgtggctgccagacaccaccgtttcatctaccgcctccgttctatatgccgcctccgttctatctgccgccgcagcagcagccgcagccatggcaataccccactcaaccaccgcagctaagcccgtgccagcagttcggatcctgcggcgtcggcagcgtcggcagcccgttcctgggccagtgcgtcgagttcctgaggcaccagtgcagcccggcggcgacgccctacggctcgccacagtgccaggcgctgcagcagcagtgctgccaccagatcaggcaggtggagccgctgcaccggtaccaggcgacatacggtgtggtcctgcagtccttcctgcagcagcagccgcagggcgagctcgcggcgctgatggcggcccaagtagcgcagcagctgacggcgatgtgcggcctgcagctgcagcagccaggtccctgcccttgcacgcagctgccggcggtgtctactactgangaaactatgtact

SEQ ID NO: 12224 - DNA, 545 bp, Zea mays
  Clone ID: LIB3061-120-Q6-K6-F2
agccatcttcttcgtcgacaagcaggggagttaggtctcacatgcatgcttcatcacattgttgactgcataacgaaacacatcgtcgtcggatcggagatgatgagttccgtcgtcgtggatgctgctgctaccagcagcagcgagaagaagacgtcgtggccggaggtggtgggcatgtccatcaaggaggcgacggagactattctcaaggacatgcccaacgcgtacatccaggtgctgcctgttgggtcgcccgtgacgctggaccttcgccccgaccgcgtccgtatcttcgttgacaccgtcgccatgactccgacagttgggtgatacataccaaatgcaataaacaaaccctactttttattttatgtttccagttaataataaaccaggccttagcttcttggttgtccttccttggttggtgttagcttctaagctactagtacaccattaaaaaaaggaggacctcatgtatggctaccgtgaaaaatgtgatcttgatggaataatatatcataaataagcaattaatgatg

SEQ ID NO: 12225 - DNA, 187 bp, Zea mays
  Clone ID: LIB3061-120-Q6-K6-F4
gtgctgtcccaacaagcatggtttggcttggatggtttactctgttggtgttgctgccttcctgcatgcgtgcgcatacactagtattctgtgttgatcctacacttgttgcctggtatagtacacaacatttgaaccgatgatggttgatctgaactcagaggagttaactagagaattgccacat

SEQ ID NO: 12226 - DNA, 377 bp, Zea mays
  Clone ID: LIB3061-120-Q6-K6-F6
gccggatctcaaaggtataccaaacttatgtatcgcgagcttgcagacttttttaattgtgttactcgagatacattaaattgagtcgactggccacaacgtttacaactgggaaaactggtgaaaaccctgcaatttcctaacttagtcgcctatgccccatatccccatttggccaaatggcgaaaaggccaagaggcctcgacctttcgacctttccaacagtttgaaaggctaatgggacaatggctctagccctgtattaagcccttaagcggtgggggttacgtggatactgaccattacacttgtcaacttgctagcgccctatcctttggtttttttgctttctttccttgctttttcgccggttttcc

SEQ ID NO: 12227 - DNA, 579 bp, Zea mays
  unsure (1)..(579): unsure at all n locations; Clone ID: LIB3061-120-Q6-K6-F8
cagcgtcctgtccacccactccctcctcgagcacactgatgtggctatcctgctggacaacgaggccatctatgacatctgccgccgttcccttgacattgagcgcccaacctacaccaacctcaacaggcttgtgtcccaggtcatatcatccctgactgcctccttgaggttcgatggtgctcttaacgtggatgtgaatgagttccagaccaacttggtgccctacccgaggatccacttcatgctttcctcctatgctccagtcatctctgctgagaaggcctaccacgagcagctgtctgtggccgagatcaccaacagcgccttcgagccatcctccatgatggccaagtgcgatccccgccatggtaagtacatggcctgctgcctcatgtaccgtggtgatgtggtccccaaggatgtgaatgctgctgtggccaccatcaagaccaagcgcaccatccagtttgtggactggtgcccaactggctttaagtgcggtattaactaccagcctccaagtgtggtgcctggntggtgacctggccaaggtgcagcgcgctgtgtgcatgatct

SEQ ID NO: 12228 - DNA, 241 bp, Zea mays
  unsure (1)..(241): unsure at all n locations; Clone ID: LIB3061-120-Q6-K6-F9
ttgtgctccngctggccatcgcgcttggcttcttggttgcttccttggttccctggtgttccgtggttttttgcgctcttggggctgttggggtgtgtgtgagctgccgttcttgcgtccataatgcttgcttgctcccttgttccttgttgcacagttgaatcggtgccgtgtctttattggttggtgggcccccggtctggccggtgtgttggcttctttgggtttttttggtgtgggt

SEQ ID NO: 12229 - DNA, 564 bp, Zea mays
  Clone ID: LIB3061-120-Q6-K6-G1
gtgcgctaccctaagccaggtgagtttgcatcaacctcactctaatggatggcagatatctaaagctccttacgcttcgtgtgctgttcgcgcgcgcagagaatgcctacattaaatcagagcgttgacttgctcaaagtcccaatattacacatgcttctaccaccagctactagcaatgggcttaaaacacaccacttgggcaagcctacaggcatcaacatgcaacggcggtgagcggataacaacaacctattttccagatgcaacaacaatccttggcacatgtaacaatacaaaccatcgcaacgaaccagcaacaacgatttctaccagcactgagccacctagccatggtgaaccctgccgcctactagcaacagcaggtgcttgcataaaacccacttgctatggcaaacgtaattgcaaaccagccacaacaacagatgcaacagttgctgccagcgctcagacaactatccatggagaaccctggcgactgacctacacagcaacaactgatttcatctagctcgcatcgtgagaccaatgcacctacatacc

SEQ ID NO: 12230 - DNA, 559 bp, Zea mays
  Clone ID: LIB3061-120-Q6-K6-G10
cccagcgtccggaagaagaaaacttgatggtgatgctgcattgaacaaattcttccgtgacatctacaaggatgctgatgaagatatgcggagggccatgatgaagtcattcgtggaatcaaatggcactgttctctcaaccaattggaaagatgttggagcaaagaaggtagaagggagcccccctgatggtatggagctcaagaagtgggaatactaaagtttggactgcccatcttttgtaaatccaggtcttggaaactatgacctaattccgtccacccatagtgccatgagcttgcttggttaagtctctgcttttgtaagctttctgtatgacagtctagcgtgtgtctgagtgctacttgccgtagcttttgatggacataggtatgctattatgtggtatcgaccgggaaccatctgtggtatcaaagacagcaaactataatgtatggaatgcctattctttttggtctaagatgtttttcttggtcagcgtagtgtgatcttcacaactgaataatagaaactatgcagggacctatgttacagtggt

SEQ ID NO: 12231 - DNA, 617 bp, Zea mays
  unsure (1)..(617): unsure at all n locations; Clone ID: LIB3061-120-Q6-K6-G12
atcttacctttatcacccttgttcctccaacaaccgtcagccctattacagcagttacctttggtgcatttgttggcacaaaacatcaaggcacaacaactacaacaacttgtgctaggaaaccttgctgcctactctcagcaacagcagtttcttccattcaaccaactggctgcattgaactctgctgcttatttgcaacaacaactaccattcagtcagctagctgctgcctacccccagcaatttcttccattcaaccaactggcagcattgaactctgctgcttatttacaacagcaacagctaccaccattcagccagctagctgatgtgagccctgttgccttcttgacacaacaacagttgttgccgttctacctgcacgctgcgcctaacgctggcaccctcttacaactgcaacaattgctgccattcaaccaacttgctttgacaaacccaacagcgttctaccaacaacccatcatntggtggtgccctcttttagattgcttatgagttatacttcaataatgaagttttttggatgatgtttgtggcttcccaaaataagaaagtcatttctagattcttaaaaaaaaaaaaaaggcggccgc

SEQ ID NO: 12232 - DNA, 583 bp, Zea mays
  unsure (1)..(583): unsure at all n locations; Clone ID: LIB3061-120-Q6-K6-G2
gcaacatagnaaagcacaatagtgtaccaacaatggcagccaaaaattttgcctccttatgctccttggtctttctgcaagtgctgctacggcgaccattttcccgcaatgctcgcaagctcctatagcttcccttcttcccccgtacctctcaccagcggtgtcttcggtatgtgaaaacccaattcttcaaccctacaggatccaacaggcaatcacagctggcatcttacctttatcacccttgttcctccaacaatcatcagccctattacatcagttacctttggtgcatttattggcacaaaacatcagggcacaacaactacaacaacttgtgctagcaaaccttgctgcctactctcagcaacagcagtttcttccattcaaccaactagctgcattgaactctgcttcttatttgcaacaacaacaactaccattcagccagctacctgctgcctacccccagcaatttcttccattcaaccaactggcagcattgaactctcctgcttatttacagcagcaacaactactaccattcagccagctagctggtgtgagccctgctaccttcttg

SEQ ID NO: 12233 - DNA, 489 bp, Zea mays
  Clone ID: LIB3061-120-Q6-K6-G3
atcatcattcatcttactggtatatgcgccaaatcaaatgtgccacatcaattatctaactccaaaaaccatagaagctggtgcgttgaggttgttgctttcattgattaagtatcaagtgtttcttgtacacagacaggcggatgcagctgtggtcaacatcaaagccatcagcagcaacattatacacaacaacatgattcacaaacacaacaactttaaccaccaccacaacatcaccagctgctagctactccaacaacaacacgttcacatgcacctccacaatcatcaccgccagcaggaaggtgatgttgaacaacaacagcaacaaccgcagtagctcgccctacatcagcaacaacgagcccaacaccggcctccttgtgaaggccgaccacttgttggcctacaatcacatggcgttgtgcaacatctcgaacagtgtcctgagcaacatcaatgacagagtcttgattttctaacttt

SEQ ID NO: 12234 - DNA, 573 bp, Zea mays
  Clone ID: LIB3061-120-Q6-K6-G4
cttctcctccccctcttaccaagtcctcctcgggttagggttccttagggttttgtggaggggcgatggcggcggctgatgtggagtaccgttgcttcgtcggcgggcttgcctgggccaccagcaacgagtcgctggagaatgccttcgcctcctacggcgagatcctcgactccaaggtcatcaccgaccgggagacggggaggtctcgcggcttcggcttcgttaccttctcctccgagaactccatgctcgacgctatcgagaacatgaacggcaaggagctcgacggccgtaacatcaccgttaaccaggcccagtcccgtggcggtggcggtggcggcggtggctacggcggcggtcgcggcggcggcggctatggtggcgggcgccgtgacggcggttatggcggcggtggcggctacggcggtcggcgcgagggtggtggcggcggctaccgaggcggtggcggctacggcggtcggcgcgagggtggtggtggcggctaccgcggcggcggcggcggctggagggactgatgtgtgggcccatcctggcttcggccgagttatc

SEQ ID NO: 12235 - DNA, 385 bp, Zea mays
  Clone ID: LIB3061-120-Q6-K6-G5
cagccagctagctactgcctactctcatcaacaacaacttcttccatttaaccaattggccgcactgaacctcgctgcttatttgcagcagcaaatattactaccatttagccagctagctgcagcaagccgtgcttccttcttgacacagcaacagttgctgcctttctaccagcagtttgcggctaaccccgcaaccctcttacaactacaacaattgttgccctttgtccaacttgctttgacaaacccagcagcctcctaccaacaacacatcattggtggtgccctcttttagattgcttattagttgtaattcaataataaagttttttggatgatgtatgtggccaaccagaaataagaagttacatttccagattct

SEQ ID NO: 12236 - DNA, 546 bp, Zea mays
  unsure (1)..(546): unsure at all n locations; Clone ID: LIB3061-120-Q6-K6-G6
gnaaagaaaggggcagngaagaaatcgagcctcactcgatccatcgcctcgccgcagcacacacgaggccggcggcgccatggccatgaagctggacatgtccgcgctcgagaccaacttcgccaacctgaccgcctccgccggcgacgacacgtacttctccgccgaggcccccgacgtgccgtccatggtgctccccatctgcgacgacttcgacggcttccaggcggccaccaaggatatggtgaagaataagaaggggacgaccacgcttgccttcatcttcgacaagggcgtcatcgtcgccgctgattccagggccagcatgggcggttatatatcctcacaaaccgtgaggaaaattattgaaataaatccatacatgctggggacaatggctggaggtgctgctgattgccaattttggcataggaacctaggaaccaagtgtcgtctccatgagctttcaaacaagcgaaggatctctattgctggtgcttccaaactggtggctaacatcctttattcatatcctgggatgggact

SEQ ID NO: 12237 - DNA, 135 bp, Zea mays
  Clone ID: LIB3061-120-Q6-K6-G7
caacagtgttctaccaacaacccatcattggtggtgccctcttttagattgcttatgagttatagttcaataatgaagttttttggatgatgtttgtggcgtcccagaaataagaaagtacatttctagattctt

SEQ ID NO: 12238 - DNA, 659 bp, Zea mays
  Clone ID: LIB3061-120-Q6-K6-G8
gagaccaacagcacatagaagtggaatccagtagcaacaatagagcaacaatggcgaccaagatattttccctccttatgctccttgctctttctacatgtgttgctaacgcgacaattttccctcaatgctcacaagctcctatagcttcccttcttcccccataccttccatcaattatagcttcaatatgtgaaaacccagctcttcaaccatataggcttcaacaagcaatcgcagcaagcaacatacctttatcgcccttgttgtttcaacaatcgccagccctatctttggtgcagtcattggtacaaaccatcagggcacaacagctgcagcaactcgtgctacctctgatcaaccaagtagctctggcaaacctttctccctactctcagcaacaacaatttcttccattcaaccaactgtctacactgaaccctgctgcttatttgcagcaacaactattaccatttagccagctagctactgcctactctcagcaacaacaacttcttccatttaaccaattggccgcactgaaccccgctgcttatttgcagcagcaaatactactaccatttagccagctagctgcagcaaaccgtgcttccttcttgacacagcacagttgctgccttttaccagcagtttgcggc

SEQ ID NO: 12239 - DNA, 670 bp, Zea mays
  unsure (1)..(670): unsure at all n locations; Clone ID: LIB3061-120-Q6-K6-H1
anacccaactagcaacatagnaaagcacaatagtgtaccaacaatggcagccaaaatattttgcctccttatgctccttggtctttctgcaagtgctgctacggcgaccattttcccacaatgctcacaagctcctatagcttcccttcttcccccgtacctctcaccagcggtgtcttcggtatgtgaaaacccaattcttcaaccctataggatccaacaggcaatcgcagctggcatcttacctttatcacccttgttcctccaacaatcatcagccctattacagcagttacctttggtgcatttattggcacaaaacatcagggcacaacaactacaacaacttgtgctagcaaaccttgctgcctactctcagcaacaacagtttcttccattcaaccaactagctgcattgaactctgcttcttatttgcaacaacaacaactaccattcagccagctatctgctgcctacccccagcaatttcttccattcaaccaactgacagctttgaactctcctgcttatttacagcagcaacaactactaccattcagccagctagctggtgtgagccctgctaccttcttgacacaccacaattgntgccgttctaccagcacgctgcgcctaacgctggcaccctcttacactgcaacaatgctg

SEQ ID NO: 12240 - DNA, 597 bp, Zea mays
  Clone ID: LIB3061-120-Q6-K6-H10
gcatcttcgccgccggcgatctatctctctcacaatggcggcgcccatgtcagccatcgactcagcgtggcagctcctgatcgccaacttcaccgagttccagctcgccaccgtcgtcaccttcctgctccacgagaccgtcttcttcctctccggcctcccctccctcctcttcgagcgcttcggactcttcgccaagtacaagatccagaagaagagcaacacctctgcttaccaaaacagatgtgtcttgcgcctcattctctaccatgtatgtgtgaacctgcctgtcatgattttctcgtatcctgccttcaaattcatgggtctcaggagctctcttcctttgccacattggtcggttgttgtatctcaagttcttttctactttgtccttgaggattttatattctattgggggcacagggcattgcatacgaaatggctatacaaacacgttcacagcgtccaccatgagtacgccacaccctttggtttaacatcggaatatgcccacccagctgaaattttgttcctgggattcgccacagttgttggtcctgctcttactggccctcatctcttcaccctgtggct

SEQ ID NO: 12241 - DNA, 556 bp, Zea mays
  Clone ID: LIB3061-120-Q6-K6-H2
gcaagctcccaggatccgcgtctggatcccctcccgccgcccctggatccgctcccgccagcgcccctgggtccgctcccgcgcggcgcccctggatccgctcccgcgcggcgcccctgggtccgctcccgcgcggcgcccctgggtcctctaccgacgccgcccctgggtcctctaccgacgccgcccctgggtctcctccgcccgccgcccctgggtctcctccgcccgtcggctccaatcaagcgacggctgcaagatgcaggaggtttctgatccaccagaaacagtaaggaaagcagaaacaaaaaatattacttccattgggaaggatgtgattttcgagcaagatccatgctcttcatatcagttatggggcagtatgaaatttgaagaagatggccatttgctatctcaggattatagagcacagtccgccgacaccaaatatgttactgaacttgggtcacatgcatgtttgaaggatccattgccaatggggaagagattatcataggcagaaactacaattttctacttcagagtgttcttttga

SEQ ID NO: 12242 - DNA, 638 bp, Zea mays
  Clone ID: LIB3061-120-Q6-K6-H3
gagcattcagaaacaaccaagcgaagcgcactagcaacgacctaacaacaatggctaccaagatattagccctccttgcgcttcttgccctttttgtgagcgcaacaaatgcgttcattattccacaatgctcacttgctcctagtgccattattccacagttcctcccaccagttacttcaatgggcttcgaacacctagctgtgcaagccaacatgcaacaacaagcgcttgcggcgagcgtcttacaacaaccaattgcccaattgcaacaacaatccttgccacatctaacaatacaagccatcacaacgcaacagcaacaacagttcctaccagcactgagccacctagccatggtgaaccctgccgcctacttgcaagagcagctgcttgcatccaacccacttgctctggcgaacgtagttgcaaaccagcaacaacaacagctacaacagtttctgccaacgctcagtcaactagccatggtgaaccctgccgcctacgtacaacaacaacaactgctttcatctagcccgctcgctgtgggcaatgcacctacatacctgcaacaacaattgttgcaacagattgtaccagctctgactcaactagctgtggcaaaccctgttgcctac

SEQ ID NO: 12243 - DNA, 208 bp, Zea mays
  unsure (1)..(208): unsure at all n locations; Clone ID: LIB3061-120-Q6-K6-H4
nctgtccgaaaaaaaaaaaaaaaaaaaaaaaaaaaaaaaaaaaaaaaaaaaaaaaaaaaaaaaaaaaaaaaaaaaaaaaaaaaaaaaaaaaaaaaaaaaaaaaaaaaaaaaaaagggggggggccgtttttgggggttcccggtttccgttccgcgtgcttgcgcactttttttttttttttttggggccccttaatttcatttgggg

SEQ ID NO: 12244 - DNA, 580 bp, Zea mays
  Clone ID: LIB3061-120-Q6-K6-H5
ttgctacatagtaagcacaatagtgtcccaacaatggcagccaaaatattttgcctccttatgctccttggtctttctgcaagtgctgctacggcgaccattttcccgcaatgctcgcaagctcctatagcttcccttcttcccccgtacctttcaccagcggtgtcttcggtgtgtgaaaacccaattcttcaaccctacaggatccaacaggcaatcacagctggcatcttacctttatcacccttgttcctccaacaatcatcagccctattacatcagttacctttggtgcatttattggcacaaaacatgagggcacatcatctactacaacttgtgctagcaaaccttgctgcctacttatagcgacagcagtttcttccattcaaccaactagctgcattgaactctgcttcttaattgcaacagcaacaactaccattcagccagctacctgctgcctacccccagcaattttttccatttaaccatctggcagcattgaactctcatgcttattttcagcagcttccacttctaccattcaaacagctagctggtgtgagcccatctacct

SEQ ID NO: 12245 - DNA, 542 bp, Zea mays
  Clone ID: LIB3061-120-Q6-K6-H6
tttctatcagtaccatcaatcatcattcatcttagtagtataggcaccaaatcaaatctgcaacatcaattatctaactccaaaaaccatgaagctggtgcttgtggttcttgctttcattgctttagtatcaagtgtttcttgtacacagacaggcggctgcagctgtggtcaacaacaaagccatgagcagcaacatcatccacaacaacatcatccacaaaaacaacaacatcaaccaccaccacaacatcaccagcagcagcaacaccaacaacaacaagttcacatgcaaccacaaaaacatcagcaacaacaagaagttcatgttcaacaacaacaacaacaaccgcagcaccaccaccaacaacaacaacaacagcaccaacaacaacatcaatgtgaaggccaacaacaacatcaccaacaatcacaaggccatgtgcaacaacacgaacagagccatgagcaacaccaaggacagagccatgagcaacaacatcaacaacaattccaggttcatgacaagcagcaacaaccac

SEQ ID NO: 12246 - DNA, 528 bp, Zea mays
  Clone ID: LIB3061-120-Q6-K6-H8
tttaaaaaaaaaaaaaaaaattaaaaaaaaaaaaaaaaaaaaaaaaaaaaaaaaaaaaaaaaaaaaaaaaaaaaaattttaaaaaaaaaaaaaaaaaaaaaaaaaaaaaaaaaaaaaaaaaaaaaaaaaaaaaaaaaaaaaaaaaaaaaaaaaaaaaaaaaaaagggggggggccgtttttgggggtccccatttttcccccccggttgtttggagggtttttctttttttttttggggcccctaaattaaattccggggccggggttttccccccttgggggggggaaaaccccgggtttccccaatttttttgctttggggaaatttccctttttccccgggggggtttttaggaaagggccccccccgttccccctttcccaccttttccccccctttttgggaattggggccccccctttttcgggttttttaagcccgggggtgggggggtttccccccgggggaccttttctttttgcggggcctttggcccccgctctttgggttttttcccttttttttt

SEQ ID NO: 12247 - DNA, 652 bp, Zea mays
  Clone ID: LIB3061-120-Q6-K6-H9
tgagcattcagaaacacaccaagcgaagcacattagcaacaacctaacaacaatggctaccaagatattatccctccttgcgcttcttgcgctttttgcgagcgcaacaaatgcgttcattattccacaatgctcacttgctccaagttccattattacacagttcctcccaccagttacttcaatgggcttcgaacacccagctgtgcaagcctataggctacaacaagcaattgcggcgagcgtcttacaacaaccaatttcccagttgcaacaacaatccttggcacatctaacaatacaaaccatcgcaacgcaacagcaacaacaattcctaccagcactgagccacctagccatggtgaaccctgccgcctacttgcaacagcagttgcttgcatcaaacccacttgctctggcaaacgtagttgcaaaccagccacaacaacagctgcaacagtttctgccagcgctcagtcaactagccatggtgaaccctgccgcctacctacaacagcaacaactgctttcatctagcccgctcgctgtggccaatgcacctacatacctgcaacaacaattgttgcaacagattgtaccagctctgactcagctagttgtggcaaaccctgctgcctacttgcaacagctg

SEQ ID NO: 12248 - DNA, 606 bp, Zea mays
  Clone ID: LIB3061-098-Q1-N6-A1
cacattagaatctgggaatgtaacttcttatttctggttggccacatacatcatccaaaaactttattattgaattacaactaataatcaatctaaaagagggcaccaccaatgatgtgttgttggtaggaggctgctgggtttgtcaaagcaagttggacaaagggcaacaattgttgtagttgtaagagggttgcggggttagccgcaaactgcttgtagaaaggcagcaactgttgctgtgtcaagaaggaagcacgacttgctgcagctagctcgctaaatggcagtagtatttgctgctgcaaataagcagcggggttcagtgcggccaattggttaaatggaagaagttgttgttgctgagagtaggcagtagctagctggctaaatggtaatagttgttgctgcaaataagcagcagggttcagtgtagacagttggttgaatggaagaaattgttgttgctgagagtagggagaaaggtttgccagagctacttggttgatcacaggtagcacgagttgctgcagctgttgtgccctgatggtttgtaccaatgactgcaccaaagataggctggtgattgttgaaacacaaggccat

SEQ ID NO: 12249 - DNA, 587 bp, Zea mays
  Clone ID: LIB3061-098-Q1-N6-A12
aagaatctagaaaatgtactttcttatttctgggaagccacaaacatcagacaaaaaactttattattgaactataactcataagaaatctaaaagagggcaccaccaatgatgggttgttggtagaacgctgctgggtttgtcaaagcaagttggttgaatggcagcaattgttgcagttgtaagagggtgccagcgttaggcgcagcgtgctggtagaacggcaacaactgtggttgtatcaagaaggtagcagggctcacaccagctagctggctgaatggtagtagttgttgctgctgtaaataagcaggagagttcaatgctgccagttggttgaatggaagaaattgctgggggtaggcagcaggtagctggctgaatggtagttgttgttgttgcaaataagaagcagagttcaatgcagctagttggttgaatggaagaaactgctgttgctgagagtaggcagcaaggtttgctagcacaagttgttgtagttgttgtgccctgatgttttgtgccaataaatgcaccaaaggtaactgatgtaatagggctgatgattgttggaggaacaaggtgat

SEQ ID NO: 12250 - DNA, 550 bp, Zea mays
  unsure (1)..(550): unsure at all n locations; Clone ID: LIB3061-098-Q1-N6-A2
gaataattnattattaagtaagccaagtaacaaaagtcaagacatcagttaaatatttntaagagtacaaaaaaacccattctggtgccgtacatgctctatctcagcaataaaccgccgactggactcaggtggggtgagtaaagattgtacagatcagcgtgctccaaacttgttggatgcgctgctgtcacattttgaagtgcggcaacagctcgaactggatagtcttaaagcaaagagcaccggcattgccctgcctaatttnttcacactaagccggtgtttcagatgattttgttcctgatgtcttttagcttnttcaggatttcacccggagttctgttcagcttattagcaatcttcctttgcatatcgggtgggagggagggatactgntngnagagatcaccatctatnacattcttgactggaaaataggcagatctgtaagccatgtgatctctttcacacaatggtggatgcttctgacgcagatgcattttcaagtggagagaagaaattaactttttcttggaggtaaatgcaa

SEQ ID NO: 12251 - DNA, 295 bp, Zea mays
  unsure (1)..(295): unsure at all n locations; Clone ID: LIB3061-098-Q1-N6-A4
ggggggggggtttttaaaaaaaattttttggggggtttttttttttgggggaaaaaagatgaagtagttggaaatggtttatttgaagaattatggaatattatgggggaaaaaaaaaaaaagcttaattttaaattatatttttggtgggtgtgggggggatnaaaaattaataantntaaaattatcaaagaactaaataatattaaggtgttaggggagaagataggaaaatttattgatgggggttaagaatatgtaaatgttttatggtagggggtttgttttaataaag

SEQ ID NO: 12252 - DNA, 536 bp, Zea mays
  unsure (1)..(536): unsure at all n locations; Clone ID: LIB3061-098-Q1-N6-A5
aaaaaaaaagaaaaggggaaaaagaaaannnnaaaannggggggggaaaaaaaaaaaaaaaaaaaaagaaaaaanaaaaaaaaaaaaaaaaaaaaaaaaaaaggtttcgctgggaaaaaantnttnttnatanaaggtttttnngaaaaaaaaaaaaaattggataaaggggaaaaattgaaaaaaaaaaaaaaaggttgaagagaaaaaaaaaaaaatggttaaaaaaagaaaaaaataaaaatggaaaaaaaaaaaaaaaaaattggtgaaaaaaagtaaaaaaaaagaaaaaataaaaaatggaaaaaaaaaaaaaagaagaaaaaaagaggaaaaaaagtaaaaaataaaaaagataaaagaaaaagaagaaaaaaaaaaaaaaaaaaaaaaaaaaaaaaaaaaaaaaaaaaagagtaaaaaaaaaaaaaaagaaaaaaaaaataaaaaaaaaaaaaaagaaagaaaataaaaaaataaaaaataagataaaaaaaaagaaaagaaaaaannataaaaataaataataagag

SEQ ID NO: 12253 - DNA, 266 bp, Zea mays
  unsure (1)..(266): unsure at all n locations; Clone ID: LIB3061-098-Q1-N6-A6
aaaaaaaaaaaaaaaaaaaatttnttnnnnnnaanaaaaaaaaaaaaaaaaaaaaaaaaaaaaaaaaaaaaaaaaaaaaaaaaaaaanaaaaaaaaaaaaaaaaaaaaaaaaaaaaaaaaaaaaaaaaaaaaaaaaaaaaaaagaaaaaaaaaaaaaaaaaaaaaataatataaaaaaaaaaaaaaanaaaaaaaaaataaaaaaaaaaaaaaaaaaaaaaaaaaaaaaaaaaaaaaaaaaaaaaaaaaaataaaaataataanaa

SEQ ID NO: 12254 - DNA, 457 bp, Zea mays
  Clone ID: LIB3061-098-Q1-N6-A7
gggggtggggggttttttttttatatttttttttgggtttttttttttttttttttttttggaaaataactttttatttttaggggggcccatacattagccaaaaaacttcattattgaattacaacttattacccaaccaaaattttggtggtcgcggggggggcccttcccaaaaggctcctgggtttgtaaaaacaagttggacaaagggcccccaccggcgccattttaaaagggttgcggggttaaccacaaaccgctggtagaaccgaagcccttgttcttgttccaaaaaggaaacggggctttttttagctagcttgcccaatggaagtatttttttctggtcgaaataaacaaaggggttcaatgccgcccattggttaaatggaaaaaatttttgcttgtgagaataggcaataacttcctggctcaatgggtaaactttcttttc

SEQ ID NO: 12255 - DNA, 406 bp, Zea mays
  unsure (1)..(406): unsure at all n locations; Clone ID: LIB3061-098-Q1-N6-B1
aaaaagaaaatgttattttgggaaagaaaaaatnagagaaaaaatttattattggaatataaatgataaaaaatgtaaaagaggggatcaacaatgatgggttgttggtagaatgatgatgggtttgtgaaggggagggggttgaatggaagaaattgttgaagttgtaagagggtgccagagttaggcgcagggtgatggtaaaaaggaaacaactgtggttgtgtaaagaaggtagaaggggtaaaaggagntaggtggatgaatggtagtagatgttgttgatgtaaataagcaggagagttaaatggtgaaagttggttgaatggaaaaaaaggtgggggtaggaaaaaaataagtgggtgaatggaacatgtaggtgatggaaataaaaaggaggttgaat

SEQ ID NO: 12256 - DNA, 461 bp, Zea mays
  unsure (1)..(461): unsure at all n locations; Clone ID: LIB3061-098-Q1-N6-B10
ggggggtttttgaattaaaattagatctgtgaatacttanttactgagaggtcgcacatatcagcatgagaactttattattacagtgataaatcattaaaaaatctagaagatggcaccaccaatggtgggcggttgcaataaggtgggggtgtggggggaaagcatgttggctaaatggtagcaattgttgttgttgtaagaaggcaacaatgtttgccacattctgtgggtagaatggtagcaattgttgctgttgcaagaaggcattaatgtttcccacaacttgtgggtaaaatggcaacaaatgttgttgtctcaagaaagcaacaatgtttgccacagcttgcagatggaatggcagaagctgttgttgcagtaagaaggcataagggctcccgacaagttggttaaatgggagtagctgctgtgcctgccagtgagaagcagggggtcacccc

SEQ ID NO: 12257 - DNA, 517 bp, Zea mays
  unsure (1)..(517): unsure at all n locations; Clone ID: LIB3061-098-Q1-N6-B2
gcttacaacaatctgctcatttttttcctggcaaatcactcggtgtatcaaaaactttagagctatgtagttgaaagactaatcaacacgcagtttaaccatgagcaagctttgtttaattattacaggctacgagtacttattcaggcagatcactctgaggttgtgcctactgttgggcgctgccagcttgaccttgttggtagctgccactgccagcaggagtaagcacagccagctcatgcttcctaccgttcttgagctctgcagcttcctccatggagatggcatacgagctggcgatgacggcggccggcaagtcgctcaggacggagttcttcccggcgacgtggctgaccatggtgtcagggttcgtctcgaaggcgatgtactggaagccttctccctgcgccttggtggcgacgaggtagccctggggtaccatgagcagctgccccgcacggagcacgtcgtcnaacaccgtggtcccgttgtcgctggcgacctggacccttgc

SEQ ID NO: 12258 - DNA, 263 bp, Zea mays
  Clone ID: LIB3061-098-Q1-N6-B3
aaaataaaaaaaataaaaaaaataaagagaaaagaaaaaaaaaaaaaaaaaaaaagaataaataaaaaataaaaaaaagaaaaaaaaaaaagaaagaaagaaaaaaaaaaaaaaagaaaaaaaaaaaaaaaagaaaaaaaaaaaaatatgaaaaaaagaaaaaaaaaaaaagaaaaaaaaaaaaaaaataagaaataaaaaaaaaaaaaaaaaagaaaaaaaataagaaaatatgaaaaatcaaaaaaacccccccccccccc

SEQ ID NO: 12259 - DNA, 113 bp, Zea mays
  unsure (1)..(113): unsure at all n locations; Clone ID: LIB3061-098-Q1-N6-B5
gggggggggtttttaaaaaaaaaaaatgtgggggtgtatttttttatttntgggaagnaagaaatattagacaaaaaatttattattgaattataagtgataagaaatttaaa

SEQ ID NO: 12260 - DNA, 534 bp, Zea mays
  Clone ID: LIB3061-098-Q1-N6-B7
gttttttttttttttttttatttttttttttttttttttttttttttttttttttttttttttttttttttttttttttttttttttttttttttttttttttttttttttttttttttttaaaaaaattgaaaaaaaaacttttttgggttgttggggcccaaaaaaaacccaaaaaactttttttttaaaaaacacaaaaaaaccaactaaaaaaggggcccccccaaaaatttttttttgaaaaaagggttttgggttttaaaaaaaaagtgggaaaaagggcaaaaccccttccacttaaaaaagggggggggggtaacccaaaacactttgaaaaaaaaaaacccatttttttttaaaaaaaaaaaaaaaggggttttttaaccttttccccccacaagtgtaaatttttttttttgaaaaaaaaaaaaagggggtaaagctcggccccattttaaaaaaaaaaaaaaatacgttcttctaaaaaaaacacacacttaactgtaaaaaataacaaaattttttgtttct

SEQ ID NO: 12261 - DNA, 216 bp, Zea mays
  Clone ID: LIB3061-098-Q1-N6-B9
ccccaacacacgacaaaaactttaaccccaaaaacacccggcgggggggggggttaaaaaaaaaaaaaaaaaaggaaaaaaaaaaaaaaaaaaaaaaaaaaaaaggaaaaaacaagaaaaacaaaaaaaaaaaaaaaaaaaaaaaagaaaaccaaaacaaaaaaaaaaacccaacaccgagggggggggggccaaccaccaaaaaaaaaacacaca

SEQ ID NO: 12262 - DNA, 446 bp, Zea mays
  unsure (1)..(446): unsure at all n locations; Clone ID: LIB3061-098-Q1-N6-C1
gtttttaaaaaaaaaaaagtgatttgtttattntgggaaggaaaaaatgagacaaaaaatttattattgagatataagtgataagaaatgtaaaagagggcaccaccaatgatgggttgttggtaaaacgctgttgggtgggggggggaagttggttgaatgggagaaattgttgcagttgtaagagggtgaaagagttaggggcagagtgctggtagaacgggaacaactggggttgtattaagaaggtagnaggggtaagacgagctagctgggtgaatgggagtagttgttggtgatggaaataagcaggagagttaaatgctgncagttggttgaatggaagaaattgatgggggtagggagaaggtagatggctgaatgggagttgttattggtggaaataagaagcagagttgaatgcagntagttggttgaatgggaag

SEQ ID NO: 12263 - DNA, 576 bp, Zea mays
  Clone ID: LIB3061-098-Q1-N6-C12
cactatggaaggggccatttttagtttgtaagaactagagcacattcatggtagggaacaaaaatgtggacagtgaactcacattgaagaggatgaaggggaagggggggcgacaatgtgaggatggaaaactaaaaacggcacacgaatctattaaatcatttctctttgcattgataatatatcttctataggaagtcgcattccaactagtgccactagagaacatcgaggcggaaatgaaaagggtgaggaacataacaagcctctttcccttaggcttctcgttcctgccttcgccagggtacattctcatgcgattgtcgagaatccctcccctacagctcctcctaaagtatcatcgtctaactctaagcttgcaccggaattctgctaggagcgctatatgatccgatgaccattcaggagaaggaagagctgtgtcttttctcaagctatcttcatccaacagctccaataatgactctacagtcaatgaatccgctgtgtaaaatatgtaatctagggtaccagtaaaatcccttgtgcaatttgtgaacaatggctcatttgtcc

SEQ ID NO: 12264 - DNA, 607 bp, Zea mays
  unsure (1)..(607): unsure at all n locations; Clone ID: LIB3061-098-Q1-N6-C2
gcagcgtcgtagcttggtccttagacggccgcctgggtttttttttgacttaaaaatagatctctaatcttttattactgganaagttgcacatatcagtatgagaactttattattacagtataaagcataaaaaaatctagaagatggcaccaccaatggtgggctgctgcaataaggggggggggggcggcaaagcaagttggttaaatggcagcaattgttgttgttgtaagaaggcgacattgtttgccacatcctgtgggtagaatggtagcaactgttgctgttgcaagaaggcgttaatgtttcccacaacctgtgggtaaaatggcagcaattgttgttgttgttgcaagaaagcagcaatgtttgccacaacttgtagatggaatggaagcaactgttgctgcagtaagaaggcagcagggctcctgacaagttggttgaatggtagtagctgttgtgcctgcaagtaagcagcagggttcaccccagctagttgattgaatggaagaaatgttgttgctggaggtaagcagcaaggttcgctgcaactacttgattgattgttggaagcaactgttgttgtagttgttgtgctgcg

SEQ ID NO: 12265 - DNA, 439 bp, Zea mays
  Clone ID: LIB3061-098-Q1-N6-C4
gggtgaaaccgagccgctcatgataaaaacgaaaagactgttgccaaaagcccgattaccctttgaacatacatacccagaccagggggtgggggggggggagctacagtctagctaacgacttgaccaggcaatgctttcccttgctaacgagaatgggccaatgggttgggatctggaccaccaacgacctttgggtctcccaaacttttccggggagggttgcgggtgctgcttatgctagcactcacagcagcaggggcctgtttggttcccgccttgggttcttgaagcttttttttgggttcaccaaaaccctggagcttttttaggatagcaaccacagcgtccataggcggcctcattttaacttcgtaggataggcattccaaagcaagggcagcaattgtttgggcccccttcaaattgtattgacctt

SEQ ID NO: 12266 - DNA, 309 bp, Zea mays
  unsure (1)..(309): unsure at all n locations; Clone ID: LIB3061-098-Q1-N6-C6
ggggggttgaattaaaaattttaatttaantttttttaaaaaataaaaattaacccctttgtaatgtttaaaaaaattttattaaatatttaggtaaaaaaaattaaattattttttttgcaagttttttttttaaaaaaaaaattttttttatttgttaaaatttttattattaatataagtaatttaattttatttttttaaaattaaaaataattaaaaattattttttttttataaaaaataaaaagaaaaatttttcttttttttgtttttttttaaaaaaataattgtaaaaaaaattaaaaa

SEQ ID NO: 12267 - DNA, 518 bp, Zea mays
  Clone ID: LIB3061-098-Q1-N6-C7
gggggggtgttttttttttttttttttttcagggttgacctattcactccacttccaactgactaaatttaatacccgataaaaaacattggtccaacaatttagactcttacattttgtttcaattatctttccccttttcctctttagggaaagtttggccagcttacaaataacaccttttaaagcatacaaataaaactagatcacgcttgtgtttgtgtgcccgagttaccgacagagaactagcgattctgcacataaacaaccaagtcgtctatcatttttaagcagcatcagtgtcccctgtggatttgttgtactctggcttaagctcatgagttccctggtttggtcctcgtttattatacacacagagatcgttcaatatctccttcaaaaattgctctggctggtcagttttttacaccagcgcctttagtgcccaattgggttgcctttcaaaaagcttgaatataatgttttccatctccgtacgatccctaccagttcttttg

SEQ ID NO: 12268 - DNA, 631 bp, Zea mays
  Clone ID: LIB3061-098-Q1-N6-C8
gtgtggggttttttcagaaatatatcgagataaatctcaatcaatatattgattatttctaggaaacacacgtcggtatgagggcaccattatcgagtacatctcatatgtaatctaaaagatggcacctccaacgatgggttgctgcctggggggggggggattcatcaaagagaactggttgtatggcagcaattgttgctgctgtaggaaggcggcgaccaatgggttagccactaccaatggattaagtaactgttgtcgctgttgtaggtacgcagcagagttcgacagagtcagttggttgaatggaagcagctgttgcaagtaggcaacagggtttgccacagctagttgagtcagagctggtacaatctgttgcaacaattgttgttgcaggtatgtaggtgcattgcccacagcgagcgggctagatgaaagcagttgttgttgttgtacgtaggcggcagggttcaccatggctagttgactgagcgttggcagaaactgttgtagctgttgttgctgctggtttgcaactacgttcgccagaacaagtgggttggatgcaagcagttgctcttgcaagtaggcggcagggttcaccatggctagggggctcagagctggt

SEQ ID NO: 12269 - DNA, 330 bp, Zea mays
  Clone ID: LIB3061-098-Q1-N6-C9
gggggggggggttttttttaaaaaaaatttttgtgggtttttttttttttttttttttttttttttttttttttttttttttttttttcccggagaaaacccaaaccaacaaattgattatttcaaggaaccccatcccccttttggggggggggggggggggcccccccacctccaaccaaaaagggggcccccccaaggagggggggcccccccccccgggcgggggccacaaaaaaaaccgggtgcgcgggccccaccggccccccctctgggagggccccccccaaggggctccccccccctgggggataaaggggggggggcccc

SEQ ID NO: 12270 - DNA, 611 bp, Zea mays
  Clone ID: LIB3061-098-Q1-N6-D1
aaatctcaatcaatatattgattatttctaggaaacacacgtcggtatgagggcaccattatcgagtacatctcatatgtaatctaaaagatggcacctccaacgatgggttgctgcctcgacaagacaggattcatcaaagagaactggttgtatggcagcaattgttgctgctgtaggaaggcggcgaccaatgggttagccactaccaatggattaagtaactgttgtcgctgttgtaggtacgcagcagagttcgacagagtcagttggttgaatggaagcagctgttgcaagtaggcaacagggtttgccacagctagttgagtcagagctggtacaatctgttgcaacaattgttgttgcaggtatgtaggtgcattgcccacagcgagcgggctagatgaaagcagttgttgttgttgtacgtaggcggcagggttcaccatggctagttgactgagcgttggcagaaactgttgtagctgttgttgttgctggtttgcaactacgttcgccagagcaagtgggttggatgcaagcagctgctcttgcaagtaggcggcagggttcaccatggctaggtggctcagtgctggtaggaactgttg

SEQ ID NO: 12271 - DNA, 511 bp, Zea mays
  Clone ID: LIB3061-098-Q1-N6-D11
ctacgaaaagaatcagctttttcgaggcttaatttgaggagggcctcaataggtggaatgtgcagcaatggcctcaacaacgacatgcacacctcacaccaagaaaaccctcagttttaagcatgaaacagtgttgggaagtgtgtacgatagctcgagaaaagagacggaactgtggcttttatgagcgctgctactaatactcttcacagagcatggctctgtcatagtagtattattaatcaccagatgcaccaacagcaggcgatccggctgccaacgagcagaggcaccctcagacaagcacctgggctgcagctagcctagcgatcgggaccctgaaaggggagcaagaaacgtaatccagcccagtcttggcgaagaaagcacccgatgaaggctctccaccatgttctccacaaatgcccaccttcaagttaggcctagctttgcggcccctctctgtcgcaagcttaaccagctcgcccactcctctttgggcgcgaaccct

SEQ ID NO: 12272 - DNA, 166 bp, Zea mays
  Clone ID: LIB3061-098-Q1-N6-D12
aaaatctggaaagtaacttcttatttctggttggccacatacatcatccaaaaaatttattattgaattacaactaataagccatctaaaagtagggcaccacctatgatgtgtcgcgcggtaggaggccgctcgggctggcaaagcaagttgcacaaagggcaac

SEQ ID NO: 12273 - DNA, 610 bp, Zea mays
  Clone ID: LIB3061-098-Q1-N6-D3
gtggtgtttttttaccaaacaaaattcatctgtttcattgaaatggaattgccaagtcttatatccaaaaccaaaactcaaacctcgcaagggagtaaagtatatatatggggtccattgcttcttacacaaccagaaatgcaagttttagggggggggtggcgagtcaacctggaccccctacccctgagtgaagaatactgcatccagagatggtgattttgttagttcaaaatgtgtagctgccctcaggcaaaaatctcattttaccatcatttgttgagtgggtgcggcccctctggttcgcatggtctccacactgtaccagaaggttcatccatcagggcgatgcccttggtagcaaggtttttcctgattccatcagatatctcaaactgtttattcttccttgcaacgtttctctgctcaatctgctcttgcaatttttcttcagtcagccccgctctctttagtgctttgtccttcaattgcttcagtacctctgccaaagatgaagatggcatcagaccaagtatagacagtttatttttaagttctatttccagtgcaatcagagcttgaatataatgttctggctgtttttgcaatt

SEQ ID NO: 12274 - DNA, 480 bp, Zea mays
  unsure (1)..(480): unsure at all n locations; Clone ID: LIB3061-098-Q1-N6-D4
gggggggggttttttataaatttttttggtgctgataacttagaaatcttatttaaataacatatgttggtccaaagcttttcttccaatatgattccagtgtaacccaacattaaattttaaaaaatattatgggtcacaaggtggccttgctttgtgtaaaaaatangtaaactttgaaggcttttactaaggcagataaagaccctggataagtggatatagaatcctggtgaatagtgaactgattggtctgtcttttccatttctttttccttgatggatagcccaacaaaatgaatcggaattttaaagacagtttaatcttgatttgcttctaaacaagctgaaatatttgatgaattgtacttcggttgatgttcatattaaaatgccaagtggttaaataaaattgtaaaaattaatgcagagggagattggcaggttttttgataactaaacgttctgcacaccaatttt

SEQ ID NO: 12275 - DNA, 585 bp, Zea mays
  Clone ID: LIB3061-098-Q1-N6-D6
gatacaacagacatcagtcatagtaaattggtaactgtatagatttgatttcatacatggaagcaggtgacgatggtaaacagaatgccacttatgaagtaagcctaaaaaccggaacaacagttcatgacttcagacggggggggagctggtatggccctatatatgccttaacagccatgcccttaccttacctctgtattatatttgtaaatccattggtctcgtgccttataaaccatatggcatcaagcagcaggaaccttccttccatcttcaatgaagaaaatggccgactcaggtacatcaggccatgtatctgtaatgaactccacaatatcatatgagatgtccccttgtacgtcgatttgctccttctccgtagggcccttaacaacagaagctccggttgcaaacttcttcccaagcttcttcgaagcatcactaagctttacaccaaacaattcaagccccttcaccacagtaacacatttgcgcttgttacggacaatcttctcaatgaccacttcttgcttctcctttttcttgagcttaccaccaggcaggcgtttcgcctcttggggc

SEQ ID NO: 12276 - DNA, 77 bp, Zea mays
  Clone ID: LIB3061-098-Q1-N6-D7
ggagatctcaggacagacttgtgatatttaataagtatgaaagagtgacgcgatgacactttcagtgccagtcaatc

SEQ ID NO: 12277 - DNA, 585 bp, Zea mays
  Clone ID: LIB3061-098-Q1-N6-D8
ctgggaagccacaaacatcagataaaaaatttattattgaactataactcataagaaatctaaaagagggcaccaccaatgatgggttgttggtagaacactgctgggtttgtcaaagcaagttggttgaatggggggaggggggggagttgtaagagggtgccagcgttaggcgcaacgtgctggtagaacggcaacaactgtggttgtgtcaagaaggtagcagggctcacaccagctagctggctgaatggtagtagttgttgctgctgtaaataagcaggagagttcaatgctgctagttcgttgaatggaagaaattgctgggggtaggcagcaggtagctggctgaatggtagttgttgttgttgcaaataagaagcagagttcaatgaacctagttggttgaatggaagaaactgctgttgctgagagtaggcagcaaggtttgctagcacaagttgttgtagttgttgtgccctgatgttttgtgccaataaatgcaccaaaggtaactgttgtaatagggctgatgattgttggaggaaccaaggtgataaaggtaagatgccagctgcgattgcc

SEQ ID NO: 12278 - DNA, 108 bp, Zea mays
  Clone ID: LIB3061-098-Q1-N6-D9
aagacaaaaactttatttttgaactttaactcataaaaaatcaaaagggagggccccaccaatgatgggttgttggcgaaacgctgttgggtttgacaaataatgttg

SEQ ID NO: 12279 - DNA, 553 bp, Zea mays
  Clone ID: LIB3061-098-Q1-N6-E1
aaaaactagaatgtactttcttatttctgggaagccacaaacatcagataaaaactttattattgaactataactcataagaaactaaagggggcaccaccaatgatgggttgttggtagaacactgctgggttgggcaaagcaagttggttgaatggcagcaattgttgcagttgtaagagggtgccagcgttaggcgcaacgtgctggtagaacggcaacaactgtggttgtgtcaagaaggtagcagggctcacaccagctagctggctgaatggtagtagttgttgctgctgtaaataagcaggagagttcaatgctgctagttggttgaatggaagaaattgctgggggtaggcagcaggtagctggctgaatggtagttgttgttgttgcaaataagaagcagagttcaatgaacctagttggttgaatggaagaaactgctgttgctgagagtaggcagcaaggtttgctagcacaagttgttgtagttgttgtgccctgatgttttgtgccaataaatgcaccaaagtaactgttgtaatagggc

SEQ ID NO: 12280 - DNA, 321 bp, Zea mays
  Clone ID: LIB3061-098-Q1-N6-E11
ggggggttttttttttttttttttttttatcgaggaaaatgtcaatcaatataattgattattttctagggaaacacatgccggtttgagggcaccatttatcgattacatctcatatgtaatctaaaaaaggcacctccaacaattggttgttggggggggggggcagggttcatcaaagagaactggctgtatggaagcaattgttgctgctgtaggaaggcagtgaccaatgggttaggcactgatagtggattaagtaactgctgtcgctgttgttggtactccacacagatcgacacagtcagttggttgaatggg

SEQ ID NO: 12281 - DNA, 362 bp, Zea mays
  Clone ID: LIB3061-098-Q1-N6-E7
ttgttttttttttttttaatttttttttttttttttttttttttttttttttttttttgttttttttttttttttttttaatagggtttaaaaatttaatcggtagaagtaaaataaaattaaaattggcgttaaaattatacatttgtttgtaagggagcccttttaaaaaacctcgccgtattaatactaacaaaacgatgttcaaaagttagccttgaaattaaatttattcaaagggattggttgaaatttggggcttaattttcactgacaaaatgaaaaagggaggtaattaattaacttaacaggaggttttgttttaaggtctaaaaaaagcctggtggggaaaggcgaaaatt

SEQ ID NO: 12282 - DNA, 526 bp, Zea mays
  Clone ID: LIB3061-098-Q1-N6-E8
gtggttttttttttttgtttttttttttttttttttttttttttttcatgatgcactttaaggcaacactggggaaaggaaaaccagcatattccacaaaagttatctgacgggcacagttggtgagcttttcattcaggctgatctgagtggagtggggtttttgatcacggcgcttcagcagattcaaaagttgaacctccctactgatacacaagttgaacagagttgccagatcattctcatcagccccgttgagattgggaccagaggcagcattagcttccacttgatgagccaatacttcacgagaattgcgctcataatattcttggaggtaagttttgtataggggccaagaattcacaggacagtacggcagtattgaatcccatccccaagctttttccaaaagagctgggtatttaactatttacaatggtggttgtggcggacgttcaccatgctttctgtatttttcaccacgaacagcaaacccagtcattctctcctcaaaagttttttg

SEQ ID NO: 12283 - DNA, 543 bp, Zea mays
  Clone ID: LIB3061-098-Q1-N6-F10
aaaaccaaaactttattatgatgcatatattattggtcataccacacatgataatgtgtgtcgtcttactgcattattacatatatagatagagagggatggatagaggagatttcccaaatatcatgaatcagtagtagggcggaatggcagcggagaccccacaggggttggtgcggtagctgggcagctggtactggtactggtagagtccacccatggccggcatgttctgcgccatcatcatggccatggggttgagaccctgggctgccagcagctgctgctgctgctgcatcagagctggctcgtacaggctgctgctggcggcagcggcacgctcaagctgcatcatcatctgcagctgctgcgcgacggactgcacgtccatcatcctcatctgctgctggcagcactgttgccggagcggctggtacatggcgctcgtctgcccacacccggcgtagtagggcgcccccgccagcgggctgcactgcggctgcctcaggtactccccgtaggggtacagcccgccggcgccca

SEQ ID NO: 12284 - DNA, 407 bp, Zea mays
  Clone ID: LIB3061-098-Q1-N6-F11
gaaaagtacaagatgggcatatattataacagcattcaggtttttgtgtcatagccagtaaacggaataacaatatttctctcatagattcaaagcagaaaatacaattgaatatgctgacaggcctccttgcttgagctttcaaaactgtggtcacctgaaagatgtggacctaagcctttttcttcgatgacttcttggggggtttcttctggggcttaagcttatcagatttcgatgacatgcctttctctttccttgtctgcttctcctttttcaccttgtacattgaaattgccttggcggcatcaagtggatcatcagtagtttctggcaagtcgagagttcaggattatgacattccgctgttactccaggctgcccattcccttccctcggacaactgg

SEQ ID NO: 12285 - DNA, 568 bp, Zea mays
  unsure (1)..(568): unsure at all n locations; Clone ID: LIB3061-098-Q1-N6-F2
ggaggaacataggtttgttattntggaacagattacacacttgattggcattccacacgcaaccgatcgatatgacgattatactcctatttattagcaccagctatatatagccatgtctggagtctggagtctggactagcaagcaaccgagatcgatgcatgatacagagatagattcatcggtttgcatgagcatggcttgttgccagccactatgttacacccaccacgcatgtacaaagttctgtatcgtcgcatcgcctccgcctgatgatgatcgatcagtgcagcgccgtcaggacagtagacccttccaccaccttgaaagtggcaccgcagatctcttcttcgtcggcggggacagcggtgaccttgtgcttggggttctcgtagcacttgagccctccgagggcgttggagtagaagcagccttgcgggaacggcgcgagcgacttgccgcatgagcctttgagcatgtcgatgtcgtcggagaaggcgacgcagccgtcggcggtgatcccccagaagagcggcaccctgccctcggggtcagatgctaccagca

SEQ ID NO: 12286 - DNA, 56 bp, Zea mays
  Clone ID: LIB3061-098-Q1-N6-F5
ccctggtaattctttttttttccttaaaccttaccattttgggtttgatgggggct

SEQ ID NO: 12287 - DNA, 224 bp, Zea mays
  Clone ID: LIB3061-098-Q1-N6-F6
ggggggtttttttaaaaatgtactttcttatttctgggaagccacaaacatcagacaaaaactttattattgaactataactcataagaaatctaaaagagggcaccaccaatgatgggttgttggtagaacgctgctgggtttgtgagggcgttggggggaactctgcttcttatttgcaacaacaacaactaccattcagccagctacctgctgcctacccc

SEQ ID NO: 12288 - DNA, 582 bp, Zea mays
  Clone ID: LIB3061-098-Q1-N6-F7
aatctaaaaatgtactttcttatttctgggaagccacaaacatcagacaaaaactttattattgaactataactcataagaaatctaaaagagggcaccaccaatgatgggttgttggtagaatgctgttgggtttgtcaaagcaagttggttgaatggcagcaattgttgcagttgtaagagggtgccagcgttaggcgcagcgtgctggtagaacggcaacaattgtggttgtgtcaagaaggtagcagggctcacaccagctagctggctgaatggtagtagttgttgctgctgtaaataagcaggagagttcaaagctgtcagttggttgaatggaagaaattgctgggggtaggcagcagatagctggctgaatggtagttgttgttgttgcaaataagaagcagagttcaatgcagctagttggttgaatggaagaaactgttgttgctgagagtaggcagcaaggtttgctagcacaagttgttgtagttgttgtgccctgatgttttgtgccaataaatgcaccaaaggtaactgctgtaatagggctgatgattgttggaggaacaaggtgat

SEQ ID NO: 12289 - DNA, 475 bp, Zea mays
  Clone ID: LIB3061-098-Q1-N6-F8
ggaaatataacttcttatttctaggaggccacatacatcagccaaaaaacttcattattgaattacaactaataagcaatctaaaagagggcacccccaatgatgtgttgttgggggaaggctgctgggtttgtcaaagcaagttggacaaagggcaacaactgttgcagttgtaagagggttgcggggttagccacaaactgctggtagaacggaagcacttgttgttgtgtcaaaaaggaagcggggcttgttgtacctagctggccaaatggtagtaggatttgctgctggaaataagcagaggggttcagtgcggccaattggttaaatggaaaaaattgttgctgctgaaagtaggcaataactagctggctgaatggtaatagttgttgttgctgcaaataaacagcagggttcaatataaacagttggttgaatggaagaaattgtttctgctgacagtagggggaaa

SEQ ID NO: 12290 - DNA, 510 bp, Zea mays
  Clone ID: LIB3061-098-Q1-N6-G1
gggggcattataattacaattaggtttcttattcaaatatcatagtccaaacatcataaggggggggcctttattggttaacaccggtatatgggtataacgggtagggagacacaattcttcaattgcaaacccccctaatggcattgctgctgcaggggttattttggggggatgagggggccaagccccacattgaggggggggattgggctgctgtcaaaattgcccccccactttggggagcttggggagaaccacataactcacagggggggggggggtgctccccctggattatggattgaaccatgttgtaaattgcttggggaatgtattggggctcaatctgcctaaaaaatgacaacattggtgctgcaatacccggcagctacttgggtgtatcaaacctgattggagaaaaggcttaccaaaggggtgcactgctgccttaggaattcatgacaattttttagatttgagctactggtataggagttatagctgccc

SEQ ID NO: 12291 - DNA, 78 bp, Zea mays
  Clone ID: LIB3061-098-Q1-N6-G10
ggactacaacaacccatcattggtggtgccctcttttagattgcttatgagtttgtcaaagctaatgaattgttttgt

SEQ ID NO: 12292 - DNA, 553 bp, Zea mays
  unsure (1)..(553): unsure at all n locations; Clone ID: LIB3061-098-Q1-N6-G11
ctcacctgaacactgcattttattcctcatcataaacatgacatccaaactagacatatcgagcatgctgtacatccgcctctccgatcaaagagagacgcatacagcatatagtactgcactgcactgcatgcccccagacacaagcatgcacacacaaagcacaacacataaacgactagctagagctatcgcggcgaccgagactctacggcagcgtacgtagcagcagccaccgcctttaagggccatatgccgccgcgccggcagtggttcaaggaggtcgcgcgcgcggtccgctcgagtgtggttcttctctcaagacccctgcgcctggtcgatgcggtgctgtgctgcatccttgatgtcgcgggccttggacgccagcctcgccttggcgtggtccagctggtcggcgcccggcgggtgcttgcccgtcaggtacttgtacatccaggagaacacggacagcgcancgacgccgaggccgccggaggtgacgaacccggccgccatgagcgccagcgcgatggcggccggcaccagcaccggg

SEQ ID NO: 12293 - DNA, 617 bp, Zea mays
  Clone ID: LIB3061-098-Q1-N6-G2
cagaaattattgagataaatctcaatcaatatattgattatttctaggaaacacatgccggaatgagggcaccattatcgagtacatctcatatgtaatctaaaagatggcacctccaacgatgggttgctgcctcgacaggacagggtttatcaaagagaactggttgtatggcagcaattgttgctgctgtaggaaggcagcgaccaatgggttagccactgctagtggattaagtaactgttgtcgctgttgtaggtacgcagcagagttcgacatagtcagttggttgaatggaagcagctgttgcaagtaggcagcagggtttgccacaactagctgagtcagagctggtacaatctgttgcaacaattgttgttgcaggtatgtaggtgcattggccacagcgagcgggctagatgaaagcagttgttgctgttgtaggtaggcggcagggttcaccatggctagttgactgagcgctggcagaaactgttgcagctgttgttgtggctggtttgcaactacgtttgccagagcaagtgggtttgatgcaagcaactgctgttgcaagtaggcggcagggttcaccatggctaggtggctcagtgctggta

SEQ ID NO: 12294 - DNA, 463 bp, Zea mays
  Clone ID: LIB3061-098-Q1-N6-G3
ggccttgttgacgcctggggggcgggggcgggcggagccggggcagccggggggggggggggggggggcggaaaaagggggaaaaaaggcgcgggaggggaggaggggaagcagggggggggggaacggggagaggcgccaacgccccccccccccgcccccccccccccccccggcccaggccccccccccccccccccccacggacccacccccccccccggggcaaaccccaaacccccccaaccccccaaaacaaaccagcccgaagcaggaagtggaaagcctgccacgcccaaagagagagctaactcacaagaaacgccctacgcgcactgccccccaaacagcccaagagacctacccgccacccgccaaaaagaacccgcaaaaaccaaaggagaggaggttcgcggaacgggcgcgcctccgcggggggacaaaaaaacccgaagggcgcggg

SEQ ID NO: 12295 - DNA, 597 bp, Zea mays
  unsure (1)..(597): unsure at all n locations; Clone ID: LIB3061-098-Q1-N6-G6
gggtgttttttttcgagataaatctcaatcaatatattgattatttctaggaaaccatgtcggtatgagggcaccattgtcgagtacatctcatatgtaatctaaaagaggcacctccaacgatgggttgctgcaaggcagggttcaggggggggagactggttgtatggcagcaattgttgttgctgctgcaggaaggtagcgaccaatgggttagccactgccaatggattaagtaactgttgtcgctgttgtaggtacgcagcagagtttgacacagccagttggttgaatggaagcaactgttgtaagtaggcagcagggtttgccacagctagctgagtcagagctggtacaatttgttgcagcaactgttgttgtaggtacgtaggtgcattgcccaccgngagcgggctagatgaaagtagttgtaggtagacggnagggttcaccatggctagttgactgagcactggcataaactgttgcagctgttgttgttgctggtatgcagttacgttcgccagagcaagtgggttggatgcaagcagttgctgttgcaagtaggtgacagggttcaccacgggtaggtggctc

SEQ ID NO: 12296 - DNA, 623 bp, Zea mays
  Clone ID: LIB3061-098-Q1-N6-G7
ggggtgttttttttattttttttcgaggaaaatctcaatcaatatattgattatttctaggaaacaatgtcggtatgagggcaccattgtcgagtacatctcatatgtaatctaaaagatggcacctccaacgatgggttgctgcagggggggggggatcaaagagaactggttgtatggcagcaattgttgttgctgctgcaggaaggtagcgaccaatgggttagccactgccaatggattaagtaactgttgtcgctgttgtaggtacgcagcagagtttgacacagccagttggttgaatggaagcaactgttgtaagtaggcagcagggtttgccacagctagctgagtcagagctggtacaatttgttgcagcaactgttgttgtaggtacgtaggtgcattgcccaccgcgagcgggctagatgaaagtagttgtaggtagacggcagggttcaccatggctagttgactgagcactggcataaactgttgcagctgttgttgttgctggtatgcagctacgttcgccagagcaagtgggttggatgcaagcagctgctgttgcaagtaagtgacagggttcaccacggctaggtggctcaatgatggcagaaact

SEQ ID NO: 12297 - DNA, 609 bp, Zea mays
  Clone ID: LIB3061-098-Q1-N6-G8
gtggttttttttgttttttttttaagaatctgagaatgtactttcttatttctgggaagccacaaacatcagataaaaaactttattattgaactataactcataagaaatctaaaagagggcaccaccaatgatgggttgttggtgggggggtggggggtttgtcaaagcaagttggttgaatggcagcaattgttgcagttgtaagagggtgccagcgttaggcgcaacgtgctggtagaacggcaacaactgtggttgtgtcaagaaggtagcagggctcacaccagctagctggctgaatggtagtagttgttgctgctgtaaataagcaggagagttcaatgctgctagttggttgaatggaagaaattgctgggggtaggcagcaggtagctggctgaatggtagttgttgttgttgcaaataagaagcagagttcaatgaacctagttggttgaatggaagaaactgctgttgctgagagtaggcagcaaggtttgctagcacaagttgttgtagttgttgtgccctgatgttttgtgccaataaatgcaccaaaggtaactgttgtaatagggctgatgattgttggaggaacaaggtgat

SEQ ID NO: 12298 - DNA, 545 bp, Zea mays
  Clone ID: LIB3061-098-Q1-N6-H1
gttttttttttttttttttttttttttttttttttttttttttttttttttttttttttttttttttttttttttggggggggagggctttaatggtacttgggggacccgcataagatcctgaattcaaaaacaaaataagagggttgtaaggggcccctggacaagggacaaggggggggacaaaacaccccccctgggggggggggccatcacggtggggaacccccttacccatgggggttacaaacccatgggggggccccttacctaccctcctaggagtatgagaatgatgctaaagtatccaacgggccaaaacaacaagaagatgggtttttctcctttaaaaaaaatgagcggggaggggcagtgaacccccttacacatgggtcaggacctttttgacaaggcccttgccctcaaaggaatacccgagcttttagtcatcaacagcagcgttaagggaattgagcttggatcgggtgggtccatttttacaggctacaaccattgaggggttgtcaaatagaaatttggtcttc

SEQ ID NO: 12299 - DNA, 505 bp, Zea mays
  unsure (1)..(505): unsure at all n locations; Clone ID: LIB3061-098-Q1-N6-H10
gggggggggggggggttgaaaaaaaaatagatgtgggatacttanttactgagaggtcgcacatatcagcatgagaactttattattacagtataaatcagtaaaaaatctagaagatggcaccaccaatggtgggcggttgcaataaggtgggtttgttcggggaancatgtttnctaaatggtancaattgttgttgttgtaagaaggcaacaatgtttgccacattctgtgggtagaatggtagcaattgttgctgttgcaagaaggcattaatgtttcccacaacttgtgggtaaaatggcaacaaatgttgttgtgtgaagaaagcaacaatgtttgccacagtttgcagatggaatggcagaagctgttgttgcagtaagaaggcataagggctcccgacaagttggttaaatggtagtagctgttgtggctgcaagtagatagcagggttcaccccagctagttgattgaatggaagaaactgcgtgtgctggaggta

SEQ ID NO: 12300 - DNA, 529 bp, Zea mays
  Clone ID: LIB3061-098-Q1-N6-H11
aaacacaacgggaggctactagtttaacaagtttatttattatcgctcatcgaccatgcacggacgccacagtagggggcggcacgtaggggcgggcgcgcgccacggcatcacatgatcacatcttcccctggggaggcgggcaggacgagccggcgcaaccctccacgcacttctcgacgcactggtccacccgctccgccgcacgctgctgcatcagccggtccttctcctcgaagtacaccgacgccgccttctccgccgcgcgttccttcgccgcgcgctcgtcctcgccgcccagccggacgtcgacgtgctgaccttggcccagcgtcagcttctccttgatcgcgcccgtcacgttccccagcgcccccagcagaccttgtccctgctccctatcagtgtcgtgagtgctggccgtctccctagccttgtcagcggcggtctgtgctgtggctcgggacctgtccctggcctcctgcgcggcctccctgctggggtcggtgtactcgcccgccttctgcct

SEQ ID NO: 12301 - DNA, 573 bp, Zea mays
  Clone ID: LIB3061-098-Q1-N6-H2
gctgtggggggttttttttttttaaaaagtactttcttatttctgggacgccacaaacatcatccaaaaaacttcattattgaactataactcataagcaatctaaaagagggcaccaccaatgatgggttgttggtagaacactgttgagtttgtggggggggggtggttgaatggcagcaattgttgcagttgtaagagggtgccagcgttaggcatagcgtgcaggtagaacggcaacaactgttgttgtgtcaagaaggcagcagggctcacatcagctagctggctgaatgggagtagttgttgctgctgtaaataagcagcagagttcaatgctgctagttggttgaatggaagaaattgctgggggtaggcagcaactagctggctgaatggtaattgttgttgcaaataagcagcagagttcaatgcagccagttggttgaatggaagaaactgatgttgctgagagtatgcagcaaggtttgctagcacaagttgttgtagttgttgtgccctgatgttttgtgccaccaaatggaccaaaggtaactgctgtaatagggctga

SEQ ID NO: 12302 - DNA, 407 bp, Zea mays
  Clone ID: LIB3061-098-Q1-N6-H4
gggttttttttttttttttatttttttttttttttttttttttttttttttttttttttttttttttttttttttttttttttttttttttttttttttttttttttttttttttttttttaaaggggggggtttttattgttaaaaggggggggggggggaaaaagtttgggtaaaaaaaatttttaaatggaaaaaaccaaaaagggtttggggggggggggggttttttgggggggaggggggggaaaagcccccaattggggggggggttggggtggtttaaaaaaatccccccccattttgggggggggggggggaaccaaaaaaaaaaaagggggggggggggggtccccccggggttgggggggaaaccaatgggaaaatgggtggggaaatggtttggg

SEQ ID NO: 12303 - DNA, 495 bp, Zea mays
  unsure (1)..(495): unsure at all n locations; Clone ID: LIB3061-098-Q1-N6-H5
ttttgaaaaaaaaaataaaagataaanaaacaaattcctgcatgcatcaaactgactattcttcatgtcacttgccgcatgacggccaagttctctgtttccatttttttactcctctcttgtaacaaactaccccaggtncgatgggggcctcatgcacaaaaattaccgcagtaacagtgagaaaacacccactgcatcatctgccacctgtctctgtctccttgttctctttaaccgctcgatcgatctcttattacccttcacgtgccgttttcaccgcatcgattcaaccactccgtgaagaccccaagcttttgagggttcttattaattaccctaacgaatcaataaataaccatatcaccaccaatattttttttactgtaacatntaagagggcgaccactgtaactagcgcagcaaccaatggagaaataggagggtgggcaacagcgacgacgacacgacatggatcgaggtgtggctaccacc

SEQ ID NO: 12304 - DNA, 606 bp, Zea mays
  Clone ID: LIB3061-098-Q1-N6-H7
ggtggtttttttttaaaattggaaagtaacttcttatttctggttggccacatacatcatccaaaaactttattattgaattacaactaataagcaatctaaaagagggcaccaccaatgatgtgttgttggtaggaggccgctcggggtgggagagcaagttggacaaagggcaacaattgttgtagttgtaagagggttgcggggttagccgcaaactgctggtagaaaggcagcaactgttgctgtgtcaagaaggaagcacggtttgctgcagctagctggctaaatggtagtagtatttgctgctgcaaataagcagcggggttcagtgcggccaattggttaaatggaagaagttgttgttgctgagagtaggcagtagctagctggctgaatggtaatagttgttgctgcaaataagcagcagggttcagtgtagacagttggttgaatggaagaaattgttgttgctgagagtagggagaaaggtttgccagagctacttggttgatcacaggtagcacgagttgctgcagctgctgtgccctgatggtttgtaccaatgactgcaccaaagatagggctggcgattgttgaaacaac

SEQ ID NO: 12305 - DNA, 390 bp, Zea mays
  unsure (1)..(390): unsure at all n locations; Clone ID: LIB3061-098-Q1-N6-H8
aaaataaattttttttttttttttttttttttttttttttttttttttttttttttttaagattataattaaaattaatttttttattaaaattttataaaaaaaaaattattattttaaacccttttttttctcggggggggcgaaactttaccttaaannttaccaattttccctaaaaaaaaaatttttaaaactttttctaattatttaaaaaaattttttctttataaaaatttttccctttaacaatttctaaaaatataaaaatttaaaaaataaaataaaaaaatttaaatgcctaataaataaataaaataatttttatttatttaaattaaattatctttatacaaataaaaaaaatttaatactttcttcatttaataa

SEQ ID NO: 12306 - DNA, 575 bp, Zea mays
  unsure (1)..(575): unsure at all n locations; Clone ID: LIB3061-099-Q1-N6-A1
gtgggtgtttttttagaaagtactttcttatttctgggaagccacaaacatcagataaaaaactttattattgaactataactcataagaaactaaagggggcaccaccaatgatgggttgttggtagaacactgctgggtttgtcaagggggggggggtgaatggcagcaattgttgcagttgtaagagggtgccagcgttaggcgcaacgtgctggtagaacgggaacaactgtggttgtgtcaagaaggtagcagggctcacaccagctagctggctgaatggtagtagttgttgctgctgtaaataagcaggagagttcaatgctgctagttggttgaatggaagaaattgctgggggtaggcagnaggtagctggctgaatggtagttgttgttgttgcaaataagaagcagagttaaatgaacctagttggttgaatggaagaaactgntgttgctgagagtaggcagcaaggtttggtagcacaagttgttgtagttgttgtgccctgatgttttgtgccaataaatgcaccaaaagtaactgttgtaatagggctgatgattgttgg

SEQ ID NO: 12307 - DNA, 513 bp, Zea mays
  unsure (1)..(513): unsure at all n locations; Clone ID: LIB3061-099-Q1-N6-A10
gtgggggggggttttaaaaaaaactttcttattggctgggaagccacaaacatcagacaaaaactttattattgaactataactcataagaaatctaaaagagggcaccaccaatgatgggttgttggtagaacgctgctnggtttgtggattcgcctgggtgaatnncancaattgttgcanttgtaagagggtgccagcgttaggcgcagcgtgctggtagaacggcaacaactgtggttgtatcaagaaggtagcagggctcacaccagctagctggctgaatggtagtagttgttgctgctgtaaataagcaggagagttcaatgctgccagttggttgaatggaagaaattgctgggggtaggcagcaggtagctggctgaatggtagttgttgttgttgcaaataagaagcagagttcaatgcagctagttggttgaatggaagaaactgctgttgctgagagtaggcagcaaggtttgctagcacaagttgtccgacccgtgggtc

SEQ ID NO: 12308 - DNA, 119 bp, Zea mays
  unsure (1)..(119): unsure at all n locations; Clone ID: LIB3061-099-Q1-N6-A11
ttttggggcgcccccccttttttttttcttttttttttccctttttattgctttttttttttctttttctttttttgtcttnnngccccttaatattttttttttttccccnttttttt

SEQ ID NO: 12309 - DNA, 488 bp, Zea mays
  Clone ID: LIB3061-099-Q1-N6-A12
gggggggtgtttttttaataaaatttttttttttttttttttttttttttttttttttttttttattttttttttttttttttttattttttttatcgggataaatctcaatcaatatattgattttttttaggaaacacattttgggggtttgccggggttgtccaatccatctcatttttaatctaaaaaatggcacctccaaccatgggttgctgcaaggcagggttcatcaaaaaaaactggttgtttggcaacaattgttgttgcttctgcaggaaggtagcgaccaatgggttagccactgccaatggattaaataactgttgtccctgttgtaggtccccaccaaagtttgacacaaccagttggttgaatggaaacaacttttttaagtaggcagcagggtttgccacaactagctgagtcaaagctggtacaatttgttgcaacaactgttgttgtaggtacctaggtgcattgcccac

SEQ ID NO: 12310 - DNA, 617 bp, Zea mays
  unsure (1)..(617): unsure at all n locations; Clone ID: LIB3061-099-Q1-N6-A2
ggggggggggttttttaaaaaaaaaatttgggggggttatatatataaaattttatattttaaaaaaaaaaaaaataaataaaaatataaaattaaataaaaaaaaaaaaaataaaaaaaaaaaaaattaataaaaaaaaaaatttttggatttgaanggggaaatanaaatttttatattaaattaaaaaaaaaaaaaaaaaaaaaataaataaaaataaaaaaaaaaaaaagaaaaaaaaaaaagataaaataaaaaaaaaataaaaaaaaatgaaagaaaaaaaaaaagaaaaaaataaaaagaaaaaaaaaaaaaaaaaaaaaaaaaaaaaaaaaaaaaaagaaagaaaataaagaaaaaaaaaataaaaaaaaaaaaaaagaaaaaaaaaaaagaaaaaaaaaaaaaaataaaaaaaagtaatattaaaaagaaaataaaaataaaaaaaaataaaaaaaaaaaagaaaaaaaaaaagaaaaaaaaagaaacaaaaaaaaaaaagaaaaagaaaaaaaaaaaaaggaagaaaaaaaaaaaaataaaaataaaaagtaaaaaaaaagaaaaaaaaaacaaaaaaaaaataaaagaaaagaaaaaaaaaagaaa

SEQ ID NO: 12311 - DNA, 206 bp, Zea mays
  unsure (1)..(206): unsure at all n locations; Clone ID: LIB3061-099-Q1-N6-A3
aaaaaaaaaaatttttttttttttttttttttatttttttttttttttttttattttttttttttttttttattttttaaaaaaaaatttttttattattgaaaaatttttttttttaaaaaaaaatttttttttggtgatgggggggaaaaaaaaatttaaaaaattntaaaaaaaaaaaaaaaaaaaaataatatattttaaaa

SEQ ID NO: 12312 - DNA, 386 bp, Zea mays
  unsure (1)..(386): unsure at all n locations; Clone ID: LIB3061-099-Q1-N6-A5
gggggggggtttcattaaaatagttcattcaggtcattgctcacactgacactgccacccatggtgatgcgtgacacattattactcaatcatcgccgctaaatgactcaactagctagctattctttttctatactacatttatggtttcgcanggggggacaccgccggcagcagcgtaggggcatgaagtaagatgatgcaggccgaacatcgccgtaagttgctgcgctatgtgggccgtcaacagccccgngacctggccgttttgcggttgttgctgcatgatggactggaggaccaagccaaatatcgcctggtaccgttgctgaggttacacctgcctgagctggtggcaacactgtgtggtgaactactggcactga

SEQ ID NO: 12313 - DNA, 215 bp, Zea mays
  Clone ID: LIB3061-099-Q1-N6-A6
gggggtgtttttttttactagaaagtactttcttatttctgggaagccacaaacatcatccaaaaaacttcattattgaagtataactcataagcaatctaaaagagggcaccaccaatgatgggttgttggtggaacgctttttggtggggggggggggggtgtttaaatggcaacaattgccgcacttataagagggtgccagcgttaggcgc

SEQ ID NO: 12314 - DNA, 352 bp, Zea mays
  Clone ID: LIB3061-099-Q1-N6-A8
acaattattatttttttttaaatttatattacaaacatcattatattttgacctttattgtttttatcctttatataactattttgtgttggggggcacctttctttaatttttaactccttttattttattcttgttactttctttattttctttttttttttttgttcaagccattcatttatttttaaacatttatttttttaattaatttgtcacctttctatattttatcttttctatatccttttttctttatcttttctttattttcctttcttcttctttctctttttatctttttttttttttttttttttttttttttttttctcttttttctttttttttt

SEQ ID NO: 12315 - DNA, 596 bp, Zea mays
  Clone ID: LIB3061-099-Q1-N6-A9
ggggggggtgttttagaaatgtactttcttatttctgggacgccacaaacatcatccaaaaaacttcattattgaactataactcataagcaatctaaaagagggcaccaccaatgatgggttgttggtagaacactgttgagtttgtggggccgctggggtgaatggcagcaattgttgcagttgtaagagggtgccagcgttaggcatagcgtgcaggtagaacggcaacaactgttgttgtgtcaagaaggcagcagggctcacatcagctagctggctgaatggtagtagttgttgctgctgtaaataagcagcagagttcaatgctgctagttggttgaatggaagaaattgctgggggtaggcagcaactagctggctgaatggtaattgttgttgcaaataagcagcagagttcaatgcagccagttggttgaatggaagaaactgatgttgctgagagtatgcagcaaggtttgctagcacaagttgttgtaattgttgtgccctgatgttttgtgcccccaaatggaccaaaggtaactgctgtaataaggctgacggttgttgggagaacaagggtgataatggta

SEQ ID NO: 12316 - DNA, 561 bp, Zea mays
  Clone ID: LIB3061-099-Q1-N6-B1
agaaatgtactttcttatttctgggacgccacaaacatcatccaaaaaacttcattattgaactataactcataagcaatctaaaagagggcaccaccaatgatgggttgttggtagaacactgttgagtttgtcaaagcaaggtggttgaatggcagcaattgttgcagttgtaagagggtgccagcgttaggcatagcgtgcaggtagaacggcaacaactgttgttgtgtcaagaaggcagcagggctcacatcagctagctggctgaatggtagtagttgttgctgctgtaaataagcagcagagttcaatgctgctagttggttgaatggaagaaattgctgggggtaggcagcaactagctggctgaatggtaattgttgttgcaaataagcagcagagttcaatgcagccagttggttgaatggaagaaactgatgttgctgagagtatgcagcaaggtttgctagcacaagttgttgtagttgttgtgccctgatgttttgtgccccaaatggaccaaagtaactgctgtaataaggctgaccggtgttggag

SEQ ID NO: 12317 - DNA, 370 bp, Zea mays
  Clone ID: LIB3061-099-Q1-N6-B10
gttgtttttttttttataaatttttttttttttttttttttttttttttttttttttttttttttttttttttttttttttttttttttttttttttttttttttttttttttttttttttttttttttttttttttttttctgggggggggggggggggggtttttttttattactctgattttttcccaccgtctccaaaaaaaaccccgcccccccttaaaattgttccccccccaatttttaccccaacctttcccctcaacgttagcgcccctttttggggggtttttctttttacaccccccccctcaacaacttttctttccctcctcccacttttaaaaccccccccccttatcaccccccc

SEQ ID NO: 12318 - DNA, 464 bp, Zea mays
  unsure (1)..(464): unsure at all n locations; Clone ID: LIB3061-099-Q1-N6-B11
ggctggggggggggtttancaaacatgattttggggggagaaagaaatagactacagacttacagggcaatagtttacccatatgagttcactaacatgatgtgtgattttgacagaaggataacagggcatctggaacatcacactgnatatggggtccgctgggagtgnaacctctgtaaagaatcttgaagaagcccatttctggcatcagcatcttcaagcttcctttgcagctctcctatttccccctgagattcagctagttgtttcatgattgcatcattttgctgcctttcagatctcaacgaagtttccagtgctgccatattttcttcatgtctctgtaaagaatcttgaagaagcccatttctggcatcaggatcttcaagcttactttggaagtctactatttccccctcgacttcaccttatggtttcatgattgtttaattttgctggct

SEQ ID NO: 12319 - DNA, 65 bp, Zea mays
  Clone ID: LIB3061-099-Q1-N6-B3
gggggggggggtggtttttttttgttttggtgggggggggggggtgcgttccgcggggggggggg

SEQ ID NO: 12320 - DNA, 555 bp, Zea mays
  Clone ID: LIB3061-099-Q1-N6-B8
ggtgggtgttttttttttttttttttttcacactgaatttgacagtttatcttcttcgaaaccaatttcgtcgtatcacgatttacaaatgaaacacggtacacatttcagtgttcatgaaaactcaaaagaacttcagcggaaacggggggggggggggaacactgctggaacatttactgagagcgtacagatgaacaagagctatcaactcttcagtttattatgtactgttgggctttctggaggcagttgcgctcccctttgtcgttgagcagggttgcaattctgaagcaaaactctaaaccatgaatgggaaatttagaattttgatatcactgtatgtatgaacatatgtgtgattcccatgctgtctgaacaagaacaatagcatgcgaggaatcaacttatctgttcaccaattagatcgaggccaacggcaaggaatgacatcccctggaacagaaggaagtagaaatgaatcccctgagcagacaagaggctccgagtcccagccggtgtgcaggagcagagaaagagcaagctctttcttgt

SEQ ID NO: 12321 - DNA, 596 bp, Zea mays
  unsure (1)..(596): unsure at all n locations; Clone ID: LIB3061-099-Q1-N6-C11
tgcgggggggggggtgttaaaaaaaaaaaatgtgctggcttatttctgggaagccacaaacatcagacaaaaaactttattattgaactataactcataagaaatctaaaagagggcaccaccaatgatgggttgttggtagaatgctgtgggttttgtcaggggaagttnnttgaatggcagcaattgttgcagttgtaagagggtgccagcgttaggcgcagcgtgctggtagaacggcaacaattgtggttgtgtcaagaaggtagcagggctcacaccagctagctggctgaatggtagtagttgttgctgctgtaaataagcaggagagttcaaagctgtcagttggttgaatggaagaaattgctgggggtaggcagcagatagctggctgaatggtagttgttgttgttgcaaataagaagcagagttcaatgcacctagttggttgaatggaagaaactgttgttgctgagagtaggcagcaggtttgctagcacaagttgttgtagttgttgtgcccctgatgttttgggccaataaatgcacccaagtaactgctggaatagggctgatgattgttggagaacaag

SEQ ID NO: 12322 - DNA, 523 bp, Zea mays
  unsure (1)..(523): unsure at all n locations; Clone ID: LIB3061-099-Q1-N6-C2
gggggtgttttagaatctggaaagtaacttcttatttctggttggccacatacatcatccaaaaactttattattgaattacaactaataagcaatctaaaagagggcaccaccaatgatgtgttgttggtaggaggctgctgggtgggggggggcgagttggacaaagggcaacaattgttgtagttgtaagagggttgcggggttagccgcaaactgctggtagaaaggcagcaactgttgctgtgtcaagaaggaagcacggnttgctgcagctagctggctaaatggtagtaatatttgctgctgcaaataagcagcgaggttcagtgcggccaattggttaaatggaagaagttgttgttgatgagagtaggcagtagctagctggctgaatggtaatagttgttgctgcaaataagcagcagggttcagtgtagatagttggttgaatggaagaaattgttgttgctgatagtagggagaaaggtttgccagagctacttggttgcggacgcgtggg

SEQ ID NO: 12323 - DNA, 302 bp, Zea mays
  unsure (1)..(302): unsure at all n locations; Clone ID: LIB3061-099-Q1-N6-C3
ataaaaaaaaaaaaaatttgtgtgttgaantataatttataaggaatttaaaaaaggggaccattaatgattggttgttggtaaaaaattggtgggtttgtgaaaacaagtttgtttaattttaaaaattttttttgtggggggggggggggaactttaagtacaatatgcatgtagaaaggaaaaaaaagtttttgtgttaaaaagggaatatgggtaaaagaaaattattgggttaatggtaagtaattattgattttgtaaataaagattaaattaaatggtaaaaatatgtttaatgg

SEQ ID NO: 12324 - DNA, 585 bp, Zea mays
  Clone ID: LIB3061-099-Q1-N6-C4
gggggtggtttttttttttttattttcacatgtgaaatctggaaatgtaacttcttatttctggttggccacatacatcatccaaaaactttattattgaattacaactaataagcaatctaaaagagggcaccaccaatgatgtgttgggggtgaggggcgctcggtctgtcaaagcaagttggacaaagggcaacaattgttgtagttgtaagagggttgcggggttagccgcaaactgctggtaaaaaggcagcaactgttgctgtgtcaagaaggaagcacggtttgctgcagctagctggctaaatggtagtagtatttgctgctgcaaataagcagcggggttcagtgcggccaattggttaaatggaaaaagttgttgttgctgaaagtaggcagtagctagctggctgaatggtaatagttgttgctgcaaataagcagcagggttcagtgtaaacagttggttgaatggaaaaaattttgttgctgaaagtagggagaaaagtttgccaaaactacttggttgatcacaggtagcaccagttgctgcaactgttgtgccctgatggtttgtaccaa

SEQ ID NO: 12325 - DNA, 135 bp, Zea mays
  Clone ID: LIB3061-099-Q1-N6-C6
tggaccccaaaaacagccgccgggggggggggggataaaaaaaaaaaacctgcggagggctgggaagccacaaacaacagacaaaaaacctattatagaactataactcacaagaaacccaaaagagggcaccac

SEQ ID NO: 12326 - DNA, 570 bp, Zea mays
  unsure (1)..(570): unsure at all n locations; Clone ID: LIB3061-099-Q1-N6-C7
tttttgttttttttttttttttttttttttttttttttttttttttttttttttttttttttttttttttttttttttttttttatttttatntattttttttttttttatttatattttttttttgggggggggggggntaataatnttctttttttttttttttttttttttttttttttttttattttttttatatttatattttatttttttttcttttttttttttatattatttttattttttttttttttttttattatttttaatttttttttttttttttttttttatttattttttttttattatcatttttttctttttttttttctatatttttatttttattttttttttttttttttttttttttttatttttttcatttcctttctttactcatttttttttattttttctttttttcttttttttttatttatttatctctcattatttccacttattatattataatattattttccttttatntttttcccctttttttatttattatcctctcactctcccttccctttccctccttcttccttttttttt

SEQ ID NO: 12327 - DNA, 261 bp, Zea mays
  unsure (1)..(261): unsure at all n locations; Clone ID: LIB3061-099-Q1-N6-C8
attaaaaaatttttgtgggttgccgggggttttttattatttattttttttttttttttttttttataaaaaaaataaatttatttattttttttttttttttttttttttttttatttttttgcttaattttttttttctttttttttttttttattttttcatttttttatctttttttttttttctttttttctttttttttatttttaattttttttttttttattttntttctattatcttttttatatttttttc

SEQ ID NO: 12328 - DNA, 571 bp, Zea mays
  unsure (1)..(571): unsure at all n locations; Clone ID: LIB3061-099-Q1-N6-C9
ggggggggtttttttgacaaaacaactaatgggtatctgcaacatgcggtccaccaaaccgaaacagcaccttgccttaattgcctgttaatattcagagcagcaaggtgcttcatactacatcgattttttttaactanactctggcatcgactgggagcaaccaggtgaggaagtccggttatgtcaagcatgcgaaggagtaacgactcctgagctcgtttatccaagagcaccctacttctgcctcttgtagatcttgtgcaagaaggatttcagcactttctgaaccgcaatgcttggctgggcttcaatgtctgcaatcagcttcttgtagctctcattctcgtactcctgaaataccgcctctaggtcaagttctttgtagaggttcttcacttttgccacacaggctggatctttcttgccataattttcaaatagaatgcgcttttggctctcatcagcacgctcaagggcttgcacaactagccatgagcacttgtaatcttcaatgtccgttccaatcttgccgataaattcaggatcaccataacaatccagatagtca

SEQ ID NO: 12329 - DNA, 562 bp, Zea mays
  Clone ID: LIB3061-099-Q1-N6-D10
gctgtgggggtgtgtttttatcgaaaataaatctcaatcaatatattgattatttttaggaaacacatgccgctatgagggcaccattatcgagtacatctcatatgtaatctaaaagatggcaccaccaacgatgggttgctgccacgacagggggttcgtcgggaaagagaactggttgtatggcagcaattgttgctgctgtaggaaggcagcgaccaatgggttagccaccgctagtggattaagtaactgttgtcgctgttgtaggtacgcagcagagttcgacacagtcagttggttgaatggaagtagttgttgcaagtaggcagcagggtttgccacagctagctgagtaagagctggtacaatttgttgcagcaactgttgttgcaacaactgttgttgcaggtatgtaggtgcattgcccatagcgagcgggctagatgaaagaagttgttgctgttggacgtaggcgatagggttcaccatggctagttgactgagcgctcgtagaaactgttccaactgttggtgttggtggtatgcctctacctttgcc

SEQ ID NO: 12330 - DNA, 343 bp, Zea mays
  Clone ID: LIB3061-099-Q1-N6-D2
aaaaaaacccccggggggcccaaaaacaaattaaaatgggggaagggcccctttttttgggggggggccccccccccaacaaaaaaaattttttttgggaaaccccccaaaaaacaaaaaaaaaaggggccccccccaaatttttttgtggggaggggggcgtggggtttttaaaaaaaggggggaaaaaggggcaaaaattttttattttaaaaagggggggggggggtccccccaaaccgggggaaaaaaggacaaactttttcttttaaaaaaaaaaaaaccgtttttgcgaaatatgagtaaaaagagggaaaatatttttgcgggcaaaaaaaacagg

SEQ ID NO: 12331 - DNA, 161 bp, Zea mays
  Clone ID: LIB3061-099-Q1-N6-D3
gggggggggggcggaaacaaaaaaaaacccaagcaggagagagaaaaaaggaaggaaacacatgccgaaaagagggcaccaaaaacgaggacaaagaaaaaggaaacacaaaagaggcaccaccaacaaaggggagctaccacaacaaggggggggggggg

SEQ ID NO: 12332 - DNA, 463 bp, Zea mays
  Clone ID: LIB3061-099-Q1-N6-D6
gccgcgtacgtaacttggaccttaacggcgcctgggtgggttttgaaagaaacagcggctgtttatttgaacaaaagtgcagtcaattcccaccatactaggaaccaggccagcgctgcccaaaaacgctcaaacatggaaaaaaacgagaaggaaccaaagttcttggaagggaatgcacggggctacaatacacgactaacaatgcgaattgcggtgaaacagatcgaaatgcaggcgatggttctccggcctgggctttttcttattctaatttccccgtcctaatcgaaggacagcggaacctggcttgccaggctacggtacttcagggcgtaaaacatctcgatgtagcggcggttatggcgcctctccacgttgctcacgtacttccagaacccgtacacgccggtcagggtaatcagcctctcggagtagagatttcaggtgtacttctcataga

SEQ ID NO: 12333 - DNA, 299 bp, Zea mays
  unsure (1)..(299): unsure at all n locations; Clone ID: LIB3061-099-Q1-N6-D7
ggggggtttttttagaaatgtcttttttttttttgggaagccacaaacattanataaaaaatttttttttgaacttttactcattataaatttaaattatgtcaccaccaatttgggggggggcggggggcacttctttttttttcaaatcaattttttttaatggaaaaaattttttctttttttaaatggttccttctttttgggcctcctgcttgtttaacggatacaactttggttttgttaaaaagggacaggggtgacaccaacttatttttttaagtggtgcttttgatgtt

SEQ ID NO: 12334 - DNA, 576 bp, Zea mays
  unsure (1)..(576): unsure at all n locations; Clone ID: LIB3061-099-Q1-N6-D8
gttggtgggtttttttagaaatgaactttcttattgctgggacgccacaaacatcatccaaaaaacttcattattgaactataactcataagcaatctaaaagagggcaccaccaatgatgggttgttggtagaacactgttgngtttgtggagccgactggggtgaatggcagcaattgttgcagttgtaagagggtgccagcgttaggcatagcgtgcaggtagaacggcaacaactgttgttgtgtcaagaaggcagcagggctcacatcagctagctggctgaatggtagtagttgttgctgctgtaaataagcagcagagttcaatgctgctagttggttgaatggaagaaattgctgggggtaggcagcaactagctggctgaatggtaattgttgttgcaaataagcagcagagttcaatgcagccagttggttgaatggaagaaactgatgttgctgagagtatgcagcaaggtttgctagcacaagttgttgtagttgttgtgccctgatgttttgtgccaccaaatggaccaaaggtaactgctgtaatagggctgacggttgttg

SEQ ID NO: 12335 - DNA, 557 bp, Zea mays
  Clone ID: LIB3061-099-Q1-N6-D9
gtgggtgtgttttttttcaaacaaaaaactttattattgaactataactcataagaaatctaaaagagggcaccaccaatgatgggttgttggtagaacgctgctgggtttgtcaaagcaagttggttgaatggcagcaattgttgcagttgtgggggggggccagcgttaggcgcagcgtgctggtagaacggcaacaactgtggttgtatcaagaaggtagcagggctcacaccagctagctggctgaatggtagtagttgttgctgctgtaaataagcaggagagttcaatgctgccagttggttgaatggaagaaattgctgggggtaggcagcaggtagctggctgaatggtagttgttgttgttgcaaataagaagcagagttcaatgcacctagttggttgaatggaagaaactgctgttgctgagagtaggcagcaaggtttgctagcacaagttgttgtagttgttgtgccctgatgttttgtgccaataaatgcaccaaaggtaactgatgtaatagggctgatgattgttggaggaacagggtgat

SEQ ID NO: 12336 - DNA, 422 bp, Zea mays
  unsure (1)..(422): unsure at all n locations; Clone ID: LIB3061-099-Q1-N6-E1
caaataaggcanaacaatttctcaagccaaggtttatacatgctatgaaatagttccgtgcaatagcaccaatgactgattggaatgtctgatcccaaaaaggagaattggggtgcgggcggatgaataaagaagcggggctggcaacaatgaacccaattgtctcaatccagttccatctcattatcttgggtgctacttctgcatgaccaaatttttatcgtacgatcaagcgacacagtcacaatcttntgtccatctccactaatatccaaactagtaaccttcgactcatggcccaccaaacttttgattggtttgtaatcacgagctgaccacagggctgctttggtgtcataggaagaagtcgctaaataatacccttcttggggttcaaatttcacatgggaaataatactctt

SEQ ID NO: 12337 - DNA, 519 bp, Zea mays
  unsure (1)..(519): unsure at all n locations; Clone ID: LIB3061-099-Q1-N6-E10
tcacccctacctaatcttttatcctctanagccgccttctttttttgttttttttttttttatatttttttttttttttttttttttttttttttttttttcttttttttttttttttttttttttttttttttttttttttttttttttttttttttttttaaaaatttttttttccccccccttttttttgggggggggggcggntnntttnccttttttaaaatttttccccctttatattttaaaaaatttttctttttccaaatttttcccctcccccccttttttttttttatttcattttttccccccctttttatttacctttttcttaaaattttccctttcctatttaccattttcttttccccttttttttttttattnaaacccctttaaatttttctttctctttttnttttttaaaaaattcctcccattttttccccccttctttttttttttttttttaaatttttataattttctctttcacccccccccattaaaatctct

SEQ ID NO: 12338 - DNA, 408 bp, Zea mays
  unsure (1)..(408): unsure at all n locations; Clone ID: LIB3061-099-Q1-N6-E11
ggggggggggggtnttctaaaaaaataatctgcggggttttgtagccttgcgctagtacattcacttatttcttagttttctttagcttcctcaaaatccacgttcttttccacaagttttttctttaatttttcaatttcanttctaggggggtcgccgggggcaacaanattggcttctctggccttaactctgtctaccaaggaaagcagaattttatccttctctatggcttcattgctcagtttgataacctctgaacgaaggttaccaagggctatttgacaactttcatcctcaacatttttctgtgctcttaaagtgttgctcaagattaagcccttcaaactattgtaagcaaggctgtctgcgaggtgcatccttgcgcattgctggaagaccaactt

SEQ ID NO: 12339 - DNA, 584 bp, Zea mays
  Clone ID: LIB3061-099-Q1-N6-E2
gtggtgggtttttttttttttttttttttttttgggaagaaaaaaacattgctggcaaatttcttgggaaaaaacatgaacatgggagaaagttcaacgcaagaacacaacaaatgcccctataattttcgatagcaactttacacaatgaataccggggggcgccaattatcacaacttgtctacttatctccacgctgacatcaaactttgggagctatctaagatgcaatgatgctagaactatggtacacaccaacggatcagcaatatcgccagccttacataatttaaaatgcgatcaggctggcaattacaagcacaccaactaccagtagaagcacctttaagtacccatcaacctgctggccttgtggtgcctggcgcgggaagccatagccatgtccatgccacccatggaaagaatggccgtatccatagggaaaccctgcagcaggcccataggcagacacctgcgggaatccatgcacctggaagctcagcaacgggaacaaccctccaatggccgccgagaaagtgtaattcctccaccgaccaccagccacagggggggcgccagcgcc

SEQ ID NO: 12340 - DNA, 256 bp, Zea mays
  Clone ID: LIB3061-099-Q1-N6-E3
gtggggggggggtttttaaaaaaaaattttttgtttttttttttacaaaaaatatcgagaaaaatttcaatcaataaattgattattatctagggaaacacatgttggtttaagggccccattggcgagtacatttaaaatataatttaaaggggtggggcgggaaccatagattactgcaaagcagggttcataaaaaaaaactagttgtatggcataaattggagtaactgatgcaggaagggaacaaccaatg

SEQ ID NO: 12341 - DNA, 534 bp, Zea mays
  unsure (1)..(534): unsure at all n locations; Clone ID: LIB3061-099-Q1-N6-E4
ggggtgtgtgtttttatcgaacacccttggagaccaatatcacattagaatctggaaatgtaacttcttatttctggttggccacatacantcatccaaaaaactttattattgaattacaactaataatcaatctaaaagagggcaccacgcggttgggggggttggtaggaggctgctgggtttgtcaaagcaagttggacaaagggcaacaattgttgtagttgtaagagggttgcggggttagccgcaaactgcttgtagaaaggcagcaactgttgctgtgtcaagaaggaagcacgacttgctgcagctagctcgctaaatggcagtagtatttgctgctgcaaataagcagcggggttcagtgcggccaattggttaaatggaagaagttgttgttgctgagagtaggcagtagctagctggctaaatggtaatagttgttgctgcaaataagcagnagggttcagtgtagacagttggttgaatggaaaaaattgttgttgctgaaagtagggaaaaagggttgcc

SEQ ID NO: 12342 - DNA, 308 bp, Zea mays
  unsure (1)..(308): unsure at all n locations; Clone ID: LIB3061-099-Q1-N6-E6
cacgcgtactaatttgttccttagacgccgtgggggggggtttttgaaaaaacaaccttgggttttgcattcctccgaaaccaaagcacagatcgactgcaaaccatgacgcgtgggagtgcggnaagggggggggggggggggggggatgtaagatcaattaaaatttnttttagtgggttttgttagggggcatttntaaaacatacaagggacacttatttacatgccatccaaagtttttttgtttttaagtttttgtttaattgaaatttnttgaataaaaattgttttgatgagctggactg

SEQ ID NO: 12343 - DNA, 405 bp, Zea mays
  unsure (1)..(405): unsure at all n locations; Clone ID: LIB3061-099-Q1-N6-E7
acccctacctaatcttttatcctctagnacggccttccttttttttttttttttttatattttttttttttttttttttttttttttttttttttttttttttttttttttttttttttttttttttttttttttttttttattttttttttttttttttttttttttttttttataatttttttttgggttgtgggggggtccccctctttttattctttttttttttttttttattttaataatttttttttcctttttttttttttttcccttttttttataaatattttttttttaccctcctttttttaattattattttttttatctttacctttttttcctttccctttattaattttttttatttttttttttaaacttttttttattctctccttt

SEQ ID NO: 12344 - DNA, 331 bp, Zea mays
  unsure (1)..(331): unsure at all n locations; Clone ID: LIB3061-099-Q1-N6-E8
gggttgccggggggttttttttttttnnnntttttttttttnttttaaaaaaaaattttttctctttttttttttctttttttaaaatttctctttttttttttttttttttttttactttatttttttttctctcatacaatttttttatttttttttttttttttttttcttttctccttttttttttttttttntttttattacctcttttattttttccctctctttctttttttctttttttttcattcccttttttctatatttacttttattctattttttattaaaccccttattttattatttctttttctctttttttctt

SEQ ID NO: 12345 - DNA, 388 bp, Zea mays
  Clone ID: LIB3061-099-Q1-N6-E9
ggtgtgtttttttttttttttttttttttttttttttttttttttttttttagatggaacgaaagcgcgatgtaagaacttgttcgagatacaagtgccccccctagatcctcaagcacaagggaacatgacaccgtacagctccgggggggggggggggggcctgacctacaacacgaaaaatcagctttttttgccccaaaataggagagagaatcgccagacaaggggtaagaacagattttttggccatcaggactttttggaccatgcaacggcattaatttcggattgggcactccggtacagctcgagcctttttgcaagggtagttctgcgttccatgactggtgggtcttcgtcaaaaagtttggaaaggtgctttatc

SEQ ID NO: 12346 - DNA, 526 bp, Zea mays
  Clone ID: LIB3061-099-Q1-N6-F1
atatcgagataaatctcaatcaatatattgattatttctaggaaacacatgccgctatgagggcaccattatcgagtacatctcatatgtaatctaaaagatggcacctccaacgatgggttgctgccacaacaaggcagggttcatcaaagagaactggttgtatggcagcaattgttgctgctgtaggaaggcaacgaccaatgggttagccaccgctagtggattaagtaactgttgtcgctgttgtaggtacgcagcagagttcgacacagtcagttggttgaatggaagcagctgttgcaagtaggcagcagggtttgccacagctagctgagtcagagctggtacaatctgttgcagcaactgttgttgcaggtatgtaggtgcattaaccacagcgagagggctagatgaaatcagttgttgctgttgtaggtaggcggcagggttcaccatggctagttgactgagcgctggtagaaactgttgcaattgttgttgttgttggtatgcaactatgttt

SEQ ID NO: 12347 - DNA, 546 bp, Zea mays
  unsure (1)..(546): unsure at all n locations; Clone ID: LIB3061-099-Q1-N6-F11
ggcgggggggggggggtttttttaaaaaaatcacattggaatctggaaatgtaacttcttatttctggttggccacataccatcatccaaaaaactttattattgaattacaactaataagcaatctaaaagagggcaccaccaatgatgtgttgggtttcgcacggtgctnnntttgtcaaagcaagttggacaaagggcaacaattgttgtagttgtaagagggttgcggggttagccgcaaactgctggtagaaaggcagcaactgttgctgtgtcaagaaggaagcacggcttgctgcagctagctggctaaatggtagtaatatttgctgctgcaaataagcagcgaggttcattgcggccaattggttaaatggaagaagttgttgttgatgagagtaggcagtagctagctggctgaatggtaatagttgttgctgcaaataagcagcaaggttcaatgtaaatagttggttgaatggaaaaaattgttgttgctgatagtagggagaagggttgccagacctcttggttgatcacagt

SEQ ID NO: 12348 - DNA, 138 bp, Zea mays
  Clone ID: LIB3061-099-Q1-N6-F2
aaaaaaaaaattggttttttttttttttaaattatattattaaaaaataaataaatttttatatatttaaaaaaaaaaaattttaaatataaaagaaaataaaaaaataaaaaaaaaaaatttttgggttgaaggggg

SEQ ID NO: 12349 - DNA, 311 bp, Zea mays
  unsure (1)..(311): unsure at all n locations; Clone ID: LIB3061-099-Q1-N6-F4
aaaaactagaaatgtactttcttatttctgggaagccacaaacatcatccaaaaaacttcattattgaagtataactcataagcaatctaaaagagggcaccaccaatgatnggttgttggtagaaggctgtggggtttgtcaaagcaagttggttgaatggcagcaattgttgcagttgtaagagggtgccagcgttaggcgcagcgtgcaagtaaaacgggaacaactgctgttgtgtcaagaaggcaacaaggctcacatcagctatctgactaaatggtggaagctgttgctgttgaaaataagcaa

SEQ ID NO: 12350 - DNA, 291 bp, Zea mays
  unsure (1)..(291): unsure at all n locations; Clone ID: LIB3061-099-Q1-N6-F6
tttaaaaaaattaagcatgctttattcactgctccggtttttcaatgtctaatgtttccagcctataagcatttaaaacattacaactaaccttgaccaaacttgtaaataccaacacaattctatcctttatatatggggggggggcggatancaactaccaccgtttatgacatacagaaattgtacactcactacataggccccaagacttcctacctgtcctaaattcaaggaaccatcctacccccaaaaatctaaaaacaacatgacactcataaaccaaactga

SEQ ID NO: 12351 - DNA, 396 bp, Zea mays
  unsure (1)..(396): unsure at all n locations; Clone ID: LIB3061-099-Q1-N6-F7
ggggggggggtttttatccaaattcatagcagtttatgacccgctattacatttctttcggctgcatttggtcaatgtttacatttacatacaactgggatcgcaccaataaacgcactagcacaaagctggccatcgatacaatgcccgtttcagactgctaaaccatnaanttcantatgacccaaaacagtatataacataaatgacctacgacaaattaaatcgctgcacctccagaacccctgagaaaggccatcttcgttgctttaacacactgactctgcctttccctcttttcgcgctggcattcaccacaccagctcggaaaatccttctggtatttcttcatctctctgaacacagagctccggcaccacaaaagcagatttattc

SEQ ID NO: 12352 - DNA, 537 bp, Zea mays
  Clone ID: LIB3061-099-Q1-N6-G10
gtgggtgtttttttgaacacataagatctagaaatgtactttcttatttctgggaagccacaaacatcatccaaaaaacttcattattgaactataactcataagcaatctaaaagagggcaccgccaatgatgggttgttggtagaacgggggggggtttgtcaaagcaagttggttgaatggcagcaattgttgcagttgtaagagggtgccagcgttaggcgcagcgtgcaggtagaacggcaacaactgttgttgtgtcaagaaggcaacagggctcacatcagctagctggctgaatggtggtagctgttgctgttgtaaataagcagcagagttcaatgctgccagttggttgaatggaagaaattgctgggggtaggcagcagctagctgactgaatggtagttgttgttgcaaataagcagcagagttcaatgcagccagttggttgaatggaacaaactgctgttgctgagagtaggcaccaagggttcctaacacaagttggtgtagttgttgggccttgatgtttt

SEQ ID NO: 12353 - DNA, 405 bp, Zea mays
  unsure (1)..(405): unsure at all n locations; Clone ID: LIB3061-099-Q1-N6-G2
aaaaaaaatataacttgttatttntaggaggccacatacatnnagcccaaaaacttcattattgaattacaactaataagcaatctaaaagaggcaccgccaatgatgtgttgttggtaaaaggctgctgggtttggggggggggggtgnacaaagggcaacaactgttggagttgtaaaagggaagaggggttagccacaaactggtggtagaacggaagcaattgttgttgttttaaaaaggaagtggggcttgttgaagctagctggccaaatggtagtaatatttgatgatggaaataagcagaggggttaaatgcggacaattggttaaatggaagaaattgttggtagtgagagtaagcaaaaaataaatagctaaaagggaaaaattaatgttgatga

SEQ ID NO: 12354 - DNA, 565 bp, Zea mays
  Clone ID: LIB3061-099-Q1-N6-G3
ggtgtttttttttagaaatgaactttcttatttctgggacgccacaaacatcatccaaaaaacttcattattgaactataactcataagcaatctaaaagagggcaccaccaatgatgggttgttggtagaacactgttgggtttgtcaagaggggggggttgaatggcagcaattgttgcagttgtaagagggtgccagcgttaggcatagcgtgcaggtagaacggcaacaactgttgttgtgtcaagaaggcagcagggctcacatcagctagctggctgaatggtagtagttgttgctgctgtaaataagcagcagagttcaatgctgctagttggttgaatggaagaaattgctgggggtaggcagcaactagctggctgaatggtaattgttgttgcaaataagcagcagagttcaatgcagccagttggttgaatggaagaaactgatgttgctgagagtatgcaacaaggtttgctagcacaagttgtttgagttgttgtgccctgatgttttgtgccaccaaatggaccaaaagtaactgctgtaataaggctgac

SEQ ID NO: 12355 - DNA, 553 bp, Zea mays
  Clone ID: LIB3061-099-Q1-N6-G4
ggtgcgctgggcaccgtcgcgtgggcggccaccgcgctcgcgctcggcctcgcgtgcaaggagatgcgggccgccgccgccgcggcgcgcgggtggcagatgcgcacgctggaggcggtcaccgcggtgctggccgtcacgcagctggcgtgcgtgggggtgctgcaccgcgccgccgccgccgcgtacgctgatgatgaagccgatgctaccgcctacgccgacgctggtggcgaccagtgcgagcctggctgttccatcggcaccgaggacgacgccgacgccgactgccagcgcgcgcagcagcagcagcatgggcgccaccaccaccaacccaggcagggcggcgggccctcgtgcagaggtcatgtgaactagcatacccatgcatgcatgtttggtggtgtcgctctcttgtcttgccattttccgtgctcgtgtctccgctcgtggaaaataagcaatttaaacttagtttaatttcctgtgtgtcatgtggtccgtttaatgggtatgcctcctattattatggtcgaatgtgggtgtcgacagg

SEQ ID NO: 12356 - DNA, 163 bp, Zea mays
  Clone ID: LIB3061-099-Q1-N6-G5
ggtgcgggggggttttaatttttttttttttttttttttttttttttttttttaaatataatttttttttttttattttttttttttttatttttaattattttttttattttatattttttttttttttttttattttttttttttttttttttattttttt

SEQ ID NO: 12357 - DNA, 583 bp, Zea mays
  Clone ID: LIB3061-099-Q1-N6-G6
agaaatatatcgagataaatctcaatcaatatattgattatttctaggaaacacatgccgctatgagggcaccattatcgagtacatctcatatgtaatctaaaagatggcacctccaacgatgggttgctgcgcgcgggggggggggttcatcaaagagaactggttgtatggcagcaattgttgctgctgtaggaaggcaacgaccaatgggttagccaccgctagtggattaagtaactgttgtcgctgttgtaggtacgcagcagagttcgacacagtcagttggttgaatggaagcagctgttgcaagtaggcagcagggtttgccacagctagctgagtcagagctggtacaatctgttgcagcaactgttgttgcaggtatgtaggtgcattaaccacagcgagagggctagatgaaatcagttgttgctgttgtaggtaggcggcaaggttcaccatggctagttgactgagcgctggtagaaactgttgccaatgttgttgttggtggtatgcaactatgtttgccacgacaagtgggttggatgcaagcaactgttgttgcaagtaggcgaca

SEQ ID NO: 12358 - DNA, 567 bp, Zea mays
  Clone ID: LIB3061-099-Q1-N6-G7
gtgttttttttttttttttttttggcacaaaagtggagcatggtctccatggcttcgctcaaagcagcacagtatggtaattaaactgatcaatttacagcatgatgtatccccaaatccaggcccccaatgtcgattcaacatgtaactgaggggggggggctacaacattctaccctacaacattgaaggacacaaaagagcaaaaagaaagaaaaaatgccttggatgacacttttattgctccgatgatctccaacagactgatctgcagatcacgcatgtaaccaggtgctgatcattgtcgaatgtcgagacacacagctgcatgtcgcacgttcacttcatataactgttccactagggagtaaagcatccttgatcactgtgacaattccacctttgatgaagtacccgtctgtctcccttgcagcttcttgaacattgtcagcattgagtatcttaacattgtctccaattcgagcattcttgtcaatgattgctctcctgatgcatgaatttttcccataccaataggaatgccccctttttccgcaaggagttttt

SEQ ID NO: 12359 - DNA, 433 bp, Zea mays
  Clone ID: LIB3061-099-Q1-N6-G8
gggggggttttttaaacaagcggaagcagaataatattattttggccaatgcatgcccataaacattgtcttcagtgtacactggtattggcggcgagatgacggatcccaatcggcgtcaatctatctaagcttaaacccttcacggggattgccgggcgatcgccagcaccgcgccgatagtccaagatgcagtgtcccttgctgcgttgttcttctgatctgcaggcggttggccgtccgcgtccggcgaaggagctggggtagtgtgctctggcgatggcgctgggcgactcctgggcgcatgtgcagtcaccggagcaggggcaagtgggggtgtgggtgcatgtgcaggcgactgctacggcgagacccgtacaggggcatgccgacggcaagtacccgcccaaggcccacgtgttaggttgcatgt

SEQ ID NO: 12360 - DNA, 592 bp, Zea mays
  Clone ID: LIB3061-099-Q1-N6-G9
catgactcacggagtaaccagatagtacaaggtactatagtacatttggcaaaaaatgcaatgttgaaaaaaaaataacacaaagattcaaggataaataagaaaacacccatgcatccaggtcacaggggctcttcttatcctgcagagtcaaaaatcattctcgaatagataacgcatgttccatgcaatagtatgccgcaaactctagtgatatattctctgcccgccaaaggtatacataacagaaacctactatccctcccagccagatcacatgaagtcgtactcatcggggtcatcgtagccaccaccccggccggggatgaagtcgtcgtctcctttctcgatgtggagttgcttctttttcgctccttgtttctttttgcctgctgcagcctccttctcagccttgatcttctcgttagcaattgccgtcacggaagaagatatatctttggcgtccgcacctttcaacgatgtcatggaaagtctcatgacattcttaagcagagccatgtagtgaaagcttttctcataggggcgtagtttgtttgcaataagctccgcgtattccgaaaatcactctcgg

SEQ ID NO: 12361 - DNA, 475 bp, Zea mays
  Clone ID: LIB3061-099-Q1-N6-H1
gggttccaaacttccaacaaatcccatcccataaaagggtccaatgggaagccccccccggttttccagcccttttttttttggtttgggggggcgatccaattggccagacctttggctgggaattagaccttttatgggtcattttactggggtacaaggggcaagggcccctttgcgacctaattcatactggcctacagctttattggttggccatttgagagggggcttttaaataaggggcccccccctgaacgaaagggggtcccctttgacacaaacaattctttttcccatttttgttccaaaaaaactggcaaaagggtctccttcttttccttggtgcccaaggaaaggccaccgggtttttttagtaataaaaagagcctttgccccagtccccatgagaatctggggcggggtcttttttgttccctttggaggcaggggggagattctggcacttttttgg

SEQ ID NO: 12362 - DNA, 498 bp, Zea mays
  Clone ID: LIB3061-099-Q1-N6-H12
catcccgaccacacacaaatctaaaataattatttttattccatacatatctatacattcaactggaaactggaaaaagggtggttcacctctataaaaaaatgttccggttctgttttggcctctataacatcatttatttatttatttatttatttatttatttatttatttttcaacgcatacatatggcaaagcgtgccttggcaacttgggcaacgtcttattcaatctatttatatacttcgttttattcgatggccttctcttatttcattcgtttgcttcgacttggatgccgaatgcacttgctcgctagcgaaaggcatccatcagcacctgggttccacgaacactgctgctgtccttttcggcacggtgaatcgacctgtggcggggtcgtacccagactgcctggctaacgcatcccatgaattcacctgcactggatgcaactgaagccgcagtgatgcaagatcagggatttctatagacact

SEQ ID NO: 12363 - DNA, 450 bp, Zea mays
  Clone ID: LIB3061-099-Q1-N6-H2
ggggggtggtttttttttttttttttttttttttttttttttttttttttatttttttttttttttttttttttttttttttttttttttttttttttttttttttttttttttttttttttttttttttttttttttttttttttttttggggggggggttttttttttttttttttttttttttttttttttttttttaaaaaaggggggggccttttggggccccccccccgagaggggaaacccggggggggcccccccttttttttgagccccccccccccatttttttggggggggggaggattttttggggggggggggggcgcccccccccccctggggggggggggtggggggcgcgaaaaaagccccccccccttttggggggggggggaaaaccccaaaaaaaaaaaggggggggggggcgcccccccccccggagggg

SEQ ID NO: 12364 - DNA, 483 bp, Zea mays
  Clone ID: LIB3061-099-Q1-N6-H6
ggtttttttttttttttttttttttttttttttttttttttttttttttttttttttttttttttttttttttttttttttaaaccccagacaaaaaactttttttttgaactttaacccataaaaaatttaaaagggggccccccccagggggggggggggggaaaaccctggggggtttgtcaaagcaaggtggttgaatggccccaattgttgcagttgtaagagggggcccgcgttaggccccaccggctggtaaaacgggaacaactggggttgtgtcaaaaagggagcagggctcaccccacctaactggctgaatgggagtagttgttgctgctgtaaataaaccggagagttcaatgctgctagttggttgaatggaaaaaattgctggggggaggcaacagggagctggctaaaagggagttgttgttgttgcaaataaaaagcagagttcaatgaaccctattgggtgaatgg

SEQ ID NO: 12365 - DNA, 558 bp, Zea mays
  unsure (1)..(558): unsure at all n locations; Clone ID: LIB3061-099-Q1-N6-H7
ggggggggggttttaaaaatagtactttcttatttctgggaagccacaaacatcagacaaaaaactttattattgaactataactcataagaaatctaaaagagggcaccaccaatgatgggttgttggtagaatgctgtnntttgtgggaccgcttgggtgaatggcagcaattgttgcagttgtaagagggtgccagcgttaggcgcagcgtgctggtagaacggcaacaattgtggttgtgtcaagaaggtagcagggctcacaccagctagctggctgaatggtagtagttgttgctgctgtaaataagcaggagagttcaaagctgtcagttggttgaatggaagaaattgctgggggtaggcagcaaatagctggctgaatggtagttgttgttgttgcaaataagaagcagagttcaatgcacctagttggttgaatggaagaaactgttgttgctgagagtaggcatcaaggtttgctagcacaaattgttgtagttgttgtgccctgatgttttgtgccaataaaagccccaaaggtaactgctgtaat

SEQ ID NO: 12366 - DNA, 547 bp, Zea mays
  unsure (1)..(547): unsure at all n locations; Clone ID: LIB3061-099-Q1-N6-H8
ggcggggggggggtgtttaaaaatgaactttcttatttgtgggaagccacaaacatcagacaaaaaactttattattgaactataactcataagaaatctaaaagagggcaccaccaatgatgggttgttggtagaacgctgctgggtttgtgggaatcgcntggggggaatggcaccaattgttgcagttgtaagagggtgccagcgttaggcgcagcgtgctggtagaacggcaacaactgtggttgtatcaagaaggtagcagggctcacaccagctagctggctgaatggtagtagttgttgctgctgtaaataagcaggagagttcaatgctgccagttggttgaatggaagaaattgctgggggtaggcagcaggtagctggctgaatggtagttgttgttgttgcaaataagaagcagagttcaatgcagctagttggttgaatggaagaaactgctgttgctgagagtaggcagcaaggtttgctagcacaagttgttgtaattgttgtgccctgatgttttgggcccataaatgcacc

SEQ ID NO: 12367 - DNA, 593 bp, Zea mays
  Clone ID: LIB3061-099-Q1-N6-H9
ggggggtgttttttagaattggaaatgtaacttcttatttctggttggccacatacatcatccaaaaaactttattattgaattacaactaataagcaatctaaaagagggcaccaccaatgatgtgttgttggtaggaggccgctggggggggggagagcaagttggacaaagggcaacaattgttgtagttgtaagagggttgcggggttagccgcaaactgctggtagaaaggcagcaactgttgctgtgtcaagaaggaagcacggtttgctgcagctagctggctaaatggtagtagtatttgctgctgcaaataagcagcggggttcagtgcggccaattggttaaatggaagaagttgttgttgctgagagtaggcagtagctagctggctaaatggtaatagttgttgctgcaaataagcagcagggttcagtgtagacagttggttgaatggaagaaattgttgttgctgagagtagggagaaaggtttgccagagctacttggttgatcagaggtagcacgagttgctgcacctgttgtgccctgatgggttgtacccatgactgccccaaaaaagggctgcc

SEQ ID NO: 12368 - DNA, 485 bp, Zea mays
  Clone ID: LIB3061-099-Q1-N7-A1
agaaatgtactttcttatttctgggaagccacaaacatcagataaaaaactttattattgaactataactcataagaaatctaaaagagggcaccaccaatgatgggttgttggtagaacactgctgggtttgtcaaagcaagttggttgaatggcagcaattgttgcagttgtaagagggtgccagcgttaggcgcaacgtgctggttgaacggcaacaactgtggttgtgtcaagaaggtagcagggctcacaccagctagctggctgaatggtagtagttgttgctgctgtaaataagcaggagagttcaatgctgctagttggttgaatggaagaaattgctgggggttggcagcaggtagctggctgaatggtagttgttgttgttgcaaatcagaagcagagctcaatgaacctagttggttgaatggaagaaactgctgttgctgagagttggcagcaaggtttgctcgcacatgttg

SEQ ID NO: 12369 - DNA, 452 bp, Zea mays
  Clone ID: LIB3061-099-Q1-N7-A10
agaaatgtactttcttatttctgggaagccacaaacatcagacaaaaaactttattattgaactataactcataagaaatctaaaagagggcaccaccaatgatgggttgttggtagaacgctgctgggtttgtcaaagcaagggggttgaatggcagcaattgttgcagttgtaagagggtgccaaggttaggcgcagcgtgctggtagaacggcaacaactgtggttgtatcaagaaggtagcagggctcacaccagctagctggctgaatggtatgtagttgttgctgctgtaaataagcaggagagttcaatgctgccagttggttgaatggaagaaattgctgggggtaggcagcaggtagctggctgaatggtagttgttgttgctgcatataataagcagcgttcaatgcagctggttggttgtatggaagaaactgctgttgct

SEQ ID NO: 12370 - DNA, 482 bp, Zea mays
  Clone ID: LIB3061-099-Q1-N7-A11
agcgcaccacaacgttgatttattcctcatttctcccggtcttagagcaaaatatctttcaaccacatttggaggcttgaagcacataagaatctagaaatgttctttcttatttctggggagggcggaggggttatccaaaaaacttcatttttgaactataactcattagcaatctaaaagagggcaccgccaatgatgggttgttggtagaacgttgttgggtttgtcaaagcaagttggttgaatggcagcaattgttgcagttgtaagagggtgccagcgttaggcgcagcgtgcaggttgaacggcaacaactgttgttgtgtcaagaaggcaacagggctcacatcagctagctggctgaatggtggtagctgttgctgttgttaattagccgcagagttcaatgctttctgttggttgaatggaagaaattgctgggggttggccgctcttgttgtctgaatggtagttgttgt

SEQ ID NO: 12371 - DNA, 500 bp, Zea mays
  Clone ID: LIB3061-099-Q1-N7-A12
ggggggggggggtttttattttttttttttttttttttttttttttttttttttttttttttttattttttttttttttttttttattttttttttgggggtaaatttcaatcaattttttggtttttttttgggaacacatttcgggttgggggggggattgttgggtccattttatttgggatttaaaaggggggccccccaacggtggggtggtggaaggggggggttattaaagagaactggggggttgggggcaattggtggtggtggtggggggggggggggcccaatggggtgggcactggccaggggttaaggaactgggggcgctgggggggggcccccgccgggtttggcccaacccggggggtggatgggagcaactgttggggggggggcgcggggtttggccccgcttggtgggtttggggtggggcaatttggggggggaactgggggtggggggtctttggggctttggcccccggggggggggt

SEQ ID NO: 12372 - DNA, 453 bp, Zea mays
  Clone ID: LIB3061-099-Q1-N7-A3
ggaaaaggtttttttttttttggggggggcccaaactttaaaaaaaaaatttttttttggggggtttacccataaaaaatttaaaaagggggcccccccaaaggggggtggggggggaaagctttgggggttggaaaaaaaagggggggggatgggggaaattggggggggtgtaaaagggggcccccgtttgggcccccgggctgggtgaaacggaaaaatttggggtgggttaaaaagggggggggggccccccccccttgctgggttaatggggggagttggggctgctttaaaaaacccggggggttcaaaacttttctttggttgaatgggaaaaatttgtggggggggggcccaaattaccggcctaatgggggttggcggtgttccaaataaaaagccgagtttaatccccctttggtggggtgatgggaaaaaatttttttcttt

SEQ ID NO: 12373 - DNA, 494 bp, Zea mays
  Clone ID: LIB3061-099-Q1-N7-A5
caattgttcattcaggtcattgctcacactgacactgccacccatggtgatgcgtgacacattattactcaatcatcgccgctaaatgactcaactagctagctagccagcggctatactacagcacatagtttcttcagtgggggacaccgccggcagcagcgtaggggcatggagtcggctgctgcaggccgcacatcgccgtcagttgctgcgctatctgcgccgccaacagccccgcgacctggccgctttgcggctgctgctgcaggatggactggaggaccaagccgaagatcgcctggtaccggtgctgcggctccacctgcctgagctgctggcaacactgctgccgcaacgactggcactgaggcgagcagtagggcgtcgccgtcgggctgcactgatgcctcaggaactcgacgcactggcccaggatcggggtgctgccaacgccgcaggttccctgcagctggcacgggcttggatgcggc

SEQ ID NO: 12374 - DNA, 353 bp, Zea mays
  Clone ID: LIB3061-099-Q1-N7-A6
ctagaaatgtactttcttatttctgggaagccacaaacatcatccaaaaaacttcattattgaagtataactcataagcaatctaaaagagggcaccaccaatgatgggttgttggtagaacgctgttgggtttgtcaaagcaagttggttgaatggcagcaattgttgcagttgtaagagggtgccagcgttaggcgcagcgtgcaggtagaacggcaacaactgttgttgtgtcaagaaggcaacagggctcacatcaactagctggctgaatgggggtagctggtgctggtggaaataaacagcagagttcaatgcttccaggtgggtggattggaaaaaattgctgggg

SEQ ID NO: 12375 - DNA, 504 bp, Zea mays
  Clone ID: LIB3061-099-Q1-N7-A8
agtagcattataattacaattagtattcttattcaaatatcatagtacaaacatcataatgtatgggactttattgcttaacaccgttatatgagtataacggctagggggacacaattcttcaattgcaaacaccactaatgtcattgctgctgcatggattattttggtagtatgagtggtacaagccccacattgatggtaggtattgtgctgctgtcaagatagccaccgcactttgagtagcttgttgagatccacataactcacatggttgttgttgttgctcctcctggattatggattgaaccatgttgtaaattgcttggtgaatgtattgtggcagaatctgcctaagatcatgacaacattgctagtgcaatacctggcagctacttggttggatcaaacctactcggagaaaagcattaccaaagggctgcactgctgccttaggaattcataacaattttttatatttgaactactgctatagtaattata

SEQ ID NO: 12376 - DNA, 617 bp, Zea mays
  unsure (1)..(617): unsure at all n locations; Clone ID: LIB3061-099-Q1-N7-A9
agaaatgtactttcttatttctgggacgccacaaacatcatccaaaaaacttcattattgaactataactcataagcaatctaaaagagggcaccaccaatgatgggttgttggtagaacactgttgagtttgtcaaagcaagttggttgaatggcagcaattgttgcagttgtaagagggtgccagcgttaggcatagcgtgcaggtagaacggcaacaactgttgttgtgtcaagaaggcagcagggctcacatcagctagctggctgaatggtagtagttgttgctgctgtaaataagcagcagagttcaatgctgctagttggttgaatggaagaaattgctgggggtaggcagcaactagctggctgaatggtaattgttgttgcaaataagcagcagagttcaatgcagccagttggttgaatggaagaaactgatgttgctgagagtatgcagcaaggtttgctagcacaagttgttgtagttgttgtgccctgatgttttgtgccaccaaatggaccaaaggtaactgctgtaatagggctgacggttgttggaggaacacgggtgataatggtaagatgcctngtgcgattgcctgtgggatcctgta

SEQ ID NO: 12377 - DNA, 316 bp, Zea mays
  Clone ID: LIB3061-099-Q1-N7-B1
agaaatgtactttcttatttctgggacgccacaaacatcatccaaaaaactcattattgaactataacgcataagcaatctaaaagagggcaccaccaatgatgggttgtgggtcgaacactgtggggtttggcaaaacaagggggttgattggcagcaattgctgcatttgtaagagggtgccagccttgggcatagcgggcacgtccaacgggttcaactcctgttgtgtcaagaaggcactggggctcatattggctggctggctgaatggtcgtacatgctgctgctgtgaataagacctgctgttgcatgt

SEQ ID NO: 12378 - DNA, 388 bp, Zea mays
  Clone ID: LIB3061-099-Q1-N7-B10
agggaaaaaagggggggttttttttttaaaaaaaggggggttttcccggggggggggaaaaaaaattggggggaaaaagaaaaagaaaaaaaaaaaaatttgtggaaaaaaaaattcaaaaaaggggggggggggaagggggggggttttttttgaaaaaaaaaaccgggaagaagttttttggccccccccaaaaaaaaaaaaacctccccaaaaaaaagggggcttttttgggggggggggggaaaaccccccccttggggggggggaatcttttaaaaaaaaaaaatttttttttggtgggggtggaaaaaagagggcccccttttgggggaaaaaaaaaaaaaattttttttgggggcggggggggggggccccccccccgggg

SEQ ID NO: 12379 - DNA, 609 bp, Zea mays
  Clone ID: LIB3061-099-Q1-N7-B11
agcaaactgtttttcttgaaaaagaaatagactacagacttacagggcaatagtttacccatatgagttcactaacatgatgtgtgattttgacagaaggataacagggcaactggaacatcacactggatatcggtacaaggtaataatggaacctctgtaaagaatcttgaagaagcccatttctggcatcagcatcttcaagcttcctttgcagctctcctatttccccctgagattcagctagttgtttcatgattgcatcattttgctgcctttcagatctcaacgaagtttccagtgctgccatattttcttcatgtctctgtaaagaatcttgaagaagcccatttctggcatcagcatcttcaagcttcctttgcagctctcctatttccccctgagattcagctagttgtttcatgattgcatcattttgctgcctttcagatctcaacgaagtttccagtgctgccatattttcttcatgtctctgtaaagaatcttgaagaagcccatatctggcatcagcatcttcaagcttcctttgcagctctcctatttccccctgagattcagctagttgtttcatgattgcatcattttgct

SEQ ID NO: 12380 - DNA, 538 bp, Zea mays
  Clone ID: LIB3061-099-Q1-N7-B12
ggaaggaaaacagacaagatttcagagttttaaccacctcgacttccaattttacagccgtatatgttctaacccaaaggtaaccatcggaatctgtttccttgactgcacaagtctttccacagcttttacaaccatgcgttgcctgaacaaacaccaagagcagctacaaacattgcaacctgacctacctttgagaccatatataaagatcaccaaccagagagaggcaactgactcacaacacaatttgcagctacaaaaccattgtatatgtacggatgtgctattccttgacgtcttcaaagagttcgtcttcgtcctcgtcgttttctttggcttcatcagaatcgtagctgtcgtactgtaggaggctgccaaagtcgctggattgtgccttgatgagcctctcctggatcctctccttgatggccgtccccattgagtggcacccttcctcaaacttctctaagaaaccagccacccagcggtctgcattttccacccactcttcctggagttttgcaaccgcccggga

SEQ ID NO: 12381 - DNA, 573 bp, Zea mays
  Clone ID: LIB3061-099-Q1-N7-B2
gcagcaccaagaagcaccattttttccttaggattaacttagaacaaatcctgacaggagtaacagcatccatcgatccacagtccatgctggttgatgcatgggtctgctggagccgaggatgaacacagcactaacaactgacacagagcgaccttgcaatcaaaaacacagatgggcaacaacaaacgagacgaacgaagataaaccctctggactagggtaaacatcacggtagcgaacaggataacttggccgcgcgggccccaccgctcagttcctccagttcccgtcggagttgccgtagccgccgccacggttgccaccgccgtagccgccaccaccaccaccgtagccaccgccgccaccgtagccgccgccgccaccgccgtagccgccgccgccatcacggcgcccgccaccgccgtagccgccgcctccacggccaccaccgtagccgccgccgccgcctccacggccgccgcgggactgggcctcgttgacggtgatgttgcggccgtccagctccttgccgttcatgccctcgatggcgttccgcatcgcctcctccgt

SEQ ID NO: 12382 - DNA, 583 bp, Zea mays
  Clone ID: LIB3061-099-Q1-N7-B3
ttttttttttttttttttttttttttttttttttttttttttttttttttttttttttttttttttttttttttttttttttttttttttttaaatttttaattaattttttttttattttaaattaaaaaataaaaaataaaaaaaaaaaaaaaaaaaaaaaaaaaaaaaaaaaaaaaaaaaaaaaaaaaaaaaaaaaaaaaaagtggttaaaataaatatctcctcggcaaaaaaaaaaaaaaaaaaaaaaaaaaaaaaaaaaaaaaaaaaaaaaaaaaaaaaaaaaaaaaaaaaaaaaaaaaaaaaaaaaaaaaaaaaaaaaaaaaaaaaaaaaaaaaaaaaaaaaaaaaaaaaaaaaaaaaaaaaaaaaaaaaaaaaaaaaaaaaaaaaaaaaaaaaaaaaaaaaaaaaaaaaaaaaaaaaaaaaaaaaaaaaataactaaaaaaaaaaaaaaaaaaaaaaaaaaaaaaggacaaaattttgtttgataaaaccccaaattgtaaaaaaaacaaaagaaaattttgtcaccccccaaaaagaaacacaccttttaataaaaaaaaaaaaaagtgggtgt

SEQ ID NO: 12383 - DNA, 567 bp, Zea mays
  Clone ID: LIB3061-099-Q1-N7-B5
cacattagaatctggaaatgtaacttcttatttctggttggccacatacatcatccaaaaaactttattattgaattacaactaataagcaatctaaaagagggcaccaccaatgatgtgttgttggtaggaggctgctgggtttgtcaaagcaagttggacaaagggcaacaattgttgtagttgtaagagggttgcggggttagccgcaaactgctggtagaaaggcagcaactgttgctgtgtcaagaaggaagcacggcttgctgcagctagctggctaaatggtagtaatatttgctgctgcaaataagcagcgaggttcagtgcggccaattggttaaatggaagaagttgttgttgatgagagtaggcagtagctagctggctgaatggtaatagttgttgctgcaaataagcagcagggttcagtgtagatagttggttgaatggaagaaattgttgttgctgatagtagggagaaaggtttgccagagctacttggttgatcacaggtagcacgagttgctgcagctgctgtgccttgatggtttgtaccaatgactg

SEQ ID NO: 12384 - DNA, 473 bp, Zea mays
  Clone ID: LIB3061-099-Q1-N7-B6
ctaccttgggcatcctttattcactgctcgggtttttcaatgtctaatgtttccaggctataagcatgtgaagcattacagctgaccttggccagacttctaaatggcaacagattctatggtttatatatggtacagtacaaactggcaacgagcacggtatatgagatacagaaattgtacactcactacataggccccaagacttcctgcctgtcctaagctcaagggaccatccttccagcagaaattttgaacaacatgtcactctgaaccaaacgggagctcattctgtgctcaggacgcttgcggtctcagctacatcgctgctggctttcacggcgccagcgaaactgcagatcttgttcagggcgctcaggtaagctctgacactggacaccacaatgtccatggatgccccgctcccgctgaaggagcggttgaaagactggccagtcagggcatgtttggcg

SEQ ID NO: 12385 - DNA, 277 bp, Zea mays
  Clone ID: LIB3061-099-Q1-N7-B8
agaaatgtactttccacactgcaaggacgccgcaaatcttatccgaaaccaatcatcgtcggaactctgactacaaatgaaacaagaaaagggctctcacaatgaaggaaaacttttttttttttttttggaaacgtaattgtttgttggtacactggcggcacatgcagtgattgtgagcgggcgacaaagcaaggcctatcatgcatgtagtacggtatagaactgttggggtagaaggaggcagttgtgctcacattagttagctggctgggtg

SEQ ID NO: 12386 - DNA, 127 bp, Zea mays
  Clone ID: LIB3061-099-Q1-N7-C11
gtgtggttggtttttaagaatctagaaatggacttgcttatttctgggaagccgcaaacgtgtgagcactgtcctggtggtgtggctgtgactcatgagaaatctaagagggggcacctccaatgat

SEQ ID NO: 12387 - DNA, 335 bp, Zea mays
  unsure (1)..(335): unsure at all n locations; Clone ID: LIB3061-099-Q1-N7-C12
acccccgggggggggggggttttttttttttttttggtgggttttttttttttcttttttttttttgttttttgtttttgtttgtttcttttttttttttttttttttttttttttttttttgttttttttttttttttttttccctnttttgggggttgtgggggggccttttcccctttgtggggttttttaatttgtgtgggtttgttgtgccgggggggggggggcgccgggttggggggggggggggggttgtgggggcgctgcgtggggtggggttgggtgccggccggtggccttgtgggtgccgggccctgccggggccggggggcg

SEQ ID NO: 12388 - DNA, 502 bp, Zea mays
  Clone ID: LIB3061-099-Q1-N7-C2
agaatctggaaatgtaacttcttatttctggttggccacatacatcatccaaaaaactttattattgaattacaactaataagcaatctaaaagagggcaccaccaatgatgtgttgttggtaggaggctgctgggtttgtcaaagcaagttggacaaagggcaacaattgttgtagttgtaagagggttgcggggttagccgcaaactgctggtagaaaggcagcaactgttgctgtgtcaagaaggaagcacggcttgctgcagctagctggctaaatggtagtaatatttgctgctgcaaataagcagcgaggttcagtgcggccaattggttaaatggaagaagttgttgttgatgagagtaggcagtagctagctggctgaatggtaatagttgttgctgcaaataagcagcagggttcagtgtagatagttggttgaatggaagaaattgttgttgctgatagtagggagaaaggtttgccagagctacttggttg

SEQ ID NO: 12389 - DNA, 582 bp, Zea mays
  Clone ID: LIB3061-099-Q1-N7-C3
atcagcaaaaaaaatttattattgaactataactcataagcaatctaaaagagggcaccaccaatgatgggttgttggtagaacactgctgggtttgtcaaagcaagttggtcgaatggcagcaattgttgcagttgtaagagggtgccaacgttaggcgcagtgtgcaggtagaacggcaacaaatgttgctgtgtcaagaaggcagcagggctcacagcagctagctggctgaatggtagtagttgttgttgttgtacataagcatgagagttcaatgctgccagttggttgaatggaagaaattgccgggggtaggcagcagctagctggctgaatggtagtagttgttgttgctgcaaataagcagcagagttcaatgcaactagttggttgaatggcagaaactgttgttgctgagagtaggcagcaaggtttgctagcacgagttgttgtagttgttgtgccctgatgttttgtgccaacaaatgcaccaaaggtaactgctgttgctgagagtaggcagcaaggtttgctagcacgagttgttgtagttgttgtgccctgatgttttgtgccaat

SEQ ID NO: 12390 - DNA, 628 bp, Zea mays
  Clone ID: LIB3061-099-Q1-N7-C4
cacattaaaatctggaaatgtaacttcttatttctggttggccacatacatcatccaaaaaactttattattgaattacaactaataagcaatctaaaagagggcaccaccaatgatgtgttgttggtaggaggccgctcggtctgtcaaagcaagttggacaaagggcaacaattgttgtagttgtaagagggttgcggggttagccgcaaactgctggtagaaaggcagcaactgttgctgtgtcaagaaggaagcacggtttgctgcagctagctggctaaatggtagtagtatttgctgctgcaaataagcagcggggttcagtgcggccaattggttaaatggaagaagttgttgttgctgagagtaggcagtagctagctggctgaatggtaatagttgttgctgcaaataagcagcagggttcagtgtagacagttggttgaatggaagaaattgttgttgctgagagtagggagaaaggtttgccagagctacttggttgatcacaggtagcacgagttgctgcagctgctgtgccctgatggtttgtaccaatgactgcaccaaagatagggctggcgattgttgaaacaacaaggtgataaagtatgttgcttgctgc

SEQ ID NO: 12391 - DNA, 428 bp, Zea mays
  Clone ID: LIB3061-099-Q1-N7-C5
gttagggggttttttggggggtggtggtagaaatgtggttggggggattggtcacatcggccgtggccccccgggggggggggggacagttttttgcaaaaatgccggcgtgatgtgcgtacttatgtgtggggggggggggtttttccacaaaaaatttttttgtgggggggggcccccccggggaaacgttggggggggggggtggggggggggggggggcccaaaagcctaggggggtgggttttgttggccccaaagaagaccccaccacgtgcattttggggggttttttggggggggggggggggggccaacccaaaagaccgctgggtcagggggtgggggcccccccggggggggggggggggaaattttgggcgcacatacggggtcttgtgagtggactgggggggctcgccgggggg

SEQ ID NO: 12392 - DNA, 609 bp, Zea mays
  Clone ID: LIB3061-099-Q1-N7-C6
agaaatgtactttcttatttctgggaagccacaaacatcagacaaaaaactttattatagaactataactcataagaaatctaaaagagggcaccaccaatgatgggttgttggtagaatgctgttgggtttgtcaaagcaagttggttgaatggcagcaattgttgcagttgtaagagggtgccagcgttaggcgcagcgtgctggtagaacggcaacaattgtggttgtgtcaagaaggtagcagggctcacaccagctagctggctgaatggtagtagttgttgctgctgtaaataagcaggagagttcaaagctgtcagttggttgaatggaagaaattgctgggggtaggcagcagatagctggctgaatggtagttgttgttgttgcaaataagaagcagagttcaatgcagctagttggttgaatggaagaaactgttgttgctgagagtaggcagcaaggtttgctagcacaagttgttgtagttgttgtgccctgatgttttgtgccaataaatgcaccaaaggtaactgctgtaatagggctgatgattgttggaggaacaaggtgataaaggtaagatgccagctgcgattgcctgtt

SEQ ID NO: 12393 - DNA, 448 bp, Zea mays
  Clone ID: LIB3061-099-Q1-N7-C7
ccccaaaaagggattttttttaaaattttaaaattactttgaatttaaggggggggggggttaaaaaagggtaaaattttttagggaaaaaaattttggaattagggcaatgggaccaaaaaaaaaaaaaaagggggggccccaaaaagaaagggggggggtttttttttttccaaaaggggggggggggggggcttttaaaaaaaaaaaaccggggtttttttggggggggggggggccccggggatttcggggcggggcctggggggggaccaaattttccttttgggggggggtttaaagggggggggaaaagaggggaaaggggtttccggggggaaaatggttttcccttaaaattccaaaaaaaaaattagccggggaaataaaagggaaaagcggggggggcctatgggggggccaacttccaatatatgggggggggcca

SEQ ID NO: 12394 - DNA, 378 bp, Zea mays
  unsure (1)..(378): unsure at all n locations; Clone ID: LIB3061-099-Q1-N7-C8
gggggggggtgttttttttttttggggggggtggtggttttttggggttttttggggggggggggggggggggggggggttgggttttttttgtgtggttggtttggtgaagttggtggttgttgggggggtttttgttttgttttttttggttttttgttttttggttggggttgttgttttggttttttttttgggttttttttagtgtttttttggggtttttgtggggaagttttttagggggttttttgggtttttttaggggggtttgggggttgggtggtttggagggggtggaattgggtaaaagggggggtttanggtttttagaatttgttggggaaaaaaaaaaattataaggggttnttggggggg

SEQ ID NO: 12395 - DNA, 580 bp, Zea mays
  Clone ID: LIB3061-099-Q1-N7-C9
gacaaaacaactaatttattatctgcaacatgcggtccaccaaaccgaaacagcaccttgccttaattgcctgttaatattcagagcagcaaggtgcttcatactacatcgattttttttaactagacgctccacatcatactagagcaaccaggtgaggaagtccggttatgtcaagcatgcgaaggagtaacgactcctgagctcgtttatccaagagcaccctacttctgcctcttgtagatcttgtgcaagaaggatttcagcactttctgaaccgcaatgcttggctgggcttcaatgtctgcaatcagcttcttgtagctctcattctcgtactcctgaaataccgcctctaggtcaagttctttgtagaggttcttcacttttgccacacaggctggatctttcttgccataattttcaaatagaatgcgcttttggctctcatcagcacgctcaagggcttgcacaactagccatgagcacttgtaatcttcaatgtccgttccaatcttgccgataaattcaggatcaccataacaatccagatagtcatcctggacttgaaatatgttcc

SEQ ID NO: 12396 - DNA, 632 bp, Zea mays
  unsure (1)..(632): unsure at all n locations; Clone ID: LIB3061-099-Q1-N7-D10
atcgagataaatctcaatcaatatattgattatttttaggaaacacatgccgctatgagggcaccattatcgagtacatctcatatgtaatctaaaagatggcaccaccaacgatgggttgctgccacgacaaggcagggttcatcaaagagaactggttgtatggcagcaattgttgctgctgtaggaaggcagcgaccaatgggttagccaccgctagtggattaagtaactgttgtcgctgttgtaggtacgcagcagagttcgacacagtcagttggttgaatggaagtagttgttgcaagtaggcagcagggtttgccacagctagctgagtaagagctggtacaatttgttgcagcaactgttgttgcaacaactgttgttgcaggtatgtaggtgcattgcccatagcgagcgggctagatgaaagaagttgttgctgttgtaggtaggcgatagggttcaccatggctagttgactgagcgctggtagaaactgttgcaactgttgttgttgttggtatgcagctacgtttgccaaagcaagtgggttgggatgcaagcagctgtctttgcaagtaggcgatagggttcaccacngctaggtggctccatgcttgttgctgctg

SEQ ID NO: 12397 - DNA, 632 bp, Zea mays
  Clone ID: LIB3061-099-Q1-N7-D12
cacattagaatctggaaatgtaacttcttatttctggttggccacatacatcatccaaaaaactttattattgaattacaactaataagcaatctaaaagagggcaccaccaatgatgtgttgttggtaggaggctgctgggtttgtcaaagcaagttggacaaagggcaacaattgttgtagttgtaagagggttgcggggttagccgcaaactgctggtagaaaggcagcaactgttgctgtgtcaagaaggaagcacggcttgctgcagctagctggctaaatggtagtaatatttgctgctgcaaataagcagcgaggttcagtgcggccaattggttaaatggaagaagttgttgttgatgagagtaggcagtagctagctggctgaatggtaatagttgttgctgcaaataagcagcagggttcagtgtagatagttggttgaatggaagaaattgttgttgctgatagtagggagaaaggtttgccagagctacttggttgatcacaggtagcacgagttgctgcagctgctgtgccttgatggtttgtaccaatgactgcaccaaagatagggctggcgattgttgaaacaaggtgataaaagtatgttgcttgctgcgattgc

SEQ ID NO: 12398 - DNA, 494 bp, Zea mays
  Clone ID: LIB3061-099-Q1-N7-D2
tttttttttttttttttttttttttttttttttttttttttttttttttttttttttttttttttttttttttttttttttttttttttttttttttttttttttttttttttttttttttttttttttttttttttttaaaaactttgggggggggttatttaattttttttaatgaaaataaattttttttttttgggggggggcaaaaatttttaaaaaaaatttttttttatgattaaaaaaaaaaaaaaaaaaaaaaaggggggccaaaaaattttttttttggggggggggggtttttttttttaaaaaagaggggtaaaaagggaaaaaattttttgtttttaaaaggggggggggggtttcccccaaattttggggaaaaaagaggaaatttttttttttttaaaaaaaaaaaacgctttttgtttcttttttttttaaaaaggaattattttttggggaaaaaaaaaacgggggtttttgtgggg

SEQ ID NO: 12399 - DNA, 663 bp, Zea mays
  Clone ID: LIB3061-099-Q1-N7-D3
atcgagataaatctcaatcaatatattgattatttttaggaaacacatgccgctatgagggcaccattatcgagtacatctcatatgtaatctaaaagatggcaccaccaacgatgggttgctgccacgacaaggcagggttcatcaaagagaactggttgtatggcagcaattgttgctgctgtaggaaggcagcgaccaatgggttagccaccgctagtggattaagtaactgttgtcgctgttgtaggtacgcagcagagttcgacacagtcagttggttgaatggaagtagttgttgcaagtaggcagcagggtttgccacagctagctgagtaagagctggtacaatttgttgcagcaactgttgttgcaacaactgttgttgcaggtatgtaggtgcattgcccatagcgagcgggctagatgaaagaagttgttgctgttgtaggtaggcgatagggttcaccatggctagttgactgagcgctggcagaaactgttgcaactgttgttgttgttggtatgcagctacgtttgccaaagcaagtgggttggatgcaagcagctgttgttgcaagtaggcgatagggttcaccacggctaggtggctcagtgcttgttgctgctgcgttgcgatggtttgtatggggtagagtgcta

SEQ ID NO: 12400 - DNA, 575 bp, Zea mays
  Clone ID: LIB3061-099-Q1-N7-D4
atcgagataaatctcaatcaattttttgattatttctaggaaacacacctcggtttgagggccccattatcgagtacatttcatttgtaatctaaaaaatggcccctccaaccatgggttgctgcctcgacaagacaggattcatcaaaaagaactggttgtttggcaacaattgttgctgctgtaggaaggcggccaccaatgggttagccactcccaatggattaagtaactgttgtcgctgttgtaggtacccaacaaagttccacagaatcagttggttgaatggaagcagcttttgcaagtaggcaacagggtttgccacaactagttgagtcaaagctggtacaatctgttgcaacaattgttgttgcaggtatttaggtgcattgcccacagcgagcgggctaaatgaaaacagttgttgttgttgtacctaggccgcagggttcaccatggctagttgactgagccttggcaaaaactgttgtagctgttgttgttgctggtttgcaactaccttcgccagagcaagtgggttggatgcaagcagctgctcttgcaagtaggcggca

SEQ ID NO: 12401 - DNA, 608 bp, Zea mays
  Clone ID: LIB3061-099-Q1-N7-D6
gacaggtgaacgagcaggcatttttattcgaagcaaaagtgcagccaattcccaccatactaggaaccaggccagcgctgcccaaaaacgctcaaacaagcgaaaaaaaacgagaaggaaccaaagttcttggaaaccaagtacacataactccaatacacgactaacaatgcgaattgcggtgaaacagatcgaaatgcaggcgatggttctccggcctgggcttcttcttcttcttctttccccgtactaatcgaaggacagcggaacctggcttgccaggctacggtacttcagggcgtagaacatctcgatgtagcggcgggtctcgcgcctctccaggttgctcacgtacttccagaacccgtacacgccggtcagggtcatcagcctctcggagtagagcttccaggtgtacttctcatagattctctgcaggccgccctgtgagatcttgtcccagtagctcggatctgccttgcatttgtcaaagaagttgaccaggatatccgcggccttgtcgctgtggtaagggtcaatgtgcaggccagataccccgtccacgatgatctcagcagggccaccatggcaggtcgcgatcgttggca

SEQ ID NO: 12402 - DNA, 562 bp, Zea mays
  Clone ID: LIB3061-099-Q1-N7-D7
agaaatgtctttcttatttctgggaagccacaaacatcagataaaaaactttattattgaactataactcataagaaatctaaaagagggcaccaccaatgatgggttgttggtagaacactgctgggtttgtcaaagcaagttggttgaatggcagcaattgttgcagttgtaagagggtgccagcgttaggcgcaacgtgctggtagaacggcaacaactgtggttgtgtcaaaaaggtagcagggctcacaccaactagctggctgaatggtagtagttgttgctgctgtaaataagcaggagagttcaatgctgctagttggttgaatggaaaaaattgctgggggtaggcagcaggtagctggctgaatggtagttgttgttgttgcaaataaaaagcagagttcaatgaacctagttggttgaatggaaaaaactgctgttgctgagagtaggcaacaaggtttgctagcacaagttgttgtagttgttgtgccctgatgttttgtgccaataaatgcaccaaaggtaactgttgtaatagggctgatgattgttg

SEQ ID NO: 12403 - DNA, 597 bp, Zea mays
  Clone ID: LIB3061-099-Q1-N7-D8
agaaatgtactttcttatttctgggacgccacaaacatcatccaaaaaacttcattattgaactataactcataagcaatctaaaagagggcaccaccaatgatgggttgttggtagaacactgttgggtttgtcaaagcaagttggttgaatggcagcaattgttgcagttgtaagagggtgccagcgttaggcatagcgtgcaggtagaacggcaacaactgttgttgtgtcaagaaggcagcagggctcacatcagctagctggctgaatggtagtagttgttgctgctgtaaataagcagcagagttcaatgctgctagttggttgaatggaagaaattgctgggggtaggcagcaactagctggctgaatggtaattgttgttgcaaataagcagcagagttcaatgcagccagttggttgaatggaagaaactgatgttgctgagagtatgcagcaaggtttgctagcacaagttgttgtagttgttgtgccctgatgttttgtgccaccaaatggaccaaaggtaactgctgtaatagggctgacggttgttggaggaacaaggtgataatggtaagatgcctgttgcga

SEQ ID NO: 12404 - DNA, 575 bp, Zea mays
  Clone ID: LIB3061-099-Q1-N7-D9
cagacaaaaaactttattattgaactataactcataagaaatctaaaagagggcaccaccaatgatgggttgttggtagaacgctgctgggtttgtcaaagcaagttggttgaatggcagcaattgttgcagttgtaagagggtgccagcgttaggcgcagcgtgctggtagaacggcaacaactgtggttgtatcaagaaggtagcagggctcacaccagctagctggctgaatggtagtagttgttgctgctgtaaataagcaggagagttcaatgctgccagttggttgaatggaagaaattgctgggggtaggcagcaggtagctggctgaatggtagttgttgttgttgcaaataagaagcagagttcaatgcagctagttggttgaatggaagaaactgctgttgctgagagtaggcagcaaggtttgctagcacaagttgttgtagttgttgtgccctgatgttttgtgccaataaatgcaccaaaggtaactgatgtaatagggctgatgattgttggaggaaccgggtgataaaggtaagatgccagctgtgattgcctgttggat

SEQ ID NO: 12405 - DNA, 578 bp, Zea mays
  unsure (1)..(578): unsure at all n locations; Clone ID: LIB3061-099-Q1-N7-E1
gacaaggaatatcagcaaagtaagtgcagaacatatttctcaagccaagggtttatacatgctatgaaatagttccgtgcaatagcaccaatgactgattggaatgtctgatcagcaaaaagggagaatatctacttctagctgatgaatagagaagcggggctggcaacaatgaacccaattgtctcaatccagttccatctcattatcttgtgtgctacttctgcatgaccaaatttttatcgtacgatcaagcgacacagtcacaatcttctgtccatctccactaatatccaaactagtaaccttcgactcatggcccaccaaacttttgattggtttgtaatcacgagctgaccacagggctgctttggtgtcataggaagaagtcgctaaataatacccttcttggggttcaaatttcacatgtgaaataatactcttatgagctggaatagaatacaacatttgccttttcctcaaatcccatatccgacagaaattgtcttcacttccagttgcaaccagataaccattaggagagaagctgactnnctagacaggtttcacatggccct

SEQ ID NO: 12406 - DNA, 444 bp, Zea mays
  Clone ID: LIB3061-099-Q1-N7-E10
aaaaaaaaaatttggggcaaccatttaaaaaaaaagggggaaaaaaagggaaaatttttaaaaaatttgcaacccaaaaattggggaaaaaaagacgtttaaaaaaaagggaaaaaaacccccccgaaaaattaaaaggaaaatttaaaaaacattttaaaaaggggggtaaaaaaaaaattccgggggaaaaaaaaaaattaaaggagccccctttttttaaaaaaggaaaacctttaaaaaatgaaaattcttttttggggggaaaaaaaagggggggaaattttcccaactgttttttttttgggttaaaaaaaatttggggggtcccaaaaaaacaaaaaaaaaaaaaagggccccaaaatttgggccccttggggagaaaaaaaaggcccaaaaaaggtttttttttttttgggggaaaaaaggccaaacccgggaaaa

SEQ ID NO: 12407 - DNA, 361 bp, Zea mays
  unsure (1)..(361): unsure at all n locations; Clone ID: LIB3061-099-Q1-N7-E12
gccgcgcaaactcagacgtcctggatttttttcatgttacagaacgtccttcctgatccatggtgtgccccgcatgcttcacatgggttctttcttttttccaacgcctgngcctggttgggtgggaatagcttgctggtttttatgctgctgcccgctnataacggccgcgcggctttggccggttgctgatggcgtatagccttgccgcgttggggcttcggttgttgctcccgttgttggggctgcgcgcgttcccgcncnggctcccctgttgcgcccgctgctgcgcgctgcgcgccggtggctccgtaccttctttcagcgccggccctgcgcacggtgtgagctgcgccgggtt

SEQ ID NO: 12408 - DNA, 594 bp, Zea mays
  unsure (1)..(594): unsure at all n locations; Clone ID: LIB3061-099-Q1-N7-E2
gaagaagagaacattgctggcaaatttcttggaagaaacatgaacatggagaaagttcaacgcaagaacacaacaaatgcacctataattttcgatagcaactttacacaatgaataccagctgccaccaattatcacaacttgtctacttatctccacgctgacatcaaactttgggagctatctaagatgcaatgatgctagaactatggtacacaccaacggatcagcaatatcgccagccttacataatttaaaatgcgatcaggctggcaattacaagcacaccaactaccagtagaagcacctttaagtacgcatcaacctgctggccttgtggtgcctggcgcgggaagccatagccatgtccatgccacccatggaaagaatggccgtatccatagggaaaccctgcagcaggcccataggcagacacctgcgggaatccatgcacctggaagctcagcaacgggaacaaccctccaatggccgccgagaaagtgtaattcccccaccgaccaccagnccacagggggggcgccagcgcccattgaaccagagttctggggcgggtaatgattactgtggtctggc

SEQ ID NO: 12409 - DNA, 566 bp, Zea mays
  Clone ID: LIB3061-099-Q1-N7-E3
cgagataaatctcaatcaatatattgattatttctaggaaacacatgtcggtttgagggccccattgtcgagtccatttcatttgtaatctaaaagatggcccctccaacgatgggttgctgcaaggcagggttcatcaaagagaactggttgtatggcagcaattgttgttgctgctgcaggaaggtagcgaccaatgggttagccactgccaatggattaagtaactgttgtcgctgttgtaggtccccagcaaagtttgacacagccagttggttgaatggaagcaactgttgtaagtaggcagcagggtttgccacagctagctgagtcagagctggtacaatttgttgcagcaactgttgttgtaggtccgtaggtgcattgcccaccgcgagcgggctaaatgaaagtagttgtaggtagacggcagggttcaccatggctagttgactgagcactggcataaactgttgcagctgttgttgttgctggtatgcacctacgttcgccagagcaagtgggttggatgcaagcagctgctgttgcaagtaggtgacagggtt

SEQ ID NO: 12410 - DNA, 653 bp, Zea mays
  unsure (1)..(653): unsure at all n locations; Clone ID: LIB3061-099-Q1-N7-E4
atcgaacacccttggagaccaatatcacattagaatctggaaatgtaacttcttatttctggttggccacatacatcatccaaaaaactttattattgaattacaactaataatcaatctaaaagagggcaccaccaatgatgtgttgttggtaggaggctgctgggtttgtcaaagcaagttggacaaagggcaacaattgttgtagttgtaagagggttgcggggttagccgcaaactgcttgtagaaaggcagcaactgttgctgtgtcaagaaggaagcacgacttgctgcagctagctcgctaaatggcagtagtatttgctgctgcaaataagcagcggggttcagtgcggccaattggttaaatggaagaagttgttgttgctgagagtaggcagtagctagctggctaaatggtaatagttgttgctgcaaataagcagcagggttcagtgtagacagttggttgaatggaagaaattgttgttgctgagagtagggagaaaggtttgccagagctacttggttgatcacaggtagcacgagttgctgcagctgttgtgccctgatggtttgtaccaatgactgcaccaaagatagggctggtgattgttgaaacaacagggcgantaagtatgtngcttgctgc

SEQ ID NO: 12411 - DNA, 330 bp, Zea mays
  Clone ID: LIB3061-099-Q1-N7-E7
ggggttgggggttgggtataaaaaaaaaaggatttgggttttttataaatatatttttaaaaggtttttttaaaaaatggtttggggaggggtttttttttaaaaaataaaagtatttaaaaatttttttaaaaaaatttttttttggtgttgttaaaaagggtgtgggaaggggttttgggaaaaaaaaaatttaaaaaaataaaaaagggggatggaaaattttttttttttgggggggaaaaagggggaaatttggttgggggttttttttgttttttgaatttaaagggggggggggaaaaaaattttttggggggaggggggagg

SEQ ID NO: 12412 - DNA, 329 bp, Zea mays
  Clone ID: LIB3061-099-Q1-N7-E8
ggaaaaaaaaaaaattttgttaccccttcatttttttttttaaaaaaaaggtttttttttttcccctttttttaaaacccttgggggggggggcccggaaattttttggaacccccttggcaaatttttttttggtccgggcctttttaaccccccccggaaaaacccccgggggggggaaaattgggcaatttttttccctcctgggaagaaacttttggggggaagtttttttttccccctccgggaaaaacctttttaaacgggccccttttggttttggggttttcaaaaaaaagggggtttaaaaaaaaaaattttttggaaaa

SEQ ID NO: 12413 - DNA, 336 bp, Zea mays
  Clone ID: LIB3061-099-Q1-N7-E9
agatggaacgaaagcgcgatgtaagaacttgttcgagatacaagtgccccccctagatcctcaagcacaaggaacatgacaccgtacagctccggggatttttaaaatgacctgacctacaacacgaaaaataagctttttttgccccagaataggagagagaatcgccagacaaggggtaagaacagatattttggccatcaggactttttggaccatgcaacggcatcaatttcggattgggcactccggtacagctcgagcctttttgcaagggtagttctgcgttccatgactgctgggtcttcgtcaagaagtttggaaagctgcttcatc

SEQ ID NO: 12414 - DNA, 610 bp, Zea mays
  Clone ID: LIB3061-099-Q1-N7-F1
atatcgagataaatctcaatcaatatattgattatttctaggaaacacatgccgctatgagggcaccattatcgagtacatctcatatgtaatctaaaagatggcacctccaacgatgggttgctgccacaacaaggcagggttcatcaaagagaactggttgtatggcagcaattgttgctgctgtaggaaggcaacgaccaatgggttagccaccgctagtggattaagtaactgttgtcgctgttgtaggtacgcagcagagttcgacacagtcagttggttgaatggaagcagctgttgcaagtaggcagcagggtttgccacagctagctgagtcagagctggtacaatctgttgcagcaactgttgttgcaggtatgtaggtgcattaaccacagcgagagggctagatgaaatcagttgttgctgttgtaggtaggcggcagggttcaccatggctagttgactgagcgctggtagaaactgttgcaattgttgttgttgttggtatgcaactatgtttgccagagcaagtgggttggatgcaagcaactgctgttgcaagtaggcgacagggttcaccacagctagttggctcagtgctggt

SEQ ID NO: 12415 - DNA, 600 bp, Zea mays
  Clone ID: LIB3061-099-Q1-N7-F11
atcacattagaatctggaaatgtaacttcttatttctggttggccacatacatcatccaaaaaactttattattgaattacaactaataagcaatctaaaagagggcaccaccaatgatgtgttgttggtaggaggctgctgggtttgtcaaagcaagttggacaaagggcaacaattgttgtagttgtaagagggttgcggggttagccgcaaactgctggtagaaaggcagcaactgttgctgtgtcaagaaggaagcacggcttgctgcagctagctggctaaatggtagtaatatttgctgctgcaaataagcagcgaggttcagtgcggccaattggttaaatggaagaagttgttgttgatgagagtaggcagtagctagctggctgaatggtaatagttgttgctgcaaataagcagcagggttcagtgtagatagttggttgaatggaagaaattgttgttgctgatagtagggagaaaggtttgccagagctacttggttgatcacaggtagcacgagttgctgcagctgctgtgccttgatggtttgtaccaatgactgcaccaaagatagggctggcgattgttgaaac

SEQ ID NO: 12416 - DNA, 388 bp, Zea mays
  unsure (1)..(388): unsure at all n locations; Clone ID: LIB3061-099-Q1-N7-F12
tgccgcgtcgtngcttgtgtccttggcggcgcctttttttttttttttttttttttttttttttttttttttttttttttttttttttttttttttttttttttttttttttttttttttttttttttttttttttttttttttttttttttttttttttttttttttttttttttggggggggggttttttttttttttttttggggttgtttgttttttttttttgggggggcgccccctctttttgggggggtttttgggggtgttccttggggttttggtggggggcccccgtggggggggggggggcccctggggtgtggtccgggggggggtgggggggtttttttgttggggggggggccgtgggggggtggggggggggg

SEQ ID NO: 12417 - DNA, 449 bp, Zea mays
  Clone ID: LIB3061-099-Q1-N7-F2
ggaaatgttctttttttttttggggggggcccaaactttacaaaaaaaacttttttttggggggtgtacccataaaaaatttaaaaggggggcccccccaagaggggggggggggggaaccctcctgggtttgtaaaaacaaggggggtggatggggccaatttgtgcacttgtaagagggggcccccgttgggggcccgggggtgggggaaccggaacaactgggggtgttttaaaaagggggcaggggttacaccaccttgccgggttaatgggggaagttgggggggccggaaaaaaaccggggagttcaatgcctcccgttggttgaaaggaaaaaaatcgtggggggggggaccaggtggctggctcaatgggggctttttttctcgcaaataaaaagaccaggtcaatgccgcttgggggggtgaaggaaaaaaccgctgttg

SEQ ID NO: 12418 - DNA, 612 bp, Zea mays
  Clone ID: LIB3061-099-Q1-N7-F4
aagaatctagaaatgtactttcttatttctgggaagccacaaacatcatccaaaaaacttcattattgaagtataactcataagcaatctaaaagagggcaccaccaatgatgggttgttggtagaacgctgttgggtttgtcaaagcaagttggttgaatggcagcaattgttgcagttgtaagagggtgccagcgttaggcgcagcgtgcaggtagaacggcaacaactgttgttgtgtcaagaaggcaacagggctcacatcagctagctggctgaatggtggtagctgttgctgttgtaaataagcagcagagttcaatgctgccagttggttgaatggaagaaattgctgggggtaggcagcagctagctgactgaatggtagttgttgttgcaaataagcagcagagttcaatgcagccagttggttgaatggaagaaactgctgttgctgagagtaggcagcaaggtttcctagcacaagttgttgtagttgttgtgccttgatgttttgtgccaacaaatgcaccaaaggtaactgctgtaatagggctgacggttgttggaggaacaaggtgataaagtaagagcctgctgcgttgcctgttg

SEQ ID NO: 12419 - DNA, 623 bp, Zea mays
  Clone ID: LIB3061-099-Q1-N7-F6
agaatctggaaatgtaacttcttatttctggttggccacatacatcatccaaaaaactttattattgaattacaactaataatcaatctaaaagagggcaccaccaatgatgtgttgttggtaggaggctgctgggtttgtcaaagcaagttggacaaagggcaacaattgttgtagttgtaagagggttgcggggttagccgcaaactgcttgtagaaaggcagcaactgttgctgtgtcaagaaggaagcacgacttgctgcagctagctcgctaaatggcagtagtatttgctgctgcaaataagcagcggggttcagtgcggccaattggttaaatggaagaagttgttgttgctgagagtaggcagtagctagctggctaaatggtaatagttgttgctgcaaataagcagcagggttcagtgtagacagttggttgaatggaagaaattgttgttgctgagagtagggagaaaggtttgccagagctacttggttgatcacaggtagcacgagttgctgcagctgttgtgccctgatggtttgtaccaatgactgcaccaaagatagggctggtgattgttgaaacaacaaggcgataaagtatgttgcttgctgcg

SEQ ID NO: 12420 - DNA, 380 bp, Zea mays
  Clone ID: LIB3061-099-Q1-N7-F7
atccaaattcatagcagtttatgacccgctattacatttctttcggctgcatttggtcaatgtttacatttacatacaactgggatcgcaccaataaacgcactagcacaaagctggccatcgatacaatgcccctgtcaagtcctaaacgatgaagttcagtatgacgcaaaacagtatataacataaatgacctacgacaaattaaatcgctgcacctccagaacccctgagaaaggccatcttcgttgctttaacacactgactctgcctttccctcttttcgcgctggcattcaccacaccagctcggaaaatccttctggtatttcttcatctctctgaacacagagctccggcaccacaaaagcagatttattc

SEQ ID NO: 12421 - DNA, 629 bp, Zea mays
  Clone ID: LIB3061-099-Q1-N7-F9
agaatctggaaatgtaacttcttatttctggttggccacatacatcatccaaaaaactttattattgaattacaactaataagcaatctaaaagagggcaccaccaatgatgtgttgttggtaggaggccgctgggtctgtcaaagcaagttggacaaagggcaacaattgttgtagttgtaagagggttgcggggttagccgcaaactgctggtagaaaggcagcaactgttgctgtgtcaagaaggaagcacggtttgctgcagctagctggctaaatggtagtagtatttgctgctgcaaataagcagcggggttcagtgcggccaattggttaaatggaagaagttgttgttgctgagagtaggcagtagctagctggctaaatggtaatagttgttgctgcaaataagcagcagggttcagtgtagacagttggttgaatggaagaaattgttgttgctgagagtagggagaaaggtttgccagagctacttggttgatcagaggtagcacgagttgctgcagctgttgtgccctgatggtttgtaccaatgactgcaccaaagatagggctggcgattgttgaaacacaagggcgataaaagtatgttgcttgctgcgattgc

SEQ ID NO: 12422 - DNA, 600 bp, Zea mays
  unsure (1)..(600): unsure at all n locations; Clone ID: LIB3061-099-Q1-N7-G1
ccaatcatcttttttccttatatattattcctttccatttcaatggttcattcaggtcattgctcacactgccacccatggtgatgggtgacactacgttactcatcgccgctaaatgagtaaactagcgagctaggtagctagtcagcggctccattacattattactacagtacatagtttcctcagtagtagacaccgccggcagctgcgttgcaagggcagggacctggctgctgcagctgcaggccgcacatcgccgtcagctgctgcgctacctgggccgccatcagcgccgcgagctcgccctgcggctgctgctgcaggaaggactgcaggaccacaccgtatgtcgcctggtaccggtgcagcggctccacctgcctgatctggtggcagcactgctgctgcagcgcctggcactgtggcgagccgtagggcgtcgccgccgggctgcactggtgcctcaggaactcgacgcactggcccaggaacgggctgccgacgctgccgacgccgcaagatccgaactgcntgcacgggcttagctgcggtggttgagtggggtattgccatggctgcngctgctgctgcggcggc

SEQ ID NO: 12423 - DNA, 650 bp, Zea mays
  unsure (1)..(650): unsure at all n locations; Clone ID: LIB3061-099-Q1-N7-G10
gaagcacataagaatctagaaatgtactttcttatttctgggaagccacaaacatcatccaaaaaacttcattattgaactataactcataagcaatctaaaagagggcaccgccaatgatgggttgttggtagaacgttgttgggtttgtcaaagcaagttggttgaatggcagcaattgttgcagttgtaagagggtgccagcgttaggcgcagcgtgcaggtagaacggcaacaactgttgttgtgtcaagaaggcaacagggctcacatcagctagctggctgaatggtggtagctgttgctgttgtaaataagcagcagagttcaatgctgccagttggttgaatggaagaaattgctgggggtaggcagcagctagctgactgaatggtagttgttgttgcaattaagcagcagagttcaatgcagccagttggttgaatggaagaaactgctgttgctgagagtaggcagcaaggtttcctagcacaagttgttgtagttgttgtgccttgatgttttgtgccaacaaatgcaccaaaggtaactgctgtaatagggctgacngttgttggaggaacaaggtgataaagtaagagcctgctgcgatgcctgttgntcctgtagggtgaagaattggttttaca

SEQ ID NO: 12424 - DNA, 574 bp, Zea mays
  unsure (1)..(574): unsure at all n locations; Clone ID: LIB3061-099-Q1-N7-G12
agcctgaaagacagctctgcantaagatagtgcatcaaatcatttttacatcaggatgcttccatgtccagtgggccgactggtttaactagctgaagcgaagagcatgtcgtcatccttttggtggggggcttgatttccgctcaaagaacatgcggcacattttcatgctgaatcttatgtcttgcctcatccaatcaacggctttcctttccagtgtgcccaacggggagagcttatttgaccattcatcagatgtttctagcccggtgaggatgaaactgtaaccactggcttcatgagatactgaaaccgaaaattttctgttccatcatttaccgagatcttcatgcgaactaaagattgaagctgctaagaaagcatatgagcactccgaatctctggtggcctattccctgagatgcgtgtctgtcttctggagcattctagctgcttgccgtgggaaaatggtgcctctcttttcggtgaccatggatttgaatttttatggacagcttcaggcgcttggctaggaaacccagttgctgcagaatggtttttttcacccttctca

SEQ ID NO: 12425 - DNA, 158 bp, Zea mays
  Clone ID: LIB3061-099-Q1-N7-G2
ggaaatgtaacttcttatttctaggaggccacatacatcagccaaaaaacttcattattgaattacaactaataagcaatctaaaagatggcaccgccaatgatgtgttgttggtagaaggctgctgggtttgtcaaagcaagttggacaaaaggcag

SEQ ID NO: 12426 - DNA, 624 bp, Zea mays
  unsure (1)..(624): unsure at all n locations; Clone ID: LIB3061-099-Q1-N7-G3
agaaatgtactttcttatttctgggacgccacaaacatcatccaaaaaacttcattattgaactataactcataagcaatctaaaagagggcaccaccaatgatgggttgttggtagaacactgttgggtttgtcaaagcaagttggttgaatggcagcaattgttgcagttgtaagagggtgccagcgttaggcatagcgtgcaggtagaacggcaacaactgttgttgtgtcaagaaggcagcagggctcacatcagctagctggctgaatggtagtagttgttgctgctgtaaataagcagcagagttcaatgctgctagttggttgaatggaagaaattgctgggggtaggcagcaactagctggctgaatggtaattgttgttgcaaataagcagcagagttcaatgcagccagttggttgaatggaagaaactgatgttgctgagagtatgcagcaaggtttgctagcacaagttgttgtagttgttgtgccctgatgttttgtgccaccaaatggaccaaaggtaactgctgtaatagggctgacggttgttggaggaacaagggtgataatggtaagatgcctgttgcgattgcctgttngatccctgtaggttga

SEQ ID NO: 12427 - DNA, 554 bp, Zea mays
  unsure (1)..(554): unsure at all n locations; Clone ID: LIB3061-099-Q1-N7-G4
gctgcgctgggcaccgtcgcgtgggcggccaccgcgctcgcgctcggcctcgcgtgcaaggagatgcgggccgccgccgccgcggcgcgcgggtggcagatgcgcacgctggaggcggtcaccgcggtgctggccgtcacgcagctggcgtacgtgctgatgctgcaccgcgccgccgccgccgcgtacgctgatgatgaagccgatgctaccgcctacgccgacgctggtggcgaccagtgcgagcctggctgttccatcggcaccgaggacgacgccgacgccgactgccagcgcgcgcagcagcagcagcatggccgccaccaccaccaacccaggcagggcggcgggccctcgtgcagtgtcatgtgaactagcatacccatgcatgcatgtttggtggtgtcgctctcttgtcttgccattttccgtgctcgtgtttcgtctcgtggaaaataagcaatttaaacttagtttaatttcctgtatgtcatgtgttcngtttagtgtgtatgcctnctataatatatggtcgtatgtgtgtgtcgacatgc

SEQ ID NO: 12428 - DNA, 382 bp, Zea mays
  Clone ID: LIB3061-099-Q1-N7-G5
ggggtggtgtttttttttttttttttttttttttttttttttggggggtttctttaggagaaggggttagggggggaggttataatgtgctggtggctcaaagtggggatgggtgtaaggtttatgtctgaaaacaatgcgtaataatggtcatagttggggtttgtgggggatggttgtccggagaatttttttaaaggggggaagcccgggggttgaaggtgaagggggggggggtggttgggggagggcacccaaatgaattggggtgggggttttggggggggaaaaaacggggggactggggggttttttgggtttttgtctcgggggggggggggggagaagaaaaaaaatccttggggcgcggggggggggcccc

SEQ ID NO: 12429 - DNA, 643 bp, Zea mays
  Clone ID: LIB3061-099-Q1-N7-G6
agaaatatatcgagataaatctcaatcaatatattgattatttctaggaaacacatgccgctatgagggcaccattatcgagtacatctcatatgtaatctaaaagatggcacctccaacgatgggttgctgccacaacaaggcagggttcatcaaagagaactggttgtatggcagcaattgttgctgctgtaggaaggcaacgaccaatgggttagccaccgctagtggattaagtaactgttgtcgctgttgtaggtacgcagcagagttcgacacagtcagttggttgaatggaagcagctgttgcaagtaggcagcagggtttgccacagctagctgagtcagagctggtacaatctgttgcagcaactgttgttgcaggtatgtaggtgcattaaccacagcgagagggctagatgaaatcagttgttgctgttgtaggtaggcggcagggttcaccatggctagttgactgagcgctggtagaaactgttgcaattgttgttgttgttggtatgcaactatgtttgccagagcaagtgggttggatgcaagcaactgctgttgcaagtaggcgacagggttcaccacagctagttggctcagtgctggtagaaattgttgttgctgttgcgttgcg

SEQ ID NO: 12430 - DNA, 604 bp, Zea mays
  Clone ID: LIB3061-099-Q1-N7-G7
ggcacaaaagtggagcatggtctccatggcttcgctcaaagcagcacagtatggtaattaaactgatcaatttacagcatgatgtatccccaaatccaggcccccaatgtcgattcaacatgtaactaacatttgctgctacaacattctaccctacaacattgaaggacacaaaagagcaaaaagaaagaaaaaatgccttggatgacacttttattgctccgatgatctccaacagactgatctgcagatcacgcatgtaaccaggtgctgatcattgtcgaatgtcgagacacacagctgcatgtcgcacgttcacttcatataactgttccactagggagtaaagcatccttgatcactgtgacaattccacctttgatgaagtacccgtctgtctcccttgcagcttcttgaacattgtcagcattgagtatcttaacattgtctccaattcgagcattcttgtcaatgattgctctcctgatgcatgaatttttcccaataccaataggaatgccacctttttcggcaaggagttttttatcagcttctgtctcatagtagtccgcacccattagtaaactgtcctctatgatagcac

SEQ ID NO: 12431 - DNA, 400 bp, Zea mays
  Clone ID: LIB3061-099-Q1-N7-G8
aagcaggcggaagcagaataatattattttggccaatgcatgcccataaacattgtcttcagtgtacactggtattggcggcgagatgacggatcccaatcggcgtcaatctatctaagcttaaacccttcacgacaagaggcacacgatcgccagcaccgcgccgatagtccaagatgcagtgtcccttgctgcgttgttcttctgatctgcaggcggttggccgtccgcgtccggcgaaggagctggggtagtgtgctctggcgatggcgctgggcgactcctgggcgcaggtgcagtcacaggagcaggggcaagtgggggtgtgggtgcatgtgcaggcgacggcgacggcgagaccggtacaggggcaggcgaccgcgagaccggcccaagggca

SEQ ID NO: 12432 - DNA, 571 bp, Zea mays
  Clone ID: LIB3061-099-Q1-N7-G9
catgactcacggagtaaccagatagtacaaggtactatagtacatttggcaaaaaatgcaatgttgaaaaaaaaaataacacaaagattcaaggataaataagaaaacacccatgcatccagatcacaagtgctcttcttatcctgcagagtcaaaaatcattctcgaatagataacgcatgttccatgcaatagtatgccgcaaactctagtgatatattctctgcccgccaaaggtatacataacagaaacctactatccctcccagccagatcacatgaagtcgtactcatcggggtcatcgtagccaccaccccggccggggatgaagtcgtcgtctcctttctcgatgtggagttgcttctttttcgctccttgtttctttttgcctgctgcagcctccttctcagccttgatcttctcgttagcaattgccgtcacggaagaagaatatctttggcgtccgcacctttcaacgatgtcatggaaagtctcatgacattcttaagcagagccatgtagtgaaagcttttctcataggggcgtagtttgtttgcaataagctccgcg

SEQ ID NO: 12433 - DNA, 302 bp, Zea mays
  Clone ID: LIB3061-099-Q1-N7-H1
tgggggggggggggagggacaaaaggggaaaaaaaaaccaggcggaaaaagggaacaaagggaagggaagggagggggaaaagagaaaaaaaagaggggggggagggggaagccaaaggggcaaaaaatgaaaggggaagaagaaaataaagggggaaaaaaagagggagaaaaaggaaaaggaacagaaaggaaaaaaaagaaaacgggcaaaaaagagaagggggggaaaagaggagaagagggggataaagaagggggacaagagtgaaaaaaaggggggggaataagaaaaaaagaaa

SEQ ID NO: 12434 - DNA, 624 bp, Zea mays
  unsure (1)..(624): unsure at all n locations; Clone ID: LIB3061-099-Q1-N7-H12
gttgatgttgtcatccacgacacaacacacaaatgcataaaattaatttatattattattccatacatatgctaatcacaattcacacatgngaaactggaaaatagggtggttcacctctataaagaaatgttccaatgcttttgtacctctataacatcatttatttatttatttatttatttatttatttatttatttttcaacgcatacatatggcaaagcgtgccttggcaacttgggcaacgtcttattcaatctatttatatacttcgttttattcgatggccttctcttatttcattcgtttgcttcgacttggatgccgaatgcacttgctcgctagcgaaaggcatccatcagcacctgggttccacgaacactgctgctgtccttttcggcacggtgaatcgacctgtggcggggtcgtacgcagactgcctggctaacgcatccgatgaattcacctgcactggatgcaactgaagccgcagtgatgcaagatcagggatttctatagacacttcgtacggacatacattgaagactgtaacgacacaagagaatgtttcatctatctgggccatatcatgcctatcatttcgtgcatcttcgatgctcatg

SEQ ID NO: 12435 - DNA, 497 bp, Zea mays
  Clone ID: LIB3061-099-Q1-N7-H2
tttttttttttttttttttttttttttttttttttttttttttttttattttttttttttttttttttttttttttttttttttttttttttttttttttttttttttttttttttttttttttttttttttttttttttttttttttttttttttttttttttttttttttttttttttttttttttttttttttttaaaaaaggggggggggttgggggggaccccccggggggggggggggggggggggggggccaaaatttttgggggccccccccccaaaggggggggggggggggggatttttttggggggggggggggggcccccccccccagggggggggggggggggggggggtgaaaagggaacccccccggggggggggggggggaaaaaaaaaaaaaaaaaaaggggggggggggggcccccccccgggggggggaaaaaaccctgggaaaaaaggggggaaaaagggtggggcccctgccccgg

SEQ ID NO: 12436 - DNA, 483 bp, Zea mays
  Clone ID: LIB3061-099-Q1-N7-H6
aaaccccagacaaaaaactttttttttggaccttaacccaaaagaaatctaaaagggggccccccccatggggggggggggggaaaacaccgcgggggttggcaaaacaaggggggtgaatggcagcaattggtgcagttggaagagggggcccgcgttaggcccaacgggctgggagaacggcaacaactgggggtgggtcaaaaagggggcagggctcaccccacctagctgggtgaatgggagaagttggtgccgctgtaaataagccggagagttcaatgccgctagttgggtgaaaggaaaaaattgctgggggggggcaacagggagccggctgaaagggagttggtggtgttgcaaataaaaagccgaggtcaatgaacccaggtgggtgaatggaaaaaaccgctgttgctgaaagtaggcaacaagggttgctagcacaaattgttgtagttgttgggccccgatgttttgggc

SEQ ID NO: 12437 - DNA, 578 bp, Zea mays
  Clone ID: LIB3061-099-Q1-N7-H7
agaaatgtactttcttatttctgggaagccacaaacatcagacaaaaaactttattattgaactataactcataagaaatctaaaagagggcaccaccaatgatgggttgttggtagaatgctgttgggtttgtcaaagcaagttggttgaatggcagcaattgttgcagttgtaagagggtgccagcgttaggcgcagcgtgctggtagaacggcaacaattgtggttgtgtcaagaaggtagcagggctcacaccagctagctggctgaatggtagtagttgttgctgctgtaaataagcaggagagttcaaagctgtcagttggttgaatggaagaaattgctgggggtaggcagcagatagctggctgaatggtagttgttgttgttgcaaataagaagcagagttcaatgcagctagttggttgaatggaagaaactgttgttgctgagagtaggcagcaaggtttgctagcacaagttgttgtagttgttgtgccctgatgttttgtgccaataaatgcaccaaaggtaactgctgtaatagggctgatgattgttggaggaacaaggtgat

SEQ ID NO: 12438 - DNA, 616 bp, Zea mays
  Clone ID: LIB3061-099-Q1-N7-H8
agaaatgtctttcttatttctgggaagccacaaacatcagacaaaaaactttattatatgaactataactcataagaaatctaaaagagggcaccaccaatgatgggttgttggtagaacgctgctgggtttgtcaaagcaagttggttgaatggcagcaattgttgcagttgtaagagggtgccagcgttaggcgcagcgtgctggtagaacggcaacaactgtggttgtatcaagaaggtagcagggctcacaccagctagctggctgaatggtagtagttgttgctgctgtaaataagcaggagagttcaatgctgccagttggttgaatggaagaaattgctgggggtaggcagcaggtagctggctgaatggtagttgttgttgttgcaaataagaagcagagttcaatgcagctagttggttgaatggaagaaactgctgttgctgagagtaggcagcaaggtttgctagcacaagttgttgtagttgttgtgccctgatgttttgtgccaataaatgcaccaaaggtaactgatgtaatagggctgatgattgttggaggaacaaggtgataaagtaagagccagctgtgatgcctgttggatctgtag

SEQ ID NO: 12439 - DNA, 624 bp, Zea mays
  Clone ID: LIB3061-099-Q1-N7-H9
agaatctggaaatgtaacttcttatttctggttggccacatacatcatccaaaaaactttattattgaattacaactaataagcaatctaaaagagggcaccaccaatgatgtgttgttggtaggaggccgctgggtctgtcaaagcaagttggacaaagggcaacaattgttgtagttgtaagagggttgcggggttagccgcaaactgctggtagaaaggcagcaactgttgctgtgtcaagaaggaagcacggtttgctgcagctagctggctaaatggtagtagtatttgctgctgcaaataagcagcggggttcagtgcggccaattggttaaatggaagaagttgttgttgctgagagtaggcagtagctagctggctaaatggtaatagttgttgctgcaaataagcagcagggttcagtgtagacagttggttgaatggaagaaattgttgttgctgagagtagggagaaaggtttgccagagctacttggttgatcagaggtagcacgagttgctgcagctgttgtgccctgatggtttgtaccaatgactgcaccaaagatatggctggcgattgttgaaacaacaaggcgataaaggtatgttgcttgctgcg

SEQ ID NO: 12440 - DNA, 549 bp, Zea mays
  Clone ID: LIB3061-100-Q1-N6-A1
gggttgtttttttttttaaaatattttttttttttttttttttttttttttttttttttttttttttttcgagaaaaatcccaaccaatatattgattatttctaggaaacccccctcggtttgggggccccattatcaaatccatttgggggtgtaggggaaaaaatggcccccccaaccatgggttgctgccccaacaagacaggattcatcaaagagaaccggttgtatggcaccaattgttgctgctgtaggaaggcggcccccaaggggttacccccccccaagggattaagtaactgttgtccctgttgtaggtccccaacaaaattccaccaaatcagttggttaaatggaaccaccttttgcaagtaggcaacagggtttgccccacctagttgagtcaaagctggtacaatctgttgcaacaattgttgttgcaggtatttaggtgcattgcccccaacgagcgggctaaaaaaaagcagttgttgttgttgtacctaggcggcagggttcaccctggctagttaactgagcgttggcaa

SEQ ID NO: 12441 - DNA, 532 bp, Zea mays
  Clone ID: LIB3061-100-Q1-N6-A11
ggggggggtttttttttaaaaaaatttttttgttttttttttttatacgaaacttttaccatctccctttatcaataaatactatgccacatcaaattatttaatgttcatgaaactttcataaaaccccatttaaatcggtataaagggaacgctggggggtccacagaacataaccccaaagcaagggatgcgggtttgacctgaaaacccatctccagttctgggtagctattagtcgattaaactactcgacgggcagctaccggtttgatttctggggtttgaaaatgttgggcttgtagtacttcagttcggggatgctttctttaatatcatccattgccctgggggttttttgctttcttggagtttggttcctttctttcgggtaccatcgtatgcataaagccattatactactcacatcgacaattacatgaaaaaagacgggtgcaagctgtggcatgtactttttcagaaatagaaaatccacataaacagaattcccagctaataatggagtgcctga

SEQ ID NO: 12442 - DNA, 574 bp, Zea mays
  unsure (1)..(574): unsure at all n locations; Clone ID: LIB3061-100-Q1-N6-A12
aaacaataacacttgggtaacaatattgagctttaacaagcaatccaatcttgggacaattttttctcaaacaaacccttttgagttcaattcagccaggacaactatagttttggatataataatagttcttggttgctgggcggcatnnntaactaatttcgccgcacgcctagcacttgatctccttaagaccatgagagaaatagaggaatgtcggattagtggcaccatccttgtaataggcgaataccacagacgcatcatccttcatggactcaccaacaaaaaattggaggtccttcagcttgctaaggagaaacttggttgcaccctcgacaccctttttgaactcatccgctttctctggctccaacacagcagtgagattcttgatgtattttttgatgtaagacacaaatgatttcttgtcaaaaggaggttgctcctgtagacggaatgtgtcaacaatatcaaccaccttcacagctgtgtcatcaacgctttcgtcctcaccaccctcggcggatggattggccccaatgtccacatcaacaggaccttgggtgaccca

SEQ ID NO: 12443 - DNA, 556 bp, Zea mays
  unsure (1)..(556): unsure at all n locations; Clone ID: LIB3061-100-Q1-N6-A2
atatcgagataaatctcaatcaatatattgattatttctaggaaacacacgtncnnggtatgaggggcaccctcattatccgagtgaccatctncnagtatgtgaatncnntaaaagaagtggcgacccctcctcaaccgatggggnttgctgcccctcgacaagggcgggggggggtgaaagagaactggttgtatggcagcaattgttgctgctgtaggaaggcggcgaccaatgggttagccactaccaatggattaagtaactgttgtcgctgttgtaggtacgcagcagagttcgacagagtcagttggttgaatggaagcagctgttgcaagtaggcaacagggtttgccacagctagttgagtcagagctggtacaatctgttgcaacaattgttgttgcaggtatgtaggtgcattgcccacagcgagcgggctagatgaaagcagttgttgttgttgtacgtaggcggcagggttcaccatggctagttgactgagcgttggcagaaactgttgtagctgttgttgttgctggtttgcaactacgtt

SEQ ID NO: 12444 - DNA, 118 bp, Zea mays
  Clone ID: LIB3061-100-Q1-N6-A4
aaaaaagtgggtgtttttttttattttttattttttttttatttttaaatatattatatatttaaaatattttaattaaaaaaaaaaaaaaaaaaaaaattttttttttttttaaaaa

SEQ ID NO: 12445 - DNA, 266 bp, Zea mays
  unsure (1)..(266): unsure at all n locations; Clone ID: LIB3061-100-Q1-N6-A6
cccagcgagcgggggcgggcaancagnncaacnnncgngcaggacccccccacagagaaacaaggccccgaagggccangannacgccagnngnacggaaccaacncacaggncanccncaggggancgggccggacngaancanggngaacncacgcgccggancgccggnggacacccagnnnnncgggnaacgggcagaggcgnnaangcccccgcgccgngcgnccgcancccngcagggcncaggcccggcgacaanncgg

SEQ ID NO: 12446 - DNA, 559 bp, Zea mays
  unsure (1)..(559): unsure at all n locations; Clone ID: LIB3061-100-Q1-N6-A7
tttttctttcttcttttcttttttttttctttttttggncggtgcgnacaatttttttttttttttnnnccnctttttggtttgtcccggggtttnttttttttccttttttccctttaataaaaaaatatatattcttcttctcttcntnttttttttcttcttttttttcttttttttttttttttgtgcccctttcctttctgtttttttttgtcttctcttttgggttttctttttttctttttttttttttgcttcttttctttttttttttttcttttttttttttttttttcttttttctccttcctctttgtttccttttccttcctcctttttttcttctctttcctcgtttttctttttctctttttttaccccttttccctcttttctcttgtttcctctttcctcttccttttttttgcccttctttttttctttttttgcccccccctcttccctcacgtttccttcttccccttttgctctcttctccttctcctcttcctttttcatcccctctcttttggtctcctctctcccccccctcccc

SEQ ID NO: 12447 - DNA, 541 bp, Zea mays
  Clone ID: LIB3061-100-Q1-N6-B1
gggggggttttttttttttttttggcaagtgtttatcatatcatatatatagcaggtaacacagtgataagcccacatcatacgagcaagacgcagcagcgttcatgggggggccgcattggtgtaggtattgtggaaggtggagtactccaaggggggggtggccccttctgttctggtactacaaaacaagtagcacgccgcgggtcaactagttccagattttatgatctcccaccgagcttgtgttgtccatctggtttggagaagctgatcacgacccgctcagggaaccagttattattatgtcttcagtggggctttcttcaccctatcagatatccggtcaggtgcgttcgtgtgcgacttgaaccggcctcgcccaccctcctccttttccttcttctttactatctggacgacatcctcgtcgttaaggccatggccgaggccgcaatgctgtggatagtgccttgcgctggttccccatacgagcacatacttcacgtccttgagcaaacttctatggatatgattgcag

SEQ ID NO: 12448 - DNA, 544 bp, Zea mays
  unsure (1)..(544): unsure at all n locations; Clone ID: LIB3061-100-Q1-N6-B10
ggggggggtttatattaaaaaaaggaaacagggggacagtgcatatatagcatcacagtagatatgcaaatacacaggtgaataaagggtaacaccaacagnatcccgagaaacatgggaaagaaactaagaaagcatgtctcaacacaggatgggatggggggccacttnttcacagcgcatatatgtcatatactaataaatagatgaaaccgtgccatggggccatcaaaatcaggagcctttcaaaaccacctcaattgacaagaatgcaatatgagagtgtcctgaaataatatttaattaattccgtcgcgacaacccaatgacctacccgagcaaacaggcatcactgttgttgctgttgctgctgtgcagctggttgctgttggtaattgggataaccgccataagcgccataaccatacatgttaggatcctggggttgtgcatacccactgccataagcctcataaccttgtccatagcccccatagtagccaccagcaccagcagccgcaccccattgattggattcctgctg

SEQ ID NO: 12449 - DNA, 61 bp, Zea mays
  unsure (1)..(61): unsure at all n locations; Clone ID: LIB3061-100-Q1-N6-B11
aaaaaaaattttttttttttgttccggggnnnnncccnnnccccccccccccccccccccc

SEQ ID NO: 12450 - DNA, 374 bp, Zea mays
  unsure (1)..(374): unsure at all n locations; Clone ID: LIB3061-100-Q1-N6-B4
gggggggggggggtttttaataatattttgggggggtttttttttttttttttttttttttttttttttttttttttttttttttttttttttttggttgaagggacccattgcccccaatgttttttgccccaaaaattttttttggggcccgccgggcgctcttttttttattaaacaaanttttaaatttttctttttttttaataccccagggtttttttctacggggcccggatttcgaatgtttttgggccttttttaggggccgggccctttgaacccgtggggtgcccgggcccttttcgcccccccccccccgggggggttttgtgggggcccgcgattggacccccttcttggtgggccccccc

SEQ ID NO: 12451 - DNA, 519 bp, Zea mays
  unsure (1)..(519): unsure at all n locations; Clone ID: LIB3061-100-Q1-N6-C1
agaaagtactttcttatttctgggaagccacaaacatcagataaaaaactttattattgaactataactcataagaaatctaaaagagggcaccaccaatgatgggttgttggtagaacactgctgggtttgtcaaagggggtgggtgaatggcancaattgttgcagttgtaagagggtgccagcgttaggcgcaacgtgctggtagaacggcaacaactgtggttgtgtcaagaaggtagcagggctcacaccagctagctggctgaatggtagtagttgttgctgctgtaaataagcaggagagttcaatgctgctagttggttgaatggaagaaattgctgggggtaggcagcaggtagctggctgaatggtagttgttgttgttgcaaataagaagcagagttcaatgaacctagttggttgaatggaagaaactgctgttgctgagagtaggcagcaaggtttgctagcacaagttgttgtagttgttgtgccctgatgttttgtgccaataa

SEQ ID NO: 12452 - DNA, 501 bp, Zea mays
  unsure (1)..(501): unsure at all n locations; Clone ID: LIB3061-100-Q1-N6-C10
aaaaaatactttgtggtttctgggaagccacaaacatcagnataaaaaactttattattgaactataactcataagaaatctaaaagagggcaccaccaatgatgggttttttttttaacactncttntttgttccagccccggggttnaatggcancaattgttgcanttgtaaaagggtgccagcgttaggcgcaacgtgctggtagaacggcaacaactgtggttgtgtcaagaaggtagcagggctcacaccagctagctggctgaatggtagtagttgttgctgctgtaaataagcaggagagttcaatgctgctagttggttgaatggaagaaattgctgggggtaggcagcaggtagctggctgaatggtagttgttgttgttgcaaataagaagcagagttcaatgaacctagttggttgaatggaagaaactgctgttgctgagagtaggcagcaaggtttgctagcacaagttgttgtagttgttgtgccc

SEQ ID NO: 12453 - DNA, 460 bp, Zea mays
  unsure (1)..(460): unsure at all n locations; Clone ID: LIB3061-100-Q1-N6-C11
caagcggcaaacttattcatgatttgtcatagttctgggtagtacgcacacacaacacaaccggtccattattaaaccaacactgacacgaacagcattttcttttacaacctccatttgggtattgcccgggcgacccangcccatcnncngcttaaacgacccatgacttactgaccaccacggagacggagcacaaggtggagggtgctctccttttggatgttgtagtctgctagggtgcggccatcctccagctgtttgccggcgaaaatcaaaccctgctggtccggggggatgccctccttgtcctggatcttcgccttcacattgtcgatggtgtccgagctctcaacctccagggttatggtttttccagtcagggtcttcacaaagatctgcataccacccctgaggcggagaacaaggtgaagggggctctccttctggatgttgtagt

SEQ ID NO: 12454 - DNA, 132 bp, Zea mays
  Clone ID: LIB3061-100-Q1-N6-C12
tttttttttttgtttaaaaatttttttttttttttttttttttttttttttttttttttttttttttttttttttttttttttttttttttttttttttttttttttttttttttttttttttttttttttt

SEQ ID NO: 12455 - DNA, 485 bp, Zea mays
  unsure (1)..(485): unsure at all n locations; Clone ID: LIB3061-100-Q1-N6-C2
tttggggttttttttttttaattttttttttttttttttttttttttttttaaaaaaggactttcttatttctgggaagccacaaacatcagataaaaaactttattattgaactataactcataaaaaatctaaaaaagggccccaccgtgttgtcgggggtnntaaaacactgctgggtttgtcaaaacaaggtggttgaatggccgccattgttgccgttgtaaaagggggccagcgttaggcgcaacctgctggtaaaaccgcaacaactgtggttgtgtcaaaaaggtaacagggctcacaccaactagctggctgaatggtagtagttgttgctgctttaaataagcaggagagttcaatgcttctagttggttgaatggaaaaaattgctgggggtaggcagcaagtagctggctgaatggtaattgttgttgtttcaaataaaaagcagagtttaatgaacctaattggtttaatgg

SEQ ID NO: 12456 - DNA, 457 bp, Zea mays
  Clone ID: LIB3061-100-Q1-N6-C4
accagtatgcatcagggatgggtagccgcaaacgagagattcatgaaatatagcaggcccccatgtttgccgggtccaggggccgggagagcatttcttcaaaaacccaaacagcgcccctaaatactatctggaggaaaaaaacgagccgagagccctaaaacgccccaaaggagcatcacacaaaccacattgctacaaaatcccccacaacccaaaatatagcgaacaacctatggggcaaaaccgaacccccccgggggcagcaaacacaaccccaaatataaatgttttatcaggggaccgccccccccatgctgggggctcaaggccctcccgggccaatacaaaagccaagcgagggaatcccatgggcacacaggagcggtcccaaaataaaaacatttgggtccgccctcaggaggctcggagctttggtcaatacccccttgggtgg

SEQ ID NO: 12457 - DNA, 476 bp, Zea mays
  unsure (1)..(476): unsure at all n locations; Clone ID: LIB3061-100-Q1-N6-C6
tttctggggggggggggttttttataaaattaaaacgggggtttattatgaccatgcatatattattgggcataccacacatgataatgtgtgtcgtcttactgcattattacatattattagataggagagagtattgttataaggaaaattttcttggggggtatgactgggggggtanncctnnaatggcancggaaactccacaagggtaggtgcggtagctgggcagctggtactggtagagtccacccatggccggcatgttctgcgccatcatcatggccatggggttgagaccctgggctgccagcagctgcttctgctgttggattagagctggtttgtacaggctggtgttgggggtagggggacgctcaagctggatcatcattttgaggatgctgcgcgacggagtggacttccatcatgctaatcttcttgtgggagtactgttgccggagcggttggaacat

SEQ ID NO: 12458 - DNA, 579 bp, Zea mays
  Clone ID: LIB3061-100-Q1-N6-C7
gtggggtttttttttttattttttttttttttgtttttcatccaaaaacttcattattgaactataactcataagcaatctaaaaggggccccaccaatgatgggttgttggtaaaacactgttggttttgtcaaagcaagttggtgtttgccagcggtttttccagttgtaagagggtgccagcgttaggcatagcgtgcaggtagaacggcaacaactgttgttgtgtcaaaaaggcagcagggctcacatcagctagctggctgaatggtagtagttgttgctgctgtaaataagcagcaaagttcaatgctgctagttggttgaatggaaaaaattgctgggggtaggcagcaactagctggctgaatggtaattgttgttgcaaataagcagcaaagttcaatgcacccagttggttgaatggaaaaaactgatgttgctgaaagtatgcaccaaggtttgctagcacaagttgttgtagttgttgtgccctgatgttttgtgccaccaaatggaccaaaggtaactgctttaatagggctgacggttgttggaggaacaagggtgataatggt

SEQ ID NO: 12459 - DNA, 237 bp, Zea mays
  unsure (1)..(237): unsure at all n locations; Clone ID: LIB3061-100-Q1-N6-C8
ttttaaaaattttgttgggggtttttttttgccttttttcttttttcatttcctttggcgttttttttttttttttttttttttttgtcttctttttcttttttttttttttttctttccntccctttttttttttttgtcccggggttccccttccggtcntttttttttaatttttctttttcatttgtttccttcctgttctgtttttttgtttttttttcccttcctcttttt

SEQ ID NO: 12460 - DNA, 291 bp, Zea mays
  unsure (1)..(291): unsure at all n locations; Clone ID: LIB3061-100-Q1-N6-D1
gggggggttttttgcaaaaatatcaatacatgggactagagctcaatcnttttagaaaacagtgtactaatcaggactgaaaacatgggataacgctctgaacttgagacgactaaccaaaaaagtgtactcatnaggacacacattggggggggggacaatccatgagaatgctctaagctacagcgctctagcccttcttactctgaaacttcttgatgtagaactgaaactgtttaccctgaaggatgaaccgatgacgtgaaacacactgatcagggaccggaagaa

SEQ ID NO: 12461 - DNA, 597 bp, Zea mays
  Clone ID: LIB3061-100-Q1-N6-D11
gtgtgtgtggttttttgtacatgcaacgatgtgtgcaaaccattaactgtccaattcagtgacagtggtgcacacactgcatgttccaggccagcacccgcccatgggagtacaaaaagaatgtgcacaatctgctgtgagttgacatttgtgtggagggctgggacgggcgctcccattcagacggtagggaatgtgcacatgtaatgaatatagatacaaccttcacccttacctactaactaaaaaagtgagaaacagataatactaacatggcatctccagcgacaccagtctgtatagttgccaccaatattcgtcattatccttttgaagggaggtgctggcattatatcatattagaaagagactgctgccgcccaagcactcgagttcagtcattggcccactttcatccccatgattctatgtcacctgatcatttccatttcgaggtggatcggtgtaatcttgaccatgatcacgaacatctctgaacatagagaagaaagaaactatgccatcagaagcaccgcctcccagcaaccacagcaaaaggacccaaatgggttgagggagcctgagcctgcaggggta

SEQ ID NO: 12462 - DNA, 486 bp, Zea mays
  Clone ID: LIB3061-100-Q1-N6-D4
accgcagtgcgaaaagaatctgtatctatttatgtttttattccctaaacacaagctaacaaactctaccgtaaaatacaagtgtatgtatcgttgtgtcccatatctgtacaattgtcattactagcccccgagagacgcaagccgttttcatcaccaccagtagtcagttccctttgtcagccgctccattgcattctgaagcctcttccacgagccaaatttgtacaccttaccgaagtttgtcctcagcgtataatcaaaattcgacaaaaatcagctcaacaaatgaatcaacacagcctcaaatttagaattgacaaaataactgtgtgaagctgttgttagctgatgtcacttgcaggccttgaacccaactgttggggcagctttttaaaaagctcagcttctcttgctatttgaatatcagatggccaaaaggtctgatataccactttacaaaggagacgaggaaagcaccccaag

SEQ ID NO: 12463 - DNA, 338 bp, Zea mays
  Clone ID: LIB3061-100-Q1-N6-D5
cagcgaaagaaatttattattgaactataactcataagcaatctaaaagagggcaccaccaatgatgggttgttggtagaacactgctgggtttgtcaaagcaagttggtcgaatggcagcaattggtgcgggtgtaagagggtgccaacgttaggcgcagtgtgcaggtagaacgggaacaaatgttgctgtgtcaagaaggcagcagggctcacagcagctagctggctgaatggtagtagttgttgttgttgtacataaacatgaaagttcaatgctgccagttggttgaatggaagaaattgccgggggtaggcagcaactaactggctgaatg

SEQ ID NO: 12464 - DNA, 327 bp, Zea mays
  Clone ID: LIB3061-100-Q1-N6-D6
ggtggggtgtgttttttttttttttttttttttgttttttttttttttagatctctaatcttttattacctgggaagttgcccatttcagtttgagaactttattattacagtttaaagcataaaaaaatctaaaagatgggcccaccaatgggggggggggggaataagggggtaggattcgtcaaagcaagttggttaaatgggagcaattggtgttgttgtaagaaggcgacattgtttgccccatcctgggggtagaacgggggcaactgttgctgttgcaagaaggcgttaatgtttcccacaacctgtgggtaaaatggca

SEQ ID NO: 12465 - DNA, 428 bp, Zea mays
  Clone ID: LIB3061-100-Q1-N6-D7
gtgggttttttttttaaaaaaattttttttgttttttttttttttttttttttttttttttaaattaattttcttttccttttttatccaaaataaaacccccaacccaatatttaaaaataactatacaaaaacaacaaatatttggggccgtggggaaaaacaaaacaacttggcttatccctttaaaagagtgaaaacaaaacaaaaccctccttaattaaccctgaaaacaatttttttccataaaaaaacttttcaactgccaatcaacataaaaaaaagtcttaaacctttcttaccaaaacaaaattaccctaacaacaaaatccctagaaaaaggacccaatatcgaaaaaacctctcacaaccagacttttgaacacaaatttcttaaccccccccttttaaaccccaccttttaaaaa

SEQ ID NO: 12466 - DNA, 274 bp, Zea mays
  Clone ID: LIB3061-100-Q1-N6-D8
ggggggggggggtttttaaaaaaaatttggggggggttttttttttttttttttttttttttttttttttttttttttctttatttttaactcaaaaacactccctccaaccaacattaatcaaattttaatcaataactttaatggggggggcgcgggggggaattaaattcctaccgaaaacgactttccccctttataaataaaaaaagaaacaaaaaaaacacaatcaaaaaaaatttcacaaacctggaaaaaggaaaaaaaaaaatag

SEQ ID NO: 12467 - DNA, 511 bp, Zea mays
  unsure (1)..(511): unsure at all n locations; Clone ID: LIB3061-100-Q1-N6-E10
gtgggggggggggttttaataactacttcgctggcctttcttcctttttttttatcacaaacaagttaaagaacacggctctctttgatcctctgtattgaagctactagtttgctacgaaaattgaaaagctttatatanacatgtgtggggctcgaccggggggtacatatgaatgcaacctcaataataccaaacgaatagactaaccaatcaccaccaccacaggagcaaccagccaaacatttcttgcagcactctgggcgacctggaacgataatcccggaatgcagcaaatggctgcttacgcgatacgaaggaagccgtcctatccaatgctttgttctttaacaaattcaccccattctaaatttgtccagctacgccagcacgagcctgcagtgtctcggtacgtttgcttttttccatttgttccaccacccactctatgccagatttgatccccctgccatcatatgcagatacagcctgaaatgatatggcctctcat

SEQ ID NO: 12468 - DNA, 66 bp, Zea mays
  unsure (1)..(66): unsure at all n locations; Clone ID: LIB3061-100-Q1-N6-E11
attaccacgcggggcgttgncccttnnnnttttttttcttttttcctctttctccttttttttttt

SEQ ID NO: 12469 - DNA, 553 bp, Zea mays
  unsure (1)..(553): unsure at all n locations; Clone ID: LIB3061-100-Q1-N6-E2
tgttttttttttttttttatttttttttttttttttttttttttttttttttttttttttttttttttttttttttttttttttttttttttttttttttttttttttttttttttttttttttttttaaaggaaaaaaatatttttggggggggggggggnnnaaaaaaaaatattttttcttttaaaaaaagggggggggtaaaaaaaaagggggggcgaggggggaaagatttaaaaaaaaaaaaattttaatttttttttaaaaggggggggggggtttggggattttaaaaaaagttggtggggggttttaaaaaaaaaaaaaagaatttgaaaaaaaaaaaagggggaggggggggttaacctaaaaaataggagatggaatttgggggggaaaaattttttcttaaaagggagggggtaaaaaggtgggggaaaaaaaggggaaaaggtattttagggggaaaaattttaattgttaaaaaaattaaaaaaaaaaagaagggtgaagcaataaaaataaaaagggggggggtttaaagggagagag

SEQ ID NO: 12470 - DNA, 173 bp, Zea mays
  Clone ID: LIB3061-100-Q1-N6-E3
cgctcaaagcagcacagtgtgggaattaaactgatcaatttacagcatgatgtatccccaaatccaggcccccaatgtcgattcaacatgtaactaacatttgctgctacaacattctaccctacaacattgaagggggcgagggggcaaaaagaaagaaaaaatgcctttgt

SEQ ID NO: 12471 - DNA, 498 bp, Zea mays
  unsure (1)..(498): unsure at all n locations; Clone ID: LIB3061-100-Q1-N6-E4
ggtggggtttttttttttttgcgacatcgaaccacttcttttatacaaaagcacgcagcagagagctaaatggaacacagcgtcatcatcatgggccgtaaccatcgtcccatcacgcatctagtacaacgccgctaccataccatacgggcatgctnggaggggcccccggattcacgcttccttattttcagttcagttcggaaggggatccaaatccagagtcaccaccggcaaagacgagcttgggcgcgcgcgcacacacacacacactactggccctctgccagcggctcggcctttggcgccgacgaaaacaccttggcgatgcgttcggtggggatggcggggaggtacttggcccccgcgtagccgtgctccgcggtggttgcgaccgccctgttgtacttgtcgggccaatgcgcgggggggggcaccacgatctcctggacgtgcgggaacacccgcagggccgttcagcgagcgccaggcggagac

SEQ ID NO: 12472 - DNA, 280 bp, Zea mays
  Clone ID: LIB3061-100-Q1-N6-E5
gtgggggggggggtttttaaaaaaataaaatggggggggtggcgagaaaaatctaaaccaataaatggattatttcaaggaaacacatgccgggaggagggcaccattatcgagtacatcgcaaatgtaatctaaaagaaggcacctccagaggggggggggggggggcgcaacaagacaggagtcatcagagagaaccgggggtatggcagcaattggtgctgctgcaggaagggagcgaccaaggggctagccacggccaatggagaaaggaaccgga

SEQ ID NO: 12473 - DNA, 590 bp, Zea mays
  Clone ID: LIB3061-100-Q1-N6-E7
gggggggggtttttcgtgaaactatatatttaaatagcacaatcactagtacatcgaggacgattagcacgcgcgcgcgacggctagcttatattagagcgcgtcatcagcctagcagtttattttttataaatgcatacatgcagacgggggggggggatctctggtgcttgtgcttgtgctgactgactgactggctggctgggctctatgactgatgaggtcgacggatgtgtcatatatatatctgatctcatcatggcctgaagaaagccgggtgggggcgtccggtgccctggaaggaggtgttcttgaggtgctccggagcttcctcgaacgagtggcgcctcgccagcgacaggatcttcttgtcggcggcgatgaagtaggccatcccggccaccgtggagacgatgagcgcctgaccggtggggttgatgttggccttggcccacggcagcatccgcacgctcgcgagggtgggaatcgcggaggcgatagtcgccactgctgccgccttagctccggcaagagtcgcctctgcagaccacacacacacacatacatacatagcgttagtcatttcgagc

SEQ ID NO: 12474 - DNA, 206 bp, Zea mays
  Clone ID: LIB3061-100-Q1-N6-E8
gagccaaaaagggggggaccacctatccaattcataaaatgggggggggggggggaccacccccaaagcgccagaggggggacccacaaaaaaaaaaaaaacaaccagcagcggcccaaacagagaccaaaaacccaaaaaaggtcaaagacgccggcaaaaaaagagcaccaccacaccacagagagccccaaccaccaaacccg

SEQ ID NO: 12475 - DNA, 210 bp, Zea mays
  Clone ID: LIB3061-100-Q1-N6-E9
gtgtttttttttgttaaaaaaaaatttttttttttttttttttttttttttttttttttattttttttttttttttttttttaaaaatattaattaataccatctaaccccataaaaaaaaaattttaattcaaaaaaacatttatgtgggggggggggggagaaaaaccaaccaaaaaaaaataaaaaaaaaaaaaaaaaaaaaaacac

SEQ ID NO: 12476 - DNA, 413 bp, Zea mays
  Clone ID: LIB3061-100-Q1-N6-F1
gggtttttttttgtttttttttttttttttttttttttttttttttttttttttttttttttttttttttttttttttttttttttttttttttttttttttttttttttttttttttttttaaaaaggggggggcttttttggaaaaccgggggggggggggaaaacgggggggggaaacaaaatttttaaaaaaaaaccccccaaatggtgtgggggggggggggggatttttggggggggagggggggaacccccccccaatggggggggggttggggggtggaaaaaaaagccccccccttttggggaggggggggggagcaaaaaaaaaaaaacgggggggggggggggcccccccccgatagagggagacaccggtttaaaaatcggggggagagtgtggggggggg

SEQ ID NO: 12477 - DNA, 577 bp, Zea mays
  unsure (1)..(577): unsure at all n locations; Clone ID: LIB3061-100-Q1-N6-F11
gcgagataaatctcaatcaatatattgattatttctaggaaacacatgccgctttgagggcaccattatcgagtacatctcatatgtaatctaaaagatggcacctccaacgatgggttgctgccacaacaaggcagggttcatcaaagagaactggttgtatggcagcaattgttgctgctgtaggaaggcaaccaccaatgggttagccaccgctagtggattaagtaactgttgtccctgttgtaggtacccagcaaagttcgacacagtcagttggttgaatggaagcagctgttgcaagtaggcagcagggtttgccacagctagctgagtcagagctggtacaatctgttgcagcaactgttgttgcaggtatgtaggtgcattaaccacagcgagagggctagatgaaatcanttgttgctgttgtaggtaggcggcagggttcaccatggctagttgactgagcgctggtagaaactgttgcaattgttgttgttgttggtatgcaactatgtttgccacagcaagtgggttggatgcaagcaactgctgttgcaagtaggcgacaggg

SEQ ID NO: 12478 - DNA, 161 bp, Zea mays
  unsure (1)..(161): unsure at all n locations; Clone ID: LIB3061-100-Q1-N6-F2
ggtagtaagttttgaccttagangncgtgggggggggggggttttacaataattttgtggggtgtttattattatttgatttaaatggttaattaggtcattgatacactgacacaatggtgatgggtgagattatgttattaaaatatttaaatgagtaa

SEQ ID NO: 12479 - DNA, 290 bp, Zea mays
  Clone ID: LIB3061-100-Q1-N6-F3
gtttgtttttttttttatttttttttttttttatttttttttttatttttttttttttttttttttttttttattttttttattttttttttttttttttttttttattttttttttttttttttttttttttttttttttttttgggttgaagggggtttttgtttttttttggggaaaaccttgcggtttgggggcccctttttcgggggccttttatttttaatttaaaaaaggggcccttccaccgtgggtttttgccttggcaaaacaggtttttttaaaaagaa

SEQ ID NO: 12480 - DNA, 355 bp, Zea mays
  Clone ID: LIB3061-100-Q1-N6-F4
cagacaaaaaactttattattgaactataactcataagaaatctaaaagagggcaccaccaatgatgggttgttggtagaacactgctaggtttgtcaaagcaagttggttgaatggcagcaattgggggggtggtaagagggtgccagcgttaggcgcagcgtgctggtagaacggcaacaactgtggttgtgtcaaaaaggtagcagggctcacaccagctagctggctgaatggtagtagttgttgctgctgtaaataagcaggagagttcaatgctgccagttggttgaatggaagaaattgttgggggtaggcaacaggaagctggctgaatggaagtcgttgttgttgc

SEQ ID NO: 12481 - DNA, 214 bp, Zea mays
  unsure (1)..(214): unsure at all n locations; Clone ID: LIB3061-100-Q1-N6-F8
gggggggggggtgtttaaaaaaaaaacagggggggccgtttttttccttaggatttaacttataataaatcctgacgggggttactgcgcccattgatcctcattccattctggtnnatccattttttttttttttncccannttttttggggtttgtccgggggcccccnnncnccctttaatctntacccaaaaaaaaaaaaacaaacaccc

SEQ ID NO: 12482 - DNA, 516 bp, Zea mays
  Clone ID: LIB3061-100-Q1-N6-G10
ggggtggggtttttttttaaaaaatattcgggggaaaaaaatttattattgaactataactcataagcaatctaaaagaggcaccaccaatgatgggttgttggtagaacactgctgggtttgttaaatcaagttggtcaaatgggggtattgttccgggggtaaaagggtgccaacgttaggcgcagtgtgcaggaaaaacggcaacaaatgttgctgtgtcaagaaggcagcagggctcacagcagctagctggctgaatggtagtagttgttgttgttgtacataagcatgagagttcaatgctgccagttggttgaatggaaaaaattgccgggggtaggcagcagctagctggctgaatggtagtagttgttgttgctgcaaataagcagcagagttcaatgcagctagttggttgaatggcagaaactgttgttgctgaaagtaggcagaaaggtttgctagcaccagttgttgtagttgttgtgccctgatgttttgtgccaacaaatg

SEQ ID NO: 12483 - DNA, 143 bp, Zea mays
  unsure (1)..(143): unsure at all n locations; Clone ID: LIB3061-100-Q1-N6-G11
ctcaaaaaaaaattatttggaactataactcataagaaactaaaagaggcaccaccaatgatgggttgttggtagaacgctgctgggtttgtcaaagcaagttggtttattttcatcaattntttctttttggtttgtccggg

SEQ ID NO: 12484 - DNA, 603 bp, Zea mays
  Clone ID: LIB3061-100-Q1-N6-G12
gggggggggtttttttttgcagcaccaaggaagcgccattttttccttaggattaacttagaacaaatcctgacaggagtaacagcatccatcgatccacagtccatgctggttgatgcatgggtctgctggagccgaggatgaacacggggctagaagggacacagagcgaccttgcaatcaaaaacacagatgggcaacaacaaacgagacgaacgaagataaaccctctggactagggtaaacatcacggtagcgaacaggataacttggccgcgcgggccccaccgctcagttcctccagttcccgtcggagttgccgtagccgccgccacggttgccaccgccgtagccgccaccaccaccaccgtagccaccgccgccaccgtagccgccgccgccaccgccgtagccgccgccgccatcacggggcccgccaccgccgtagccgccgcctccacgggcaccaccgtagccgccgccgccgcctccacggccgccgcgggactgggcctcgttgacggtgatgttgcggccgtccagcttcttgccgttcatgccctcgatggcgttccgcatcgcctcctccctgggagaggtgac

SEQ ID NO: 12485 - DNA, 513 bp, Zea mays
  unsure (1)..(513): unsure at all n locations; Clone ID: LIB3061-100-Q1-N6-G2
gggggggggttttctgggaaacccaaactcagataaaaaacttattattgaactataactcataagaaactaaaagaggcaccaccaatgatgggttgttggtagaacactgctgggtttgtcaaagcaagttggttgaatgggggggggggggggggttgtaagagggtgccagcgttaggcgcaacgtgctggtagaacggcaacaactgtggttgtgtcaagaaggtagcagggctcacaccagctagctggctgaatggtagtagttgttgctgctgtaaataagcaggagagttcaatgctgctagttggttgaatggaagaaattgctgggggtaggcagcangtagctggctgaatggtagttgttgttgttgcaaataagaagcagagttcaatgaacctagttggttgaatggaagaaactgctgttgctgagagtaggcagcaaggtttgctaacacaagttgttgtaattggtgtgccctgatgttttgtgccaataaatgc

SEQ ID NO: 12486 - DNA, 429 bp, Zea mays
  unsure (1)..(429): unsure at all n locations; Clone ID: LIB3061-100-Q1-N6-G4
tctcttgtgggggggtttttttttaaaaaaaattttgggggaacaacatgcatatcacagctgcttcattattcagggtcgaacaaacaggctcagctagccccggcgttttattgtcactattgctcggtttctcccccaagggtgctatgtggggggttgcggggggctgaaggccccctccttcctccnatgccacctaacctaacaggtgaggttgggcccggggtcaacgccgagctggcggcagtactgcctgtagtagccgacgcgcgcgttcatttgggcggggttgttcccgccgcactcaagggccccgttgatggccctggtgggggggccgaacccctgcgggaccaccccgggcacgctgttcatccaaaaccagaacgccttcttgaacgccaccacgggagtaccgagccaccc

SEQ ID NO: 12487 - DNA, 99 bp, Zea mays
  unsure (1)..(99): unsure at all n locations; Clone ID: LIB3061-100-Q1-N6-G5
ggaagccacaaacatcanacaaaaactttattattgaactataactcataagaaatgtaaaagagggcaccanccaatgatggggttttttttttttaa

SEQ ID NO: 12488 - DNA, 352 bp, Zea mays
  unsure (1)..(352): unsure at all n locations; Clone ID: LIB3061-100-Q1-N6-G6
gggggttttaatacaaaaaaagtgtggggaggtgagcatatngatacatttttacatttctggggcctttttgccagtatataagtacaacatcagctacaattcttcccgcaacagatcaccttttttttcaccataattttgggggtttgcaggggggtattnttnnntntantattattggccaacaaaaacataaaaaaaacaacagcggtcccatttgcaacaacagtgtacagactagctaaatctaaaaatggaaataaaaaatcaaattaacgaaaaggtgtttactaaatgtttttttgcctgcccttgttttttttgtggaagaaaacagacgaacaaaatg

SEQ ID NO: 12489 - DNA, 536 bp, Zea mays
  unsure (1)..(536): unsure at all n locations; Clone ID: LIB3061-100-Q1-N6-G7
gtgggggggggtttttttaaaaaaaataaatgtggagtcaatatattgattattttctagggaaacacatgtcggtatgagggcaccattgtcgagtacatctcatatgtaatctaaaagatggcaccttcaactatgggttgcttcaagggggttttgctcagggagaactgnttgtatggcaccaattgttgttgctgatgcaagaaggtagcgaccaatgggttagccactgccaatggattaagtaactgttgtcgctgttgtaggtacgcagcagagtttgacacagccagttggttgaatggaagcaactgttgtaagtaggcagcagggtttgccacagctagctgagtcagagctggtacaatttgttgcagcaactgttgttgtaggtacgtaggtgcattgcccaccgcgagcgggctagatgaaagtagttgtaggtagacggcagggttcaccatggctaggtgactgaacacttgcataaactgttgccactgttgttgttgctggtatgcaactactttcgc

SEQ ID NO: 12490 - DNA, 522 bp, Zea mays
  Clone ID: LIB3061-100-Q1-N6-G8
ggggggtgttttttttttttttatttttttgtggttttttttttttttttttccaggaagtagcatcatgggacatcattgattatcaatatcacgagattccagtagctatttcagttgatctaaaaaaaaaaacggttaaaagctgggcctgaagggggacctcaactgaacctaacagctggggcatttccaaaccgcagttcaagtttacagtaatcagggtcaaaacaggctgggaaaaaacagcctaaactaaccagctgccaaccccctatcccattcccaaacatcatgaggaaacacaaatcacatttatgatgtggaacaagcttcaagctttgggaggacgctgcgccatgcatccgcaatgtctttagctagcttagcctgacccttggcaaattcatggaatgcgagtccaatatcagctgtcttttgctcctggaaacgagcaagctcttcattcattagtctaactatgtgtgcaaacttcttaatagcctcctcactggctgcttt

SEQ ID NO: 12491 - DNA, 595 bp, Zea mays
  Clone ID: LIB3061-100-Q1-N6-H12
ggggggggggtttttgctaaacaaccagacgccaggggatcacattttctccatttacgtacagggctccaaagcaaaaccataccaccttatccatttacgtacacactcacacgtcgtcgcaacttgcaatacacacacgacagcttggggatgcggggacgatttgctatgaccggcatacagtcccatgttgtgaagcctaagcttcctctcgtcagaaaggatctttgcaaaccgtgcgagcataccagcataggttagtagggcacggccatctctcggcgtcgtctcgacgcagtcgtcggtcttataatcgtcgtcgcctagtggcttatgcagaaggttctctgcaatcttaaccagccctcgcagattcttctccgtcgagaggtcagctgccacagccgctatgggtatgttgcggtcctgaacacgcagcagttggtccgagcacccgatcgctttgaaaaggtcggcgacgtagctgtccgtcatgtctgagctcgcgtgcatgaacatctgcagcaagggcacggtgttctcccggccgagccatccgaagatgccccacttggcgacacggcacgcgtcg

SEQ ID NO: 12492 - DNA, 520 bp, Zea mays
  Clone ID: LIB3061-100-Q1-N6-H2
gaatagaaaatatagaggtgtaatacttatttactgaaaggaacaccatatcagcttggggaccttattattacgagcataataacatagaaaaatctaagaagatggcaccaccaatggggggccggtgcaataagggggtggggggggggagagcatcttgcctaaatggtaacaaacggtggtgtgtgtgaagaaggcaacactgtttgccacattctgtgggtagaatggaatcaaatgatgttgttgcaggaaggcattaatgtttcccacaactggtgggtaaaatgtcaaccaatgttgttgaataaagaaagcaacaatgtttgccacagcttgcacatagaatggcagaatctatagaatcagtaagaaggcataacggctcgcgacaagtgtgataaatggtagtagattgagtgcctgcaaaaacatagcaaggttcaccccaacttggtgattgaatagaataaactgtagatgctggaggtaaccaagaaggttctcttgaactact

SEQ ID NO: 12493 - DNA, 258 bp, Zea mays
  Clone ID: LIB3061-100-Q1-N6-H4
ggtgggggggggggggttttttataataaaaaatggggggggttatttctgggacgccacaaacatcattcaaaaaacttcattattgaactataactcataagcaatctaaaaaggggaccaccaatatgggttgttgtaaaacattttgggttgtcgggggagtgtttaaatggcagcaattgttgcagttgtaaaagggtgccaggttaggcataacttgcaggtaaaacggaacaactgttgttatgtaaaaag

SEQ ID NO: 12494 - DNA, 377 bp, Zea mays
  unsure (1)..(377): unsure at all n locations; Clone ID: LIB3061-100-Q1-N6-H8
gggggccatttttttccttaggatttaacttanaataaancctgacgggggtaacagcacccatcgatccccantccatgctggttgatgcttttttttttttganccnnatatggggggtcgcggggggctnacacananccaccttcantcaaaaacacaaatgggcaacaacaaacactagacgaacgaagataaacactctggacttgggttaacaacacggtcgcgaacaggataacttgggcgggcgggccccaccgctcagttcctccatttcccgtctgagttgccgtagcctccgtctcggttgccacctctctatccgccttccccaccactctatccgccggcgtccccaccgtagcccccgccac

SEQ ID NO: 12495 - DNA, 404 bp, Zea mays
  Clone ID: LIB3061-100-Q1-N7-A1
cgagataaatctcaatcaatattttgattatttctaggaaacacacgtcggtttgagggccccattatcgagtccatctcatttgtaatctaaaagatggcccctccaacgatgggttgctgcctcgacaagacaggattcatcaaaaaaaactggttgtttggcaacaattgttgctgctgtaggaaggcggcaaccaatgggttagccactaccaatggattaagtaactgttgtccctgttgtaggtccccagcaaagttcgacagagtcagttggttgaatggaagcagctgttgcaagtaggcaacagggtttgccacagttagttgagtcaaagctggtacaatctgttgcaacaattgttgttgcaggttttttttttctttgcccacagggagcgg

SEQ ID NO: 12496 - DNA, 500 bp, Zea mays
  Clone ID: LIB3061-100-Q1-N7-A10
aggaaccccttttgggtttagggcccccttggccagttccttttattttttattttaaaaaatggcccctccaccattgggtggttgcagggcggggtccttaaaagggaccgggtggtttggcaccattggtggtggttgttccgggaaggtaccacccaatgggttaccccctgccattggtttaattacctgtggcccttgttgtgggtccccaccaaatttggccccacccggttggttaattggaaccacttgttgtaagtagccacaaggtttggccccacttggttaattcaaacttggtccatttggttccaccacctgtggttgtaggtccttagttcctttgccaaccgcaaccggcttaaataaaattatttgtaggtgaccggcagggtcaaccttggttagttacctgacccctgccttaaactgtgcaacttgtggttgttcctggtttccacttccttccgccaaaccaggtggtttgattccaa

SEQ ID NO: 12497 - DNA, 499 bp, Zea mays
  Clone ID: LIB3061-100-Q1-N7-A11
atacgaaacttttaccatctccctttatcaataaatactatgccacatcaaattatttaatgttcatgaaactttcataaaaccccattgagatcggtttaaacccaagcactaatgggtgcacagaacataaccccaaagcaaggcatgcggctttgacctgaaaacccatctccagttctggttagctattagtcgattaaactactcgacgtgcagctaccgctttgatttctgtggtttgaaaatgttgtgcttgtagtacttcagttcggcgatgctttctttaatatcatccattgccctgtgggttttttgctttcttggagtttggttcctttctttcgggtaccatcgtatgcataaagccattatactactcacattgacaattacatgaaagaagaccgctgcaagctgtggcatgtacttcttcagaaatagaaaatccacataaacagaattcccagctaataatggagtgcctgaatttatgtgc

SEQ ID NO: 12498 - DNA, 583 bp, Zea mays
  Clone ID: LIB3061-100-Q1-N7-A12
aagcaataacacttcaataacaatattgagctttaacaagcaatccaatcttgggacaattttttctcaaacaaacccttttgagttcaattcagccaggacaactatagttttggatataataatagtacatagatagtacccaacatgggtaactaatttcgccgcacgcctagcacttgatctccttaagaccatgagagaaatagaggaatgtcggattagtggcaccatccttgtaataggcgaataccacagacgcatcatccttcatggactcaccaacaaaaaattggaggtccttcagcttgctaaggagaaacttggttgcaccctcgacaccctttttgaactcatccgctttctctggctccaacacagcagtgagattcttgatgtattttttgatgtaagacacaaatgatttcttgtcaaaaggaggttgctcctgtagacggaatgtgtcaacaatatcaaccaccttcacagctgtgtcatcaacgctttcgtcctcaccaccctcggcggatggattggcaccaatgtccacatcaacaggaccttgggtgacccactttccctc

SEQ ID NO: 12499 - DNA, 633 bp, Zea mays
  unsure (1)..(633): unsure at all n locations; Clone ID: LIB3061-100-Q1-N7-A2
atatcgagataaatctcaatcaatatattgattatttctaggaaacacacgtcggtatgagggcaccattatcgagtacatctcatatgtaatctaaaagatggcacctccaacgatgggttgctgcctcgacaagacaggattcatcaaagagaactggttgtatggcagcaattgttgctgctgtaggaaggcggcgaccaatgggttagccactaccaatggattaagtaactgttgtcgctgttgtaggtacgcagcagagttcgacagagtcagttggttgaatggaagcagctgttgcaagtaggcaacagggtttgccacagctagttgagtcagagctggtacaatctgttgcaacaattgttgttgcaggtatgtaggtgcattgcccacagcgagcgggctagatgaaagcagttgttgttgttgtacgtaggcggcatggttcaccatggctagttgactgagcgttggcagaaactgttgtagctgttgttgttgctggtttgcaactacgttcgccagagcaagtgggttggatgcaagcagctgctcttgcaagtangcggcagggttcaccatggcttagtggctcaagtgctgtaggaactgttgttgctgttgcgt

SEQ ID NO: 12500 - DNA, 630 bp, Zea mays
  Clone ID: LIB3061-100-Q1-N7-A3
ggaaatataacttcttatttctaggaggccacatacatcagccaaaaaacttcattattgaattacaactaataagcaatctaaaagagggcaccgccaatgatgtgttgttggtagaaggctgctgggtttgtcaaagcaagttggacaaagggcagcaactgttgcagttgtaagagggttgcggggttagccacaaactgctggtagaacggaagcacttgttgttgtgtcaagaaggaagcggggcttgttgtagctagctggccaaatggtagtagtatttgctgctggaaataagcagaggggttcagtgcggccaattggttaaatggaagaaattgttgctgctgagagtaggcagtagctagctggctgaatggtagtagttgttgttgctgcaaataagcagcagggttcagtatagacagttggttgaatggaagaaattgttgttgctgagagtagggggaaaggtttgccagagctacttggctgatcactggtagcacgagttgctgcaactgttctgccctgatggtttgtaccaatgactgcaccaaagatagggctggcgattgttgaaagaacagtgtgataaaagtaaagtgcttgttgcgattgcttgct

SEQ ID NO: 12501 - DNA, 430 bp, Zea mays
  Clone ID: LIB3061-100-Q1-N7-A4
ggggggaaacatgtttttttgagtaaaaaggggcccccgggggggggggggggccctttttttgggcccccccaaattttttttttttgaaaggcccccccaacaagggggggttgtaagaatagggggggaattgccttggccctgggggggaacttgaaggggaccgggggttgctctttttttgggggatgggggtccccggcccttggggggtttttttttggggaatttttgctgggcaagcccttgggggcctttttgccggacttttttagggggggctttttgtgggggctctttttttgggggttttctttggggggtatctttgggccttccccctgtagcctgttcaatggtgggccttcccgtgtttttcggggcgggggggttgccccgggatttttgggctgggtcccgggggggt

SEQ ID NO: 12502 - DNA, 622 bp, Zea mays
  Clone ID: LIB3061-100-Q1-N7-A5
ggcgctaacaattactaactatatcatccatttacaaaccaaaccattggtcaaatacataaataaatgtaccaaaatgctagctgggataaaactggctacaatgccattacaacatttcacaggtctacatggcgacgctgggattcttgttcggcgaatgacttgatgatatgaggctgctgctgctgtgcctgcggtagtagagagagcctggagatgatgagccgcgccacgttctctgctgctacagcacccgtctctatggcgctcgcggcgctctcaaaggtgttcacgtagtacagctgcttcccgtccaacactatcggagcaaactcctctggggcttggtagtgcgggtaagcagcccagttgatccggatcgtctctatccgagccctgaagatctgatccagcaaaccatcatccagctttgcccgtgaaaacatcttgtacgccgccatgtcgccttcgctgtacctcttcagaacagagatgcaggagaaagggatatcagggagctctagggtaccaatcagctctggaatatctgatgccgagttcagacccaaaatatcccggttcaatatgcctctcacaaaggtcgcatgtgtgtgctgca

SEQ ID NO: 12503 - DNA, 559 bp, Zea mays
  unsure (1)..(559): unsure at all n locations; Clone ID: LIB3061-100-Q1-N7-A7
cacataaaatcgaatgcgaatcctgaacaaccaagaagtgaagaaaaaaaattcaaacaaacagttactacgctcagcacggctattggcagagcagcaccaagattagtaataagtattgtccgccgctaaacaccggggcgaaatttggctcggctcccggcactccacgtcaccaccaccatctacaaccatctacagctcgtcgtggtcgtcgtcaacaccgccgtcagcgtcaccgccaggggcgccgcccgaccgctggtacacggccgacacgatggggttgcacacggcctccacctccttgagcttctcctcgtagtcctccttctcggccgactggttgtcgtccagccactccagcgcctccttgagggcctcctccaccttctccttctcctccgcctccagcttgtccgcgagcttgtccttgtcgcccaccgtgttcttcatgttgtacacgtacgtctccagctggttgcgggcgtcgatccgctccttcaccttcttgtgctcctncgngaactcctccgncttccgcaccatgcggtcgatc

SEQ ID NO: 12504 - DNA, 620 bp, Zea mays
  Clone ID: LIB3061-100-Q1-N7-A8
agaatctggaaatgtaacttcttatttctggttggccacatacatcatccaaaaaactttattattgaattacaactaataagcaatctaaaagagggcaccaccaatgatgtgttgttggtaggaggccgctgggtctgtcaaagcaagttggacaaagggcaacaattgttgtagttgtaagagggttgcggggttagccgcaaactgctggtagaaaggcagcaactgttgctgtgtcaagaaggaagcacggtttgctgcagctagctggctaaatggtagtagtatttgctgctgcaaataagcagcggggttcagtgcggccaattggttaaatggaagaagttgttgttgctgagagtaggcagtagctagctggctaaatggtaatagttgttgctgcaaataagcagcagggttcagtgtagacagttggttgaatggaagaaattgttgttgctgagagtagggagaaaggtttgccagagctacttggttgatcagaggtagcaccagttgctgcagctgttgtgccctgatggtttgtaccaatgactgcaccaacaataggctggcgattgttgaaacaacacgacgattaaagatgttgcttgctg

SEQ ID NO: 12505 - DNA, 201 bp, Zea mays
  Clone ID: LIB3061-100-Q1-N7-B1
tttttgtttttttattttttttggcaagtgttgatgatatcatatatatagcaggtaacacagggatgagcccacatgatacgagcaagacgcagtagcggacatggtggtgccgaattggtgtaggtattgtggaaggtggagtactccaaacatggggggggcccatgatgatttggtactacaaaacaagtggtacgc

SEQ ID NO: 12506 - DNA, 638 bp, Zea mays
  Clone ID: LIB3061-100-Q1-N7-B10
aggaaacaaacggcacagtgcatatatagcatcacagtagatatgcaaatacacagtaataaaggtaacacaacagatccgagaaacatggaaagaaactaagaaagcatgtctcaacacagcaatcacaggggagcgccacttgttcacagcgcatatatgtcatatactaataaatagatgaaaccgtgccatggggccatcaaaatcaggagcctttcaaaaccacctcaattgacaagaatgcaatatgagagtgtcctgaaataatatttaattaattccgtcgcgacaacccaatgacctacccgagcaaacaggcatcactgttgttgctgttgctgctgtgcagctggttgctgttggtaattgggataaccgccataagcgccataaccatacatgttaggatcctggggttgtgcatacccactgccataagcctcataaccttgtccatagcccccatagtagccaccagcaccagcagccgcaccccattgattggattcctgctgaggctgagcctgcttgttcgacaggcttctaccccatgaaagtcgaacattctgtgcaccaatcaaggccccttgcagcattagcagcgcttgttcagcagaatgtctggttacgaactg

SEQ ID NO: 12507 - DNA, 446 bp, Zea mays
  unsure (1)..(446): unsure at all n locations; Clone ID: LIB3061-100-Q1-N7-B11
ggggggggggggggtgtctaaacaaattttttttttttttttattttttttttttttttttttttttttttttttttttttttttttttttttttttttttttttttttttttttttttttatttgggaacttttttttttttttttttggttttgttttggggganttttttcccccccgggcccccccccccaaggagagggggcccccctttttccccaatctcccccccttatggccccccccggttgtttgccccggggttttcccccccccaattttttttttggggggggcccccccccgcccccgggggggggcctgggtccggggttggtggccccccctttgccgggggggggcgggttttttggccccccaaaccccccccccccgggccctttgggggttttcgtggtgggggggggtgggggcccccccccaa

SEQ ID NO: 12508 - DNA, 323 bp, Zea mays
  Clone ID: LIB3061-100-Q1-N7-B12
cccacccgggggggggggggggggggttttttttttggggggggggggggggggggtttggggggggtccccctttttctttttggggggggttttttggtggggggggtttgtggggttgtgggtgtctggggggtttttgtgttttcttccgtttttgctgtgttttttggtggggggggtttttgggggggggggggggggttttttgggggggggtcttctcctttttggtggggggggtttgggggggttgtgggtgggggcccttttgggcttgggggtttttttgttggcgccctgggtgggggtggggggttttg

SEQ ID NO: 12509 - DNA, 483 bp, Zea mays
  Clone ID: LIB3061-100-Q1-N7-B2
tttttttttttttttttttttttttttttttttttttttttttttttttttggcccaccacaactgtgatttattcttcattactggcggtcttagggcaaaataactttcataatacatttggggacttgaagcacataagaatctagaaaggggctttgttatttctgggaagccacaaacatcagacaaaaaactttattattgaactataactcataagaaatctaaaagagggccccctccaatgatgggttgttggtcgaatgcttctgggtttgtcaaagcaagttggttgaatggcagcaattgttgcagttgtaagagggtgccagcgtttggcgccgcgtgctggtggaacggcgacaactgtgggtgtttcaagaaggtggcagggctcacaccagctggctggctgtatggtgggggttgttggtgctgtgttttagtttttgagttcaatgctgccagttggttgaatgg

SEQ ID NO: 12510 - DNA, 376 bp, Zea mays
  Clone ID: LIB3061-100-Q1-N7-B3
ggaaatataacttcttatttctaggaggccacatacatcagccaaaaaacttcattattgaattacaactaataagcaatctaaaagagggcacccccaatgatgtgttgttggtagaaggctgctgggtttgtcaaagcaagttggacaaagggcagcaactgttgcagttgtaagagggttgcggggttagccacaaactgctggttgaacggaagcacttgttgttgtgtcaagaaggaaatggggcttgttgtagctagctggccaaatggttgtagtatttgctgctggaaataagcagaggggttcagtgcggccaattggttaaatggaagaaattgttgctgcttcgagttggcagtagcttgctgtt

SEQ ID NO: 12511 - DNA, 384 bp, Zea mays
  Clone ID: LIB3061-100-Q1-N7-B4
aattaaagaggccaattggctccaatggttttgggccaaaaaaattgacccatttacgggggaaacgggttatgataaaggaaaaaaaactttaaacttttactcctttaaaaaacaaaagatcgccccccccggaaacaaaatttgcaatggtttttgacctttttaaaaaaccgccccttttaaaaatttggggtcgggggggttttttccaccccccccccatgaggagacattatgttgaaaaacaatttcaccccctttttgggggggaccccccttggaaaaggggccccaacagccaaaaacccttccccaaaaaggggggggggaacgaaacctagcctggaaacccatattatttttacgtttgccacctggggg

SEQ ID NO: 12512 - DNA, 584 bp, Zea mays
  Clone ID: LIB3061-100-Q1-N7-B5
agaaatgtactttcttatttctgggaagccacaaacatcagacaaaaaactttattattgaactataactcataagaaatctaaaagagggcaccaccaatgatgggttgttggtagaatgctgctgggtttgtcaaagggggggggttgaatggcagcaattgttgcagttgtaagagggtgccagcgttaggcgcagcgtgctggtagaacggcaacaactgtggttgtgtcaagaaggtagcagggctcacaccagctagctggctgaatggtagtagttgttgctgctgtaaataagcaggagagttcaatgctgtcagttggttgaatggaagaaattgctgggggtaggcagcagatagctggctgaatggtagttgttgttgttgcaaataagaagcagagttcaatgcagctagttggttgaatggaagaaactgctgttgctgagagtaggcagcaaggtttgctagcacaagttgttgtagttgttgtgccctgatgttttgtgccaataaatgcaccaaaggtaactgctgtaatagggctgatgattgttggaggaacaaggtgataaagta

SEQ ID NO: 12513 - DNA, 481 bp, Zea mays
  Clone ID: LIB3061-100-Q1-N7-B6
ggggggaagccaggttttttttaaccaccaattacttgggccaatcgcttcccaatttttatcaatttaggggggggggggggggaaaactgtttttgggaacccccattgccttccccccgccggctcccccctttttttttaaaaaaaggaaaaaggtccttccccccccctcagtttaaggggtaacccttagggaacccgctcccccaccgggtttttgataatgcctttgcctgccaaaaataaccggccgggccggggtgggaacttttttgcccacaaccgccccggggggcttcaagcccggggctgggtgccttatccccggggggggccggctttggggggccccccatcggcccccttattttttcggcccgggacttggggggcttgggcagcttggcccccaacttgccccaggggggagccccaacccttttattaagggggttgggggggacatacaccttttttt

SEQ ID NO: 12514 - DNA, 300 bp, Zea mays
  unsure (1)..(300): unsure at all n locations; Clone ID: LIB3061-100-Q1-N7-B7
cccgncaggcngacagcacggggcagnngnncacccagcgagcggaggcgggcaancagnncancnnncgncanggaccccncccagagaaacaaggccccgaagggccangannacgccagnngnacggacacgaacncancagggncagccagcagcagcaggggggcggacggaancanggngaacncacgcgccggancgccggngggcacccagnnnnncgggnaacgggcagaggcgnnaaagccnncgcgccgngcgnccgcancccngcagggcncaggccngncgacaann

SEQ ID NO: 12515 - DNA, 623 bp, Zea mays
  unsure (1)..(623): unsure at all n locations; Clone ID: LIB3061-100-Q1-N7-B9
cctgccgcgtcgtagctttttccttaggcggcgccttggggggggggtttttttaagatcaattaaccatttattcagtccttcaatgtaacgcgaacacagcgggttactcggtcccagttcgcaacacacccagggacagacctggttttcgacactcgggagaagggggggggggggcttaagcaaactgaaacggggaacacaagagaagagaaactagggaaaccgtaacaactagccaactgctctccatccagtagcgatgaggagatcgagcaacgcttatggggccatgctgccagttccacagcctgccttggttggtcaccagttcccttgcaccgcatctgagtcttcaggacacccaccccaccctggctatggagctctggttgcacggtcgagttaaccggtcttggcgactccgttggagaggacgggtttctctggtgctgtctgggccacctttgctgcntaggaaacaacaggagcagtgatgccgttctctgcgggagccttcaccggcttcacctctgccgtgacaccatctggttccgacggattgggcttgccatttgcaggttcctgtggtcgttcaccgtgacagaaacgggggtcta

SEQ ID NO: 12516 - DNA, 531 bp, Zea mays
  Clone ID: LIB3061-100-Q1-N7-C1
agaaatgtactttcttatttctgggaagccacaaacatcagataaaaaactttattattgaactataactcataagaaatctaaaagagggcaccaccaatgatgggttgttggtagaacactgctgggtttgtcaaagcaagttggttgaatggcagcaattgttgcagttgtaagagggtgccagcgttaggcgcaacgtgctggtagaacggcaacaactgtggttgtgtcaagaaggtagcagggctcacaccagctagctggctgaatggtagtagttgttgctgctgtaaataagcaggagagttcaatgctgctagttggttgaatggaagaaattgctgggggtaggcagcaggtagctggctgaatggtagttgctgttgttgcaaataagaagcagagtacaatgaacctagttggttgaatggaagaaactgctgtttcttttagtaggcagcaaggtttgctagcacaagttgatgtagttgttgtgccctgatgttttgtgccaataaatgcaccaaa

SEQ ID NO: 12517 - DNA, 477 bp, Zea mays
  unsure (1)..(477): unsure at all n locations; Clone ID: LIB3061-100-Q1-N7-C10
agaaatgtactttcttatttctgggaagccacaaacatcagataaaaaactttattattgaactataactcataagaaatctaaaagagggcaccaccaatgatgggttgttggttgaacactgctgggtttgtgagggggggggggttgaatggcagcaattgttgcagttgtnagagggtgccagcgttaggcgcaacgtgctggtagaacggcaacaactgtggttgtgtcaagaaggtagcagggctcacaccagctagctggctgaatggtcgtngttgttgctgctgtnaataagcgggagagttcaatgctgctcgttggttgaatggaagaaattgctgggggttggccgcaggtggctggctgtatggtggttgttggtgttgctcgttaggtgcagagttcaatgaaccttgttggtcgaatgggggaaactggtgtggctctgcgttggctgcaaagtttgctggc

SEQ ID NO: 12518 - DNA, 484 bp, Zea mays
  Clone ID: LIB3061-100-Q1-N7-C11
caaacaacaaacttattcatgatttgtcatagttctgggtagtacgcacacacaacacaaccggtccatttttaaaccaacactgacacgaacagcagatacttttacaacctccatatggaggggggggggggcgacgcaggcacatcggcagcttaaacgacccatgacttactgaccaccacggagacggagcacaaggtggagggtgctctccttttggatgttgtagtctgctagggtgcggccatcctccagctgtttgccggcgaagatcagacgctgctggtccggggggatgccctccttgtcctggatcttcgccttcacattgtcgatggtgtccgagctctcaacctccagggttttggtttttccagtcagggttttcactaagttctgcgttccacccctgtggcggtttacaaggggaagggtgctttccttctgggtttgttgttcgggagagtgcggccttccttca

SEQ ID NO: 12519 - DNA, 468 bp, Zea mays
  Clone ID: LIB3061-100-Q1-N7-C12
ggtgtggtggtggtttttaaaaaaatttttttttttttttttttttttttttttttttttttttttttttttttttttttttttttttttttttttttttttttttttttttttttttttttttttttttttttttttttttttttttgggggggggggggttttttttttttttttggggggggggggggggtaaaaattaaaaaaaaaacttgggggggggggggggggggggggccaaaaattttttaaaagcccacccaaaaatagttttggggggggggtgttttttttgggggggggggggggcccccccccccctttggggggggttttgtttttttttttttgtccccccccccctggggggggggggtaaagggcccccaccccgaagggggggggggggggcgtccccgtctttttgggggcgccatccttgcgtttttggggggggggtgggggggg

SEQ ID NO: 12520 - DNA, 444 bp, Zea mays
  Clone ID: LIB3061-100-Q1-N7-C4
gcctcaggggttggtggccgcaaacgggggattcaagaaaaataacaagcccccctgtttggcggggcccgagaccgggggaggattgtttaaaaaacccaaaaagggcccctaaaaacttttttggggagaaaaaccagcccggggccctcaaaccccccaaaagggccttaaaaaaaccacattggtacaaaaacccccccaacccaattttttgggaaaaacccttggggcaaaacccaacccccccgggggggggaaaaacaacccccaaaatttatgttttataaggggaccgccccccccatgctggggggtcgagggccccccgggcccattcaatatccaaagaaggggatcccctgggcccacagggacgggcccaaaaaaaaaacaattgggtccgcccccaaaaagcctgcagctttggtaaaaacccccctg

SEQ ID NO: 12521 - DNA, 607 bp, Zea mays
  Clone ID: LIB3061-100-Q1-N7-C6
cattaaaaccaaaactttattatgaccatgcatatattattggtcataccacacatgataatgtgtgtcgtcttactgcattattacatatatagatagagagagatggatagaggagatttcccaaatatcatgaatcagtagtagggcggaatggcagcggagacgccacaggggttggtgcggtagctgggcagctggtactggtagagtccacccatggccggcatgttctgcgccatcatcatggccatggggttgagaccctgggctgccagcagctgctgctgctgctgcatcagagctggctcgtacaggctgctgctggcggcagcggcacgctcaagctgcatcatcatctgcagctgctgcgcgacggactgcacgtccatcatcctcatctgctgctggcagcactgttgccggagcggctggaacatggcgctcggctgcccacacccggcgtagtagggcgccgccgccagcgggctgcactgcggctgcctcaggtactccgcgtaggggtacagcccgccggcgcccatcatcgtcgtcaggccggcgccagcgccgtacaagccctgcagccccgcgcaggggcagggca

SEQ ID NO: 12522 - DNA, 573 bp, Zea mays
  Clone ID: LIB3061-100-Q1-N7-C7
catccaaaaaacttcatttttgaactttaactcataagcaatctaaaagagggccccaccaatgatgggttgttggtagaacactgttgggtttgtcaaagcaagttggttgaatggcagcaattgttgcagttgtaagagggtgccagcgttaggcatagcgtgcaggtagaacggcaacaactgttgttgtgtcaagaaggcagcagggctcacatcagctagctggctgaatggtagtagttgttgctgctgtaaataagcagcaaagttcaatgctgctagttggttgaatggaaaaaattgctgggggtaggcagcaactagctggctgaatggtaattgttgttgcaaataagcagcagagttcaatgcagccagttggttgaatggaaaaaactgatgttgctgaaagtatgcagcaaggtttgctagcacaagttgttgtagttgttgtgccctgatgttttgtgccaccaaatggaccaaaggtaactgctgtaatagggctgacggttgttggaggaacagggtgataatggtaagatgcctgttgcgattgcctgttggatc

SEQ ID NO: 12523 - DNA, 529 bp, Zea mays
  Clone ID: LIB3061-100-Q1-N7-C8
ccaggtaagcaagttccaataccagtggcgtaaaaattttactaaatccccagcaggggcgacaaatacaaaatcattttattccccaattcgctccctacagcgatcggggaacaatgctaccagttccggcaaattttggtgggtgtagctttacatggcgtccttggaaagccagttgtgggtcgagattccccgagcattggtgagctcataaacgccgtttccccgctcgaacacagcagcagcacccatcccagaacctatgcacatagaaatcactccgaaccggcaatccttgccggggcgcttcatttcattgagaagagtactgacgcaccgtgcacctgtagcacccaaaggatgtccaagagccattgcaccgccattaacattgactttagcaggatcaagttccaacttcttgcagcagtagacatactgagatgcaaaagcctcgttgatttcgaaaagatcgatatcatccatctgaaggccagcagctttcactgctgcagggattgcaacg

SEQ ID NO: 12524 - DNA, 513 bp, Zea mays
  Clone ID: LIB3061-100-Q1-N7-D1
gcagaaattatcaatacattggactagagctcaatcgcttttagaaaacagtgtactaatcaggactgaaaacatggcataacgctctgaacttgagacgactaaccaaaaaagtgtactcatcaggacacacatttcggtgcaagacaatccatgagaatgctctaagctacagcgctcttgcccttcttcctctgtagcttcttcatgtagaactcaagctctttaccctcaaggatgtacccatcagctcggccacactgtccagggcgggaagaaatgcatgccagcaaccgtccactgccaaattgctcctcaatgtgtgggtcaagggtacgtccctccttgcgcttctcaagcttcctcgtgacatggttgctctttttcgtttcctcagctgctgcctcaacctcttgtccctcagcattatccttttttgcagcaggggttctcttattcctaccaatgtcaactccatattgagtgaggtaccactgcttgaatggggcagta

SEQ ID NO: 12525 - DNA, 482 bp, Zea mays
  Clone ID: LIB3061-100-Q1-N7-D11
gtacatgcaacgatgtatccaaaccattaactgtccaattcagtgacagtggtgcacacactgcatgttccaggccagcacccgcccatgggagtacaaaaagaatgtgcacaatctgctgtgagttgacatttctgtacaggactgggacgggcgctcccattcagacggtagggaatgtgcacatgtaatgaatatagatacaaccttcacccttacctactaacttaaaaagtgagaaacagataatactaacatggcatcttcagcgacaccagtctgtatagttgccaccaatattcgtcattatccttttgaagggaggtgctggcattatattatattagaaagagactgctgccgcccaagcactcgagttcagtcattggcccactttcattcccatgattctatgtcacctggtcctttccatttcgaggggggtcggggttatcttggcccttatcaccaacattttttga

SEQ ID NO: 12526 - DNA, 526 bp, Zea mays
  Clone ID: LIB3061-100-Q1-N7-D3
ctagaaatgtcctttcttatttctgggaagccacaaacatcagacaaaaaactttatttttgaactttaactcataagaaatctaaaagagggcccccccaatgatgggttgttggtagaaccctgctgggtttgtcaaagcaagttggttgaatggcagcaattgttgcagttgtaagagggtgccagcgttaggcccagcgtgctggtagaacggcaacaactgtggttgtttcaaaaaggtagcagggctcacaccagctagctggctgaatggtagtagttgttgctgctgtaaataagcaggagagttcaatgctgccagttggttgaatggaaaaaattgctgggggtaggcagcaggtagctggctgaatggtagttgttgttgttgcaaataaaaagcagagttcaatgcacctagttggttgaatggaaaaaactgctgttgctgagagtaggcagcaaggtttgctagcacaagttgttgtagttgttgtgccctgatgttttgtgccaataaatg

SEQ ID NO: 12527 - DNA, 434 bp, Zea mays
  Clone ID: LIB3061-100-Q1-N7-D4
accgcagtgccgaaaagaatctgtatctatttatgtttttattccctaaacacaagctaacaaactctaccgtaaaatacaagtgtatgtatcgttgtgtcccatatctgtacaattgtcattactagcccccgaagacccaagccgttttcatcaccaccagtagtcagttccctgaggcagccgctccattgcattctgaagcctcttccacgagccaaatttacacaccttaccgaagtttgtcctcagcgtgtaatcaaaattcgacaaaaatcagctcaacaaatgaatcaacacagcctgaaatttagaattgacaaaataactgtgtgaagctgttgttagctgatgtcacttgcaggccttgaacccaactgtgggggcagttttttaaaaagctcaccttctcttgctgtgtggatatcagatgg

SEQ ID NO: 12528 - DNA, 409 bp, Zea mays
  Clone ID: LIB3061-100-Q1-N7-D5
cagcaaaaaaaactttattattgaactataactcataagcaatctaaaagagggcaccaccaatgatgggttgttggtagaacactgctgggtttgtcaaagcaagttggtcgaatggcagcaattgttgcagttgtaagagggtgccaacgttaggcgcagtgtgcaggtagaacggcaacaaatgttgctgtgtcaagaaggcagcagggctcacagcagctagctggctgaatggtagtagttgttgttgttgtacataagcatgagagttcaatgctgccagttggttgaatggaagaaattgccgggggtaggcagcagctagctggctgaatggtagtagttgttgttgctgcaaataagcagcagagtgcaatgcacgctagagggatgaatggcaggaact

SEQ ID NO: 12529 - DNA, 262 bp, Zea mays
  Clone ID: LIB3061-100-Q1-N7-D6
attactgggaagttgcacattttagtttgagaactttatttttacagtttaaagcataaaaaaatctagaagatgggacccccaatgggggggtggtgcaataaggggggaggattcgtcaaagcaaggtggttaaatggcagcaattgttgttgttgtaagaaggggacattgtttgccacatcctgtgggtagaatgggagcaactgttgctgttgcaagaaggggttaatgtttcccacaacctgggggtaaaatggca

SEQ ID NO: 12530 - DNA, 428 bp, Zea mays
  Clone ID: LIB3061-100-Q1-N7-D7
gttccccccctttggttccgggccttttttttcccgggggaggcgcccccctcctttgtcttcacccccttttccttttccccccccactggggggggggggggggggcccgggggtcttgggggttccctttgggggggggggttccaagcttgtccctccgttcgtgacccggggaaccttttgtgggccttgggccccccttccgggggcggggggcctcgggggagggccgtgggcctggccccccccgggggggggcccccacgggggggtccccggggggggggggcctgggcgggccccccttgggggggggggcttttgggccccgggttctgggggccccccttttggtgcccgggggctgggaggggccccttgtttaagggccctgttgaggggggcccgccgggccgtgccctccc

SEQ ID NO: 12531 - DNA, 332 bp, Zea mays
  Clone ID: LIB3061-100-Q1-N7-D8
ttgtttttttttttttaaaaaaattttttttttttttttttttttttttttttttttttcttttttttttttttttttttttcccccccagcccccccaccccccgagcggggccgcccgagggggggcccccccgggggggggggggggggggggcaaggcggggggggcgggggccgggcgggggggaggggcaaagggggggggggggggggggggaaagggggggggggggggggggggggggcgggccggggggggggggcgggcccacacaaagggcccgccccccgccccagggggggccctcggggaggccacgcccccccccc

SEQ ID NO: 12532 - DNA, 172 bp, Zea mays
  Clone ID: LIB3061-100-Q1-N7-E1
gccgcgcccaggagccccctttttttctttggttttacttggaacaaattctggccggggttacagtcttcttctttccacatttcatgctggttggtgcttgggtctgctggggccgtgggtgaacacactttttacatctgtcccggggcgacctttggttttaaaacac

SEQ ID NO: 12533 - DNA, 566 bp, Zea mays
  Clone ID: LIB3061-100-Q1-N7-E10
aattccttcttcgctttcctttcttcctttttttttatcacaaacaagttaaagaacacggctctctttgatcctctgtattgaagctactagtttgctacgaaaattgaaaagcatcatatagacatgtatgcttgcgacctttaggtacatatgaatgcaacctcaataataccaaacgaatcgcctcaccaatcaccaccaccacaggagcaaccagccaaacatttcttgcagcactctgggcgacctggaacgataatcccggaatgcagcaaatggctgcttacgcgatacgaaggaagccgtcctatccaatgctttgttctttaacaaattcaccccattctaaatttgtccagctacgccagcacgagcctgcagtgtctcggtacgtttgcttttttccatttgttccaccagccagtctatgccagatttgatccccctgccatcatatgcagatacagcctgaaagtatatggcctctcatccagttctttatgcagaaatttagccaattcttcctcatcaatggctccaggtaaatcctgtttgtttgcaac

SEQ ID NO: 12534 - DNA, 101 bp, Zea mays
  unsure (1)..(101): unsure at all n locations; Clone ID: LIB3061-100-Q1-N7-E11
tttggtttttttacttnnnaaatttggatgtggagggtgtgtttgggggnttggttnttgtggcgctggcgcccgtggggttgcgtggctcgtgtttgctc

SEQ ID NO: 12535 - DNA, 436 bp, Zea mays
  Clone ID: LIB3061-100-Q1-N7-E2
tttttttttttttttttttttttttttttttttttttttttttttttttttttttttttttttttttttttttttttttttttttttttttttttttttttttttttttttttttttttttttttttggggggaaaaccccccccccacaaaagggggggggggggggtaaatggggcccccccaaaaaaggggggggggccccaaaaaaaagggggaccccgggggaaacccccaaaagaaaaaaaaattcccccctttcccccgggggggggggggccccccgggtttttaaaaaccggcggggggggttttgggggtccccccaagcccccccccccccccccgggggggggggggggggcccccggttttgcgggcggggccccgggggggccccccgccccccgttgggggggggggtcgaagcggtgggc

SEQ ID NO: 12536 - DNA, 235 bp, Zea mays
  Clone ID: LIB3061-100-Q1-N7-E3
cgctcaaagcagcacagtatggtaattaaactgatcaatttacagcatgatgtatccccaaatccaggcccccaatgtcgattcaacatgtaactaacatttgctgctacaacattctaccctacaacattgaaggacacaaaagagcaaaaagaaagaaaaaatgccttggatgacacttttattgctccgatgatctccaacagactgatctgcacatcacgcgtgtgaccag

SEQ ID NO: 12537 - DNA, 571 bp, Zea mays
  Clone ID: LIB3061-100-Q1-N7-E4
gcgacatcgaaccacttcttttatacaaaagcacgcagcagagagctaaatggaacacagcgtcatcatcatggtccgtaaccatcgtcccatcacgcatctagtacaacgccgctaccataccataccaccatctttaactggcccccggattcacgcttccttattttcagttcagttcggaaggtgatccaaatccagagtcaccaccggcaaagacgagctcgcgcgcgcgcgcacacacacacacactactggccctctgccagcggctcggcctctggcgccgacgaaaacaccttggcgatgcgttcggtggggatggcggggaggtacttggcccccgcgtagccgtgctccgcggcggctgcgaccgccctgttgtacttgtcggcccagtgcgcggcggtgggcacgacgatctccgcgacgtgcgggaacaccggcaggccgttcagcgagcgccaggcggagacggccaggtgctccgccgcgggctcgtaccgcacgtagaggtgcttggccacgggctccacgcggccgtacacgtcccgcgccaccggctccgtca

SEQ ID NO: 12538 - DNA, 320 bp, Zea mays
  Clone ID: LIB3061-100-Q1-N7-E5
cgagataaatctcaaccaatatattgattatttctaggaaacacatgccggtatgggggcaccattatcgagtacatctgatatgtaatttaaattatggcccctccaactatggggggctgcctggacaagacaggattcatcaaagagaaccggttggatggcacaaattgttgcttctctaggaaggcagccaccaatgggttatgccctgccaatggattaagaaactttaggcctttttgcaggtccccaacatagttctacatatctagttggttgaatggaagcacgttctccatgttggctacaaggtttgc

SEQ ID NO: 12539 - DNA, 575 bp, Zea mays
  unsure (1)..(575): unsure at all n locations; Clone ID: LIB3061-100-Q1-N7-E7
cgtgaaactatatatttaaatagcacaatcactagtacatcgaggacgattagcacgcgcgcgcgacggctagcttatattagagcgcgtcatcagcctagcagtttattttttataaatgcatacatgcagacatggatggcatcatctctggtgcttgtgcttgtgctgactgactgactggctggctgggctctatgactgatgaggtcgacggatgtgtcatatatatatctgatctcatcatggcctgaagaaagccgggtgggggcgtccggtgccctggaaggaggtgttcttgaggtgctccggagcttcctcgaacgagtggcgcctcgccagcgacaggatcttcttgtcggcggcgatgaagtaggccatcccggccaccgtggagacgatgagcgcctggccggtgggngttgatgttggccttggcccacggcagcatccgcacgctcgcgagggtgggaatcgcggaggcgatagtcgccactgctgccgccttagctccggcaagagtcgcctctgcagacacacacacacacacatacatacatagcgttagtcatttc

SEQ ID NO: 12540 - DNA, 297 bp, Zea mays
  Clone ID: LIB3061-100-Q1-N7-E9
ggggggggggggccgtggggggggggagcttttttttttttttaaatctttctggggggggggggggggggtcccacggggggggggggggggggggggggggggggggggggggggggggggggggggggggggggggggggggcgggggggggggggggggggggggggtggggcgtttgggggggggggggggggtcgggggggggtccgccccgggcgggggggggggcgcggggctcctgtgtgaagggggggtggggggtggcgcgcgttggtgggggtggggggggggcg

SEQ ID NO: 12541 - DNA, 460 bp, Zea mays
  Clone ID: LIB3061-100-Q1-N7-F1
aaaaaggggggggctttttggggaaaaccccggggggggggaaaaggggggggggaaaaaaattttttaaaaaaaaaaacccaaaaatggaaggggggggggggggtttttttgggggggggggggggaaaaacccccaaaaggggggggggtttggggctttgtaaaaaacaccccccccctttgagggaagggggggaaacaaaaaaaaaaaaagggggggggggggtgccccccccgggtttggggcaaaaaacccgtggaacaatggggggggaaaagttggggggtaaaccaccccaaaaaaaaaaaaaaaatggggggcaaaccccgtccgtcggcgggggggttcaaaaggggtggggaaaaaaagttcaaaaaaggggccgccgtggtctaagaaaaaaaacacaactttttaaactaggcccccctgcttaggaataaaaccccccccctg

SEQ ID NO: 12542 - DNA, 436 bp, Zea mays
  Clone ID: LIB3061-100-Q1-N7-F11
cgagataaatctcaatcaatatattgattatttctaggaaacacatgccgctatgagggcaccattatcgagtacatctcatatgtaatctaaaagaggcacctccaacgatgggttgctgccacaacaaggcagggttcatcaaagagaactggttgtatggcagcaattgttgctgctgtaggaaggcaacgaccaatgggttagccaccgctagtggattaagtaactgttgccgctgttgtaggtacccagcagagttcgacacagtcagttggttgaatggaagcagctgttgcaagtaggcagcagggtttgccacagctagctgagtcagagctggtacaatctgttgcaccaactgttgttgcaggtatgttggtgcattaaccacagcgagagggctagatgaaattagttgttgctgttgcaggta

SEQ ID NO: 12543 - DNA, 365 bp, Zea mays
  Clone ID: LIB3061-100-Q1-N7-F12
gggtgggtttttttttttttttttttttttttttttttttttttttttttttttttttgggccaaaccttttaatgtgtggggcttttttggttaacaccgtttttggggtttaacgggtggggggacacaatttttcaattgccaaccccggggaggggattgctgctgcctgggttattttgggggtttgggtgggccaagccgcacattggtggggggttttgtgctgctttcaagattgccccccgactttgggtggcttggtgggttccccattactcacatgggtgttgttgttgctcctcctgggttttgggttggaccttgttggcttttggttggggtttgttttgggggccaatt

SEQ ID NO: 12544 - DNA, 568 bp, Zea mays
  unsure (1)..(568): unsure at all n locations; Clone ID: LIB3061-100-Q1-N7-F2
ccaatcatcttttttccttatatattattcctttccatttcaatggttcattcaggtcattgctcactactgccacccatggtgatgggtgacactacgttactcatcgccgctaaatgagtaaactagcgagctaggtggctggtcagcggctccattacattattactacagtacatagtttcctcagtagtagacaccgccggcagctgcgttgcaagggcagggacctggctgctgcagctgcaggccgcacatcgccgtcagctgctgcgctacctgggccgccatcagcgccgcgagctcgccctgcggctgctgctgcaggaaggactgcaggaccacaccgtatgtcgcctggtaccggtgcagcggctccacctgcctgatctggtggcagcactgctgctgcagcgcctggcactgtggcgagccgttgggcgtctccgtctggctgcactggtgcctcaggaactcggcgcactggcccaggaactggctgccgaccctgccngcgccgtaggatccgaactgctggcaccggcttagctgcggtggttgagtgggg

SEQ ID NO: 12545 - DNA, 426 bp, Zea mays
  Clone ID: LIB3061-100-Q1-N7-F3
aattccaacccaattttttttttttttttggaaaaaaaaccccggttggggggcccctttttggggcccttttatttttaaattaaaaaaagggccccccaaacaagggggggttcccccccaagaaagggttttttaaaaaaaacccggttttttggaaaaatttttttttttttgggaagggggccccccaaggggttgcccccccccaagggttaaaaaacctttggcccttttggggggcccccacaaaattccacattattttttgggttaaaggaaacccctttttcaagggggcaaaaaggtttgcccccccttgcttggtttgaggtgggccaaatttttggaaaaaattttttttcggggtttttggggccttggccccaacgagggggcttaataaaaaaaaattttttttttttt

SEQ ID NO: 12546 - DNA, 513 bp, Zea mays
  Clone ID: LIB3061-100-Q1-N7-F4
cagacaaaaaactttattattgaactataactcataagaaatctaaaagagggcaccaccaatgatgggttgttggtagaacactgctaggtttgtcaaagcaagttggttgaatggcagcaattgttgcagttgtaagagggtgccagcgttaggcgcagcgtgctggtagaacggcaacaactgtggttgtgtcaagaaggtagcagggattcacaccagctagctggctgaatggtagtagttgttgctgctgtaaataagcaggagagttcaatgctgccagttggttgaatggaagaaattgttgggggtaggcaacaggtagctggctgaatggtagttgttgttgttgcaaataagaagcagagttcaatgcagctagttggttgaatggaagaaactgctgttgctgagagtaggcagcaaggtttgctagcacaagttgttgtagttgttgtgccctgatgttttgtgccaataaatgcaccaaaggtaactgctgtaataggg

SEQ ID NO: 12547 - DNA, 501 bp, Zea mays
  Clone ID: LIB3061-100-Q1-N7-F6
ggaaatataacttcttatttctaggagccacatcatcagccaaaaaacttattattgaattacaactaataagcaatctaaaagaggcaccgccaatgatgtgttgttggtagaaggctgctgggtttgtcaaagcaagttggacaaagggcagcaactgttgcagttgtaagagggttgcggggttagccacaaactgctggtagaacggaagcacttgttgttgtgtcaagaaggaagcggggcttgttgtagctagctggccaaatggtagtagtatttgctgctggaaataagcagaggggttcagtgcggccaattggttaaatggaagaaattgttgctgctgagagtaggcagtagctagctggctgaatggtagtagttgttgttgctgcaaataagcagcagggttcagtatagacagttggttgaatggaagaaattgttgttgctgagagttgggggaaaggtttgccagagcttcttggctggtcactg

SEQ ID NO: 12548 - DNA, 164 bp, Zea mays
  Clone ID: LIB3061-100-Q1-N7-F8
aaaaataatattttttttttttttttttttttttttttttttttgtttttttggggtgtttggtggtggttgttgggtgccgggggagcggggctccttgcgggggggttttttttttttttgcagcccttggggggggggggggggccccccgccgccggggg

SEQ ID NO: 12549 - DNA, 445 bp, Zea mays
  Clone ID: LIB3061-100-Q1-N7-G10
cagcaaaaaaaactttattattgaactataactcataagcaatctaaaagagggcaccaccaatgatgggttgttggtagaacactgctgggtttgtcaaagcaagttggtcgaatggcagcaattggggcggttgtaagagggtgccaacgttaggcgccgtgtgcaggtagaacggcaacaaatgttgctgtgtcaagaaggcagcagggctcacagcagctagctggctgaatggtagtagttgttgttgttgtccataagcttgagagttcaatgctgcccgttggttgaatggaagaaattgccgggggttggcagcagcttgctggctgaatggttgtcgttgttgttgctgccaattagccgccgggttcaatgcagctcgttggttgaatggcagaaactgttgttgtctgggagtcggccgctttttttgtttgcc

SEQ ID NO: 12550 - DNA, 131 bp, Zea mays
  Clone ID: LIB3061-100-Q1-N7-G11
ctcagacaaaaaactttattattgaactataactcataagaaatctaaaagagggcaccaccaatgatgggttgttggtagaacgctgctgggtttgtcaaagcaagttggttgaatggcagcaattgttg

SEQ ID NO: 12551 - DNA, 534 bp, Zea mays
  Clone ID: LIB3061-100-Q1-N7-G12
gcagcaccaagaagcaccattttttccttaggattaacttagaacaaatcctgacaggagtaacagcatccatcgatccacagtccatgctggttgatgcatgggtctgctggagccgaggatgaacacagcactaacaactgacacagagcgaccttgcaatcaaaaacacagatgggcaacaacaaacgagacgaacgaagataaaccctctggactagggtaaacatcacggttgcgaacaggataacttggccgcgcgggccccaccgctcagttcctccagttcccgtcggagttgccgtagccgccgccacggttgccaccgtcgtagccgccaccaccaccaccgtagccaccgtcgtcaccgtagccgccgccgtcaccgtcgtagccgtcgtcgccatcacggcgcccgccaccgccgtagccgtcgccttcacggccaccaccgtagccgccgtcgtcgtcttcacggtcggcgtgggactgggcctcgttgacggtgatgttgcgggcggccagctccttgcc

SEQ ID NO: 12552 - DNA, 422 bp, Zea mays
  Clone ID: LIB3061-100-Q1-N7-G2
ctgggaagccacaaacatcagataaaaaactttattattgaactataactcataagaaatctaaaagagggcaccaccaatgatgggttgttggtagaacactgctgggtttgtcaaagcaagttggttgaatggcagcaattgttgcagttgtaagagggtgccagcgttaggcgcaacgtgctggtagaacggcaacaactgtggttgtgtcaagaaggtagcagggctcacaccagctagctggctgaatggtagtagttgttgctgctgtaaataagcaggagagttcaatgctgctagttggttgaatggaagaaattgctgggggtaggcagcaggtagctggctgaatggtagttgttgttgttgcaaataagaagcagagttcaatgaacctagttggttgaaatggaaagaaa

SEQ ID NO: 12553 - DNA, 380 bp, Zea mays
  unsure (1)..(380): unsure at all n locations; Clone ID: LIB3061-100-Q1-N7-G3
ggtgggggggttttggaacaatacttttttcttttcatttcaattgttcattcaggtcattggtcacactgacactgccacccatggtgatgcgtgacacattattactcaatcatcgccgctaaatgacttaactagctagcttgccggggggtgtgggggcagcacatagtttcttcagggggggacaccgccggcagcagcgtaggggcatggagtcggctgctgcaggccgcacatcgccgtcagttgctgcgctatctgcgccggcgacagccccgcgacctggccggtttgcggctgctgctgccgggtgggctgtggggccnagccgcgggtcggctggtgccggggctgcgggtgcgcctgcctgggctggt

SEQ ID NO: 12554 - DNA, 300 bp, Zea mays
  Clone ID: LIB3061-100-Q1-N7-G4
cgaaacaacatgcatttcacagctgcttcattattcaggtcgaacaaacaggctcagctagccccggcgttttattgtcactattgctcggtttcgcccgcgagggtgcgatgcgacgccggggacggggcctgaaggcccccgccgtccgccgatgccgcctagcctagcaggggaggttgggcccggggtcgaccccgagctggcggcagtcctgcctgtagtagccgacgcgcgcgttcatctgggcggggttgttcccgccgcactcgagggcgccgttgatggccctggtggggg

SEQ ID NO: 12555 - DNA, 480 bp, Zea mays
  Clone ID: LIB3061-100-Q1-N7-G5
ctagaaatgtactttcttatttctgggaagccacaaacatcagacaaaagactttattattgaactataactcataagaaatctaaaagagggcaccaccaatgatgggttgttggttgaatgctgctgggtttgtggaggggggggggttgaatggcagcaattgttgcagttgtaagagggtgccagcgttaggcgcagcgtgctggtagaacggcaacaactgtggttgtgtcaagaaggtagcagggctcacaccagctggctggctgaatggtagtagttgttgctgctgtaaatactcgggagagttcaatgctgtcagctggttgaatggaagaaattgctgggggtaggcagcggatagctggctgaatggtaggtgcggtttttgccactttgattctgtgttccctcgctctcgcttgttggttgggggaacctgcttttgctgcttcgttgctgcatgggtcgcttgcc

SEQ ID NO: 12556 - DNA, 521 bp, Zea mays
  Clone ID: LIB3061-100-Q1-N7-G6
aatccaaaatagggtttaagatgtcagcatatcgatacatttttacatttctggggcctttttgccagtatataagtacaacatcagctacaattcttcccgcaacagagcaccataatgtgcaccatgattcgccattggggagcctggtatagttgggtgtagtattattggccaccacaagcatcgaccaacaacagcggacccatttccaacaacagtgtacagactagctaaatctaaaaatggaaataaaaaatcaaattaacgaaaaggtgtttcctaaatgttttcttgcctccccttgtttctcttctagaagaaaacagacgaacaaaatgccaccaagccccggcgttcctgttgaagctacccacctatcataaagagtcaattactccttcaactcacctaatacaaaattaccatcttgttccagcactgcactgaaatatattttgtgacaactcgactagccgacattgactgcactggatgagcatagctttcagcaaggcatg

SEQ ID NO: 12557 - DNA, 507 bp, Zea mays
  Clone ID: LIB3061-100-Q1-N7-G7
atcgagataaatctcaatcaatatattgattatttctaggaaacacatgtcggtatgagggcaccattgtcgagtacatctcatatgtaatctaaaagatggcacctccaacgatgggttgctgcaaggcagggttcatcaaagagaactggttgtatggcagcaattgttgttgctgctgcaggaaggtagcgaccaatgggttagccactgccaatggattaagtaactgttgtcgctgttgtaggtacccagcagagtttgacacagccagttggttgaatggaagcaactgttgtaagtaggcagcagggtttgccacagctagctgagtcagagctggtacaatttgttgcagcaactgttgttgtaggtacctcggtgcattgtccaccccgaggcggctctatgaaagtagttgttggtggacggcagggtgcaccatcggttgttgactgatcacccgcgtaaacaactgcagctgctggtgttgctggtgttcagcta

SEQ ID NO: 12558 - DNA, 169 bp, Zea mays
  Clone ID: LIB3061-100-Q1-N7-G8
acaccctccttcttttttttttaaaaaaaaaaattgtgttttttttgtgtgttgttacaggaatatgcggggtggcgcgcgactgtttttttttttagacgggcgtgaccggcgcagaaagaaaaaacagattttttttttttttaaaaatttttttactggggggggg

SEQ ID NO: 12559 - DNA, 186 bp, Zea mays
  unsure (1)..(186): unsure at all n locations; Clone ID: LIB3061-100-Q1-N7-G9
gattcattaaaaccaaaactttattatgaccatgcatatattattggtcataccacacatgataatgtgtgtcgtcttactgctttgttacatttatagatngagagaggtggattgtggtgttttcccatttttcgtgggggggggggtgggcggtttggctgcggggacgcctcaggggttggt

SEQ ID NO: 12560 - DNA, 90 bp, Zea mays
  Clone ID: LIB3061-100-Q1-N7-H1
gcagctccaagaagcccctattttttccttaggattaacttagcacaaatcctggccggggtcacagcctccatcggtccacagtccatg

SEQ ID NO: 12561 - DNA, 73 bp, Zea mays
  Clone ID: LIB3061-100-Q1-N7-H2
aaaaacgatctcttatactgattttctgtggggttttcccttttgtcttactgacctagttttttttgtttgt

SEQ ID NO: 12562 - DNA, 646 bp, Zea mays
  unsure (1)..(646): unsure at all n locations; Clone ID: LIB3061-100-Q1-N7-H3
aaaaaaaagaaggccggggggggggggggggggagggggggggggaggaaaggaaaggaagaagggggggggggggagggggagggggggagaggggggggggaggggggaggggggggggggggaggggaggggggggagggggggggggggggggaggggggggggggggggggggggggggggggaggggggggagggggggggggggaggggaggagagggggggggggggggggggtggggggggggggggggggggggagcaaggaggagaggggggggagagggaggggggggggcggagggggggggaggggaggaggggggggggaggaaaggggagggggggggcaggggggggggaggggggggggggggggggggaggggggggggggaggggggggaagagaggaggggagagcggggggaggggggggggaagggagggggggcaggggggaggaggggaggggagggaggcgggaggggagggggggagggggggggggagagggggggagagggcggaggggaggggagggagggggaaagaggggggggcggggggggggggggggggggggaggggagggggggggggaagggnggtagagtgggggcaggggggggggtgggagggg

SEQ ID NO: 12563 - DNA, 238 bp, Zea mays
  Clone ID: LIB3061-100-Q1-N7-H4
gggggtggggtttttttttaaaaaaaaggccgtggtctttgttggggcgctctcgctcttatgccttctacttgggggctcccccattgctgggtggttggttgaacactggtcggtttgtcgaagcgttttttttgtatggctttttttgtggggggggggggggggtgcccgcgttgggcgcggcgggctggtggaacggcaacaactgcggttgtgtcgtgacggtggctgggct

SEQ ID NO: 12564 - DNA, 409 bp, Zea mays
  Clone ID: LIB3061-100-Q1-N7-H7
aaagcttgttactcccaatcttaggaaaagtaattttcgaacacccttggggaccaatttcacattaaaatctggaaatgtaacttcttatttttggttggccacatacatcatgcgagagactttatttttgaattacaactaataagcaatctaaaagagggcaccaccaatgatgtgttgttggttggaggccgctcggtctgtcaaagcaagttggccaaagggcaacatttgttgttgttgttagagggttgcggggtttgctcgtttctgttggttgtagggccgctactgttgctgtgtcttgttgggagctccgtttgctgccccttgctggctttctgggtgtggtctttgctgttgcgttttcgctttgtgggttttgtgccgcctcttgcgtttttgg

SEQ ID NO: 12565 - DNA, 492 bp, Zea mays
  Clone ID: LIB3061-102-Q1-K6-A1
attttgagcattcagaaacaacctagcgaagcgcactagcaacgacctaacaacaatggctaccaagatattatccctctttgcgcttcttgccctttttgtgagcgcaacaaatgcgttcattattccacaatgctcacttgctcctagtgccattattccacagttcctccctccagttacttcaatgggcttcgaacacccagctgtgcaagcctacaggctacaacaagcgcttgcggcgagcgtcttacaacaaccaattgcccaattacaacaacaatccttggcacatctaaccatacaaaccatcgcaacggcaacagcaacaacaatttctaccagcactgagccaactagctggggtgaaccctgtcgcctacttgcaacagcaggtgcttcgatccaacccacttgctctgggaaaatagctgcctacccacgacaacaaccattgcgaccgcgcctaccagcgctcatgccgactagccc

SEQ ID NO: 12566 - DNA, 652 bp, Zea mays
  Clone ID: LIB3061-102-Q1-K6-A11
tccacgcgtccgccgccgccatcggttggggcggcgaaccctagccgccctcagcgacggattgcagatctcccagccatgacgttcaagcggaggaacggcggacgcaacaagcacgggcgcggccacgtcaagtacatacgctgctccaactgcgccaagtgctgtccaaggatggtcgatgggagcggttcttggtgaggaacattgttgagcaggctgctgtgagggacgtgcaggaggcttgtgtgcatgatggatatgttcttcccaaattgtacgcaaaggttcatcactgtgtctcatgcgcaatccatgcgcacattgtccgtgtccgctctcgtgagaacaggaggaaccgtgagcccccgcagcgtttcaggcgccgggatgatggcccaaggccaggtcagggcccaccgcgcccaggtgctgctgccacagcagctccccctgctgccgctcctcgtacctaagttcaggaatgcgtttcagggcttagttctctcacctatgggataatggacttttcctgttttgaaaaccaatgtactgtacccccttgatgtcaaaattttagcacaatttgtggttcgttcttctgtcatccagtcagtgctgtcgttgattatatgacttcattgattttttt

SEQ ID NO: 12567 - DNA, 119 bp, Zea mays
  Clone ID: LIB3061-102-Q1-K6-A12
agggagggaaggaataaactcactgccagccagtgaagggggagaagtgtactgctccgtcgaccagtgcgcgcaccgcccggcagggctgctcatctcgtctactaccacaccattaa

SEQ ID NO: 12568 - DNA, 456 bp, Zea mays
  unsure (1)..(456): unsure at all n locations; Clone ID: LIB3061-102-Q1-K6-A4
ggggggggggtaaaaaaaaaccaatggggttgcttctgncttaaatggagacaacgacgagtggtcagaagtacagagattgcagacaaggataacaacattcagaaatactgagattgattatatttanangaaaattcttttttctcgtnttggtntnnacttaaaggaaanctacatgcatttaatcaaaacattaatgaccaagttgctggttacatgagagatccaagtcggatgattaacaggatgtacttgaccaactctgctgttagtgtatttggaaaggatgttggagaacctggaacaggtgaggaggggcacaatatggaaggtgatcctgaacttattgacgattctgagttttattaacaacttctcaaggagtttattgagtaatgtgataagggggcctaaaagtgagaattttatgctgtaaaaaacagaaagttaaaa

SEQ ID NO: 12569 - DNA, 486 bp, Zea mays
  unsure (1)..(486): unsure at all n locations; Clone ID: LIB3061-102-Q1-K6-A5
tttttgagnagcgttttttcgctggggcccgttgggggggggggggtcctaaaattctgggggggtcgctgtttcccttttccaggcagctgatgctttaaacacacatccactgcctccnagtttaatagctaggcatctgctctggaaaatcaacggggttgccggggcacacactanctagcanatctttcngtgaagaccaaagagtagagagatggaaaggatgagttcgtcgctgcatactgggtggaggagcacaagctctcaaccatcggagccgtgtgggcgacggcggtgggcgcgtnggtggcgtacagccggtggngggcgccggcgcgggcgacgggcatgcgcctaatncacgccaggatgcacgcgcaggcgcttacgcttgccgttcttgagggagccgtgcttgngcaccactaccacggcaagagcaccaacgccgggaagaggcagtagcaggaggacctggactac

SEQ ID NO: 12570 - DNA, 548 bp, Zea mays
  unsure (1)..(548): unsure at all n locations; Clone ID: LIB3061-102-Q1-K6-A6
agcaagcgcggcgaccncgacnnnaaaaccacaangcgcacaacaanaccncncnccggngacagccgcgggaanccaataccgcaatgtcngagccnacanggnacaagaggccanccaagcaagcancnnacgggcannagcannaacccnccaacaaccanangcncnanngcaacagccanccccagngcancnggancnccaaagaancgcggcacaacaaccacaacaacaggngcnaccaacaancaancaagnagnngcagcgaaccccgcngcnaaccnccagcaacaacaggnncnnccanncaancaactagcgggggngaacccngcnancnactngcaggcacaacagcnacnaccannnaaccaactnggcgggagcccnnaagccnncnaaccgcaacaacagcnncngccannccatctgcaagctgtggcaaacattgttgctttcttgagacaacaacatttgttgccattttacccacaagttgtggggaaacattaatgccttcttgcaacagcaacaattgctacca

SEQ ID NO: 12571 - DNA, 651 bp, Zea mays
  unsure (1)..(651): unsure at all n locations; Clone ID: LIB3061-102-Q1-K6-B1
ccgccagcccggccggctataaagagaggcccatctcngaaatcgacggcgatgaagaagaccagttcccctctcctgatcgtcctgttcctcacagcagcagccatggcggccgagccggagaagcaggcggcccccgcggcacaggagacggccgtgcacatcgtgtacgttgaccgccccgaggacgccgaccctgaggagttccacatccgcaccctcacccccgtcctcggcagcgaacagaaggccagggacgcagtgctctaccactacaagaacgccgccagcggcttctccgcgaagctcaccccccagcaggtcaaggatctcaaggagcaaccaggtgttctccaggttgtgccgagccagacttaccagctacatggccctgggtctggcactcaccagggcacgacacacaccttgggccttatgtgaaggcgtatgagaatcaagaagactttgtttagtatggctgtatggcacaggtctgacgaatgtgtatagtacagtactatgtaagaataagggacgtatcgtctatatactgctttgcgcatgctcagccctgttctaaagcttgtaatgcaccaatgcgtatgttttcaatacaatgacaagtatgctatcttgtttggtgctaaaaac

SEQ ID NO: 12572 - DNA, 303 bp, Zea mays
  unsure (1)..(303): unsure at all n locations; Clone ID: LIB3061-102-Q1-K6-B10
aaaaaaaaaaaaaaaaaaaaaaaaaaaaaaaaacaagaaaacaaaaaaaaaaaaaaaaaaaaaaaaaaaaaaacaaaaaaaaacgaacaaaaaacaacaaacaaaacaaaaaaaaacacaacacccccaacaaaaaccaccccacccccccccccgcggccncnngaananaaagggacaaaaanaacnacaaaaaaaaaacaacanccccccccccacacaccccaaaaaaaaacaaaaaacaacaacaaaaaaacccaanaacacccacaaaanaaaaaacaaaaacccacanaacccaac

SEQ ID NO: 12573 - DNA, 630 bp, Zea mays
  Clone ID: LIB3061-102-Q1-K6-B11
caatccttgccacatctaacaatacaggggatcacaacgcaacagcaacaacagttcctaccagcactgagccacctagccatggtgaaccctgccgcctacttgcaagagcagctgcttgcatccaacccacttgctctggcgaacgtagttgcaaaccagcaacaacaacagctacggggaggggtgccaacgctcagtcaactagccatggtgaaccctgccgcctacgtacaacaacaacaactgctttcatctagcccgctcgctgtgggcaatgcacctacatacctgcaacaacaattgttgcaacagattgtaccagctctgactcaactagctgtggcaaaccctgttgcctacttgcaacagctgcttccattcaaccaactgactctgtcgaactctgctgcgtacctacaacagcgacaacagttacttaatccattggtagtggctaacccattggtcgccgccttcctacagcagcaacaattgctgccatacaaccagttctctttgatgaatcctgtcttgtcgaggcagcaacccatcgttggaggtgccatcttttagattacatatgagatgtactcgataatggtgccctcataccgacgtgtgtttcct

SEQ ID NO: 12574 - DNA, 352 bp, Zea mays
  unsure (1)..(352): unsure at all n locations; Clone ID: LIB3061-102-Q1-K6-B3
ccgactaaccaacgccggagaagaggggcgcgngaaccgcgcgcagcgnaagggggcggggnccgngnncaagnccaacccaccacggagggccccgcccnggnccgttccctcgacttcngcaagcgcatggggtcgtngggggcgtnntnaccgacgtnatncacgaccccggacgtggaacgccgatcgccaaggtcactttnnnggcacccattcaggtacaagcaccagaaggagctntttgtngaaggcgagggcatgtacacgggccagtttgtttactgcgngggnngngcgaacctgtggatggggaacgtggtggccttgcgggggatccctgagggtgccg

SEQ ID NO: 12575 - DNA, 231 bp, Zea mays
  Clone ID: LIB3061-102-Q1-K6-B5
cagctattactgttgagggggggggtggtcgggatccaggacttgctagatcagccaaatcctgctgatcctgctcaaacggatggctatcacctttttatccaggatcctacagaatataagagacgtgttaaactgcaggcgaagcagtaccccgcgttgctaggttctggaatggaagactaaagaacaaggtcaacatgaggaagactactataaagattgtgagga

SEQ ID NO: 12576 - DNA, 630 bp, Zea mays
  Clone ID: LIB3061-102-Q1-K6-B7
gcacctcgggtctgctgcagcgcctcgtctctgtggtctggcatcagagtccccgggagaagagaatggttgctctgtcggcaggagcgctggctccgctcgcaggttgcaaccgctcaagcttaacttcacccccttgatgtatcgtctttcttggttgcctcgttcgttactcttggcgcgagattcctttcgttctcaggtctgtctccgctgccgtcgtgcagcgcggctccgttgtactgccgcaggagtccgccacttctcaaggtcgccatcgctaagacgcggccagctgttcaccaatctgctcctgcaagcttccgaaaatgtgcagctatgtcagaacatggacgtcaggaactccggaccaatgagtaccagctggatgatgatgatgagccgttttggctggcagtggtcagagaccttgctgtggattggtagctttcttagctgagcagccgaggcaactgaagcacctggagtggccgggctttctacacacgctgaagacggccacacttactcttgtattggtagctatgtttattgttgcattatcaactattgatgctgccctctgctacatgctggcctggctacttcgaaatctgcctagaaaatgct

SEQ ID NO: 12577 - DNA, 607 bp, Zea mays
  Clone ID: LIB3061-102-Q1-K6-C1
cagtggggggggtggagcaacaatggcaaccaagaactttccctccttatgctccttgctctttctgcatgtgttgctaacgcgacaattttccctcaatgctcacaagctcctatagcttcccttcttcccccataccttccatcaatgatagcttcagggggggagaaacccagctcttcaaccctataggctccaacaagcaatcgcagcaagcaacatacctttatcacccttgtttcaacaatcgccagccctatctttggtgcagtcattggtacaaaccatcaaggcacagcagctgcagcaactcgtgctacctgtgatcaaccaagtagctctggcaaacctttctccctactatcagcaacaacaatttcttccattcaaccaactatctacactgaaccctgctgcttatttgcagcaacaactattaccattcagccagctagctactgcctactctcatcaacaacaacttcttccatttaaccaattggccgcactgaacctcgctgcttatttgcagcagcaaatattactaccatttagccagctagctgcagcaagccgtgcttccttcttgacacacaacagttgctgc

SEQ ID NO: 12578 - DNA, 456 bp, Zea mays
  unsure (1)..(456): unsure at all n locations; Clone ID: LIB3061-102-Q1-K6-C11
aaccctacctttggtggggggggcttccaccaatacaatccccatgggggacgaggacaccggccccggcgatgggggcgaggcctctcctccgcaccacgtcgcggcgtcgagcgaccgggcgcgcgacatggtggcgtcccctaccagctccctcttggtggtgggggggggggacaantcccaccncttcntnatccaaaactactaaaataactaacgccactctcctnnnnaatcacatctccatctaaacattcacctttntctgttaccattattctatctacttctacccctactgtaataacctcaaanacaacttcacctacttctacctcttaatacatctctctttcaacttcaccaacttacactctctcttcaanctcactctcctcaaccaaacctaaaaatacaaacataaagtgcactcncacttaaaccactccctaa

SEQ ID NO: 12579 - DNA, 558 bp, Zea mays
  unsure (1)..(558): unsure at all n locations; Clone ID: LIB3061-102-Q1-K6-C12
cgtccttttttcaagnaaggtctttgagtgggggtggggtgagtggactactactgccttggtggtgtaatctgtgctgggactctctatgttgcaaacctgggtgactcacgtgcagttcttggaaggcttgttaaggcaactggagaggtcgtggccatgcagttgtcatctttgcggggttgttgggatgannaanttagacaagaactgcagtcatcacatcctgacgatccacatattgtggttctcaaacacaatgtttggcgagtgaagggtctcatccagatctcaagatctattggagatgtatatctaaagaaaccatgatacaacagagaaccacttcacagcaagtttcggcttcgagaaaccttccagaggccgatccttagttctgaacctcaaattactgaacatcgaatacagccaaatgatcaatttgttatatttgcttctgatggtctatgggagcacctcagcaataaggaagcagttgaccttgttcaaagtagtccacacaatggaattgctctgagactattgaaagcggcgatg

SEQ ID NO: 12580 - DNA, 636 bp, Zea mays
  Clone ID: LIB3061-102-Q1-K6-C2
tttggccatcacagcaagcatcttacgggggtgggcattgaccgtccaacaaccatatgccctattgcaacaaccatccttagtgaatctgtatctccaaagaatcacagcacaacaactacaacaacggttgcttccaacaattaatcaagtagttgcagcgaaccttgctgcttagctgggggggcaacaatttcttccattcaatcaactagctggggtgaaccctgctgcttacttgcaggcacaacagctactaccattcaaccaacttgtcgggagccctgctgccatcttattgcagcaacagttgctgccattccgtctacaagttgttgcaaacattgctgctttcttgcaacaacaacaattgctgccattttacccacaggttgtgggaaacattaacgccttcttgcaacaacaacaattgctgccattctacccacaggatgtggcaaacattgtcgccttcttacaacaacagcaattgctgccatttagccaactcgctttgacgaatcctaccaccttattgcatcagcccaccattggtggtaccatcttctagattttttatgctttatactgtaataataaatttctcatactgatatgtgcaacttctcagtaata

SEQ ID NO: 12581 - DNA, 634 bp, Zea mays
  unsure (1)..(634): unsure at all n locations; Clone ID: LIB3061-102-Q1-K6-C3
tttttgagcttcanaacacactagcggagcgcactagcaacgacctaacaacaatggctaccaagatattatccctctttgcgcttcttgccctttttgtgagcgcaacaaatgcgttcattattccacaatgctcacttgctcctagtgccattattccacagttcctccttgggtgacgggaatgggcttcgaacacccagctgtgcaagcctacaggctacaacaagcgcttgcggcgagcgtcttacaacaaccaattgcccaattacaacaacaatccttggcacatctaaccatacaaaccatcgcaacgcaacagcaacaacaatttctaccagcactgagccaactagctgtggtgaaccctgtcgcctacttgcaacagcagttgcttgcatccaacccacttgctctggcaaacatagttgcataccaacaacaacaacaattgcaacagtttctaccagcgctcagtcaactagccatggtgaaccctgccgcctacctacaacagcaacaactgatttcatctagccctctcgctgtggttaatgcacctacatacctgcaacaacagttgctgcaacagattgtaccagctctgactcagctagctgtggcaaaccctgct

SEQ ID NO: 12582 - DNA, 368 bp, Zea mays
  unsure (1)..(368): unsure at all n locations; Clone ID: LIB3061-102-Q1-K6-C4
caattgctgccattcaaccaacttgctttgacaaacccaacagtgttctaccaacaacccatcattggtggtgccctcttttagattgcttatgatttataccccaataatggaatttgtccnaggatntttgtnncntnccanaaataaaaaagtacattactagattctaaaaaaaataaaataaataaaaaaaaaaaaaaaaaaaaaaaaaaaaaaaaaaaaaaaaaaaaaaaaaaaaaaaaaaaaaaaaaaaaaaaaaaaaaaaaaaaaaaaaaaaaaaaaaaaaaaaaaaaaaaaaaaaaagaaatattattttaaaaaaaaaaaaaaaaaaaaaaaaaaaaaaaaaannnnnnnnnnnnntt

SEQ ID NO: 12583 - DNA, 609 bp, Zea mays
  unsure (1)..(609): unsure at all n locations; Clone ID: LIB3061-102-Q1-K6-C5
aaaacacacttggggggcgcactagcaacaaaataacaccaatggctaccaagatattagccctccttgcgcttcttgcccttttagtgagcgcaacaaatgcgttcattattccacagtgctcacttgctcctagtgccagtattccacaattctcttggggtcagtngggggaatnnncttcnaacatccanccgtgcaagcctacaggctacaactagcgcttgcggcgagcgccttacaacaaccaattgcccaattgcaacaacaatccttggcacatctaaccctacaaaccattgcaacgcaacaacaacaacaacagtttctgccatcactgagccacctagccgtggtgaaccctgtcacctacttgcaacagcagctgcttgcatccaacccacttgctctggcgaacgtagctgcataccagcaacaacaacagctgcaacagtttatgccagtgctcagtcaactagccattgtgaaccctgccgtntacctacaactactttcatgtagcccgctcgcggtgggcaatgcacctacgtacctacaacaacatgtgctgcaacaaattgtaccagttttgacttaactagctgtggc

SEQ ID NO: 12584 - DNA, 650 bp, Zea mays
  unsure (1)..(650): unsure at all n locations; Clone ID: LIB3061-102-Q1-K6-C9
tcgcccagcgtccttttttcccacaatgctcacaatcttttgtggggtgccttcttcccccatacctctcaccagcggtgtcttcaatgtgtgaaaccccaattgttcaaccctacaggatccaacaggcaatcgcaacaggcatcttaccattatcacccttgttcctccaacaaccgncanccctttggttcggttgggcgttggtccatttggtggcacaaaacatcagggcacaacaactacaacaacttgtgctagcaaaccttgctgcatactctcagcaacatcagtttcttccattcaaccaactggctgcattgaactctgctgcttatttgcaacaacaattaccattcagccagctagttgctgcctacccccagcaatttcttccattcaaccaactagcagcattgaactctgctgcttatttacagcagcaacaactactaccattcagccagctagctgatgtgagccctgctgccttcttgacacaacaacagttgttgccgttctacctgcacgctatgcctaacgctggcaccctgttacaactgcaacaattgctgccattcaaccaacttgctttgaccaacccaacagtgttctaccaacaacccctcattgggggtgccctcttttta

SEQ ID NO: 12585 - DNA, 674 bp, Zea mays
  Clone ID: LIB3061-102-Q1-K6-D1
cggggcggggtttcgggtcggcccagcgtccttttgagaccaatagcaacatagaagcgcatagtgtaccaacaatggcagccaaaatttttgcttccttatgctccttggtctttctgcaagtgttgctaccgagaccattttcccacaatgctcacaagctcctatagcttcccttcttcccccatacctctcaccagcggggggggggggggtgaaaccccaattgttcaaccctacaggatccaacaggcaatcgcaacaggcatcttaccattatcacccttgttcctccaacaaccgtcagccctattacagcagttacctttggtccatttggtggcacaaaacatcagggcacaacaactacaacaacttgtgctagcaaaccttgctgcatactctcagcaacatcagtttcttccattcaaccaactggctgcattgaactctgctgcttatttgcaacaacaattaccattcagccagctagttgctgcctacccccagcaatttcttccattcaaccaactagcagcattgaactctgctgcttatttacagcagcaacaactactaccattcagccagctagctgatgtgagccctgctgccttcttgacacaacaacagttgttgccgttctacctgcacgctatgcctaacgctggcac

SEQ ID NO: 12586 - DNA, 121 bp, Zea mays
  Clone ID: LIB3061-102-Q1-K6-D10
tttgctaagcaccaagcgaatgctaaggtgggccctatcatcgcaaagatgatggccaagttcaatgggtcccagtgatggttatgtcgcagtcaggttcactgtccaacaaacctttgct

SEQ ID NO: 12587 - DNA, 546 bp, Zea mays
  unsure (1)..(546): unsure at all n locations; Clone ID: LIB3061-102-Q1-K6-D11
aaaatttttgcctgcttatgctccttggtctttctgcaagtgctgctacggcgaccattttcccacatctcaaactcctatactcccttttccccctcctctcacacggtgtctttggggtgtgagggcgcattcttcaaccctacangatccaacaggcaatcgcagctggcatcttacctttatcacccttgttcctccaacaatcatcagccctattacagcagttacctttggtgcatttattggcacaaaacatcagggcacaacaactacaacaacttgtgctagcaaaccttgctgcctactctcagcaacagcagtttcttccattcaaccaactagctgcattgaactctgcttcttatttgcaacaacaacaactaccattcagccagctatctgctgcctacccccagcaatttcttccattcaaccaactgacagcattgaactctcctgcttatttacagcatcaacaactactaccattcaaccagctagctggtgtgagccctgctaccttcttgacacaccccattgttg

SEQ ID NO: 12588 - DNA, 612 bp, Zea mays
  unsure (1)..(612): unsure at all n locations; Clone ID: LIB3061-102-Q1-K6-D2
atagagcaacaatggcgggcaagatattttccatccttatgctccttgctctttctgcatgtgttgctaacgcgaccatttttcctcaatactcacaagctcctatagctgcccttcttcccccataccttccattagggacgtnggggaggttgtgaaaacccagcccttcaaccctacaggctccaacaagcaatcgcaacaagcaacttacctttatcacccctgttctttcaacaatcgccagccctatctttggtgcagtcattggtacaaaccatcagggcacaacagctgcaacaactcgtgctaccagtgatcagccaagtagctctggcaaacctttctccctactctcagcaacaacaatttcttccattcaaccaactgtctacactgaaccctgctgcttatttacaacaacaacaactactaccattcagccagctagctactgcctactctcagcagcaacaatttcttccatttaaccaattggccgcactgaacccctctgcttatttccagcagcaaatactactaccatttggccagctagctacaacaagccccacttccttttttgaaacaacaacaattgcttccgttcta

SEQ ID NO: 12589 - DNA, 634 bp, Zea mays
  unsure (1)..(634): unsure at all n locations; Clone ID: LIB3061-102-Q1-K6-D4
atagcaacatagtatgtttgtggggtaccaacaatggaaaacaaaattggggcttccttatgctccttggtctttctgcaagtgttgctaccgagaccattttcccacaatgctcacaagctcctatagcttcccttcttcccccatacctctcaccagctttggggttagttnggagaaacccaattgttcaaccctacaggatccaacaggcaatcgcaacaggcatcttaccattatcacccttgttcctccaacaaccgtcagccctattacagcagttacctttggtccatttggtggcacaaaacatcagggcacaacaactacaacaacttgtgctagcaaaccttgctgcatactctcagcaacatcagtttcttccattcaaccaactggctgcattgaactctgctgcttatttgcaacaacaattaccattcagccagctagttgctgcctacccccagcaatttcttccattcaaccaactagcagcattgaactctgctgcttatttacagcagcaacaactactaccattcagccagctagctgatgtgagccctgctgccttnttgacacaacaacagttgttgccgttctacctgcacgctatgcctaacgctggcac

SEQ ID NO: 12590 - DNA, 578 bp, Zea mays
  unsure (1)..(578): unsure at all n locations; Clone ID: LIB3061-102-Q1-K6-D7
tttcctttgtgctttttgggggggggagggggcacaacaactacaacaacttgggctagcaaaccttgctgcctactctcagcaacagcagtttcttccattcaaccaactagctgcattgaactctgcttcttatttgcaacaacaacaactaccattcagccaggtgggttgtnggggggcccncacaatttcttccattcaaccaactggcagcattgaactctcctgcttatttacagcagcaacaactactaccattcagccagctagctggtgtgagccctgctaccttcttgatacaaccacagttgttgccgttctaccagcacgctgcgcctaacgctggcaccctcttacaactgcaacaattgctgccattcaaccaacttgctttgacaaacccagcagcgttctaccaacaacccatcattggtggtgccctcttttagatttcttatgagttatagttcaataataaagttttttgtctgatgtttgtggcttcccagaaataagaaagtacatttctagaaaaaaaaaaaaaaaaaaaaaaaaaaaaaaaaaaaaaggcggcc

SEQ ID NO: 12591 - DNA, 208 bp, Zea mays
  unsure (1)..(208): unsure at all n locations; Clone ID: LIB3061-102-Q1-K6-D8
aaaaaaaaaaaaaaaaaatttttttnntantaaatnaaaaaaaaaaaaaaaaaaaaaaaaaaaaaaataaaaaaaaaaaaaaaaaaaaaaaaataaaaaaaaaaaaaattaaaaaaaaaaaaaaaattatttaaaaaaaaaaaaaaaaaaaaaaaaaaaaaaaaaaaaaaaaaattaaaaaaaaaaaaaaaaaaaaaaaatattaatt

SEQ ID NO: 12592 - DNA, 314 bp, Zea mays
  unsure (1)..(314): unsure at all n locations; Clone ID: LIB3061-102-Q1-K6-D9
aaacccancncnncaaccananangcnacaacaagcaancgcagcaagcaacanaccnnnancgcccnnnnggggncaacaancgccagcccnancggnggggcaggcagnggnacaaaccancagggcacaacagcngcagcaacgcgggcgaccgcggancaaccaaggagcgcgggcaaaccgnncncccnacgcgcagcaacaacaanggncngccaggcaaccaacgggcnacacggaacccggcngcgnannngcagcaacaacgangaccangnagccagcgagcgaccgccnacccncagcaacaa

SEQ ID NO: 12593 - DNA, 516 bp, Zea mays
  unsure (1)..(516): unsure at all n locations; Clone ID: LIB3061-102-Q1-K6-E1
gcactgaatataaccacattcgtgagaaagaggcatntgggctgtgcttgcatggctttctattattgctttcaagaataaggacaaccttggaggagataagcttgtcactgttgaagatattgtccgtcatcattgggccaggtgtggtcgncattattacacacgctatgactatgagaatgtcgatgctggggctgctaaggagctgatggcaaacctagtaagcatgcagtcatcactttctgatgttaacaagttgatcaaggagatccggtctgatgtttntgaagtagttgcagctgacgagtttgagtacaaggatccagttgatggctttgtgtncaagcaccagggcattcgatacctnttnggagatggttaacgactggtgttncgtttattctgaaccggttgtgttggtgccaccatgcgtgtntacatggagcaatacgagaaggatttctncaagaccggtagggattgacaggaggcccttgctacactggttgatgt

SEQ ID NO: 12594 - DNA, 662 bp, Zea mays
  Clone ID: LIB3061-102-Q1-K6-E10
agcaacatatttaagcacaatagtgtaccaacaatgggggggaaaaattttgcctccttatgctccttggtctttctgcaagtgctgctacggcgaccattttcccgcaatgctcgcaagctcctatagcttcccttcttcccccgtacctctcaccagcggtgtcttcggtatgtgaaaacccggtcgtcaggcctacaggatccaacaggcaatcacagctggcatcttacctttatcacccttgttcctccaacaatcatcagccctattacatcagttacctttggtgcatttattggcacaaaacatcagggcacaacaactacaacaacttgtgctagcaaaccttgctgcctactctcagcaacagcagtttcttccattcaaccaactagctgcattgaactctgcttcttatttgcaacaacaacaactaccattcagccagctacctgctgcctacccccagcaatttcttccattcaaccaactggcagcattgaactctcctgcttatttacagcagcaacaactactaccattcagccagctagctggtgtgagccctgctaccttcttgatacaaccacagttgttgccgttctaccagcacgctgcgcctaacgctggcaccctcttacactgcaacaattgctgcc

SEQ ID NO: 12595 - DNA, 657 bp, Zea mays
  Clone ID: LIB3061-102-Q1-K6-E2
cggggcgggaattcgggtcgacccagcgtcctttgtcactattgctgtgaagggggtggttggctttatgaaaaaagatgatagtgctgtgcctgatagagcaaagtacaatagagatgacttccctgttcagtacgatgctgcaaagttctttgtcattaaatcgtacagcgaggatgacatccacaagagcgtaaagtgcggggggggggcaagcacaaccaacggaaacaagaagcttgatgctgcttaccaagaagctcagtcaaagggatctgcatgccctatattcttgttcttctcagtgaatacaagtgggcagtttgttggtgttgctgaaatgactggcgccgttgattttgagaaaaccctagagtattggcaacaggacaagtggaacggctccttctctgttaagtggcacattgtcaaggacgtgcccaacaatattctcaagcacatcatcctggagaacaatgagaacaagcctgtcacaaacagccgtgacactcaggagatacgcctcgaacaaggccttcagatgctcaagatattcaaggatcatgtcagcaaaacttccatcctcgacgactttgccttctatgagagccgccagaagttgatgcaggataagaggtccaaacagcagcagctcca

SEQ ID NO: 12596 - DNA, 457 bp, Zea mays
  unsure (1)..(457): unsure at all n locations; Clone ID: LIB3061-102-Q1-K6-E3
ttagctcttggtatttctgcaatgctgtacgggaccattttcccgcaagctcaaactcctatacttccttctccccttacctctcaccacttgtggtttgtntgggacccaatcttcaacctacanatccaacaaaaaaaaaaaatgcanttaccttacacccttgttctccacaataaaagncctatacagcagttacctttggtgcattattgggacaaaacaaagggnacaacaactacaacaacttgtgctagcaaaccttgctgtctactntaagnaacagcaggttataacattgaaccaactaagtagattgaactgtggttgttatttgcaacaacaacaactaccattaaagcaggtacctagtagaataccaggaacaataagttacattgaaccaactgaggaaaatagaaatatactggttaatgacaggaggaacaactactac

SEQ ID NO: 12597 - DNA, 477 bp, Zea mays
  unsure (1)..(477): unsure at all n locations; Clone ID: LIB3061-102-Q1-K6-E4
agggggggggttacatagttacaagcatcacacggcaaccttgcttctccaagactttgcgggttccaagctgccttctgcacaacctcttccccacctgtgggtttgtctggggaaaacaaattcttttctgaggaaaaaaaaaaacagcctctnaagaagaactattccataagtgtattgctgagcagactaacttcatcagtgatgggagatctccttatgaagagccttcggtcatctatgagggaataattgatgaatggacatacattcatgtttcggggtccagcccagatgcttggaatcccacagttaaggctttgcgcgaccgcctggatgcctgggttggaaaggtgcatactacattgctttcagttgaggcagaaacacctgatcttgttgctgcctaatttagcacccgttacacttccgcgagaggcttggtcagccaagtgatgagatgcattgggacac

SEQ ID NO: 12598 - DNA, 137 bp, Zea mays
  unsure (1)..(137): unsure at all n locations; Clone ID: LIB3061-102-Q1-K6-E5
acccccccccccccccccccattgccccccccgggcggtctttaannngggggagccccccgggggaggagaagagtatganaaaaaaaaaaaggaaggggggggggaaaagaaaaaaaaaaaaagaggggaagaag

SEQ ID NO: 12599 - DNA, 498 bp, Zea mays
  unsure (1)..(498): unsure at all n locations; Clone ID: LIB3061-102-Q1-K6-E6
gccctaaaaaaatggctctgggtgcgagcgccacctccacgcatacaagcggcggctgcggctgccagccaccgccgccggttcatctaccgccgccggtgcatctgccacctccttttcacctgccaccttcggtggggggggggggggcnntccacctnccncccccnntccacctaccaccaaacaaccatgtnccnccnccnnttcatctnccncccccaccatnccactaccctactcaaccnccccngcctcancctcatccccagccacacccatgcccgtgccaacagccgcatccaagcccgtgccagctgcagggaacctgcggcgttggcagcaccccgatcctgggccagtgcgtcgagttcctgaggcatcagtgcagcccgacggcgacgccctactgctcgcctcagtgccagtcgttgcggcagcagtgttgccagcagctcaggcaggtggagccgcaacaccggtaccaggcgatcttcg

SEQ ID NO: 12600 - DNA, 547 bp, Zea mays
  unsure (1)..(547): unsure at all n locations; Clone ID: LIB3061-102-Q1-K6-E8
gtccctccttatgctccttgctctttctgcatgtgttgctaacgcgacaattttccctcaatgctcacaagctcctatagcttcccttcttcccccataccttccatcaattattgtgtggtgtaggggagaaacccanctcttcaaccctatangctccaacaagcaatcacagcaagcaacatacctttatcacccttgtttcaacaatcgccagccctatctttggtgcagtcattggtacaaaccatcaaggcacagcagctgcagcaactcgtgctacctgtgatcaaccaagtagctctggcaaacctttctccctactatcagcaacaacaatttcttccattcaaccaactatctacactgaaccctgctgcttatttgcagcaacaactattaccattcagccagctagctactgcctactctcatcaacaacaacttcttccatttaaccaattggccgcactgaacctcgctgcttatttgcagcagcaaatattactaccatttagccagctagcttcagcaagccgtgcttcct

SEQ ID NO: 12601 - DNA, 556 bp, Zea mays
  unsure (1)..(556): unsure at all n locations; Clone ID: LIB3061-102-Q1-K6-E9
ctttatctactcctggggggggggggacccgaacaaaccatgagggggtggctcgttgccctcgctctcctggctctcgctgcgagcgccacctccacgcatacaagcggcggctgcggctgccagccaccgccgccggttcatctaccgccnccntgcatgtggcagtcggggtcacctnccacctccnntncatctcccaccgccggaccacctgccgccgccggtccacctgccaccgccggtccatgtgccgccgccggttcatctgccgccgccaccatgccactaccctactcaaccgccccggcctcagcctcatccccagccacacccatgcccgtgccaacagccgcatccaagcccgtgccagctgcagggaacctgcggcgttggcagcaccccgatcctgggccagtgcgtcgagtttctgaggcatcagtgcagcccgacggcgacgccctactgctcgcctcagtgccagtcgttgcggcagcagtgttgccagcagctcaggcaggtggagccgcagcaccggtaccaggcgatcttcggc

SEQ ID NO: 12602 - DNA, 473 bp, Zea mays
  unsure (1)..(473): unsure at all n locations; Clone ID: LIB3061-102-Q1-K6-F1
gggggggattttttgtttgagggagcgtttttttttnnnggncgcngnggttttttttgtttggggcaagnggagtaagacgnggggggggatgnagnattttggggantgaggacgagtactgnnagtggagtgttgaatagggtatggtgaccggaaccttttgttgtgggcggggagtgagcagttgncttcttttttttttttggggnnggggggnnaaataagngatagnggtggnggtggtagtaagagcaagttgtgtgttattgggaagatgttgttgaagagtaaggtgtgttgtaagttttggggttggacttgtggttaggtgatcaattggaatttgtggtatggtatggaggaggtgtggaagtgatttgggaattgggaggagattgtgggtgggtattaggagggtatttaggatttggaggagtaagatgtggtgatgatgacatttgggaattgtt

SEQ ID NO: 12603 - DNA, 636 bp, Zea mays
  unsure (1)..(636): unsure at all n locations; Clone ID: LIB3061-102-Q1-K6-F10
tgtccaactgcacatanaaggggggggggggccaacaatggcagccaaaatttgggcctccttatgctccttggtctttctgcaagtgctgctacggcgaccattttcccgcaatgctcgcaagctcctatagcttcccttcttcccccgtacctctcaccagctttgtgtggttggatnggagaaacccaattcttcaaccctacaggatccaacaggcaatcacagctggcatcttacctttatcacccttgttcctccaacaatcatcagccctattacatcagttacctttggtgcatttattggcacaaaacatcagggcacaacaactacaacaacttgtgctagcaaaccttgctgcctactctcagcaacagcagtttcttccattcaaccaactagctgcattgaactctgcttgttatttgcaacaacaacaactaccattcagccagctacctgctgcctacccccagcaatttctttccattcaaccaactggcagcattgaactttgctgcttatttacagtagcaacaactactaccattcagccagctagctggggtgagccctgctaccttgttgatacaaccacgagggggtgccgtagtaccagcacgctgggcctaa

SEQ ID NO: 12604 - DNA, 547 bp, Zea mays
  unsure (1)..(547): unsure at all n locations; Clone ID: LIB3061-102-Q1-K6-F11
cacaaggaattgcttttgagccatggaacccaatttgcacatgggtatcttgacaaactattgaagggagggtcattgaatttgatgcacaataactaattcttttctttttttttgggggggggggaanctttcctcatctcacaatattactccaaanatacattaatttaaaattcttatttttnatcactttaatactaattccaattttaangactcaatnattattatattttcccattaccnanaaantntcaattaaatatattnctcactacannatattnattataaacttntcataccttttaaattcatttntcaaatctcaacatataaccaactaaatgtgcaaattcaaaaaacttaacaaactattttcaataaatttctatctaaattatataataatttaattaccaacattaaatttactaagaatgacttaatattatttaatataatattccttattttatttaataccaatttttcaccattaaaatgttatcaaccattttttaaacttgaacaaataattaat

SEQ ID NO: 12605 - DNA, 598 bp, Zea mays
  unsure (1)..(598): unsure at all n locations; Clone ID: LIB3061-102-Q1-K6-F3
tggtggtcttttttgtgtgtggggagctgacagaaataataaacgatcggtggggtccacatcaatacttcctctgagtgcaaaggataaagataccaagttgaaagaagaaatacgagattgctgaatggtaactctatggattcagctgatcccanacccggggctgatngagggaaagcaaattgataataaaagccaagttgatagtgaaactgtgaaagcatgatatactctgatggagggggttttgtttgctaaaagctgttcagacagctaaggccccgttcgtttgttacggattgatggatcggaacgattcctaatcggattgctttagtttatataaacctcatctggaacgattccggggattgcttctctagtttatataaatctcaacgggaacgattctggatgtaattctacacaaacgaacaaggcccaaagaagaaatatgggatgccacgcgctttggtgcctagctccttgatgacttgatgacatagctacgaaggaaatagctttacatctcgctgttctaggcagcagaattttgtttgcactttgcaaaacttatatncttctcagctgtctc

SEQ ID NO: 12606 - DNA, 550 bp, Zea mays
  unsure (1)..(550): unsure at all n locations; Clone ID: LIB3061-102-Q1-K6-F5
attctgggtcgaccagcgttctatctttccatgggcctgcgctgttggggggggtgggggcacctaaagtgcccgtggtggcgcgccgncgtggacgccggtgccgtcgtcgtcgncgacggcgcctagaagcgggcgaggctttggtcttgctggggcttgccctgggctgggactgcncaaaactccttggttttgtnttggcacaccaantactctacccccatggngttgccacgctaggcagtggctagtgggggtggtcatggtgagtggtgaccgggctgcttgtgcatgtggagcggagcggaggaggacagtgagacgcgcacgacgaacccgtgagtgccttgggagtttttgcacgctttgtgcgcgcaaaggtacggttggtgcacatttgttggttggaccgtttggaccccctttggcgtgtgctggtagaatgatggagagcaagtgatgaagggttttggttaaaggtatggggagcgctttgtttatggactgtggtgttaggggatagagggacaatgtgtgattgatgtgg

SEQ ID NO: 12607 - DNA, 552 bp, Zea mays
  unsure (1)..(552): unsure at all n locations; Clone ID: LIB3061-102-Q1-K6-F6
gcaacaaaaaaacacatgggtaccaagatattatccctccttgcgcttcttgcgctttttgcgagcgcaacaaatgcgtccattattccacaatgctcacttgctcctagttccattattccacagttcctttggggtgtgggggaatnnccttcnaacacccanctgtgcaagcctataagctacaacaagcgattgcggcgagcgtcttacaacaaccaattgcccaattgcaacaacaatccttggcacatctaacaatacaaaccatcgcaacgcaacagcaacaacagttcctaccagcactgagccacctagccatggtgaaccctgtcgcctacttgcaacagcagctgcttgcatccaacccacttgctctagcaaacgtagttgcaaaccagcaacaacaacaactgcaacagtttctgccagcgcttagtcaactagccatggtgaaccctgccgnctacctacaacagcaacaactgctttcatttagcccgctcgctgtggccaatgcacctacatacctgcaacaagaattgttgcaac

SEQ ID NO: 12608 - DNA, 643 bp, Zea mays
  unsure (1)..(643): unsure at all n locations; Clone ID: LIB3061-102-Q1-K6-G10
ccagcgtccttttttttccatgaanacttattttggggtggcgagggaactacagaaaacaaaagatgctggaaaatctagacacatgggagagattgaaggatataaatacacagtaccagngagaaactattaacacttagagctcggcaagcgaactatagagatgagttcctgcgcaggaatttggttcgctccgagggcaataccagcacgccagcatgagccattatgccagcaattccacggctggggagcagcatggttataacccaacggcagcaggcacgcctcctgttgctgctggaggtgcttatggtgaggctcatcggggttatgcttctggccagtatgaatcatttagcgatcgtccagattatccagagttccatgatgggggcagaggtcgtggtcgtagttctgagcagcgtgctcaataccctggtggtcgtgcttataattccggtggccggcgattctagatatgctttgaactttgaaagacgatctatcactctgtcaagcgagctcatatcacctgatgtcagtgtgctgcaccgtgctatactcgaccgagaaacctaagcgctcataaaaacttgtctacaattcaggtgcatcgaactactttatgggtttgcta

SEQ ID NO: 12609 - DNA, 291 bp, Zea mays
  unsure (1)..(291): unsure at all n locations; Clone ID: LIB3061-102-Q1-K6-G11
aggagacaacgacgagnggncagaagnacaagagangcagacaaggagaacaacannncagaaaaccgagaagganaaanggcannagaaaaacangggggggggggggggcggcacnnaaaggaaagcnacagngcannnnaancagaaacaaaagagaccaagnngcnggnnacangagagaaccaaggncggagaaaaacaggagggacccgaccaacncngcngngagngnannnggaaaggaggnnggagaacccggaacagcggaggaggggcacaananggaag

SEQ ID NO: 12610 - DNA, 494 bp, Zea mays
  unsure (1)..(494): unsure at all n locations; Clone ID: LIB3061-102-Q1-K6-G12
gcaaaaaaaaattttgggtgcttatgctccttggtctttctgcaagtgctgctactgcgaccattttccctcaatgctcgcaagctcctatagcttcccttcttccccctttcctttcaccaaccccctcttttgtgttgtagggggaanncttcaaccctacannatccaacaaacaaaaacaaataacatcttacctttatcacccttgttcctccaacaatcatcacccctattacatcaattacctttagtgcatttattggcacaaaacatgatggtacaacaactacaacaacttgtgctagcaaaccttactgcctactttttataacaacattttcttctcattaaccaactagctgcattaaactcttttttttatttgcaacaacaacaactaccattcatccatctacctatttcctacccccatcaattcctttcattcaatcaactattcaacttataacttttctgcttatttacttcat

SEQ ID NO: 12611 - DNA, 107 bp, Zea mays
  Clone ID: LIB3061-102-Q1-K6-G2
acccatcattggtgttgttgttgttttgagattcttataaattatagttcaataataaagttttttgtctgatgtttgtggcttcccagaataagaaagacatttct

SEQ ID NO: 12612 - DNA, 581 bp, Zea mays
  unsure (1)..(581): unsure at all n locations; Clone ID: LIB3061-102-Q1-K6-G3
cccccctcttttgtgggnnggcttctccttttttggggggggggtgcggaaaaaaaaaattctgcggggttcggtttcntgggtgagcggatcgagatggcggcgtcggatgttgagtaccgctgcttcgtcggcggcctcgcctgggccacggacgaccactccctccacaactccttgtgttttgcnnnggggtcctnnantccaanatcatcctcnatcggaaaacacaaaggtcccncnncttcnncttcntcaccttctccacngaggaggcgatgcggaacgccatcgagggcatgaacggnaaggagctggacggccgnaacatcaccgtcaacgaggcccagtcccgcggnggccgtggaggcgtttgcggtggcgggtacggtggtggccgtggaggcggnggttacggcggtggcgggcgccgtgatggcggnggnggttactgcgggggcggnggctacggtggtggcggcggcggctactgtggtggtggcgggggttacggnggtggcaaccgtggcgggggttacgggaactccgnacgggaacctggagaactgagcggtggggcc

SEQ ID NO: 12613 - DNA, 314 bp, Zea mays
  unsure (1)..(314): unsure at all n locations; Clone ID: LIB3061-102-Q1-K6-G4
aaaaaaaaaaaaaaaaaaaaaaaaaaaaaaaaaaaaaaaataaaaaaaaaaaaaaaaaataaaaaaaaaaaaaaaaaaaataaaataaaaaaaaaaaaaaaaaaaaaaaaaaaaaaaaaataaaaaaanaaaaaaaaaaaaaaaaaaaaaaaaaaaaaaaaaaaaaaaaaaaaaaaaaaaaaaaaaaaaaaaannaaaaaaaaaaaaaaataaaaanaaaaaaaaaaaaaaaaaaaaaaaannaaaaaaaaaanaaaaaaanaaaaaaaaaaaaaaaaaaanaaaaaaaaaaaaaaaaaaaaaaaaaaaaaaaa

SEQ ID NO: 12614 - DNA, 549 bp, Zea mays
  unsure (1)..(549): unsure at all n locations; Clone ID: LIB3061-102-Q1-K6-G8
tgcagacctcatcttggggtgggtccttgccgataacaaatcgacggggcgcacggtgacgggtctttcacagtccatttcggtgatctcgcccgcgaggagagccgaaggatactggtggacgtgcagctccctcaagtacatctttagcaaaaanataatttggtgttgaggtggaatatnaatatanttctcccaannaagtnaaagtcaccaacaccctggacatcaagatgaaccgcgtccagaatccgggacaggctgccatgaatccaaatgtgagccgggagctggcccgtcgcgcacaggtggagcacctgagaaagtgatggatctggccaacaagaaaaaccttgtttcggccaaagatgaggtggagagagccaggaacgccttgaactctatcacccacgacacagatgacgccgtcgattccctcttcaacgagctggacaatatcgaagaatttctggagacgtacgacatctacaacaagctcggccgctcctacctgctggcctgcatctcctcgcatgaacgccagcgcta

SEQ ID NO: 12615 - DNA, 606 bp, Zea mays
  unsure (1)..(606): unsure at all n locations; Clone ID: LIB3061-102-Q1-K6-G9
ccagcgtcctttttcgtcgcgtggtccgnnagcgagcggggggtgcctgaggtgcaacaacccttcggagaggtgtccaggctcctccgcggcatccgggactaccgcgtggcggtcctggaggcgaacccgcgctcgttcgtggtgcccagccacaccgacgcgcactgcatctgctacttggggggattgtanggagtgntnacnacnatcgagaacggcgagaggcggtcatacaccatcaagcaaggccacgtcttcgtggcgccggccggggcggtcacctacctggccaacaccgacggccggaagaaactggtcatcgccaagatcctccataccatctccgtgcctggcgagttccagttcttcttcggccccggcgggaggaacccggaatcgttcctgtcgagcttcagcaagagcatccagagagctgcatacaagacctcgagcgaccgtctggagaggctgttcgggaggcatgggcaggacaaggggatcatcgtgcgcgccacggaggagcagacccgcgagctgcggcgccacgcctcggagggcggccacggcccgcactggcccctgccgccgttcggcgagtcgcgc

SEQ ID NO: 12616 - DNA, 527 bp, Zea mays
  Clone ID: LIB3061-102-Q1-K6-H10
gtcgacccagcgtccgtcctgggggaaacacccaaaatcttcacggtatctggcttgaacgttaggagctaccgctattatgatcctgcaacatgcagccttcacttcgaaggactcctggaagacctcggttctgctccttcaggttcaattgtactgctgcatgcctgtgctcacaaccctactggagtgggggcggcatcgaacagtgggaacagattaggcagctgatgagatcaaaatcactgcttccgttctttgacagagcctatcaaggctttgcaagtggaagtcttgacaaagatgctcagtcagtgcgtatgtttgtagctgatggtggtgaacttctcatgggtcagagctactctaagaacatgggattgtatggagagcgtgttggcgctataagccttgtctgtaaaagtgcccatgtacctggtagggtcgcaaagtcaacttcaaacttgagataaggcctatgtattcaaaccctcctattcatggagcctatatggttggtaccatac

SEQ ID NO: 12617 - DNA, 216 bp, Zea mays
  unsure (1)..(216): unsure at all n locations; Clone ID: LIB3061-102-Q1-K6-H12
actagttctagatcgcgagcgggcggtgggtgggtccatgcatgaataacaagggtgtgcgcggtttgtgatgccaaattgtatcctcgtcgtgtgttgaagcgttcgatcgtcggtctagtagtgtgcctgtgagcagcggcgtgctgttgtacgtacgtctgcctctgttctatgtggggggagtttccatancaaatgcatgcgtcgagatct

SEQ ID NO: 12618 - DNA, 585 bp, Zea mays
  Clone ID: LIB3061-102-Q1-K6-H2
gctaccaaaaattagccctccttgcgcttcttgcccttttagtgagcgcaacaaatgcgttcattattccacagtgctcacttgctcctagtgccagtattccacagttcctcccaccagttacttcaatgggcttggggcgggcagccgtgcaagcctacaggctacaactagcgcttgcggcgagcgccttacaacaaccaattgcccaattgcaacaacaatccttggcacatctaaccctacaaaccattgcaacgcaacaacaacaacaacagtttctgccatcactgagccacctagccgtggtgaaccctgtcacctacttgcaacagcagctgcttgcatccaacccacttgctctggcgaacgtagctgcataccagcaacaacaacagctgcaacagtttatgccagtgctcagtcaactagccatggtgaaccctgccgtctacctacaactactttcatctagcccgctcgcggtgggcaatgcacctacgtacctacaacaacagttgctgcaacaaattgtaccagctctgactcagctagctgtggcaaaccctgctgcctacttacaac

SEQ ID NO: 12619 - DNA, 350 bp, Zea mays
  unsure (1)..(350): unsure at all n locations; Clone ID: LIB3061-102-Q1-K6-H3
gggggggggaaaaaaaaaaaactntgaaggggggtcattagaaccgnttnacctgtttagcgtaccggtgcgcgtgccgggtgttgtattttgtgtttgagtgtgttgtaaactgggcaggtacatgccacccaccccttatgtgttcgtttanggggntnactnntntcatnntantnacngataaactaaaaaaaaaaaaaaactcgtgttcggtaattaagtgctgcttagtgtgatnaaaaaaaaaaaaaaaaaaaaaaaaaaaaaaagaaaaaaaaaaaaaaaaaaaaataaaaaaaaaaaaaaaaaaggggggggaaaaaaaaaaaaaaaattttttttttttt

SEQ ID NO: 12620 - DNA, 547 bp, Zea mays
  unsure (1)..(547): unsure at all n locations; Clone ID: LIB3061-102-Q1-K6-H4
caaatgggcaacatcaattatctaactccaaaaaccatgaagctggtgcttgtggttcttgctttcattgctttagtatcaagtgtttcttgtacacagacagtcnctncanctttttggggaatgaangggggancancaacatnatccacaacaacatnatccacaaaaacaacaacatcaaccaccaccacaacatcaccagcagnancaacaccaacaacaacaagttcacatgcaaccacaaaaacatnagcaacaacaagaagttcatgttcaacaacaacaacaacaaccggaggancaccaccaacaacaacaacaacaggaccaacaacaacatcaatgtgaaggccaacaacaacatcaccaacaatcacaaggccatgtgcaacaacacgaacagagccatgaacaacaccaaggacagagccatgagcaacaacatcaacaacaattncagggtcatgacaagcaggaacaaccacaacagcctnagtaatataagcaggggccaggaaaaaaaacaacagcaaccatgtgattg

SEQ ID NO: 12621 - DNA, 503 bp, Zea mays
  unsure (1)..(503): unsure at all n locations; Clone ID: LIB3061-102-Q1-K6-H5
caaggggcagctaaccttggggggggtgttctcaccataaaacatatttggtcctatagctgacaatgctggtggtattgttgagatgagccagcaccattgaaagtgtgtagagaaatcacagatgttctagatgctgtgggcaacacaactaaagctactacaaaattttttgtggtgggggcagcaccactnccatcatccctcctggnnagtgcatacataaacaaactaccttcttttgctcaaatgcccctcacagaggttgacataacactcccccagatttttgttgatggtttattaggctcaatgcttatattcctgtttacagcctagcctggttcaaccattagcaaaactgcacattaagctcctaatcatgtcactagacaatttattctataccctcctcttatggactacaaagagaaaccctatttccgaccctctctccacaattgttctcttttcacatccttaacaaaaatcataaaaacctc

SEQ ID NO: 12622 - DNA, 359 bp, Zea mays
  unsure (1)..(359): unsure at all n locations; Clone ID: LIB3061-102-Q1-K6-H7
ccccccccccttttttcccananaaacacattttttttttgggggggggaaaaaaaaaaannctggtgtgctccttggtctttctgnaagtgctgttacggngaccattttnccgcaatgctcgcaagctcctatagcttnccttgttnccccntacctctttcctccccccccctcttttttttttgtccnggggnnnnaaccctacannatccaacanncaaacacaaaaaacatataacctttatcacccttnttactncaacaatcattanccctattacatcanttaccttnnntncatttattnncacaaaacttannnaacaacttctacaacaacttntnctagcaaacct

SEQ ID NO: 12623 - DNA, 330 bp, Zea mays
  unsure (1)..(330): unsure at all n locations; Clone ID: LIB3061-102-Q1-K6-H9
gctccttggtctttctgcaagtgctgctactgcgaccattttcccgcaatgctttcaagctcctataacttcccttnttnccccntacctttcaccacccctctcttttttgggggggggcgcaaactncaaccctacannatccaacaaacaatacacaataaaatattacctttatcacccttnttcctncaacaatnatnanacctattacaacaattacctttaaatgcatttatttgncacaaaacattanggctcataaactacaacaacttgtgctagcaaaccttgctgnctatttttttcacagaaatttcttccattaaa

SEQ ID NO: 12624 - DNA, 252 bp, Zea mays
  Clone ID: LIB3061-114-Q6-N7-A1
ggaacgtaaaatgttgttttttatgtggggaaataagatacaacccttggggggatattgtgggaacttacaaacaagggaagtggtattggcagatatgtatgtaattgatcattttaatataagagcataagtggggtggggtttgaactaggaatatgtgattgaagagcggtcactaattatgcgaccaaaccttggggtgtttgggtgagactgaaggttttgaataaggagaggtggggacaggag

SEQ ID NO: 12625 - DNA, 611 bp, Zea mays
  Clone ID: LIB3061-114-Q6-N7-A10
agtggaaatattccttgcaaccagttcaagagttgcctaatatatatatttgtagtaaacaatggcataaatgattatgtattgtagtgtacatatataagaaagactagttagatgcccgtgctttgcaatggcatataaaatattcgacaaaatatcacttcaataactcaatgaccttgcatcaagtagaaccagactaattgctccacaaccaatgcatgccaatattcaatgtgcagcactcactcctgcttgcactcaacaggtcgttcgctgctgcccttccccctccagtagcccccttggtctttgtatcataatcatcatcatcctcgtcatctttgtcttcatcatcgtcctcaccatacataacttcaaattcctcatcttgagtagcctctctagctagtaaaccatgatacaacatgtggggtaatcttgtcgctgcgtgcttctgttagccatgctgagatgacagtaagagagacgatggacttctctttcaagatgcttggaaccaataatgaatttggtaagtcatactcttgactatagtgtgctattcatttagaaagacattggagtgtgctgcaatttataacaaggca

SEQ ID NO: 12626 - DNA, 603 bp, Zea mays
  Clone ID: LIB3061-114-Q6-N7-A11
aagaatctagaaatgtactttcttatttctgggacgccacaaacatcatccaaaaaacttcattattgaactataactcataagcaatctaaaagagggcaccaccaatgatgggttgttggtagaacactgttgggtttgtcaaagcaagttggttgaatggcagcaattgttgcagttgtaagagggtgccagcgttaggcatagcgtgcaggtagaacggcaacaactgttgttgtgtcaagaaggcagcagggctcacatcagctagctggctgaatggtagtagttgttgctgctgtaaataagcagcagagttcaatgctgctagttggttgaatggaagaaattgctgggggtaggcagcaactagctggctgaatggtaattgttgttgcaaataagcagcagagttcaatgcagccagttggttgaatggaagaaactgatgttgctgagagtatgcagcaaggtttgctagcacaagttgttgtagttgttgtgccctgatgttttgtgccaccaaatggaccaaaggtaactgctgtaatatggctgacggttgttggaggaacaagggtgataatggtaagatgcctgttg

SEQ ID NO: 12627 - DNA, 321 bp, Zea mays
  Clone ID: LIB3061-114-Q6-N7-A12
agagtgaactgatttgattaaaagtttcacggcgacacatagacctgacaaaatatgagccattaatgctcaaccaaccactaggatacacccaacatagtttcagacattccgatggaaaaaaatttattctcggaagcacttttctccgggggggaagaagacaactcgctcgtatcaccagaccttgaggtcttcatgtgagttggtgctgtgcatgtgtcggttcatggttaccgctcgggtgctgttatttattctggtggtgagtcctgatctcgtggttgttattttttttttctttttggatcttgtctctgg

SEQ ID NO: 12628 - DNA, 252 bp, Zea mays
  Clone ID: LIB3061-114-Q6-N7-A4
aaaaaaaattaaataataaataaaatggttaaaaaaaaaaaagaaaagaaaaggataaagggggggtggcgtgatggaaatgaaaaaaaaaacaaaaaaaaaataaaaaaaccaaaaaaaaagaaaaaaaaaaatgaacaaaaagtcgaaaatgagaagaaaaaaaagaaaaaaaggggtacaggaaaaaatttgaaagtttaaaataaaaaggaaaaaatagagagaaaaaagaaagaaagaacagaccaa

SEQ ID NO: 12629 - DNA, 478 bp, Zea mays
  unsure (1)..(478): unsure at all n locations; Clone ID: LIB3061-114-Q6-N7-A5
aaaatatagatctctaatacttanttactgagaggtcgcacatatcagcatgagaactttattattacagtataaatcataaaaaatctagaagatggcaccaccaatggtgggcggttgcaataaggtggtaggattcgtcaaagcatgttggctaaatggtagcaattgttgttgttgtaagaaggcaacaatgtttgccacattctgtgggtagaatggtagcaattgttgctgttgcaagaaggcattaatgtttcccacaacttgtgggtaaaatggcaacaaatgttgttgtctcaagaaagcaacaatgtttgccacagcttgcagatggaatggcagaagctgttgttgcagtaagaaggcataagggctcccgacaagtaggttaaatggtagtagctgttgtgcctgcaagtagatagcaggggtcaccccagctagttgattgaatggaagaaactgtgttgctgga

SEQ ID NO: 12630 - DNA, 235 bp, Zea mays
  Clone ID: LIB3061-114-Q6-N7-A6
atctagaaatgtactttcttatttctgggacgccacaaacatcatccaaaaaacttcattattgaactataactcataagcaatctaaaagagggcaccaccaatgatgggttgttggtagaacactgttgagtttgtcaaagcaagttggttgaatggcagcaattgttgcagttgtaagagggtgccagcgttaggcatagcgtgcaggtagaacgacaacaacagttgttgc

SEQ ID NO: 12631 - DNA, 560 bp, Zea mays
  Clone ID: LIB3061-114-Q6-N7-A7
agaaatgtactttcttatttctgggaagccacaaacatcatccaaaaaacttcattattgaagtataactcataagcaatctaaaagagggcaccaccaatgatgggttgttggtagaacgctgttgggtttgtcaaagcaagttggttgaatggcagcaattgttgcagttgtaagagggtgccagcgttaggcgcagcgtgcaggtagaacggcaacaactgttgttgtgtcaagaaggcaacagggctcacatcagctagctggctgaatggtggtagctgttgctgttgtaaataagcagcagagttcaatgctgccagttggttgaatggaagaaattgctgggggtaggcagcagctagctgactgaatggtagttgttgttgcaaataagcagcagagttcaatgcagccagttggtttgaatggaagaaactgctgttgctgaaagtaggcagcaaggtttcctagcacaagttgttcgacctgatgttccttgatgttttgtgccaacaaatgccccaaaggtaactgctgtaaaagggctgacgggttgt

SEQ ID NO: 12632 - DNA, 550 bp, Zea mays
  Clone ID: LIB3061-114-Q6-N7-A8
aagaaaaaaacttgccacgtatataatcgataattgatgatgtattgaagaacagagttttgaaccatggagcagtttggaagttttacatgactggggaaaaaaaagacatgggattgtagcttttatgagcactgctactagtaatgttcacatagcatggctctgtaataatactgttgatcaccacatccaccagcagcaggcaatccggttgccaatgaggaggcagcctcagacaagcacctgagctgcagctagcctagcaatcggaaccctgaaaggggagcaagaaacgtaatccagcccagccttcgcgaagaaggccacagaggaaggctctccaccgtgttctccacaaatgcccaccttcaagttaggcctagctttgcggcccctctctgtagcaaacttcaccagctcgcccactcccctctggtccaggacctcgaaggggtcatgttggaggatgccctgagcaagaagacgggaatgaacttccccacatcatccctgctgtacccaaaggtcatctgcgttaggtcgttcg

SEQ ID NO: 12633 - DNA, 327 bp, Zea mays
  Clone ID: LIB3061-114-Q6-N7-A9
aagaatctagaaatgtactttcttatttctgggacgccacaaacatcatccaaaaaacttcattattgaactataactcataagcaatctaaaagagggcaccaccaatgatgggttgttggtagaacactgttgagtttgtcaaagcaagttggttgaatggcagcaattgttgcagttgtaagagggtgccagcgttaggcatagcgtgcaggtagaacggcaacaactgttgttgtgtcaagaaggcagcagggctcacatcagctagctggctgaatggtagtagttgttgctgctgtaaataagcagcagagttcaatgctg

SEQ ID NO: 12634 - DNA, 486 bp, Zea mays
  Clone ID: LIB3061-114-Q6-N7-B10
tttttttttttttttttttttttttttttttttatttttttttttttttattttttttttttttttttttttttttttttttttttttttttttttttttttttttttttttttttttttttttttttttttttggggttttaattcacaatggggtttttttttaaaattttatgggccaaacacataagggggggggcctttttgggtaaacccccttttgggggtttaaggggggggggaaccaattttttatttgggaaacccccataggggtttgggggggggggggtttttttggggggggggggggggccaaccccccatttgggggggggttttgggcggtttaaaaaatggccccccccttttggggggttgggggggaaccaaaaaaccaaagggggggggggggggggcccccggggttttggggggaaccccgtgggaaaatggggggggagaaatttggggggaataagcgcc

SEQ ID NO: 12635 - DNA, 581 bp, Zea mays
  Clone ID: LIB3061-114-Q6-N7-B11
agaaatgtactttcttatttctgggaagccacaaacatcagacaaaaaactttattattgaactataactcataagaaatctaaaagagggcaccaccaatgatgggttgttggtagaatgctgctgggtttgtcaaagcaagttggttgaatggcagcaattgttgcagttgtaagagggtgccagcgttaggcgcagcgtgctggtagaacggcaacaactgtggttgtgtcaagaaggtagcagggctcacaccagctagctggctgaatggtagtagttgttgctgctgtaaataagcaggagagttcaatgctgtcagttggttgaatggaagaaattgctgggggtaggcagcagatagctggctgaatggtagttgttgttgttgcaaataagaagcagagttcaatgcagctagttggttgaatggaagaaactgctgttgctgagagtaggcagcaaggtttgctagcacaagttgttgtagttgttgtgccctgatgttttgtgccaataaatgcaccaaaggtaactgctgtaatagggctgatgattgttggaggaacaagggtgataa

SEQ ID NO: 12636 - DNA, 517 bp, Zea mays
  unsure (1)..(517): unsure at all n locations; Clone ID: LIB3061-114-Q6-N7-B2
ggatccacgaccatacatcaaaaactgctgattattggaaacatttcataatacaaagacaacaacttgagaatagaagtacacaacttatacttccatgccaaactggaacaggaaatagggtagtttggtgacaacattttccagacagaagaggatggaaccacaatcagtttgaggggaaagagtttcttattgatgcccaagtagaccttctgggcaaagatcggaacgggtgttcaggaagacggcggcgagccagagtggcgggcgatgaggtcgtcgtaggggttccgacggccggcggcctggctgatctggggatcccaggagagctgcaagttgaagcggatgaaggttcaaaagccgtaagggcgcaaagggaggctacactccggcttagtgcgctcgaaccgctccttcatattgtagacatgctcccgtcgaacctgaacgcgcttgtncgggatcttcatcagacggaggatcagattctccgtaaagtccataatgaaac

SEQ ID NO: 12637 - DNA, 330 bp, Zea mays
  Clone ID: LIB3061-114-Q6-N7-B4
ttttttttttttttttttttttttttttttttttttttttttttttttgccatgaacttacatactttaccatataagttaacaggttcttattctttttatatacataatgtaccaggtcaggttctcacatgatcgcagctgacaattaaacaccactagtgctgcaacataaaaacatgtacaaggtgatggatgactggtgcttccttggaagtaggtaggttcgtataccactcccaacttgcggaaggggtccgggcgagcaaagaagcggcggcggaaatcagtggaggtcttggttcgttaaaatctccagggaaggccttg

SEQ ID NO: 12638 - DNA, 174 bp, Zea mays
  Clone ID: LIB3061-114-Q6-N7-C1
atcatcgccggtcaagtacaaaaattaaatatgtgtaccatactgtcaacaacaggacgaagatgttgttatttgacatcctttgatttagcatttacaagaacaaaggccagagagtccaagaaggatagtgaccgcaacttatgggaggaagaaaacggggggggggggggg

SEQ ID NO: 12639 - DNA, 587 bp, Zea mays
  Clone ID: LIB3061-114-Q6-N7-C10
agaaatgtactttcttatttctgggaagccacaaatatcagcaaaaaaactttattattgaactataactcataagcaatctaaaagagggcaccaccaatgatgggttgttggtagaacactgctgggtttgtcaaagcaagttggtcgaatggcagcaattgttgcagttgtaagagggtgccaacgttaggcgcagtgtgcaggtagaacggcaacaaatgttgctgtgtcaagaaggcagcagggctcacagcagctagctggctgaatggtagtagttgttgttgttgtacataagcatgagagttcaatgctgccagttggttgaatggaagaaattgccgggggtaggcagcagctagctggctgaatggtagtagttgttgttgctgcaaataagcagcagagttcaatgcagctagttggttgaatggcagaaactgttgttgctgagagtaggcagcaaggtttgctagcacgagttgttgtagttgttgtgccctgatgttttgtgccaacaaatgcaccaaaggtaactgctggtgcttgaagtaggcagcaagtttgctagcacgagttgttgt

SEQ ID NO: 12640 - DNA, 552 bp, Zea mays
  Clone ID: LIB3061-114-Q6-N7-C11
agaaatgtactttcttatttctgggaagccacaaacatcagataaaaaactttattattgaactataactcataagaaatctaaaagagggcaccaccaatgatgggttgttggtagaacactgctgggtttgtcaaagcaagttggttgaatggcagcaattgttgcagttgtaagagggtgccagcgttaggcgcaacgtgctggtagaacggcaacaactgtggttgtgtcaagaaggtagcagggctcacaccagctagctggctgaatggtagtagttgttgctgctgtaaataagcaggagagttcaatgctgctagttggttgaatggaagaaattgctgggggtaggcagcaggtagctggctgaatggtagttgttgttgttgcaaataagaagcagagttcaatgaacctagttggttgaatggaagaaactgctgttgctgagagtaggcagcaaggtttgctagcacaagttgttgtatttgttgtgccctgatgttttgtgccaataaatgcaccaaaagtgactgttgtgatagggct

SEQ ID NO: 12641 - DNA, 544 bp, Zea mays
  unsure (1)..(544): unsure at all n locations; Clone ID: LIB3061-114-Q6-N7-C12
aaatctcaatcaatatattgattatttctaggaaacacacgtcggtntgagggcaccattatcgagtacatctcatatgtaatctaaaagatggcacctccaacgatgggttgctgcctcgacaagacaggattcatcaaagagaactggttgtatggcagcaattgttgctgctgtaggaaggcggcgaccaatgggttagccactaccaatggattaagtaactgttgtcgctgttgtaggtacgcagcagagttcgacagagtcagttggttgaatggaagcagctgttgcaagtaggcaacagggtttgccacagctagttgagtcagagctggtacaatctgttgcaacaattgttgttgcaggtatgtaggtgcattgcccacagcgagcgggctagatgaaagcagttgttgttgttgtacgtaggcggcagggttcaccaaggctagttgactgagcgttggcagaaactgttgtagctgtacctgttgctcgtttgcaactacgttcgccagagcaagtgggttggatgcaagca

SEQ ID NO: 12642 - DNA, 433 bp, Zea mays
  Clone ID: LIB3061-114-Q6-N7-C2
aacatcataatgtatggtactttattgcttaacaccgttatatgagtataacgggtaggtagacacaattctttaattgcaaacaccactaatgtcattgctgctgcatggattattttggtagtatgagtggtacaagccgcacattgatggtaggtattgtgctgctgtcaagattgccaccgcactttgagtagtttgttgagatccacataactcacatggttgttgttgttgctcctcctggattatggattgaaccatgttgtaaattggttggtgaatgtattgtgggtcaatttgcctaagatcatgacaacattgttgttgcaatacctggcagctacttggttgtattaaacttgattggagaaaaggcattaccaaagggttgcactgctgccttaggaatttatgacaattttttagattt

SEQ ID NO: 12643 - DNA, 565 bp, Zea mays
  unsure (1)..(565): unsure at all n locations; Clone ID: LIB3061-114-Q6-N7-C3
gaaaaaacgaaatgtcttttgtttggttctggagacaaaacatgatgagagactgttacagttacagatcatcagtaacttaaacctcaacctcgtccatagtagatcgactgaaacttcattttcttcgccaccccctttttcccaaaaaaaaagtcagttataatttcaaggtatggtgaatccgatgctttttatcttgagttctccttgaagcctctctggatcacgcacccggccgagtactgctcgcgtttgtcgcgcgagctgcaggggcagcggcctgatcagcaggtggcagcgatccgcctgctgttgtgttgggaggcaatactgccatagcttgcggcggcggatggagcctgaagttgtgctgcgggagcgagggagccgggaagaaaggggcatgaatctgtggcggnggatgctggagcagaggctgcaccgtgacctgctgcgccggcggcggcggatgctgcaccaacggttgcacggcggtgacctgctgcgccgccagcggcggtggtggtggcagtatcatccttggcgttggaagcggcgggta

SEQ ID NO: 12644 - DNA, 629 bp, Zea mays
  Clone ID: LIB3061-114-Q6-N7-C4
tttttttttttgtgcatgcaattacaaaccaaaactcaaatgctaagatatttgttcatttatctttcaaaacaaacacaatatcactcattaccatcggtttcctagaactacttgtacttgaccttaccactatatatggtcaacgcatgttacaattattatactgtatgatacatataatgtctcactaaagttccttcagaaccatggaacggtaccatagctaccatcagacgacagagccgcagctgagaacatctgatccacttcgacatccatatcagacgatcttttcgcgaagcgtcccttgatcctcggccgtgcttctgcgtacgtcttcctcgttgcataccgtatggtcttctcaaacttcctgctcttcttcttctccctgtacctcagcaccctggcctccctgtccatggaggccaagtgaagcggcatctggagcggaggacccgacgagaacaggctgatggccccagcaggcgtcagcaggatgccggagcttggcatgtctgtcgttgccatgttgtctggtactatacccacctccattgacgatgagaaagagactatgctgcgatggacaattgctgatgatactagtctggcagatgtgctgg

SEQ ID NO: 12645 - DNA, 453 bp, Zea mays
  Clone ID: LIB3061-114-Q6-N7-C8
gggggccaaccaaaaacaggtcttttttttaaaaaaagggacccggttaaagcaaactttgggggaacacgtttcaccagggcggggcggggaccaattttccagggggatccattttatacaggagggggccccagacttatttttaggaattggggcccgggctactggtatttttgcttataaccttatcatgggagttcatgttttggttcacaatgagccggtaacccctgacgtaccatgttgaactttcccaaaaactttttttttttttttggaaaaatttcccaaaaaaacttaaaaacactttatgtggacaatgcccggaccaatttcgtcatactctcccttggagatcccatttgctgaaaaagcttggagaagccaaaatagagccaccggtccaaacactgttctttcttttaaggggcgcaatcactttaaccttta

SEQ ID NO: 12646 - DNA, 610 bp, Zea mays
  Clone ID: LIB3061-114-Q6-N7-C9
agaaatgtactttcttatttctgggaagccacaaacatcagacaaaaaactttattattgaactataactcataagaaatctaaaagagggcaccaccaatgatgggttgttggtagaatgctgttgggtttgtcaaagcaagttggttgaatggcagcaattgttgcagttgtaagagggtgccagcgttaggcgcagcgtgctggtagaacggcaacaactgtggttgtgtcaagaaggtagcagggctcacaccagctagctggctgaatggtagtagttgttgctgctgtaaataagcaggagagttcaatgctgtcagttggttgaatggaagaaattgctgggggtaggcagcagatagctggctgaatggtagttgttgttgttgcaaataagaagcagagttcaatgcagctagttggttgaatggaagaaactgctgttgctgagagtaggcagcaaggtttgctagcacaagttgttgtagttgttgtgccctgatgttttgtgccaataaatgcaccaaaggtaactgctgtaatagggctgatgattgttggaggaacaagggtgataaaggtaagatgccagctgcgattgcctgtt

SEQ ID NO: 12647 - DNA, 92 bp, Zea mays
  Clone ID: LIB3061-114-Q6-N7-D1
agtaaaactgatggttgattatttataataacaggttttaattcctgctaaaaacaacccgcctggaaaaccaaattttatttacatacaat

SEQ ID NO: 12648 - DNA, 589 bp, Zea mays
  unsure (1)..(589): unsure at all n locations; Clone ID: LIB3061-114-Q6-N7-D10
aaaaatcctaatcatgtgcttcttccaaaatcctgaaatctacaaagatcagagccagccgttgttatgtacagagacttcagctcatgaaactgttaccctgcgactgcccttcatagcccagcagtgcaaacttcacatggatcccgatcttccctccctccttcacaagcttcgccgcgatcaccagccagtggcccgggacgtcgtgtggcccttttaccacctccgagatgtcgacgaacttgaggagcttcctggaccggagcgggaccggcggtccgtcggggtagacacctgagttcagctgcaccgccggctcatgtttcgcctggtgggtgtcagcacgctgcgtgaaaggggagctcagtgtcgtgctgatcgtcgtcaggaagctccccttctgagacgccgccggagcgttcctccactcggtcctctggatggtgcagttggggatgtgggtgtagaggaggcgcanatggaggaccttcttggcccaggcccccttcgagacgagctgggcgccagtgacgataaacactccgccgggggctctcttgtgccactccgggttgtacttgatggc

SEQ ID NO: 12649 - DNA, 330 bp, Zea mays
  Clone ID: LIB3061-114-Q6-N7-D11
ataaaactagtaatatatatccatataaatcattacattaaggtcatgagcaagatgccaaagactctagattgaaagcgcatccgtaaaggtttatctctagagcactagcatacaagacccaaataccatatacaaacatgtatacatctcatgcccttaacacttccacgtcggtttggctggagcaaactacaggcttggcttgcagttgatcaacgcacagagacgtttttcatctttgctgatctgtgtttgacaaagaaagcggctagcatactttttgtgcgaagcggagccttctttgtcaaacacagagacgtttttcat

SEQ ID NO: 12650 - DNA, 325 bp, Zea mays
  Clone ID: LIB3061-114-Q6-N7-D12
agagcctcaagaaataaagtagtttaaaatttactggctacattttagaccatataaggaacaccgcgtacgccgggtgtatttatttgtatacgaacatagtaattaagtgcagcagcagatcatgatgtgtcgttgcattgatcaggcctcgtcgtcgacgttgtcagcactggcagcagaagcgagagcggaagtagtttgattcttaacgagcgcaacgatcctcactgctaagaacttatccttgatgccaagctactgcatgtaagggatcacagaagaggggtggacaggccactcaaaggccgacttgaagatcctg

SEQ ID NO: 12651 - DNA, 348 bp, Zea mays
  Clone ID: LIB3061-114-Q6-N7-D2
agaaagtactttcttatttctgggacgccacaaacatcatccaaaaaacttcattattgaactataactcataagcaatctaaaagagggcaccaccaatgatgggttgatggtagaacactgttgggtttgtcaaagcaagttggttgaatggcaacaattgttgcagttgtaagagggtgccagcgttaggcatagcgtgcaggtagaacggcaacaactgttgttgtgttaagaaggcagcagggctcacatcagctagctggctgaatggtgatagttgatgctgctgtaaataagcatcatagtccaatgctcctagttgggtgaatcgaagaaattgatggg

SEQ ID NO: 12652 - DNA, 554 bp, Zea mays
  unsure (1)..(554): unsure at all n locations; Clone ID: LIB3061-114-Q6-N7-D3
gggaagccacaaacatcagacaaaaaactttattattgaactataactcataagaaatctaaaagagggcaccaccaatgatgggttgttggtagaacgctgctgggtttgtcaaagcaagttggttgaatggcagcaattgttgcagttgtaagagggtgccagcgttaggcgcagcgtgctggtagaacggcaacaactgtggttgtatcaagaaggtagcagggctcacaccagctagctggctgaatggtagtagttgttgctgctgtaaataagcaggagagttcaatgctgccagttggttgaatggaagaaattgctgggggtaggcagcaggtagctggctgaatggtagttgttgttgttgcaaataagaagcagagttcaatgcagctagttggttgaatggaagaaactgctgttgctgagagtaggcagcaaggtttgctagcacaagttgttgtagttgttgtgccctgatgttttgtgccaataaatgcaccaaaggtaactgatgtaatanggctgatgattgttggaggaacaagggt

SEQ ID NO: 12653 - DNA, 583 bp, Zea mays
  Clone ID: LIB3061-114-Q6-N7-D5
agaaatgtactttcttatttctgggacgccacaaacatcatccaaaaaacttcattattgaactataactcataagcaatctaaaagagggcaccaccaatgatgggttgttggtagaacactgttgggtttgtcaaagcaagtaggttgaatggcagcaattgttgcagttgtaagagggtgccagcgttaggcatagcgtgcaggtagaacggcaacaactgttgttgtgtcaagaaggcagcagggctcacatcagctagctggctgaatggtagtagttgttgctgctgtaaataagcagcagagttcaatgctgctagttggttgaatggaagaaattgctgggggtaggcagcaactagctggctgaatggtaattgttgttgcaaataagcagcagagttcaatgcagccagttggttgaatggaagaaactgatgttgctgagagtatgcagcaaggtttgctagcacaagttgttgtagttgttgtgccctgatgttttgtgccaccaaatggaccaaaagtaactgctgtaataaggctgacggttgttggaggaaacaaggtgataatggta

SEQ ID NO: 12654 - DNA, 407 bp, Zea mays
  Clone ID: LIB3061-114-Q6-N7-D7
atcgagataaatctcaatcaatatattgattatttctaggaaacacacgtcggtatgagggcaccattatcgagtacatttcatttgtaatctaaaaaaggcacctccaacgatgggttgctgcctcgacaagacaggattcatcaaaaagaactggttgtatggcaacaattgttgcttctgtaggaaggcggcgaccaatgggttagccactaccaatggattaagtaactgttgtcgctgttgtaggtacccaacaaagttcgacagaatcaattggttgaatggaagcagctgttgcaagtaggcaacatggtttgccacagctagttgagtcaaagctggtacaatctgttgcaacaattgttgttgcaggtatttaggtgcattgcccacagtgagcgggc

SEQ ID NO: 12655 - DNA, 539 bp, Zea mays
  Clone ID: LIB3061-114-Q6-N7-D9
ctagaaatgtactttcttatttctgggaagccacaaacatcatccaaaaaacttcattattgaagtttaactcataagcaatctaaaagagggcaccaccaatgatgggttgttggtagaacgctgttgggtttgtcaaagcaagttggttgaatggcagcaattgttgcagttgtaagagggtgccagcgttaggcgcagcgtgcaggtagaacggcaacaactgttgttgtgtcaagaaggcaacagggctcacatcagctagctggctgaatggtggtagctgttgctgttgtaaataagcagcagagttcaatgctgccagttggttgaatggaagaaattgctgggggtaggcagcagctagctgactgaatggtagttgttgttgcaaataagcagccgagttcaatgcagccagttggctgaatggaagaaactgctgttgctgagagtaggcagcaaggttttctagcacaagttgttgtggttgttgtgccttgatgttttgtgcgctccaatgctccaaaggttactgc

SEQ ID NO: 12656 - DNA, 459 bp, Zea mays
  unsure (1)..(459): unsure at all n locations; Clone ID: LIB3061-114-Q6-N7-E1
agataccacattttttttctggtcaatgtccaggtagcactggagtacatgccactctccagaaattcgccactccatgattatcacacaaagtcctaccacagcagtgtcttatcacaccgccaagtttcgagtttatgtacacagggagcttcctctacacctggacgacgccatcacccccaggcatgcgtncccattcacgagaactatcagcgcaaagccacccaacatgcttattagtacgcatggttggccataagggctttcccggcacggtgtgggtggagggcgcaggcgcagtggactgacgtgaggctgaggcagccactgatgatgagggagtgcctntcggggcaggtgtgcagcgccgggaaggagttgcagacggtctgcaccgacgggggcgtcagggcggtgcactggctgatgttgaggttcgngagcccgtntttcact

SEQ ID NO: 12657 - DNA, 496 bp, Zea mays
  Clone ID: LIB3061-114-Q6-N7-E10
ggaaatataacttcttatttctagggggccacattcatcagccaaaaaacttcatttttgaattacaactaataagccatctaaaagagggcaccgccaatgatgtgttgttggtagaaggctgctgggtttgtcaaagcaagttggacaaagggcagcaactgttgcagttgtaaaagggttgcggggttagccacaaactgctggtagaacggaagcacttgttgttgtgtcaaaaaggaagcggggcttgttgtagctagctggccaaatggtagtagtatttgctgctggaaataagcagaggggttcagtgcggccaattggttaaatggaaaaaattgttgctgctgagagtaggcagtagctagctggctgaatggtagtagttgttgttgctgcaaataagcagcagggttcagtataaacagttggttgaatggaagaaattgttgttgcttaaagtagggggaaaggtttgccagagctacttggc

SEQ ID NO: 12658 - DNA, 479 bp, Zea mays
  Clone ID: LIB3061-114-Q6-N7-E11
aaatctcaatcaatatattgattatttttaggaaacacatgccgctttgagggcaccattttcgagtccatctcatttgtaatctaaaagatggcaccaccaacgatgggttgctgccacgacaaggcagggttcatcaaaaagaactggttgtatggcagcaattgttgctgctgtaggaaggcagcgaccaatgggttagccaccgcttgtggattaagtaactgttgtcgctgttgtaggtacccagcagagttcgacacagtcagttggttgaatggaagtagttgttgcaagtaggcagcagggtttgccacagctagctgagtaagagctggtacaatttgttgcagcaactgttgttgcaacaactgttgttgcaggtttgtaggtgcattgcccatagcgagcgggctaaatgaaaaaagttgttgctgttgttggtaggcgatagggttcaccatggctagttgactgag

SEQ ID NO: 12659 - DNA, 286 bp, Zea mays
  Clone ID: LIB3061-114-Q6-N7-E12
aagaatctagaaatgtactttcttatttctgggaagccacaaacatcagacaaaaaactttattattgaactataactcataagaaatctaaaagagggccggtcgcgtgggtcgtcccggggcttctcgggccggggcctgctggcgttcccgctttccctatggtgtgtcgttttccagcttggcgtgttcatggccgttgctgttgcctgtgtgggattgttgtgcgctcgcggttgctctcggcgtgcgagccggaggcgtgttgtgtgtggcctggggtgc

SEQ ID NO: 12660 - DNA, 389 bp, Zea mays
  Clone ID: LIB3061-114-Q6-N7-E4
aaacacaagggccccccactgaatttcgggttaacttaacatttgttttattctttggttttggcttttttaacattcaaaggaacatttttttcagcgctccagttcctggggaatacataaatttctttttttacaaaaagggttttccggaaaccttttttacagtttaactaaatgctccttttttaaaactcacttggataggaaaaatttttttttccaattctttaaataaaggcaaaggggaaggcaaagggccctttttcaaaatattgcaggttttttaaaacccttggccttaacttaccatagtgcaaaattaccggtgtaaaattagccctattaaggggtttaataacaggtgggaaccccttcaggttttttaa

SEQ ID NO: 12661 - DNA, 212 bp, Zea mays
  unsure (1)..(212): unsure at all n locations; Clone ID: LIB3061-114-Q6-N7-E6
atcagttgagaaattattattacagtntaaagcataaaaaatctagaagatggtaccaccaatggtgggctggtgcattaaggtggtaggattcgncaaagcgatttggcnatagngtctttaanngctgntggtgggagaaggcgacaatgtttgccacattctgtgggttgaatggcaggtattgttgttgttgcatgaaggcgttaatg

SEQ ID NO: 12662 - DNA, 382 bp, Zea mays
  Clone ID: LIB3061-114-Q6-N7-E7
ctagaaagtactttcttatttctgggaagccacaaacatcagataaaaaactttattattgaactataactcataagaaatctaaaagagggcaccaccaatgatgggttgttgttttttacactgctgggtttgtcaaagcaagttggttgaatggcagcaattgttgcagttgtaagagggtgccagcgttaggcgcaacgtgctggtagaacggcaacaactgtggttgtgtcaagaaggtagcagggctcacaccagctagctggctgaatggtagtagttgttgctgctgtgaataagcaggagagttcaatgctgctagttggtgtgaatggaagaaattgctggtggtaggcatcaggtcgttgcctttaatggt

SEQ ID NO: 12663 - DNA, 581 bp, Zea mays
  unsure (1)..(581): unsure at all n locations; Clone ID: LIB3061-114-Q6-N7-E8
aatagcatggtggtgtcaatctttatcaaaatgcaaagagctttatttgacaaccatgtntgtacatacagacacgacgacgatcgaacatataagaccatgataggtcatatgacatatataagacctttatctagcatatctgtaatacccgtcctgctgctgaaaccagactaaagttggcgcaggtagacaccgatcgcagcgacgaatctggtcgtcgcgcgtccatagaatcccacgatgctgctgccgatgggcgcggtgatgcagaaacgtgtgccgctctcgatgccccatggcccccaagctctggcggtgctggtgacaatcctgaacgaggtaagggtagtcgcaccttcgaatgcgccgtacgttccagaaacttccttgacgtattcagcgtcgccaagatcgagcttccggacgttgccgtcaagtccaccccatcgtccagcggtgcgcgtctgaccacctgtgtcggtactgtaggtgaactcgatggagtccacggtaacgccggcgcggtaggtcaggctctgcaaacgcctcggcggctccgttgtcgcgatgttctgcgc

SEQ ID NO: 12664 - DNA, 581 bp, Zea mays
  Clone ID: LIB3061-114-Q6-N7-E9
atctagaaatgtactttcttatttctgggaagccacaaacatcagataaaaaactttattattgaactataactcataagaaatctaaaagagggcaccaccaatgatgggttgttggtagaacactgctgggtttgtcaaagcaagttggttgaatggcagcaattgttgcagttgtaagagggtgccagcgttaggcgcaacgtgctggtagaacggcaacaactgtggttgtgtcaagaaggtagcagggctcacaccagctagctggctgaatggtagtagttgttgctgctgtaaataagcaggagagttcaatgctgctagttggttgaatggaagaaattgctgggggtaggcagcaggtagctggctgaatggtagttgttgttgttgcaaataagaagcagagttcaatgaacctagttggttgaatggaagaaactgctgttgctgagagtaggcagcaaggtttgctagcacaagttgttgtagttgttgtgccctgatgttttgtgccaataaatgcaccaaaggtaactgttgtaatagggctgatgattgttggagggaacaaggtg

SEQ ID NO: 12665 - DNA, 117 bp, Zea mays
  Clone ID: LIB3061-114-Q6-N7-F1
agggggggagattttgatggttacatacttgattgttcaatttttgtccaaatagtttgacagttttacaggtactcactttactgccagaaaaaaattttagcatgatttcatgaa

SEQ ID NO: 12666 - DNA, 635 bp, Zea mays
  Clone ID: LIB3061-114-Q6-N7-F11
cacattagaatctggaaatgtaacttcttatttctggttggccacatacatcatccaaaaaactttattattgaattacaactaataagcaatctaaaagagggcaccaccaatgatgtgttgttggtaggaggctgctgggtttgtcaaagcaagttggacaaagggcaacaattgttgtagttgtaagagggttgcggggttagccgcaaactgctggtagaaaggcagcaactgttgctgtgtcaagaaggaagcacggcttgctgcagctagctggctaaatggtagtaatatttgctgctgcaaataagcagcgaggttcagtgcggccaattggttaaatggaagaagttgttgttgatgagagtaggcagtagctagctggctgaatggtaatagttgttgctgcaaataagcagcagggttcagtgtagatagttggttgaatggaagaaattgttgttgctgatagtagggagaaaggtttgccagagctacttggttgatcacaggtagcacgagttgctgcagctgctgtgccttgatggtttgtaccaatgactgcaccaaagatagggctggcgattgttgaaacagggtgataaaggtatgttgcttgctgcgattgcttg

SEQ ID NO: 12667 - DNA, 453 bp, Zea mays
  Clone ID: LIB3061-114-Q6-N7-F12
gaatctagaaatgtactttcttatttctgggaagccacaaacatcagacaaaaaactttattattgaactataactcataagaaatctaaaagagggcaccaccaatgatgggttgttggtagaacgctgctgggtttgtcaaagcaagttggttgaatggcagcaattgttgcagttgtaagagggtgccagcgttaggcgcagcgtgctggtagaacggcaacaactgtggttgtatcaagaaggtagcagggctcacaccagctagctggctgaatggtagtagttgttgctgctgtaaataagcaggagagttcaatgctgccagttggttgaatggaagaaattgctgggggtaggcagcaggtagctggctgaatggtagttgttgttgttgcaaataagaagcagagttcaatgcagctagttggttgaatggaagaaactgctgt

SEQ ID NO: 12668 - DNA, 561 bp, Zea mays
  Clone ID: LIB3061-114-Q6-N7-F4
ctagaaagtactttcttatttctgggaagccacaaacatcatccaaaaaacttcattattgaagtataactcataagcaatctaaaagagggcaccaccaatgatgggttgttggtagaacgctgttgggtttgtcaaagcaagttggttgaatggcagcaattgttgcagttgtaagagggtgccagcgttaggcgcagcgtgcaggtagaacggcaacaactgttgttgtgtcaagaaggcaacagggctcacatcagctagctggctgaatggtggtagctgttgctgttgtaaataagcagcagagttcaatgctgccagttggttgaatggaagaaattgctgggggtaggcagcagctagctgactgaatggtagttgttgttgcaaataagcagcagagttcaatgcagccagttggttgaatggaagaaactgctgttgctgagagtaggcagcaaggtttcctagcacacgttgttgtagctgttgtgccttgatgtttttgtgccaacaaatgcaccaaaggtaactgctgtaaataggcttacggttgtt

SEQ ID NO: 12669 - DNA, 578 bp, Zea mays
  Clone ID: LIB3061-114-Q6-N7-F6
agaaatgtactttcttatttctgggaagccacaaacatcagataaaaaactttattattgaactataactcataagaaatctaaaagagggcaccaccaatgatgggttgttggtagaacactgctgggtttgtcaaagcaagttggttgaatggcagcaattgttgcagttgtaagagggtgccagcgttaggcgcaacgtgctggtagaacggcaacaactgtggttgtgtcaagaaggtagcagggctcacaccagctagctggctgaatggtagtagttgttgctgctgtaaataagcaggagagttcaatgctgctagttggttgaatggaagaaattgctgggggtaggcagcaggtagctggctgaatggtagttgttgttgttgcaaataagaagcagagttcaatgaacctagttggttgaatggaagaaactgctgttgctgagagtaggcagcaaggtttgctagcacaagttgttgtagttgttgtgccctgatgttttgtgccaataaatgcaccaaaggtaactgttgtaatagggctgatgattgttggaggaacaaggtgat

SEQ ID NO: 12670 - DNA, 256 bp, Zea mays
  Clone ID: LIB3061-114-Q6-N7-F7
attaaaaatttttttttttttatttttttttattttttttttttttttttggatcgggaaaggaaacttttttttttggggggggcaccttcattatgaaaaaaactttattattgaattacaactaataagtaatttaaaagaggggccccccaaagatgtgtttttggtcggagggggttgggtttgttaaagtaagtgggcaaaagggcaacaattggaggaaattaataaagggtcgaggggttagcccaaa

SEQ ID NO: 12671 - DNA, 357 bp, Zea mays
  unsure (1)..(357): unsure at all n locations; Clone ID: LIB3061-114-Q6-N7-G1
atntagaaaatgtactttattatttgtgggaagccacaaacattagacaaaaaactttattattgaactataactcataagaaatttaaaagagggcaccaccaatgatgggttgttggtagaatgctgttgggtttgtaaaagcaagttggttgaatgggagaaattgttggagttgtaagaaggtgccagcgttaggcgcagagtgctggtagaacggtaacaactgtggttgtgttaagaaggtataagggtattacaccaggtaggtgggtgaatggtagtagttgttgatggtgtaaataagtaggagagttaaatgttgttatttggttgaatggaagaaattgatggggg

SEQ ID NO: 12672 - DNA, 316 bp, Zea mays
  Clone ID: LIB3061-114-Q6-N7-G10
aaaattaaaggggggctcttttgttgttgggtagtgggtggaaggggggggggggggtcaaagcaggggggggggggggtagaaaaggaagggggtgggtagaaaaaggcgggcggaagggaaaaagaagggggggcaaacaaaaagaagggggagggggaaaagggggggggggggaaaaaaaagggggggggaaaagaaaaaaaaaggggggggggggacaaaaagggggggggggagggccctgagggttggtgccaataaaaaacccaaggaaagcgcggaaaaggggagggggaaaaaagggggaccaggg

SEQ ID NO: 12673 - DNA, 600 bp, Zea mays
  Clone ID: LIB3061-114-Q6-N7-G11
ccaaacatcctttttccctatatattattcctttccatttcaatggttcattcaggtcattgctcacactgccacccatggtgatgggtgacactccgttactcatcgccgctaaacgagtgaactagctatagccctataggtagctagtcagcggctccattacattattactacagtacatagtttcctcagtagtagacaccgccggcagctgcgttgcaagggcagggacctggctgctgcagctgcagaccgcacatcgccgtcagctgctgcgctacctgggccgccatcagcgccgcgagctcgccctgcggctgctgctgcaggaaggactgcaggaccacaccgtatgtcgcctggtaccggtgcagcggctccacctgcctgatctggtggcagcactgctgctgcagcgcctggcactgtggcgagccgtagggcgtcgccgccgggctgcactggtgcctcaggaactcgacgcactggcccaggaacgggctgccgacgctgcccgacgccgcagatccgaactgctggcacgggcttagctgcggtggttgagtggggtattgccatggctgcggctgctgctgc

SEQ ID NO: 12674 - DNA, 589 bp, Zea mays
  Clone ID: LIB3061-114-Q6-N7-G12
gaacataagaactagaatgtactttcttatttctgggaagccacaaacatcagacaaaaaactttattattgaactataactcataagaaatctaaaagagggcaccaccaatgatgggttgttggtagaatgctgctgggtttgtcaaagcaagttggttgaatggcagcaattgttgcagttgtaagagggtgccagcgttaggcgcagcgtgctggtagaacggcaacaactgtggttgtgtcaagaaggtagcagggctcacaccagctagctggctgaatggtagtagttgttgctgctgtaaataagcaggagagttcaatgctgtcagttggttgaatggaagaaattgctgggggtaggcagcagatagctggctgaatggtagttgttgttgttgcaaataagaagcagagttcaatgcagctagttggttgaatggaagaaactgctgttgctgatagtaggcagcaaggtttgctagcacaagttgttggagttgttgtgcccctgatgtttgtgccaataaatgcaccaaaggtaactgcttgaatagggctgatgattgttggaggaacaagggtg

SEQ ID NO: 12675 - DNA, 348 bp, Zea mays
  Clone ID: LIB3061-114-Q6-N7-G2
ggggggggggggggggtcgggggggttgggggggggatggggggggggtagggggggggggggggggggggagagtaaggggggggggggagaagggggtgggggggttggggggggaagtggtatgggtttgaaattgttagaggataaaggagcggggggaaaaaggggtgaggggggggggggggaaggggggggggtaataagagtaggggggggggggtggttggggggttgtgaggggggaagggggatgggggggtatagattggggttgtggtgaaatggggggggggggggatttggtgtgggggggggggggggggggttttttgggaaggggggggg

SEQ ID NO: 12676 - DNA, 155 bp, Zea mays
  Clone ID: LIB3061-114-Q6-N7-G3
aaatgggtcattcagggtattgtttacactgaccctgccccccctgggggggcggggcccattattactcaatcattgccgtttaatgactcaatttgctagtttgcccccggcttttcccccatacatagttttttcaaggggggacacccccg

SEQ ID NO: 12677 - DNA, 370 bp, Zea mays
  Clone ID: LIB3061-114-Q6-N7-G6
caggctcgaaaggaaacatgtttttttttttatttagtgctaaaccagggcggaacactttttttttttgtgccgtgctaacaaactggcagcccccaaaagggcctttggaacggtacggaaccaactgttggcttacaaagaaagcagcctcccaggggtttgtccctagccagggttatttgaacctttgtttctaataaagtccccttccaactcccaatttttgcacctagtcacagacaccgtaatttacacaaaaccagaaggcggtaggcagcccaaaatgttatggctcccctaacgttttcattccacccgatgtccaacggttatccgttaccggtttccctaaccaaaatggttcaac

SEQ ID NO: 12678 - DNA, 347 bp, Zea mays
  Clone ID: LIB3061-114-Q6-N7-G7
gacaacaaccaaacaacaactcattgcatcccgcgatacaagcaccagcaaatacaagcgaacaaacacataagcaaacaaacacatgaatgctgatgcagatgccacattattctatctagaggttgttggaatttgtgtgttacgttcataccatgtagaagccaaaaggtggtggttcataccatataattaccggcacgggaagctaccctactgcttggcaaaagccaaactgaacgcgacacacattcgctgtccatggtcagtgtgtatgtacctgcttatggaaagggcaagctaacattgcctttaatattggccccgagcccttggtggatgacaaa

SEQ ID NO: 12679 - DNA, 623 bp, Zea mays
  Clone ID: LIB3061-114-Q6-N7-G9
gagataaatctcaatcaatatattgattatttttaggaaacacatgccgctatgagggcaccattatcgagtacatctcatatgtaatctaaaagatggcaccaccaacgatgggttgctgccacgacaaggcagggttcatcaaagagaactggttgtatggcagcaattgttgctgctgtaggaaggcagcgaccaatgggttagccaccgctagtggattaagtaactgttgtcgctgttgtaggtacgcagcagagttcgacacagtcagttggttgaatggaagtagttgttgcaagtaggcagcagggtttgccacagctagctgagtaagagctggtacaatttgttgcagcaactgttgttgcaacaactgttgttgcaggtatgtaggtgcattgcccatagcgagcgggctagatgaaagaagttgttgctgttgtaggtaggcgatagggttcaccatggctagttgactgagcgctggtagaaactgttgcaactgttgttgttgttggtatgcagctacgtttgccaaagcaagtgggttggatgcaagcagctgttgttgcaagtaggcgatagggttcaccacggctaggtggctcattgcttgttgc

SEQ ID NO: 12680 - DNA, 158 bp, Zea mays
  Clone ID: LIB3061-114-Q6-N7-H1
atcgagataaatctcaatcaatatattgattatttctaggaaacacatgccgctatgagggcaccattatcgaatacatctcatatgtaatctaaaagatggcacctacaacgatgggttgctgccacaacaaggcagggattatcaaagagaactgg

SEQ ID NO: 12681 - DNA, 456 bp, Zea mays
  Clone ID: LIB3061-114-Q6-N7-H10
gagcatcgaaggggctgacgaatcgattcggcagctgccacattgtattcaagcacacaggacatcttattcagaatgtattacaatttatgctctgttagggtgaagaaggcaggcagatcgaaatgtaacaattcttggggtgtaaacaacagaaattgttttcgatttgggtacaaaactgatccaatcaccagctaaatgtgcctcctactacaatgcataaagttttcgtttctgctagcactcgaggcacgtgaacagtagcttccacacaatcagtatgttctgttgctgcagcagtttagcatactaccgaggaccctcggtgaacgttaattgctggaacagcttttcttgtttggtgaaatatacacaatgcaaaccaatgggggtgctccaatgtgctaaaaacccataccagccacccccttaacttttgctgacaactgctgt

SEQ ID NO: 12682 - DNA, 613 bp, Zea mays
  Clone ID: LIB3061-114-Q6-N7-H12
aagaatctagaaatgtactttcttatttctgggaagccacaaacatcagacaaaaaactttattattgaactataactcataagaaatctaaaagagggcaccaccaatgatgggttgttggtagaatgctgctgggtttgtcaaagcaagttggttgaatggcagcaattgttgcagttgtaagagggtgccagcgttaggcgcagcgtgctggtagaacggcaacaactgtggttgtgtcaagaaggtagcagggctcacaccagctagctggctgaatggtagtagttgttgctgctgtaaataagcaggagagttcaatgctgtcagttggttgaatggaagaaattgctgggggtaggcagcagatagctggctgaatggtagttgttgttgttgcaaataataagcagagctcaatgcagctagttggttgaatggaagaaactgctgttgctgagagtaggcagcaaggtttgctagcacaagttgttgtagttgttgtgccctgatgttttgtgccaataaatgcaccaaaggtaactgctgtaatagggctgatgattgttggaggaacagggtgataaaggaagagccacctgcgattgcctg

SEQ ID NO: 12683 - DNA, 224 bp, Zea mays
  Clone ID: LIB3061-114-Q6-N7-H3
aatctagaaaatgtactttgttacatctcgggaagccacaaacatcaaacaaaaaactctatgtattggactataactcatcagaaatctaaagagggcaccacctacgatgggctgatggtggaacgctgatgggctagccaagatacgagctagaatggcagctatagccgcagatgtaaaaggggggcagcaccaagcgcagcgggctagggaaatggaaa

SEQ ID NO: 12684 - DNA, 290 bp, Zea mays
  Clone ID: LIB3061-114-Q6-N7-H6
agaatctaaaaatgtactttcttatttctgggaagccacaaacatcagacaaaaaactttattattgaactataactcataagaaatctaaaagagggcaccaccaatgatgggttgttggtagaacactgctaggtttgtcaaagcaagttggttgaatggcagcaattgttgcagatgtaagagggtgccagcgttaggcgcagcgtgctggtagaacggcaacaactgtggttgtgtcaagaaggtagcagggctcacaccagctagctggctatatgataatagaa

SEQ ID NO: 12685 - DNA, 173 bp, Zea mays
  Clone ID: LIB3061-114-Q6-N7-H7
aggaagtactttcttgtttctgggacgccacaaacatcatgcaaaaaacggattgtggaactgtaactcataagcaatgttaaagggggcaccaccaatgatgggtggtgggtggaacactggtgggtttgttaaagcaagttgggggaatggcagggatggttgcaattggt

SEQ ID NO: 12686 - DNA, 421 bp, Zea mays
  Clone ID: LIB3061-114-Q6-N7-H8
aaaaccaaaactttattatgatgcatattttattggtcataccacacatgataatgggtgtcggcttactgcattattacatatttagatagagagggatggattgaggagatttcccaaatttcatgaatcaattgttgggcggaatggcagcggagaccccacaggggttggtgcggtagctgggcagcttgttctggttctggtagagtccacccatggccggcatgttctgcgccattattatggccatggggttgaaaccctgggcttccagcaactgctgctgcttctgcatcagaactggcttgtacaggctgttgtttgcggaagcggcacgctcaagcttcatcatcatttgtaaattctgtacaaaggactgcactttcattattttaattttttttttgacaatattttt

SEQ ID NO: 12687 - DNA, 624 bp, Zea mays
  Clone ID: LIB3061-115-Q6-N7-A1
ggtgttaagtagccaaaatttggcttggcgagctatttaaatagtctttcgaagatgctataagacatcgtacagtatcaggcatactttgaaacgtgccgtgctggctgctgtcgtagcgccgagggccttttcgcacggccatgcatcatgcaattgcactagcagatgctacacacacgcacaaacatgtgcgccgctaagttcagaagaggacattgatatgggtggacaatactagcgcggtagtgccacgaaccggttgccaccactacacgagacaacacggcacggcatagtacgcacatacatagagcctatatatatactagtactagtcagagaaaccaccagcaggcacaaaagatccgcgcaccccggtcgacgcggactgacagacgagctagatgtccgtgccgtacgtcggctagctaaaccttggtgaaacggaggtagcccttcttggagggcaggtcggcggtctcgaacccctgcgggaacatcttcctggcctcctcgtcggagacgccgggcgcgatgacggcgcactccccgggcttccagttggcgggcgtggccaccttcccgccatgcttggcggcggtgagcagcgagtcgacagcg

SEQ ID NO: 12688 - DNA, 497 bp, Zea mays
  Clone ID: LIB3061-115-Q6-N7-A11
atcgggataaatcccaatcaatattttgtttttttctaggaaacacatgtcggtttgagggccccattggcgagtccatctcatttgtaatctaaaagatggcccctccaacgatgggttgctgcaaggcagggttcatcaaaaaaaactggttgtatggcaccaattgttgttgctgctgcaggaaggtaccccccaatgggttacccactgccaatggattaagtaactgttgcccctgttgtaggtccccaccaaattttgacacacccagttggttgaatggaaccaactgttgtaagtaggcaccagggtttgccacagctagctgagtcaaagctggtccaatttgttgcaccaactgttgttgtaggtccctaggtccattgcccaccgcgagcgggctaaataaaagtagttgtaggtagacggcagggttcaccatggctagttgactgaccactggcataaactgttgcagctgttgttgttgctgg

SEQ ID NO: 12689 - DNA, 479 bp, Zea mays
  Clone ID: LIB3061-115-Q6-N7-A12
gaaaaaaaaaaaaggggcttttttttttgggggggccccaaaaaatttaaaaaaaaaatttattttgggacttaaaccaaaaggcaattaaaaagggggcccccccaagggggggggggggggaaaaaactggggggttttaaaaaaaaagggggggaaaggggaaaaattgtggcagtttaaaaggggggcccgcgttggggatttgggggggggaaaaaggaaaaaactttttttggttaaaaaaggggaagggggcaaaaaaaatttgggggggaaaggggaaaaattggtgttgttttaaaaaaaccgaaaaattaaatgctgtttttggggaaaaaggaaaaaaatgggggggggggggaaaaacaaaggggggaaagggaaaaggggggggcaaaaaaaccccaaatttaaatgccccccttggggggaaaggaaaaaaatatttttttttaaaatataacaaagggtttttt

SEQ ID NO: 12690 - DNA, 485 bp, Zea mays
  Clone ID: LIB3061-115-Q6-N7-A3
accccctggcaaaacatgcttttggggaaaagattgttcagttcttcacataccaacttggcacttacttcttttttcttggggtggcgggacattttttactcactccataacatagggcaaattaaacgggggggacccccgccgaacaagaacaacaattcccaaacccaagttttttttttggggtgacttgcttttataaagcatgcgtgcgttttaaattaccccaagggcccgcaaacatgggctttttactttccattcattttgcccgatttaacggggggtgctcctggtcttgccgctttaaaaccaatcttaaaccgtgggggagtttggcttcggcccgtccaaaaagttggcccccattccctttgtggccaggtttcttccccggtggaaaacactttgccacacttttccggggccccgcggggttttttaaaacaacgaagaccacagggttaccggggtttttgggg

SEQ ID NO: 12691 - DNA, 623 bp, Zea mays
  Clone ID: LIB3061-115-Q6-N7-A4
agaaatgtactttcttatttctgggaagccacaaacatcagacaaaaaactttattattgaactataactcataagaaatctaaaagagggcaccaccaatgatgggttgttggtagaacgctgctgggtttgtcaaagcaagttggttgaatggcagcaattgttgcagttgtaagagggtgccagcgttaggcgcagcgtgctggtagaacggcaacaactgtggttgtatcaagaaggtagcagggctcacaccagctagctggctgaatggtagtagttgttgctgctgtaaataagcaggagagttcaatgctgccagttggttgaatggaagaaattgctgggggtaggcagcaggtagctggctgaatggtagttgttgttgttgcaaataagaagcagagttcaatgcagctagttggttgaatggaagaaactgctgttgctgagagtaggcagcaaggtttgctagcacaagttgttgtagttgttgtgccctgatgttttgtgccaataaatgcaccaaaggtaactgatgtaatagggctgatgattgttggaggaacaagggtgataaaggtaagatgccagctgtgattgcctgttggatcctgtaggg

SEQ ID NO: 12692 - DNA, 254 bp, Zea mays
  Clone ID: LIB3061-115-Q6-N7-A5
ggggaaaaaaaaaaaaagggggggggttttttgggtaaaacccggttttggggttaaaggggggggggaaaaaattttttttttgggaaaaccccaataagtattggggggggggggggttttttggggggggggggggggccacccccccaattggggggggggttggggggttttcaaaaaagcccccccccttttgggggggtggggggaacccaaaaaaaaaaaggggggggggggggggcccccccggg

SEQ ID NO: 12693 - DNA, 616 bp, Zea mays
  Clone ID: LIB3061-115-Q6-N7-A6
ctagaaatgtactttcttatttctgggaagccacaaacatcagacaaaaaactttattattgaactataactcataagaaatctaaaagagggcaccaccaatgatgggttgttggtagaatgctgctgggtttgtcaaagcaagttggttgaatggcagcaattgttgcagttgtaagagggtgccagcgttaggcgcagcgtgctggtagaacggcaacaactgtggttgtgtcaagaaggtagcagggctcacaccagctagctggctgaatggtagtagttgttgctgctgtaaataagcaggagagttcaatgctgtcagttggttgaatggaagaaattgctgggggtaggcagcagatagctggctgaatggtagttgttgttgttgcaaataagaagcagagttcaatgcagctagttggttgaatggaagaaactgctgttgctgagagtaggcagcaaggtttgctagcacaagttgttgtagttgttgtgccctgatgttttgtgccaataaatgcaccaaaggtaactgctgtaatagggctgatgattgttggaggaacaagggtgataaaggtaagatgccagctgcgattgcctgttggat

SEQ ID NO: 12694 - DNA, 604 bp, Zea mays
  Clone ID: LIB3061-115-Q6-N7-A7
agaatctagaaatgtactttcttatttctgggacgccacaaacatcatccaaaaaacttcattattgaactataactcataagcaatctaaaagagggcaccaccaatgatgggttgttggtagaacactgttgagtttgtcaaagcaagttggttgaatggcagcaattgttgcagttgtaagagggtgccagcgttaggcatagcgtgcaggtagaacggcaacaactgttgttgtgtcaagaaggcagcagggctcacatcagctagctggctgaatggtagtagttgttgctgctgtaaataagcagcagagttcaatgctgctagttggttgaatggaagaaattgctgggggtaggcagcaactagctggctgaatggtaattgttgttgcaaataagcagcagagttcaatgcagccagttggttgaatggaagaaactgatgttgctgagagtatgcagcaaggtttgctagcacaagttgttgtagttgttgtgccctgatgttttgtgccaccaaatggaccaaaggtaactgctgtaatagggctgacggttgttggaggaacaagggtgataatggtaagatgcctgttgca

SEQ ID NO: 12695 - DNA, 608 bp, Zea mays
  Clone ID: LIB3061-115-Q6-N7-A8
agaaatgtactttcttatttctgggacgccacaaacatcatccaaaaaacttcattattgaactataactcataagcaatctaaaagagggcaccaccaatgatgggttgttggtagaacactgttgggtttgtcaaagcaagttggttgaatggcagcaattgttgcagttgtaagagggtgccagcgttaggcatagcgtgcaggtagaacggcaacaactgttgttgtgtcaagaaggcagcagggctcacatcagctagctggctgaatggtagtagttgttgctgctgtaaataagcagcagagttcaatgctgctagttggttgaatggaagaaattgctgggggtaggcagcaactagctggctgaatggtaattgttgttgcaaataagcagcagagttcaatgcagccagttggttgaatggaagaaactgatgttgctgagagtatgcagcaaggtttgctagcacaagttgttgtagttgttgtgccctgatgttttgtgccaccaaatggaccaaaggtaactgctgtaatagggctgacggttgttggaggaacaagggtgataatggtaagatgcctgttgcgattgcctgttg

SEQ ID NO: 12696 - DNA, 445 bp, Zea mays
  Clone ID: LIB3061-115-Q6-N7-A9
aaaaatgtgctttcttttttctgggaagccacaaattttagcaaaaaaaactttttttttgaacttttactcataagccatctaaaagagggcccccccaatgatgggttgttggtagaacactgctgggtttgtcaaaacaagttggtcgaatggcaacaattgttgcagttttaaaagggtgccaaccttaggcccagtgtgcaggtagaaccgcaacaaatttttctttttcaaaaaagcaacagggcttacaacaactagctggcttaatggtaataattgttgttgttgtacataaacctgaaagttcaatgcttccaattggttgaatggaaaaaatttcccggggtaggcaacaactaactggcttaatggtagtaattgttgtttctgcaaataagcagcaaagttcaatgcaacttgttggttgaatggcaaaaac

SEQ ID NO: 12697 - DNA, 411 bp, Zea mays
  unsure (1)..(411): unsure at all n locations; Clone ID: LIB3061-115-Q6-N7-B1
aataaggatataaagaatgggggttgaaggaaaaaaaaaaaaaaaaaaaaaaaaaaaaaaaaaaaggaagcaaaaaagaaaaagggaaaaaaaaaaaaaaaaaaaaaaaaaagaaatttgggtaaaaaagaagaaaaaaagggggggggggaaaaaaaaaaggggggaaaaaaaaaaacagtgtttaagaaagaaaaaaaaaaaaaaggggggggaaaaaaaaagggggagaaaaatagggaaaagggggggaaaaaaaaaaatggacgagggggggggaaaaaaaggaaaaaggggggggtcgggggaatgggggaaagcaaataggcaaaaaagggcggaaggcgaaaggggaaaaaaactagcgggccggagaaggggagcaaataatgnggggacggatgggggggg

SEQ ID NO: 12698 - DNA, 464 bp, Zea mays
  Clone ID: LIB3061-115-Q6-N7-B10
ataaaacacgcacgtgtcattatttatttatgggacttgcctcagtagcatacagcattgtttccgcacgttcatactacagagccacacttattgcactgcctgccgcttacgtacatagttaacacgcagagaggtttttacatacacgtccaacgtttccactcaggctcatgctacgtacgcacgttggtcgcgcgccaccctcttgttgctttttgctcgttttggcgagcgcgggggcctcacattctggcggtaaccatccttatgagcgtttccgccacctccttgcggggcccgcggccggggcgtccttcgcgttcctcctcctttttttcccgctcctcacgtccgtggggttccctttccccacggccgccgtggggttcttcgcgttcctcctcctccttttgctcccgctcctcgtggccgccgctcttcttggggccaggaaggaaccc

SEQ ID NO: 12699 - DNA, 325 bp, Zea mays
  Clone ID: LIB3061-115-Q6-N7-B11
gaaaattatcattacattacaataacacccacaatgtcaatcaggttccgttgcctgtaagcttacaacaaagcataaataaacagtccaaactgatacacatggataacacgggtgcatttacttgatattataaaatgaatatgccatttgcgactacatccccatccccatcatgcatgcttcgaaccacttgctagtatcatcaagacggaccatgcatgatgtcaagatccatcaattttccttattgtctaataggttgtcataaaactcccacatactaatttcagctgccacgttctcactgacatcaccttgcaaa

SEQ ID NO: 12700 - DNA, 550 bp, Zea mays
  Clone ID: LIB3061-115-Q6-N7-B12
aaaggaaagctccaatctaacccacattcattcggatccactcaatataacgacgaacacaactggccatactagaccccaatgacgacgcaacacacccagccagacgggcttcgcaaattccttttgtccggccaaaggtctctggcattccaatactacagaaaagtcttcgggctataagtaaactgaaacggggaacacagcgacagagagagagagagaaactagggaaaacgctaacagctagccagctgctttccagcagcgacgagatggagccgcaacgctttagggcgccatgcctgcccagttccacagcctgccttggttggtcaccagttcccttgtacagcgattcggtcgagctcttggggacgtcgaccgtcgctcgcggctagctatggagcatcggttgggcggtccagctaaccggtcttagcgtctccgttggcgagcacaggtttctctgttgctgcttgggccacctttgccgcgtaggaaatagctggagtggcggtgccgttctctgcagaagccttcgccgcct

SEQ ID NO: 12701 - DNA, 598 bp, Zea mays
  Clone ID: LIB3061-115-Q6-N7-B2
cacattaaaatctggaaatgtaacttcttatttctggttggccacatacatcatccaaaaaactttattattgaattacaactaataagcaatctaaaagagggcaccaccaatgatgtgttgttggtaggaggccgctcggtctgtcaaagcaagttggacaaagggcaacaattgttgtagttgtaagagggttgcggggttagccgcaaactgctggtagaaaggcagcaactgttgctgtgtcaagaaggaagcacggtttgctgcagctagctggctaaatggtagtagtatttgctgctgcaaataagcagcggggttcagtgcggccaattggttaaatggaagaagttgttgttgctgagagtaggcagtagctagctggctgaatggtaatagttgttgctgcaaataagcagcagggttcagtgtagacagttggttgaatggaagaaattgttgttgctgagagtagggagaaaggtttgccagagctacttggttgatcacaggtagcacgagttgctgcagctgctgtgccctgatggtttgtaccaatgactgcaccaaagatagggctggcgattgttgaaac

SEQ ID NO: 12702 - DNA, 615 bp, Zea mays
  Clone ID: LIB3061-115-Q6-N7-B3
atcaaaatgcaaagagctttatttgacaaccatgtatgtacatacagacacgacgacgatcgaacatataagaccatgataggtcatatgacatatataagacctttatctagcatatctgtagtacccgtcctgctgctgaaaccagactaaagttggcgcaggtagacaccgatcgcagcgacgagcctggtcgtcgcgcgtccatagaatcccacgatgctgctgccgatgggcgcggtgatgcagaaacgtgtgccgctctcgatgccccatggcccccaagctctggcggtgctggtgacaatcctgaacgaggtaagggtagtcgcaccttcgaatgcgccgtacgttccagaaacttccttgacgtattcagcgtcgccaagatcgagcttccggacgttgccgccaagtccaccccatcgcccagcggtgcgcgtctgaccacctgtgtcggtactgtaggtgaactcgatggagtccacggcaacgccggcgcggacggtcaggctctgcagacgcctcggcggctccgtcgtcgcgatgtcctgcgccgaccctccctctccaccccacactccgaccttggtgacgacgacggtggagctgatg

SEQ ID NO: 12703 - DNA, 556 bp, Zea mays
  Clone ID: LIB3061-115-Q6-N7-B4
cgagataaatctcaatcaattttttgattatttctaggaaacacatgtcggtttgagggccccattgtcgagtccatctcatttgtaatctaaaaaatggcccctccaacgatgggttgctgcaaggcagggttcatcaaaaagaactggttgtatggcaacaattgttgttgctgctgcaggaaggtagcgaccaatgggttagccactgccaatggattaagtaactgttgtcgctgttgtaggtacccaccaaagtttgacacacccagttggttgaatggaagcaactgttgtaagtaggcagcagggtttgccacagctagctgagtcagagctggtacaatttgttgcagcaactgttgttgtaggtacgtaggtgcattgcccaccgcgagcgggctaaatgaaagtagttgtaggtagacggcagggttcaccatggctagttgactgagcactggcataaactgttgcagctgttgttgttgctggtatgcagctacgttcgccagagcaagtgggttggatgcaagcagctgctgttgcaagtagg

SEQ ID NO: 12704 - DNA, 454 bp, Zea mays
  Clone ID: LIB3061-115-Q6-N7-B5
aaaaatgtccttttttttttttggggagccccaaacctcaaataaaaaactttttttttggactttaacccataaaaaatttaaaagagggcccccccaatgatgggttgttggtaaaacacttctgggtttttcaaaacaagttggttgaatggcaacaattgttgcagttttaaaagggggccaacgttaggcccaacctgctggtaaaaccgcaacaactgtggttttttcaaaaaggtagcagggctcacaccaactagctggctgaatgggaatagttgttgctgctttaaataaacaggaaagttcaatgctgcttgttggttgaatggaaaaaattgctgggggtaggcaacaggtaactggctgaatgggagttgttgttgttgcaaataaaaagcaaagttcaatgaacctatttggttgaatggaaaaaactgcttttgcttaa

SEQ ID NO: 12705 - DNA, 580 bp, Zea mays
  Clone ID: LIB3061-115-Q6-N7-B6
agagcagatggccgaagttcaaattatcttacttatttattttcttctgtttcgatcttccacgatacattttacatgaatgatacaaatatctatccaacatagtctttggtccctacgtgaatcatactggctattgtgtaacctacagttgacatatccaaagcagaggcgagctctatagcttgtcgaccttgtttacggtttatgcggataataaatggctttttaggatgatatactaacgcttgcgatgcccgtagttcatcttgatgactttgatggtagtttcttaaccagactagtgttaccagttaccaatagtcgagcacccttcaccagctcctccttaatcataaaaagcaaagcagaagcaaaaacactttgcacaatttttgtgcccattcctttgtacatccctgacagaccctcatatcgtaccatctttgtgaacgcatcaagtgtacctttgtagcgatgcctcttgtcatcgttaatcatgtgctttgcctgaagtcttgccttaacaactagaaggggatacgtaacgacggttgcaccaagtttcgcaccagcacca

SEQ ID NO: 12706 - DNA, 617 bp, Zea mays
  Clone ID: LIB3061-115-Q6-N7-B7
actcacacatgatatatatatatgcactaccatatgattcataacataggtgactcagcagaccagacgcattttattccgtcccgtctctcgtccgagcaacgcagtgcattcttgaaaacaagttccttttcttctcccgaattaatcacggcggaattacacaccgttggaaaattggagcttttacttacacccatggagccgtcactgtaccattccatcggtcaccagctcctgcaggccgcgcctgagcctctcagcggccagcctggtgtcctcttccttgagccctccgaaggagacgcggatgtacccgggtcctccgctggcgctcccggggatcacggcgactccgtgcttgttcgcgagccacctgacagcctcgaagtcgtccgagcagctgtccggtagctttgcccagaggtagatggcgccctccccgcccttgacgttgtcctcgccgagcggggacagtgcctccaccagcagcgcccggtttttcaccaggtctttcacccgttctttgatccactcggggccggcctccagcgagtagagcgccaggcgctgcccgatgatggaggcgcagatcggtatgttgtcttgcaccttga

SEQ ID NO: 12707 - DNA, 452 bp, Zea mays
  Clone ID: LIB3061-115-Q6-N7-B9
gtaggggaaaaacatgtttcattttctgctgcacctgtcctttcatttggtaaatgtcaattcagaaatttccttctttttttttttggaccaattgaaaaaattttgggggaaaaaaactcggccccgggggtggccccgggatttccggcccgggccttgaaggcttcccacctttccttttgggggggggttttaaacctgggggtaataagggccaaagttttttcctgggggaaatttttttccctttccaattcccccaaccttacagcccgaaggattaaattgtaaaacctgggggccctatgagggggcgcaccccccataaattgggtgggcgcactggccccttttttatggggaaaaactctttgcccccccttttattaaaaatgcccacacccccggggagaggggttttgtattttgcgcccccgggggtttttttt

SEQ ID NO: 12708 - DNA, 494 bp, Zea mays
  Clone ID: LIB3061-115-Q6-N7-C1
gggatctcaggacagacttgggatttttattaataagtttgaaagagtgacccgatgaccctttcagggccagtcaatcttgatttattccaaacaagacacaacggccttcaagggaagggaaatataaaaaaagactcggcaaccatcagggagcagcgaagcgatccacgatccactccaatgtccaaaggcagccagggatccaatctcactcaggtcctgcaaatttgcaaaggagccacagttccggccattttctcccacgccgcgacctggaccaggtccgggatgcccttcaacgccaggagccgcttcctgcattccttggcagcggcgatgcccgacgagtaggcgccgtgcacggaccccgagtgctcggcactggccgcctcgccggcgaagtgcaggtttttgacgggggcggggaaccttgcgcacacgttggccggtttcgcgaccaggtcgcacgagtaggaccccagggagttggg

SEQ ID NO: 12709 - DNA, 460 bp, Zea mays
  Clone ID: LIB3061-115-Q6-N7-C10
cagcaaaaaaaactttattattgaactataactcataagcaatctaaaagagggcaccaccaatgatgggttgttggtagaacactgctgggtttgtcaaagcaagttggtcgaatggcagcaattgttgcagttgtaagagggtgccaacgttaggcgcagtgtgcaggtagaacggcaacaaatgttgctgtgtcaagaaggcagcagggctcacagcagctagctggctgaatggtagtagttgttgttgttgtacataagcatgagagttcaatgctgccagttggttgaatggaagaaattgccgggggtaggcagcagctagctggctgaatggtagtagttgttgttgctgcaaataagcagcagagttcaatgcagctagttggttgaatggcagaaactgttgttgctgagagtaggcagcaaggtttgctagcacgagttgttgtagttg

SEQ ID NO: 12710 - DNA, 431 bp, Zea mays
  Clone ID: LIB3061-115-Q6-N7-C11
ggtccaaaactatttgtattccggagtctgaaactaacagcgcaaacacacattactctgatcatatgtatgttcagagacagcattggtccacagcactacactacgcttcaaattctaaactatttacacggcagattcgctggcgtcgagtcccaccgaaccatcattcgccatgaactaagagcaggcagatatattccctgaaccgcgcatcagaaccttcagccagcacctagcacaacaccggtcaccaaagctcagttcttcacacgtatgagtcaagatagtcgaatccgcggatcatcctgtactgcaacaggctggcatagacgcggtcgcacactccgatgaacagggactcgtcgtccgggctgagcgtgatcccggacacctcaccaaagaagtcgatctcctgccgtttcttgtag

SEQ ID NO: 12711 - DNA, 474 bp, Zea mays
  Clone ID: LIB3061-115-Q6-N7-C12
gggggttgttttttttttttttttttttttttttttttttttttttgtttttttttttttttaaaaaaaaaaaagggggggtttttttttggggggggggccgcgcccccggaaaaaaagggttttgtgggggccccccccccaaaaaaaaaaaaggggggggcccccccccgggggggggggggggaaaaccccggggggtttcaaacaaaggggggggggggggaaaaaccccttgggggggggggggggggggggggggttttccccaaaagggtggtggggggggccccccgggggttggcccccaaaaaaaccccaaaagggactgtttttaagggggggtaatgtggggggggggaccgggggtaaaaaggaaaaccccccccccggggggggggggggcccccggggggggaaaaaaggggttttccccccccccaacccccctgggggggggggggggggaggggg

SEQ ID NO: 12712 - DNA, 554 bp, Zea mays
  unsure (1)..(554): unsure at all n locations; Clone ID: LIB3061-115-Q6-N7-C2
gatgcgaacaaaaaccttgctcattcttctctcgtctcgtttcatagcgggagcaaccaaagcgaacaaaaggggtaccaacacctaatccaaaggtagaacggacactaacacggtgacagaagcgaacggtaacacgatactatagatagataagataactcggccgaagccaggatggggccacacatcagtccctccagccgccgccgccgccgccgtagccgccaccaccaccctcgcgccgaccgccgtagccgccaccgcctccgtagccgccgccaccaccctcgcgccgaccgccgtagccgccaccgccgccataaccgccgtcacggcgcccgccaccatagccgccgccgccgcgaccgccgccgtagccaccgccgncgccgccgccgccgccgccacgggactgggcctggttaacggtgatgttacggccgtcgagctccttgccgttcatgttctcgatagcgtcgagcatggagttctcggaggagaaggtaacgaagccgaagccgcgggacctccccgtctcccggtcggtgatg

SEQ ID NO: 12713 - DNA, 497 bp, Zea mays
  Clone ID: LIB3061-115-Q6-N7-C3
agaaatgtactttcttatttctgggaagccacaaacatcagacaaaaaactttattattgaactataactcataagaaatctaaaagagggcaccaccaatgatgggttgttggtagaatgctgctgggtttgtcaaagcaagttggttgaatggcagcaattgttgcagttgtaagagggtgccagcgttaggcgcagcgtgctggtagaacggcaacaactgtggttgtgtcaagaaggtagcagggctcacaccagctagctggctgaatggtagtagttgttgctgctgtaaataagcaggagagttcaatgctgtcagttggttgaatggaagaaattgctgggggtaggcagcagatagctggctgaatggtagttgttgttgttgcaaataaaaagcagagttcaatgcagctagttggttgaatggaagaaactgctgttgctgagagtaggcagcaaggtttgctagcacaagttgttgtagttgttg

SEQ ID NO: 12714 - DNA, 408 bp, Zea mays
  Clone ID: LIB3061-115-Q6-N7-C4
caaaggttaaaaccaattttaatttggaacagatggggtcctttttttcttttcatttcaattgttcattcaggtcattgcttattttttccctgccacccatggtgatgcgtgacacatttttactcaatcatcgccgctaaatgactcaacttgcttgcttgccagcggtttttctacaacacattttttttttagtgggggacaccccccgcagcaacgtaggggcattgagtcggttttttcaggccccacattgccctcagttgtttggcttttttggccgccaacagccccccgacctggccgtttttcggtttttttttcaggatggactggaggaccaaacccaatatcgcctggtaccggtgctgcggttccacctgcctgagctgttggcaacacttt

SEQ ID NO: 12715 - DNA, 575 bp, Zea mays
  Clone ID: LIB3061-115-Q6-N7-C6
aaatgtcaatcaatatattgattatttctaggaaacacatgccggtatgagggcaccattatcgattacatctcatatgtaatctaaaagatggcacctccaacgatgggttgctgccacgacaaggcagggttcatcaaagagaactggctgtatggtagcaattgttgctgctgtaggaaggcagtgaccaatgggttaggcactgctagtggattaagtaactgttgtcgctgttgtaggtacccagcagagttcgacacaatcagttggttgaatggaagcagctgttgcaagtaggcagcaaggtttgccacagctagctgagtcagagctggtacaatctgttgcagcaattgttgttgcaggtatgtaggtgcattacccacaacgagagggctagatgaaagcagttgttgctgttgtaggtaggcggcagggttcaccatggctagttgactgagcgctggcagaaactgttgcaattgttgttgttgttggtatgcagctacctttgccagagcaagtgggttggatgcaagcacctgctgttgcaagtaggcgacagggttcac

SEQ ID NO: 12716 - DNA, 592 bp, Zea mays
  Clone ID: LIB3061-115-Q6-N7-C8
agaaatgtactttcttatttctgggaagccacaaacatcagacaaaaaactttattattgaactataactcataagaaatctaaaagagggcaccaccaatgatgggttgttggtagaatgctgctgggtttgtcaaagcaagttggttgaatggcagcaattgttgcagttgtaagagggtgccagcgttaggcgcagcgtgctggtagaacggcaacaactgtggttgtgtcaagaaggtagcagggctcacaccagctagctggctgaatggtagtagttgttgctgctgtaaataagcaggagagttcaatgctgtcagttggttgaatggaagaaattgctgggggtaggcagcagatagctggctgaatggtagttgttgttgttgcaaataagaagcagagttcaatgcagctagttggttgaatggaagaaactgctgttgctgagagtaggcagcaaggtttgctagcacaagttgttgtagttgttgtgccctgatgttttgtgccaataaatgcaccaaaggtaactgctgtaatagggctgatgattgttggaggaacaagggtgataaaggtaagatgc

SEQ ID NO: 12717 - DNA, 575 bp, Zea mays
  Clone ID: LIB3061-115-Q6-N7-D1
atcattacttatttattatatattccatcaggatgatatttgtatgatagacatacatggaatttctcggtcctccttttgatggtgatatagctaataagctaaaccaatcaaggataaccaagaaatgtaggttttattagccatgatacataaaagtaggctttgtttatttggcctatagataaggaatctccttgtcagccaactgttggagcctgggcaacaatatcaacgaagatgcgaacacggtcagggcgaaaatcctgggtcacaactgagccaaccggtagaacttgaatgttagcgttgggcaagtctttaagaatgatctctcttgcctccttgatggacatgcccaccacctcaggccatgatgtcttattctccctactagtagcacccaaaacaatggaactcatcttcaatgatggaatatattttcagttaatctgcatgcataaatatatggacaaataggaggggaatcgatttagcaagagaagtagacatcaacattgatcaaacatgtatacaaactacttgagctcactaaggtgaacttactacttgag

SEQ ID NO: 12718 - DNA, 580 bp, Zea mays
  Clone ID: LIB3061-115-Q6-N7-D10
atggattgaaccatgttgtagattggttggtgaatgtattgtggctcaatctgcctaagatcatgacaacattgttgctgcaatacctggcagctacttggttgtatcaaacgtgattggagaaaaggcattaccaaagggctgcactgctgccttaggaattcatgacaattttttagatttgagctactgctatagtagttatagctgcaccttgtagtctgttgctgctcctggcaatgacattgttgctgttgtgatttttcctggccctgctgatattgctgaggctgttgtggttgttgctgcttgtcatgaccctggaattgttgttgatgttgttgctcatggctctgtccttggtgttgctcatggctctgttcgtgttgttgcacatggccttgtgattgttggtgatgttgttgttggccttcacattgatgttgttgttggtgctgttgttgttgttgttgttgttggtgctgcggttgttgttgttgttgttgaacatgaacttcttgttgttgctgatgtttttgtggttgcatgtgaacttgttgttgttggtgttgctgctgct

SEQ ID NO: 12719 - DNA, 587 bp, Zea mays
  Clone ID: LIB3061-115-Q6-N7-D11
aagaatctagaaatgtactttcttatttctgggaagccacaaacatcagacaaaaaactttattattgaactataactcataagaaatctaaaagagggcaccaccaatgatgggttgttggtagaacgctgctgggtttgtcaaagcaagttggttgaatggcagcaattgttgcagttgtaagagggtgccagcgttaggcgcagcgtgctggtagaacggcaacaactgtggttgtatcaagaaggtagcagggctcacaccagctagctggctgaatggtagtagttgttgctgctgtaaataagcaggagagttcaatgctgccagttggttgaatggaagaaattgctgggggtaggcagcaggtagctggctgaatggtagttgttgttgttgcaaataagaagcagagttcaatgcagctagttggttgaatggaagaaactgctgttgctgagagtaggcagcaaggtttgctagcacaagttgttgtagttgttgtgccctgatgttttgtgccaataaatgcaccaaaggtaactgatgtaatagggctgatgattgttggaggaacaagggtgat

SEQ ID NO: 12720 - DNA, 523 bp, Zea mays
  Clone ID: LIB3061-115-Q6-N7-D12
actcctccaaccatctcatcaagtactagtttttacatttcaagaagtcaagaccacagcacacaggtccaagggcaagtgggggaaggaaaacgaaaaatcacgcctcatggatggccaccgaaaccaaaaaaaaagtccaaggggagcccccatggccccatggctggcggcaggaggtctaactattttacaaacagacaaaaagcgcgtggggctcttggctgtgcctttttactttttactaccagcactggtccgtttcccatgtgcggcgtcggggccggccgtaaacggggccgttccaggggcgccttgccaccgccgccgggggcgcggggcccccgccgtcgtagcgcgcgcggctgtccgggtcggagagcgtggcgtaggcgtcgtgcaggcgggcgaactcggggggggccccgggcgcgtgcgccacgttcgggtgccgctcccgcgccaggcgccggtacgcggccttgatctcccggcccgtcgcgccggcgcgcaggcccaggac

SEQ ID NO: 12721 - DNA, 349 bp, Zea mays
  Clone ID: LIB3061-115-Q6-N7-D4
gataaaaaaaaagggttttttttttttggggggggggccaatacggaaaaaaaaaaatttttttttgggtttttgctttaaaaaaaaataaaggggggggccccccaaggggggggtgggggaaaaaaatggggggttttaaaaaaggagggtgggtggggggaaaaatttggggggtggtagggggggggcccgttggggggcaagtggggggtgaaaaaaaaaaaatctgggtgtttttaaaagggggggggggtctaaaacggggggggggggggcccccggatttttcgcgggggggccgggggggggcaaaatttttttttagggggggggtttaggggggggg

SEQ ID NO: 12722 - DNA, 385 bp, Zea mays
  Clone ID: LIB3061-115-Q6-N7-D7
atatcacaagaacaaatccggatcccctttaattattgttccggatgaacgatccgagaaatgcattcatcttcttgctgtgcttattattcagacatatgagctagctacaagctcattcctcatgcactatgctcttcgcagttacttggaggggattgtttccccgccgagaattcaagggcatttggcgaccccccttatggtgggcaggttgcacttcgccttcctgacgagggtgggggggaattcccttttgaccttccgcgggcaggccggcaggttctctttgggggccttcaacttcgcgttccggccccgcgggatcgcgccctccattaagatgctcaacgccgtgcacccgcagtacgcccggatgttcgcc

SEQ ID NO: 12723 - DNA, 500 bp, Zea mays
  Clone ID: LIB3061-115-Q6-N7-E10
aaacaacggcccccaatagcactcaaacttgcaaacaactgatttgccttaacggcagtacaccgcagagtgcaaattcgaaaacagcacttaagtccaaccattgaagaaaaaaaaggagcaattctttcatgtgccaaataacctttggaaacattactcaattgcaaactgaaaatagtttgttatggctttcaagttaggagataatgccttcggttagtgattatgcaacaagcttacttgtcggggtgtttgcgttttgcttatgggccacattgtggagaacattcattgccttaacaaccttttactttagggcattaggggacttaagcaggtggaggacctcaatctgatccattttcaaaagcatttcaatgacctttgccgcttggtttggttccagttgctcaaccagtgggtataggtttttaccaaggatcgttctttgctgttcaagattagcatttgcaagggcagaagtcagagtcccaatt

SEQ ID NO: 12724 - DNA, 466 bp, Zea mays
  Clone ID: LIB3061-115-Q6-N7-E11
atcacattaaaatctggaaatgtaacttcttatttctggttggccacatacatcatccaaaaaactttattattgaattacaactaataagcaatctaaaagagggcaccaccaatgatgtgttgttggtaggaggccgctcggtctgtcaaagcaagttggacaaagggcaacaattgttgtagttgtaagagggttgcggggttagccgcaaactgctggtagaaaggcagcaactgttgctgtgtcaagaaggaagcacggtttgctgcagctagctggctaaatggtagtagtatttgctgctgcaaataagcagcggggttcagtgcggccaattggttaaatggaagaagttgttgttgctgagagtaggcagtagctagctggctgaatggtaatagttgttgctgcaaataagcagcagggttcagtgtagacagttggttgaatggaagaaattgtt

SEQ ID NO: 12725 - DNA, 548 bp, Zea mays
  Clone ID: LIB3061-115-Q6-N7-E2
aagttagctgtaaaatcaaatgtcgaagagcatgtcaagtgtccacgatgtcacatttacaaactcacgtgcctgaaaggataattgcctaagctgcccaaatgactttccacaagaaaagctgggcgatgtcaacataaatagtttgcagataccagacctccggggcaatttacaccttcctttaggactgtttcccgaaaaatagtctggcctcagaaaactgtgggcaaagaggaacaaaaaagggagattttttaacaagtccaacctaagagcctaatgaattatcagcaactttccaatagggtgtacaactattgcatacaggtccttaagactgaacagccagcctttgtaggtgctcacagaagaccaggaagctaacatcatcggtgaaaatgatgtcggaacctggagcaacatcatgagctgagttatatgtggccgatggattcagcttagccaacaaaaaccttgcctgtgagccatgttggtcacagacaactagtcttggaactggaaatcgaccttttattatcatctgc

SEQ ID NO: 12726 - DNA, 422 bp, Zea mays
  Clone ID: LIB3061-115-Q6-N7-E4
gtgttcaaaattgtttttttttttttttaatatgaattttttgttttttttttttgttggggatagggaagacacaaacatactcaagtggtggggggggggggaacacgcacaaaaaaacaaaataagaaccttttaatagaaaggatgcgcaaagtccgatccacacaaacttaaaaaccttacttcttaaccctggactcaaagccctgcaaaaaaagaccttttttccagatgccaaccctggtttacatgagggtgaaggaaaccttcccaacttaaccttcctcgtggctgaactcacccatttccatttccatccagccggcgggttttgtttgagggggcaggacgtgcactccaggagggtggggacgggtcccgcttccgagccttgggctaaatacattacccaccggccc

SEQ ID NO: 12727 - DNA, 588 bp, Zea mays
  Clone ID: LIB3061-115-Q6-N7-E5
ggaaatataacttcttatttctaggaggccacatacatcagccaaaaaacttcattattgaattacaactaataagcaatctaaaagagggcaccgccaatgatgtgttgttggtagaaggctgctgggtttgtcaaagcaagttggacaaagggcagcaactgttgcagttgtaagagggttgcggggttagccacaaactgctggtagaacggaagcacttgttgttgtgtcaagaaggaagcggggcttgttgtagctagctggccaaatggtagtagtatttgctgctggaaataagcagaggggttcagtgcggccaattggttaaatggaagaaattgttgctgctgagagtaggcagtagctagctggctgaatggtagtagttgttgttgctgcaaataagcagcagggctcagtatagacagttggttgaatggaagaaattgttgttgctgagagtagggggaaaggtttgccagagctacttggctgatcactggtagcacgagttgctgcaactgttctgccctgatggtttgtaccaatgactgcaccaaagatagggctggccattgttgaaag

SEQ ID NO: 12728 - DNA, 565 bp, Zea mays
  Clone ID: LIB3061-115-Q6-N7-E6
agaaatgtactttcttatttctgggaagccacaaacatcagacaaaaaactttattattgaactattactcataagaaatctaaaagagggcaccaccaatgatgggttgttggtagaatgctgctgggtttgtcaaagcaagttggttgaatggcagcaattgttgcagttgtaaaagggtgccagcgttaggcgcaacgtgctggtagaacggcaacaactgtggttgtgtcaaaaaggtagcagggctcacaccagctagctggctgaatggtagtagttgttgctgctgtaaataagcaggagagttcaatgctgtcagttggttgaatggaaaaaattgctgggggtaggcagcagatagctggctgaatggtagttgttgttgttgcaaataagaagcagagttcaatgcagctagttggttgaatggaagaaactgctgttgctgagagtaggcaccaaggtttgctagcacaagttgttgtagttgttgtgccctgatgttttgtgccaataaatgcaccaaaaggtactgcctgtatagggctgatgattgttgga

SEQ ID NO: 12729 - DNA, 431 bp, Zea mays
  Clone ID: LIB3061-115-Q6-N7-E7
atcgagataaatctcaaccaatatattgattatttctaggaaacacatgcgcggtatgagggcaccattatcgagtacatctcatatgtaatctaaaagatggcacctccaacgatgggttttcgctccgacaagacaggattcatcaaagagaaccggttgtatggcagcaattgttgctgctgtaggaaggcagcgaccaatgggttagccactgccaatggattaagtaactgttgtcgctgttgtaggtacgcaacagagttcgacatagttagttggttgaatggaagcagctgttgcaagtaggcaacagggtttgccacagctagctgagttagagctggtacaatctgttgcaacaattcttgttgcaggtatgtaggtgcattggccacagcgagcgggctagatgaaagcagttgttgctg

SEQ ID NO: 12730 - DNA, 614 bp, Zea mays
  Clone ID: LIB3061-115-Q6-N7-E9
agaaatgtactttcttatttctgggacgccacaaacatcatccaaaaaacttcattattgaactataactcataagcaatctaaaagagggcaccaccaatgatgggttgttggtagaacactgttgggtttgtcaaagcaagttggttgaatggcagcaattgttgcagttgtaagagggtgccagcgttaggcatagcgtgcaggtagaacggcaacaactgttgttgtgtcaagaaggcagcagggctcacatcagctagctggctgaatggtagtagttgttgctgctgtaaataagcagcagagttcaatgctgctagttggttgaatggaagaaattgctgggggtaggcagcaactagctggctgaatggtaattgttgttgcaaataagcagcagagttcaatgcagccagttggttgaatggaagaaactgatgttgctgagagtatgcagcaaggtttgctagcacaagttgttgtagtttgttgtgccctgatgttttgtgccaccaaatggaccaaaggtaactgctgtaatagggctgacggttgttggaggaacaagggtgataatgggtagatgcctgttgcgattgcctgttggatct

SEQ ID NO: 12731 - DNA, 397 bp, Zea mays
  Clone ID: LIB3061-115-Q6-N7-F1
cattaaaaccaaaactttattatgaccatgcatatattattggtcataccacacatgataatgtgtgtcgtcttactgcattattacatatatagatagagagagatggatagaggagatttcccaaatatcatgaatcagtagtagggcggaatggcagcggagacgccacaggggttggtgcggtagctgggcagctggtactggtagagtccacccatggccggcatgttctgcgccatcatcatggccatggggttgagaccctgggctgccagcagctgctgctgctgctgcatcagagctggctcgtacaggctgctgctggcggcagcggcacgctcaagctgcatcatcatctgcagctgctgcgcgacggactgcacgtccatcatcc

SEQ ID NO: 12732 - DNA, 506 bp, Zea mays
  Clone ID: LIB3061-115-Q6-N7-F10
caaaccaaaaaacttttttttggacctttacctaataaaaaatttaaaggggggcccccccaagggggggttgtgggaaaaaccctttggggtttgtaaaaaaaggtgggttaaagggaaaaatttgtggcatttgaaaggggggcccagctttggggccagggggttggtaaaacggaaaaaattggggtggtttaaaaagggggggggggttaaaaccacttagtgggttaaagggaaaaagttgtggttgttgaaaaaaagcgggggggttaaatgctcccagtgggttaaagggaaaaaattgttgggggtgggcaaaaggaacctggctaaagggaatttgtggttgttcaaaataaaaagcagggttaaaggcacttggtgggttaaatggaaaaaactgtttttgttaaaagtaggcaaaagggtttgctaccacaatttgttgaatttgtgggcccctgtttttttgggccaataattgccccaaaggtaactgtttt

SEQ ID NO: 12733 - DNA, 581 bp, Zea mays
  Clone ID: LIB3061-115-Q6-N7-F2
ctagaaatgtactttcttatttctgggaagccacaaacatcagataaaaaactttattattgaactataactcataagaaatctaaaagagggccccaccaatgatgggttgttggtagaacactgctgggtttgtcaaagcaagttggttgaatggcagcaattgttgcagttgtaagagggtgccagcgttaggcgcaacgtgctggtagaacggcaacaactgtggttgtgtcaaaaaggtagcagggctcacaccagctagctggctgaatggtagtagttgttgctgctgtaaataagcaggaaagttcaatgctgctagttggttgaatggaaaaaattgctgggggtaggcagcaggtagctggctgaatggtagttgttgttgttgcaaataaaaagcagagttcaatgaacctagttggttgaatggaagaaactgctgttgctgagagtaggcagcaaggtttgctagcacaagttgttgtagttgttgtgccctgatgttttgtgccaataaatgcaccaaaggtaactgttgtaatagggctgatgattgttggaggaacaagggtgat

SEQ ID NO: 12734 - DNA, 66 bp, Zea mays
  Clone ID: LIB3061-115-Q6-N7-F3
acgacaggggctacccagggattccggtggctacagacgcggagcaattattgggggcgggggggg

SEQ ID NO: 12735 - DNA, 116 bp, Zea mays
  Clone ID: LIB3061-115-Q6-N7-F4
aagaatctagaaatgtactttcttatttctgggacgccacaaacatcatccaaaaaacttcattattggacgttcactcattagccatcctaaagagggccggccgcgtggggcgg

SEQ ID NO: 12736 - DNA, 603 bp, Zea mays
  Clone ID: LIB3061-115-Q6-N7-F5
agcatcatggtacatcattgattatcaatatcacgagattccagtagctatttcaattgatctaagaaaagaagaagggtaaaagctcaaacagcaagaaatgacgtcaactgaacctaacagctggagcatttccaaaccgcagttcaagtattcagtaatcagtgtcaaaacaggctgggaaaaaaacagcctaaactcaccagctgtcaaccccctatcccatttcccaaacatcatgaggaaacacaaatcacatttatgatgtggaacaagcttctagctcttggaggacgctgcgccatgcatctgcaatatctttagctagcttagcctgacccttggcaaattcatggaatgcgagtccaatatcatctgtcttttgctcctggaaacgagcgagctcttcattcattagtctaactatgtgttcaaacttcttagtagcctcctcactgtctgctttcaactctcgaaactcaaattctgcttcggcatacttttcagggttcatgaacttcaatttttcaagattaagctctttatacttcctctcctggtccaataaaaaagctgcctgaaagcattggctcgatcaagcat

SEQ ID NO: 12737 - DNA, 447 bp, Zea mays
  unsure (1)..(447): unsure at all n locations; Clone ID: LIB3061-115-Q6-N7-F6
gaaacaatcaaataancggctgatgaggcttacattgtttatactatgatcaaagaacatgtacgaccattgtacagataggtccatcttcctgttgtacaacaactgattccactcacaagaggtacaattagaacagctcgactgtgcactatgttttttctcccatttgctatattgatcttcagaataaagaatatgcgactcaacaagaacagctaggctgttaccaaagacggaatctaatttaagagatcatgtcgccacaaaacatctccatcacaggttttcaaggtattgccattcattacagatggaagtcattgggttagaatttggaggtgatttggcgacctattgggtcagcatctcatttcgggctatccatcctcatctggttagcacccctatatttcttcaatgttctattattcttctgctcttgct

SEQ ID NO: 12738 - DNA, 607 bp, Zea mays
  Clone ID: LIB3061-115-Q6-N7-F7
ggaacaatacttttttcttttcatttcaattgttcattcaggtcattgctcacactgacactgccacccatggtgatgcgtgacacattattactcaatcatcgccgctaaatgactcaactagctagctagccagcggctatactacagcacatagtttcttcagtgggggacaccgccggcagcagcgtaggggcatggagtcggctgctgcaggccgcacatcgccgtcagttgctgcgctatctgcgccgccaacagccccgcgacctggccgctttgcggctgctgctgcaggatggactggaggaccaagccgaagatcgcctggtaccggtgctgcggctccacctgcctgagctgctggcaacactgctgccgcaacgactggcactgaggcgagcagtagggcgtcgccgtcgggctgcactgatgcctcagaaactcgacgcactggcccaggatcggggtgctgccaacgccgcaggttccctgcagctggcacgggcttggatgcggctgttggcacgggcatgggtgtggctggggatgaggctgaggccggggcggttgagtagggtagtggcatggtggcggcggcagatga

SEQ ID NO: 12739 - DNA, 614 bp, Zea mays
  Clone ID: LIB3061-115-Q6-N7-F9
cattaaaaccaaaactttattatgaccatgcatatattattggtcataccacacatgataatgtgtgtcgtcttactgcattattacatatatagatagagagagatggatagaggagatttcccaaatatcatgaatcagtagtagggcggaatggcagcggagacgccacaggggttggtgcggtagctgggcagctggtactggtagagtccacccatggccggcatgttctgcgccatcatcatggccatggggttgagaccctgggctgccagcagctgctgctgctgctgcatcagagctggctcgtacaggctgctgctggcggcagcggcacgctcaagctgcatcatcatctgcagctgctgcgcgacggactgcacgtccatcatcctcatctgctgctggcagcactgttgccggagcggctggaacatggcgctcggctgcccacacccggcgtagtagggcgccgccgccagcgggctgcactgcggctgcctcaggtactccgcgtaggggtacagcccgccggcgcccatcatcgtcgtcaggccggcgccagcgccgtacaagccctgcagccccgcgcaggggcagggcatctgcat

SEQ ID NO: 12740 - DNA, 117 bp, Zea mays
  Clone ID: LIB3061-115-Q6-N7-G1
acgaaccctatcattttttattttgtttatctagaaagcgcgcggcgggctgattttgttgatgccttcgtgctggactgcgtgccagtgaaacaatcggctggtcgcgcgccggga

SEQ ID NO: 12741 - DNA, 559 bp, Zea mays
  Clone ID: LIB3061-115-Q6-N7-G10
agtacagcagtactcgaactcagaagatcaccacgagtaatcttaaacacttgttgagaataatcttaattttaaacttgtttccagacaaaatcttaggggcggatgaaaacaagtagacaactctaagttcacgtcataagcaacctcatgtccagactcagcctagatatagaagtagcaaacaaactactcggcagcagcaaccttctgcacaggcttattttccttgacaggcctttcaagcttcacaccaacattctctttgtagtcgccatgaaccttcatgagcttcccaagatcgaacttgggggccttgagtatcttcaccttgcggatgaagacattttgaagtgggaagatgcttgaggtagacttctcaatctccttaccaataacttctggaatgaacttcgaaacaagttctttcaggtcacatgtagaagcctgggtgatcataatctcaaccatcttacggcggatctgacggatctgggatgcctgagcatagcaggttctcttgacctggtttgggcgcctcttcgtgagccgatgcaga

SEQ ID NO: 12742 - DNA, 540 bp, Zea mays
  Clone ID: LIB3061-115-Q6-N7-G11
aaatctcaatcaatattttgattatttctaggaaacacacgtcggtttgagggccccattatcgagtacatctcatttgtaatctaaaagatggcccctccaacgatgggttgctgcctcgacaagacaggattcatcaaagagaactggttgtttggcaacaattgttgctgctgtaggaaggcggcgaccaatgggttagccactaccaatggattaagtaactgttgtcgctgttgtaggtacccaacaaagttcgacagagtcagttggttgaatggaagcagctgttgcaagtaggcaacagggtttgccacagctagttgagtcaaagctggtacaatctgttgcaacaattgttgttgcaggtatttaggtgcattgcccacagcgagcgggctaaatgaaagcagttgttgttgttgtacctaggcggcagggttcaccatggctagttgactgagcgttggcagaaactgttgtagctgttgttgttgctggtttgcaactaccttcgccagagcaagtgggttggatgca

SEQ ID NO: 12743 - DNA, 606 bp, Zea mays
  Clone ID: LIB3061-115-Q6-N7-G12
ataatagcagttctctaaatagatgaattgtaacaaagtatcacccggcatggataaacaaacaaagaaataagggaagcacattactgacaactatttgaatagtttgcgcatgccacagtcgcaaatcaatctaggagatcagatcagctgccctttcgcttttgccacgacactggaaatgagaatgacacacagacaagcgttgctgtcttcagtgtcacctccagagcttaacgagctgatcatgactcactgatgcaaccagccccgatgcacttgacgcggctagggcagcaaccatgccgtcatgagcgttgctgattgtcaccgtgttcttctccctaatgtcccaaagctctagggactcataacaaccgattataagcaaattcgggtaatttgggtgaaaaacacacgaatggaacttgttcccgctgcagatcagctcatgtatgcattcgatgtagttccctgaggtaaatgaccacaccctgacagaatcttcactgacagacgccagatagttgcccgcggcatcccaacatactgactgaataatctgtacgtggccctgcaaaggagttctacaaacttgtaatgtct

SEQ ID NO: 12744 - DNA, 585 bp, Zea mays
  unsure (1)..(585): unsure at all n locations; Clone ID: LIB3061-115-Q6-N7-G2
aatctagaaatgtactttcttatttctgggaagccacaaacatcagacaaaaaactttattattgaactataactcataagaaatctaaaagagggcaccaccaatgatgggttgttggtagaacgctgctgggtttgtcaaagcaagttggttgaatggcagcaattgttgcagttgtaagagggtgccagcgttaggcgcagcgtgctggtagaacggcaacaactgtggttgtatcaagaaggtagcagggctcacaccagctagctggctgaatggtagtagttgttgctgctgtaaataagcaggagagttcaatgctgccagttggttgaatggaagaaattgctgggggtaggcagcaggtagctggctgaatggtagttgttgttgttgcaaataagaagcagagttcaatgcagctagttggttgaatggaagaaactgctgttgctgagagtaggcagcaaggtttgctagcacaagttgttgtagttgttgtgccctgatgttttgtgccaataaatgcaccaaaggtaactgatgtaatanggctgatgattgttggaggacaagggtgataa

SEQ ID NO: 12745 - DNA, 616 bp, Zea mays
  Clone ID: LIB3061-115-Q6-N7-G3
ctagaaatgtactttcttatttctgggaagccacaaatatcagcaaaaaaaactttattattgaactataactcataagcaatctaaaagagggcaccaccaatgatgggttgttggtagaacactgctgggtttgtcaaagcaagttggtcgaatggcagcaattgttgcagttgtaagagggtgccaacgttaggcgcagtgtgcaggtagaacggcaacaaatgttgctgtgtcaagaaggcagcagggctcacagcagctagctggctgaatggtagtagttgttgttgttgtacataagcatgagagttcaatgctgccagttggttgaatggaagaaattgccgggggtaggcagcagctagctggctgaatggtagtagttgttgttgctgcaaataagcagcagagttcaatgcagctagttggttgaatggcagaaactgttgttgctgagagtaggcagcaaggtttgctagcacgagttgttgtagttgttgtgccctgatgttttgtgccaacaaatgcaccaaaggtaactgctgttgctgagagtaggcagcaaggtttgctagcacgagttgttgtagttgttgtgccctgatgttttgtg

SEQ ID NO: 12746 - DNA, 420 bp, Zea mays
  Clone ID: LIB3061-115-Q6-N7-G4
ggggggacttttttttttttaatttaaaaggggcattcaggggattggtaaaaatgaaactggcccccaggggggggggggaaaaattttttccaaaaaattgccggtaaaagaccaaaataggttggttgccaggggtttttctaaaaaaaaaattttttttaaggggggaaaccccccggaaaaacctaggggcatggaattggttttttcaagccccaaattcccccaaggtggtgggttttttgggcccccaaaaacccccgaacctgggcctttttggggttttttttaaagatggactgggggaccaaacccaaaatcccctggtaccgggggtgggggtccacccggctgaagtggtgggaaaaatgttgcccaaacaactgggacttgggggagccccggaatttcggaccg

SEQ ID NO: 12747 - DNA, 485 bp, Zea mays
  Clone ID: LIB3061-115-Q6-N7-G6
gtatccaaacacgtagattctgacgaacagcttttctgcacagctggcgaaccaaacacctaaattctaaccaccagcttttcccaacagccagcttttccctacagccagcttttcagataagctggccagaaaaaagccaacatactgtatgcacgaagtttaaagtcacacaacgaacgaaggtgacagctgatttacaactcgtccacatttgaccgaacagacaagcagcagctagcaccatgtcactgccagctgcctttaccgaagccgacgaccatattgcagcgtttggctactcccgtttgatgtccgagctgtgcagcggcgccggctggaggccccctttggcgccggtgacctcctgcaacctcttgcccttcgcctggtgaccgcgcccgcccgcggtccgtcggcacaacagtctctggctgaactccaccacctcgggcgcgagcgcccgccacaggaacagcgcccgg

SEQ ID NO: 12748 - DNA, 642 bp, Zea mays
  unsure (1)..(642): unsure at all n locations; Clone ID: LIB3061-115-Q6-N7-G8
gggcgctgacctcgaatgcctcctccacgtcccgctgcgagaagccgaagcggtgggtgatgagaggcttgacgtccaccttgccgctgcgcaggaagtcgatgcacagtggccaggtgtccttgtaccggaacacgcccacctctttcaccttccgggccgccgccgccgtcaggggcagcgtcatctcgttgtggcccattccgaccaggcacaccttcccgccgggccgcgtcgccttcagcgccgtcgacatggtcttgctgaacccggcgcagtccaagctgacgtcgatgtccgagcccatggccgcgcggatgcgctccacctcgtccgccaggtcctccgcgcggggcgacacccgcaccgccgcgttcgcgcccagcgacctggccacggccaggcggtgctcgtncacgttcacgaccaccacgcgcggcgcgccgaaagcccgcgccgccagcagcgacaccaggccgatggggccggcgcccaccacgagcacgcccgtcttgggtcccacccccgcgcggcggcacgcgtgcacgcccacgctcagcggctcgcacatggcgccctccttcaggctcaccccgtcggggagcttgaagcacangtcggccgggtgcaccacctggttca

SEQ ID NO: 12749 - DNA, 268 bp, Zea mays
  Clone ID: LIB3061-115-Q6-N7-G9
aaaaccaaaactttattatgaccatgcatatattattggtcataccacacatgataatgtgtgtcgtcttactgcattattacatatatagatagagagagatggatagaggagatttcccaaatatcatgaatcagtagtagggcggaatggcagcggagacgccacaagggttggtgcggtagctgggcaactggtactggtagagtccacccatggccgggatgttctgcgccatcattatgggcatggggttgagaccctgggc

SEQ ID NO: 12750 - DNA, 532 bp, Zea mays
  Clone ID: LIB3061-115-Q6-N7-H1
aaaaaacccctacaaagatgttcatgatacattgccaaataactctggttaatagacagaaagattaggcaccagcaaatgcaaaggtattcctaatatacaacagcacatgatttcctcaaaatttacatgcatgcaaggtttcccccccttcctgactgcacagaaacagtggggagcaaagattaaatggttttgcacagaaacatgtgagcagctaccctaacaaacatctctaagatggctaagcttgtcttgaagatgacggttcacccagtgaaacagaaggaaatgaggaagcccacgctcgagcattatttgctcccttcctcaagtctgttgccttattgctcagcctcagcttgctccaaagcctccttacatcaagaacattcaaggctcgttccaggagctggtttgatcccctacggatccctaggttcaagttttggacacgaacaactaagaaagctctcagatgagacatgacaacaggtatgaagtgtgctacaaccttcacgataataaaaag

SEQ ID NO: 12751 - DNA, 384 bp, Zea mays
  Clone ID: LIB3061-115-Q6-N7-H2
ctagaaatgtactttcttatttctgggacgccacaaacatcatccaaaaaacttcattattgaactataactcataagcaatctaaaagagggcaccaccaatgatgggttgttggtagaacactgttgggtttgtcaaagcaagttggttgaatggcagcaattgttgcagttgtaagagggtgccagcgttaggcatagcgtgcaggtagaacggcaacaactgttgttgtgtcaagaaggcagcagggctcacatcagctagctggctgaatggtagtagttgttgctgctgtaaataagcagcagagttcaatgctgctagttggatgaatggaagaaatagctgggggtaggcagcaactagctggatgaatggcaatt

SEQ ID NO: 12752 - DNA, 441 bp, Zea mays
  Clone ID: LIB3061-115-Q6-N7-H4
gcagcaccaagaagcaccattttttccttaggattaacttaaaacaaatcctgacaggagtaacagcatccatcgatccacagtccatgctggttgatgcatgggtctgctggagccgaggatgaacacagcactaacaactgacacagagcgaccttgcaatcaaaaacacagatgggcaacaacaaacgagacgaacgaagataaaccctctggactagggtaaacatcacggtagcgaacaggataacttggccgcgcgggccccaccgctcagttcctccagttcccgtcggagttgccgtagccgccgccacggttgccaccgccgtagccgccaccaccaccaccgtagccaccgtcgccaccgtagccgtcgccgtcaccgtcgtaagcgccgtcggcatcacggggcccgcccaccgcgtagccgccgcctca

SEQ ID NO: 12753 - DNA, 596 bp, Zea mays
  Clone ID: LIB3061-116-Q6-N7-A1
aacatcagacaaaaaactttattattgaactataactcataagaaatctaaaagagggcaccaccaatgatgggttgttggtagaatgctgttgggtttgtcaaagcaagttggttgaatggcagcaattgttgcagttgtaagagggtgccagcgttaggcgcagcgtgctggtagaacggcaacaattgtggttgtgtcaagaaggtagcagggctcacaccagctagctggctgaatggtagtagttgttgctgctgtaaataagcaggagagttcaaagctgtcagttggttgaatggaagaaattgctgggggtaggcagcagatagctggctgaatggtagttgttgttgttgcaaataagaagcagagttcaatgcagctagttggttgaatggaagaaactgttgttgctgagagtaggcagcaaggtttgctagcacaagttgttgtagttgttgtgccctgatgttttgtgccaataaatgcaccaaaggtaactgctgtaatagggctgatgattgttggaggaacaagggtgataaaggtaagatgccagctgcgattgcctgttggatcctatagggttgaag

SEQ ID NO: 12754 - DNA, 472 bp, Zea mays
  Clone ID: LIB3061-116-Q6-N7-A10
gaacttaaaatatagatctctaatcttttattactgagaagttgcacatatcagtatgagaactttattattacagtataaagcataaaaaaatctagaagatggcaccaccaatggtgggctgctgcaataaggtggtaggattcgtcaaagatagttggttaaatggcagcaattgttgttgttgtaagaaggcgacattgtttgccacatcctgtgggtagaatggtagcaactgttgctgttgcaagaaggcgttaatgtttcccacaacctgtgggtaaaatggcagcaattgttgttgttgttgcaagaaagcagcaatgtttgccacaacttgtagatggaatggaagcaactgttgctgcagtaagaaggcagcagggctcctgacaagttggttgaatggtagtagctgttgtgcctgcaagtaagcagcagggttcaccccagctagttgattgaatggaag

SEQ ID NO: 12755 - DNA, 398 bp, Zea mays
  Clone ID: LIB3061-116-Q6-N7-A12
agaaatgtactttcttatttctgggaagccacaaacatcatccaaaaaacttcattattgaagtataactcataagcaatctaaaagagggcaccaccaatgatgggttgttggtagaacgctgttgggtttgtcaaagcaagttggttgaatggcagcaattgttgcagttgtaagagggtgccagcgttaggcgcagcgtgcaggtagaacggcaacaactgttgttgtgtcaagaaggcaacagggctcacatcagctagctggctgaatggtggtagctgttgctgttgtaaataagcagcagagttcaatgctgccagttggttgaatggaagaaattgctgggggtaggcagcagctagctgactgaatggtagttgttgttgcaaataagc

SEQ ID NO: 12756 - DNA, 551 bp, Zea mays
  Clone ID: LIB3061-116-Q6-N7-A2
agaaatgtactttcttatttctgggaagccacaaacatcatccaaaaaacttcattattgaagtataactcataagcaatctaaaagagggcaccaccaatgatgggttgttggtagaacgctgttgggtttgtcaaagcaagttggttgaatggcagcaattgttgcagttgtaagagggtgccagcgttaggcgcagcgtgcaggtagaacggcaacaactgttgttgtgtcaagaaggcaacagggctcacatcagctagctggctgaatggtggtagctgttgctgttgtaaataagcagcagagttcaatgctgccagttggttgaatggaagaaattgctgggggtaggcagcagctagctgactgaatggtagttgttgttgcaaataagcagcagagttcaatgcagccagttggttgaatggaagaaactgctgttgctgagagtaggcagcaaggtttcctagcacaagttgttgtagttgttgtgccttgatgttttgtgccaacaaatgcaccaaaggtaactgctgtaatagggctga

SEQ ID NO: 12757 - DNA, 584 bp, Zea mays
  Clone ID: LIB3061-116-Q6-N7-A4
cacaagaacaaatccggatcccctttaattattgttccggatgaacgatccgagaaatgcattcatcttcttgctgtgcttattattcagacatatgagctagctacaagctcattcctcatgcactatgctcttcgcagttacttggagggcatcgttccgccgccgagaatccaggggcattcggcgacgccgctgatggtggccaggttgcactcggcctccgtgacgagggtggcggcgaatcccctctgcacctcccgcgggcagcccggcaggtcctttaggcggccctccagctgcgcgtccgggcccggcgggatcgcgccgtccatgaggatgctcagcgccgtgcaccggcagtacgccgggatgtccgccagctcccggcagcatctccttttcagctccggccacgggaggcgcggcccgatgccgcaggtccggctggtcacgtaccagcggcagctcgggagcgggttgtgcgggatggcccaccccggcacgcagaaggtcccggcgctggcgctggcagccgcgagcacggagagcaggacggcggctgcaaggatgaggcggcggtg

SEQ ID NO: 12758 - DNA, 573 bp, Zea mays
  Clone ID: LIB3061-116-Q6-N7-A5
ggaaatgtaacttcttatttctggttggccacatacatcatccaaaaaactttattattgaattacaactaataagcaatctaaaagagggcaccaccaatgatgtgttgttggtaggaggccgctcggtctgtcaaagcaagttggacaaagggcaacaattgttgtagttgtaagagggttgcggggttagccgcaaactgctggtagaaaggcagcaactgttgctgtgtcaagaaggaagcacggtttgctgcagctagctggctaaatggtagtagtatttgctgctgcaaataagcagcggggttcagtgcggccaattggttaaatggaagaagttgttgttgctgagagtaggcagtagctagctggctgaatggtaatagttgttgctgcaaataagcagcagggttcagtgtagacagttggttgaatggaagaaattgttgttgctgagagtagggagaaaggtttgccagagctacttggttgatcacaggtagcacgagttgctgcagctgctgtgccctgatggtttgtaccaatgactgcaccaaagatagggctggc

SEQ ID NO: 12759 - DNA, 525 bp, Zea mays
  Clone ID: LIB3061-116-Q6-N7-A6
ggaacgggccggggcccaacaagcaagcatcatgctacactgtactgcaggttccaatgttcagcaccatcaacacgatcactggttcctcaaacatcactcgagatcaaaagcatgcatagcacaaacgacaggggcagtctagcagtatgcgctaatacttagcacaaacggaacttagcaatacaacatcgacccccaaaggggggtaagtttagtgagctcggtctgacaaaaacataggactgatgaccgcatgaccatgctggtcatgcgcataccattcatattgtagcatccatcggtcgatcagtcactggcaacaggagaatcgtcggcggacctggagcgggatccaggaggtgagcccgagtactccttgggggacctgcggtgcaaaggaaatccatcgctgtctgctgggggcgacctcttctcataaacattgtcagcatcatctctactggcaggagagtaggacctccgcttcttatcttcatcatgctcctttggcaggcgcctggg

SEQ ID NO: 12760 - DNA, 587 bp, Zea mays
  Clone ID: LIB3061-116-Q6-N7-A7
gaacttaaaatatagatctctaatcttttattactgagaagttgcacatatcagtatgagaactttattattacagtataaagcataaaaaaatctagaagatggcaccaccaatggtgggctgctgcaataaggtggtaggattcgtcaaagcaagttggttaaatggcagcaattgttgttgttgtaagaaggcgacattgtttgccacatcctgtgggtagaatggtagcaactgttgctgttgcaagaaggcgttaatgtttcccacaacctgtgggtaaaatggcagcaattgttgttgttgttgcaagaaagcagcaatgtttgccacaacttgtagatggaatggaagcaactgttgctgcagtaagaaggcagcagggctcctgacaagttggttgaatggtagtagctgttgtgcctgcaagtaagcagcagggttcaccccagctagttgattgaatggaagaaattgttgttgctggaggtaagcagcaaggttcgctgcaactacttgattgattgttggaagcaactgttgttgtagttgttgtgctgcgattctttggagatatagattcatt

SEQ ID NO: 12761 - DNA, 528 bp, Zea mays
  Clone ID: LIB3061-116-Q6-N7-A8
acactagtactggagggttttattcctcagtaaaacatgggacacttccactccatacaagggcatataccctgtcacaaaaaagaaaaacgcgaacacataaactagtaaaactacccacacgcccagagccatttccgtcattgagtcatcccaattcccacctcactgttcaaagctccacctttttggtctgatgaccatttccggggccagttccgatgcttttctttgccttggggccaccgttttcttcggggatcccgacgacgcgcgggcccttgatctgctcgggcgccagcttcctgaatcgcacggggaggacccccctgtcgaggctggcggcgacggagtcaaggtcggcgttctcggggagggggaaccggggccagaacctgccgtaggagcgctcctcgcggtgccagtggtcgcccttgcgcttctaaacgcgccgccgtttgccgttgacgcgcaacaccctgttgtcctcgacctcgatcctgaggtcctccctgcgcattccgggca

SEQ ID NO: 12762 - DNA, 430 bp, Zea mays
  Clone ID: LIB3061-116-Q6-N7-A9
aatctagaaatgtactttcttatttctgggaagccacaaacatcagacaaaaaactttattagtgaactataactcataagaaatctaaaagagggcaccaccaatgatgggttgttggtagaatgctgctgggtttgtcaaagcaagttggttgaatggcagcaattgttgcagttgtaagagggtgccagcgttaggcgcagcgtgctggtagaacggcaacaactgtggttgtgtcaagaaggtagcagggctcacaccagctagctggctgaatggtagtagttgttgctgctgtaaataagcaggagagttcaatgctgtcagttggttgaatggaagaaattgctgggggtaggcagcagatagctggctgaatggtagttgttgttgttgcaaataagaagcagagttcaatgcagctagttg

SEQ ID NO: 12763 - DNA, 586 bp, Zea mays
  Clone ID: LIB3061-116-Q6-N7-B1
agtagcattataattacaattagtattcttattcaaatatcatagtacaaacatcataatgtatggtactttattgcttaacaccgttatatgagtataacggctaggtagacacaattcttcaattgcaaacaccactaatgtcattgctgctgcatggattattttggtagtatgagtggtacaagccgcacattgatggtaggtattgtgctgctgtcaagattgccaccgcactttgagtagcttgttgagatccacataactcacatggttgttgttgttgctcctcctggattatggattgaaccatgttgtagattgcttggtgaatgtattgtggctcaatctgcctaagatcatgacaacattgttgctgcaatacctggcagctacttggttgtatcaaacgtgattggagaaaaggcattaccaaagggctgcactgctgccttaggaattcatgacaattttttagatttgagctactgctatagtagttatagctgcaccttgtagtctgttgctgctcctggcaatgacattgttgctgttgtgatttttcctggccctgctgatattgctg

SEQ ID NO: 12764 - DNA, 612 bp, Zea mays
  Clone ID: LIB3061-116-Q6-N7-B10
aacattaacatcccggtatttattgtataatgaactcagctctgggcaggtaactgcacgttcagaaagattacaagcttaacagaacagcaggtgataaaggaaaccgttcgattgtttcggcggcgttatacaaagcaaaccacagtaatgcgttttcgcagaacttgtcacaacaacatagaaagatctaaagataggccaatgatatgaaaggactaaaatattatagtgctcagacaaagaaggtaaaattccatgtcagaccaaggcgcaggggaccggatcaaatgctgtgccacatgttatccattgcctttttcgactccatggtagcatgcaatcaggaaccttctgccactcccttttcaaaaggttgtatgtaacaaggcggttcatatgcttcgccttcaaggagagcatgagcaaaccactgttgcccaggcatttcatcttcatgtgcttaccgtagaactctaagcaccagagatttggcattctgtccacctccttccagaggagagtcatcttctgcaactcccatatgcagatgcaggtcgctgcatttttgcacagcagacccaccagcataacccttccctggaactcggc

SEQ ID NO: 12765 - DNA, 602 bp, Zea mays
  Clone ID: LIB3061-116-Q6-N7-B11
tttttttttttttttttttttttttttttttttttttttttttttttttttttttttttttttttttttttttttttttttttttttttttttttttttttttttttttttttttttttttttttttttttttttttttttttttttttttttttttttttttttttttttaaaaaaaaaaaaagggttttttttttgggggggggcccaaaattttaaaaaaaaaaaatttttttttggaaaattaaaaaaaaaaaaaaagaaaaggggggccccccaaatttttttttttaaagaagggggttttggtttttaaaaaaaaagggggaaaaaggggaaaatttttgtgttaaaaaaaaggggggggggggaaaaaaaaaaatgggggaaaaaaaagaaaaatttttgtttaaaaaaaaaaaaaaaagaggtttggaaaaaattgggggaaaaagggaaaaaaattttggggggaaaaaaaaaaaagggggttaagggggaaaaatttttaaaaaaaaaaaattttttttaaaaaaaaaaaaaaaaacaaacgggggaaaaagagaaaaagggggggaaaaaaaaaaaaaagggggttaagg

SEQ ID NO: 12766 - DNA, 586 bp, Zea mays
  Clone ID: LIB3061-116-Q6-N7-B3
gaggttacattgtttatagtatatgatcaaagaacatgtatgaccattgtacaaataggcccatcttcatgttgtacaacaactgattccactcacaggtacaattagaactagactatgcactgtgttttttttcatttgctatattgaatttcagagtaaagaatatgcgactcacaagaacatctaagctgttaccatagatggaacataatttaacaggtcatgtcgcctcaaaaattgggttagaacttggaggtgattcggcgacttattgggtcagcatctcatttagggctatccatccgttttgttagctcctctatatttcttcgatgtacctattattcttcgacgcttgccgctccaggctttttgcctctaacaaccttgctggcaggaaaatgcaaccttgcataaaggggccttggtgcccttactgtcctatcaaagcccctcacacaaacgaatcctctccaaagcattgttgtatctcttcagtcgttaaacctctaaatattgtaggaactgaggttccaaagtaaacagttcgtcttgggaggtcccatatccaacttcgtgggac

SEQ ID NO: 12767 - DNA, 464 bp, Zea mays
  Clone ID: LIB3061-116-Q6-N7-B6
attcattaatgtttgtttcctatatttggccgatttataaggcatttcctttaaagccaactgttgttgtttgggcctcaataaaaacaaaaatgcgggcacgatcagggcgaaagcaaaagggtcacactctagcaaaccggcaaaactagaagggaaacggtgggccaccacattacgagggatctggctaaactcctaagagagcatgcccaccaccttgggcaatgatttgttattctacctaccagaagcagccaaaacaaaggggcccagttggaatgatctaaaaaaaagtatcttaattaccaggcggggggattcccccccacaataaccgatcggttcttattcccccaccaagtgtccccaaaaagaaagggattaaaggtagggggaggaatagccattgctgaaaacccggggcaaatgggatccccgcagaattccgacaacataccagc

SEQ ID NO: 12768 - DNA, 384 bp, Zea mays
  Clone ID: LIB3061-116-Q6-N7-B8
ctatctaataatactaattatttattataaatatataaatatttgattaaagttaaacattgttgatttttcgagaacgacaactaattttgtaatggagtaagtactgtacccgatttggcacgggcgctggcgcggccctcccccagtaagggcttgttcggatagctctcaatccacatgtggattgagtgggattggatgaatttgaatcacaaacaagtcaaacattttcttatttttttttcaaactcatccaatccatgtgtattgggaataaccgaaccagccctaaagtgcgccggctcaccaaccagccgccggcggccgggggaagtggagcagcatctccgtccagcgacacaacccgtctcctgaatcctg

SEQ ID NO: 12769 - DNA, 478 bp, Zea mays
  unsure (1)..(478): unsure at all n locations; Clone ID: LIB3061-116-Q6-N7-B9
agaaatgtactttcttatttctgggacgccacaaacatcatccaaaaaacttcattattgaactataactcataagcaatctaaaagagggcaccaccaatggatgggttggtggtagaaactgttgagtttgtcaaagcaagttggttgaatggcagcaattggtgcagttgtaagagggtgccagcgttaggcatagcgtgcaggtagaacggcaacaactgttgttgtgtcaagaaggcagcagggctcacatcagctagctggctgaatggtagtagttgttgctgctgtaaataagcagcagagttcaatgctgctagttggttgaatggaagaaattgctgggggtaggcagcaactagctggctgaatggtaanttgttgttgcaaataagccagcagagttcaatgcagccagttggttgaatggaagaaactgatgttgctgagagtatgcagcaaggtttgctagcac

SEQ ID NO: 12770 - DNA, 574 bp, Zea mays
  Clone ID: LIB3061-116-Q6-N7-C10
atcacaatcagaaaaccgaatatatcatgtagtgtagtcacgtatgtagtataacatctgtagcagaacatttctcaatcatgaccagagctccagaagaaccttcacgatgacacggaattttacatggaacgggagcgtctcagatcttgctggcgaactggaggccatccttcttgagctcctcgaggttagcgaccggcggctgggttttcgccaccttggcaatgaccttgttctcgtccggtgacccgccctccaggaaggcgcccaagaccttgccgtccttaatccagtacgagccgaacttgggcttgctggaggtggggtcactgtcgccaaacaggatggtttcgcccacgttgtcgccgtagaattgccacgccaggtcgaatgatcgggagtagaagtatggcaggtagtcatactccggaactggttcaccggactctttgcccttgatcgcctttacagcctgctctgcagactttctagaatggtcaacatgttccactctcctcaactcattgtacatcttcaaagggaaggtagccacatcaccaatggcatatac

SEQ ID NO: 12771 - DNA, 590 bp, Zea mays
  Clone ID: LIB3061-116-Q6-N7-C11
cttaaaaataccataatgaagaaattttagatagagttaactcatgatatacatcatacgaacaccacaggaactggaactcatgacatccatacatagattcagagtagacaccaccagtagacccaacatacgcaaagtttgtgaccacattccaccatcctacgacattacgatcatattgacaaacgccataattcttgtaacccaattttatttcacagaacgaccgaggcgaactgccgttcctcaaaccacgcaggtacgacgaccgcagaccgaggtctagccggagatctgaatggacttcacttcaggcttcttggcgtcctccttgggcacagtgactgtaagcacgccgttctccatggcggccctgatctgctccgtcttggcgttctcgggcagtcggaacctgcgcaggaatctcccgctgctccgctccacgcggtgccaggtgtccgtcttctcctcctgctccttgttgcgctcgccgctgatctgaaggacgttgccgtcctcgacctccaccttgacctcctccttcttcagccccggtacgtctgccttgaacacgtgcgcctctggag

SEQ ID NO: 12772 - DNA, 612 bp, Zea mays
  Clone ID: LIB3061-116-Q6-N7-C2
aagaatctagaaatgtactttcttatttctgggaagccacaaacatcagacaaaaaactttattattgaactataactcataagaaatctaaaagagggcaccaccaatgatgggttgttggtagaacgctgctgggtttgtcaaagcaagttggttgaatggcagcaattgttgcagttgtaagagggtgccagcgttaggcgcagcgtgctggtagaacggcaacaactgtggttgtatcaagaaggtagcagggctcacaccagctagctggctgaatggtagtagttgttgctgctgtaaataagcaggagagttcaatgctgccagttggttgaatggaagaaattgctgggggtaggcagcaggtagctggctgaatggtagttgttgttgttgcaaataagaagcagagttcaatgcagctagttggttgaatggaagaaactgctgttgctgagagtaggcagcaaggtttgctagcacaagttgttgtagttgttgtgccctgatgttttgtgccaataaatgcaccaaaggtaactgatgtaatagggctgatgattgttggaggaacaagggtgataaaggtaagatgccagctgtgattg

SEQ ID NO: 12773 - DNA, 577 bp, Zea mays
  Clone ID: LIB3061-116-Q6-N7-C5
aacgaaaactctatgtttaattgacaccttgaaggtcttaaatatatagagaggacaacgcagcgagatgcatgggctttccagcatcgattaaagtatcagaaccttattgtagcatgcatgcatgcatctgccggttttggaagaaggtttttcctcacatcgacagccccacacatgccgcgcagcaacgagtaccccgctatcactccactggagcatagacgacacatgttctgcttggtgtataaaccgagaatgaatatggcctattatcatgcgaacagtcggcggtgaagtgctcggctgcgtgatggatcctgctaaatccaccaaatagtccagcgtcggagtccaagaccaccttatacaccccaggctttcgacaaccaatacggtagtcaaaatagctgttgttgcagtggaagttgaacacaaataccaaatctcccttttcgaacacaatcaccttatcctcctcatgtttccgggaaaatactggtgatcagatgtcatgaattcatatttttgctcaagatgttgcattgcctgatcaaactcttgcataccatgatac

SEQ ID NO: 12774 - DNA, 105 bp, Zea mays
  Clone ID: LIB3061-116-Q6-N7-C6
agcctctgcacatggcggtagtaataaaaaagaccaattacaaaccgactcgaactgagttcaccgaacgaacgcacagaatagctcaacaaggtcttcatacat

SEQ ID NO: 12775 - DNA, 587 bp, Zea mays
  Clone ID: LIB3061-116-Q6-N7-C7
agaaatgtactttcttatttctgggaagccacaaacatcagataaaaaactttatttttgaacttttaactcataagaaatttaaaagagggccccaccaatgatgggttgttggtagaacactgttgggtttgtcaaagcaagttggttgaatggcagcaattgttgcagttgtaagagggtgccagcgttaggcccaacgtgctggtagaacggcaacaactgtggttgtgtcaaaaaggtaccagggctcacaccagctagctggctgaatggtagtagttgttgctgctgtaaataaccaggaaagttcaatgctgctagttggttgaatggaaaaaattgctgggggtaggcagcaggtacctggctgaatggtagttgttgttgttgcaaataaaaagcaaagttcaatgaacctatttggttgaatggaaaaaactgctgttgctgaaagtaggcagcaaggtttgctagcacaagttgttgtagttgttgtcccctgatgttttgtgccaataaatgcaccaaaggtaactgttgtaatagggctgataattgttggaggaacaagggtgataaaggta

SEQ ID NO: 12776 - DNA, 524 bp, Zea mays
  Clone ID: LIB3061-116-Q6-N7-C8
aaaaccaaaactttattatgaccatgcatatattattggtcataccacacatgataatgtgtgtcgtcttactgcattattacatatatagatagagagagatggatagaggagatttcccaaatatcatgaatcagtagtagggcggaatggcagcggagacgccacaggggttggtgcggtagctgggcagctggtactggtagagtccacccatggccggcatgttctgcgccatcatcatggccatggggttgagaccctgggctgccagcagctgctgctgctgctgcatcagagctggctcgtacaggctgctgctggcggcagcggcacgctcaagctgcatcatcatctgcagctgctgcgcgacggactgcacgtccatcatcctcatctgctgctggcagcactgttgccggagcggctggaacatggcgctcggctgcccacacccggcgtagtagggcgccgccgccagcgggctgcactgcggctgcctcaggtactccgcgtaggggtac

SEQ ID NO: 12777 - DNA, 506 bp, Zea mays
  Clone ID: LIB3061-116-Q6-N7-C9
cgacaggtgaacaagcaggcatttttattcaaagcaaaaggggcagccaattcccaccatactaggaaccaggccagtgctgcccaaaaacgctcaaacaaggaaaaaaaacgagaaggaaccaaagttcttggaaaccaagtccacataactccaatccacgactaacaatgcgaattgcggggaaacaaatcgaaatgcaggcgatggttctccggcctgggcttcttcttcttcttctttccccggactaatcgaaggacagcggaacctggcttgccaggctacggtactttagggcgtaaaacatttcgatgtagcggcgggtctcgcgcctttccaggttgctcacgtacttccaaaacccgtacacgccggtcagggtcatcagcctttcggagtagagcttccaggtgtacttctaatagattctctgcaggccgccctgtgagatcttgtcccagtagctcggatctgccttgcatttgtcaaagaagttgaccagg

SEQ ID NO: 12778 - DNA, 612 bp, Zea mays
  Clone ID: LIB3061-116-Q6-N7-D10
atcgagataaatctcaatcaatatattgattatttctaggaaacacatgtcggtatgagggcaccattgtcgagtacatctcatatgtaatctaaaagatggcacctccaacgatgggttgctgcaaggcagggttcatcaaagagaactggttgtatggcagcaattgttgttgctgctgcaggaaggtagcgaccaatgggttagccactgccaatggattaagtaactgttgtcgctgttgtaggtacgcagcagagtttgacacagccagttggttgaatggaagcaactgttgtaagtaggcagcagggtttgccacagctagctgagtcagagctggtacaatttgttgcagcaactgttgttgtaggtacgtaggtgcattgcccaccgcgagcgggctagatgaaagtagttgtaggtagacggcagggttcaccatggctagttgactgagcactggcataaactgttgcagctgttgttgttgctggtatgcagctacgttcgccagagcaagtgggttggatgcaagcagctgctgttgcaagtaggtgacagggttcaccacggctaggtggctcagtgatggcagaaactgttgttgta

SEQ ID NO: 12779 - DNA, 553 bp, Zea mays
  Clone ID: LIB3061-116-Q6-N7-D11
gaaccagaaaacaaaacgcttccagtgtggcctggtggaatgcaacagcctaacagcgtcggtgttattgacttgtctatacagatagacatgcaataaatatgtcagtgttacacgtcgatttccttttccaaaaacatgtatgcgcctagctacaatagcagctgtccgccacaggcaccaagttcgttcgttccttggcaagggacctcaactccggtggctaccctaacaaaactgtctcccttcctagaacgccaactcctttttcttttcagctgcaaccggcagcgatccctccgaggctgcgtactgcatctcgttagccttctcgttgctaatgccgagcaggtactgcaaccttgatagcttctcaggcttaggaatgctcttcaggtagatggcaaatagatcatctagctctcctggtgtgggccatgacaagggtcgtgatgcagggaccgcagcatcacatgcgagcatgtcattcagagatgaaagcacattatttctcttcttctgccgaagcaacgcaatagcctggacaagggag

SEQ ID NO: 12780 - DNA, 603 bp, Zea mays
  Clone ID: LIB3061-116-Q6-N7-D12
aagaatctagaaatgtactttcttatttctgggacgccacaaacatcatccaaaaaacttcattattgaactataactcataagcaatctaaaagagggcaccaccaatgatgggttgttggtagaacactgttgggtttgtcaaagcaagttggttgaatggcagcaattgttgcagttgtaagagggtgccagcgttaggcatagcgtgcaggtagaacggcaacaactgttgttgtgtcaagaaggcagcagggctcacatcagctagctggctgaatggtagtagttgttgctgctgtaaataagcagcagagttcaatgctgctagttggttgaatggaagaaattgctgggggtaggcagcaactagctggctgaatggtaattgttgttgcaaataagcagcagagttcaatgcagccagttggttgaatggaagaaactgatgttgctgagagtatgcagcaaggtttgctagcacaagttgttgtagttgttgtgccctgatgttttgtgccaccaaatggaccaaaggtaactgctgtaatagggctgacggttgttggaggaacaagggtgataatggtaagatgcctgttg

SEQ ID NO: 12781 - DNA, 532 bp, Zea mays
  Clone ID: LIB3061-116-Q6-N7-D3
atcgagataaatctcaatcaatattttgattatttctaggaaacacatgtcggtttgagggccccattggcgagtccatctcatatgtaatctaaaagatggcccctccaacgatgggttgctgcaaggcagggttcatcaaagagaactggttgtatggcaacaattgttgttgctgctgcaggaaggtagccaccaatgggttagccactgccaatggattaagtaactgttgtcgctgttgtaggtacccaacaaagtttgacacaaccagttggttgaatggaagcaactgttgtaagtaggcagcagggtttgccacaactagctgagtcaaagctggtacaatttgttgcaacaactgttgttgtaggtacctaggtgcattgcccaccgcgagcgggctaaatgaaagtagttgtaggtagaccgcagggttcaccatggctagttgactgagcactggcataaactgttgcaactgttgttgttgctggtatgcaactaccttcgccagaacaagtgggttgga

SEQ ID NO: 12782 - DNA, 585 bp, Zea mays
  Clone ID: LIB3061-116-Q6-N7-D5
cagactaattgtttctatcgtaatttattctctgacattcatagcatatgtcgagttcacaggaaccagaagcaatatggtgccattattataaatattatacaccagactaattgtttctatcatataccatcattaagactatgaagataacagcataactcgccatgtgaagaactactgtagtggtaacgaatcgaagaaataacatcgagtggagtgctccattaataataactaacatggccaatcctctcctaaataccaaaattgttctagcacactcttcaaaggatctcaaatataccctccgtaatcaaatcgacagtacattctactcccttttgttttcctcatcatcaccttcaaaatctgctacggtattcacatcctttgtagctttgggctctggtgtagaagataaattccatccattcttggatgcactgggtgctggcctaattaatgagatgttatcctttcgatcaaagaattcacttgcatcataagaaaatctcattgagttttgtgaaggtgcccacaggtagcaaatgacacaaagaagttagaaagacaagacatgcc

SEQ ID NO: 12783 - DNA, 542 bp, Zea mays
  Clone ID: LIB3061-116-Q6-N7-D6
agaaatgtactttcttatttctgggaagccacaaacatcagacaaaaaactttattattgaactataactcataagaaatctaaaagagggcaccaccaatgatgggttgttggtagaacgctgctgggtttgtcaaagcaagttggttgaatggcagcaattgttgcagttgtaagagggtgccagcgttaggcgcagcgtgctggtagaacggcaacaactgtggttgtatcaagaaggtagcagggctcacaccagctagctggctgaatggtagtagttgttgctgctgtaaataagcaggagagttcaatgctgccagttggttgaatggaagaaattgctgggggtaggcagcaggtagctggctgaatggtagttgttgttgttgcaaataagaagcagagttcaatgcagctagttggttgaatggaagaaactgctgttgctgagagtaggcagcaaggtttgctagcacaagttgttgtagttgttgtgccctgatgttttgtgccaataaatgcaccaaaggtaactgatg

SEQ ID NO: 12784 - DNA, 599 bp, Zea mays
  Clone ID: LIB3061-116-Q6-N7-D7
ttttttttttttttttttttttttttttttttttttttttttttttttttttttttttttttttttttttttttttaattttttttttttttttttttttttttttttttttttttttttttttttttttttttttttttttttttttttgggtttttttttttttgggggggggggcacaaaaatttaaaaaaaaatttttttttggggcttttaccacaaaaaaaataaaaaggggggccccccaaagggggggggtgggtaaaaaactttggggttttaaaaaaaaagggggttaaaagggaaaaatttttgaattttaaaaagggggccccactttgggcccaatgtttgtaaaaaaaaaaaaaatttttggtttttaaaaaaaggaaaaagggataaaaaacatttttggggaaaaggggtaaattttttcttttaaaaaaaaaaagggggagttaaaactttctttgtggaaaaaaaaaaaaaaatggggggggggggaaaaaaaaagcgcgctaaaagggttttttttttttggaaaaaaaaaaaaaagttcaaacgcctttttggggggaaaaaaaaaaaaatttggtttt

SEQ ID NO: 12785 - DNA, 534 bp, Zea mays
  Clone ID: LIB3061-116-Q6-N7-D8
acatgacatttgagtgacaactacatgacggagcaggcgttggggttctcgtcgctgaagatctgcggcgccatgggctgctgctggtgcaggtggtggtgcggcggcgcgtagaacggcggcgggtaggccggctggtaggcgtacgggtaccccggaggcggcgggtaggccggcggctggtagtaccctccagcgaacgggaaccgcgggtagtgcatgtacaggctggcggccgggtccttgtccttgtcgccggcctcgtccttcttgtcgccgtctccgtcgccgccgtccttcttctcctcattcttctcgccgccgtccttcttctcttcctcctccttgccgtccttcttctcctcgcttccggctccgcctgcatccttcttctcctcctccttggccgccttgtcgccgccgccgccctccggcgccggggccggctcggacttgacgacggccgcgtgcttgcccgtgcgcttgtacacgtactccgccagcttggactcctcgaacacgcccttcaccgtc

SEQ ID NO: 12786 - DNA, 583 bp, Zea mays
  Clone ID: LIB3061-116-Q6-N7-D9
atcgagataaatctcaatcaatatattgattatttttaggaaacacatgccgctatgagggcaccattatcgagtacatctcatatgtaatctaaaagatggcaccaccaacgatgggttgctgccacgacaaggcagggttcatcaaagagaactggttgtatggcagcaattgttgctgctgtaggaaggcagcgaccaatgggttagccaccgctagtggattaagtaactgttgtcgctgttgtaggtacgcagcagagttcgacacagtcagttggttgaatggaagtagttgttgcaagtaggcagcagggtttgccacagctagctgagtaagagctggtacaatttgttgcagcaactgttgttgcaacaactgttgttgcaggtatgtaggtgcattgcccatagcgagcgggctagatgaaagaagttgttgctgttgtaggtaggcgatagggttcaccatggctagttgactgagcgctggcagaaactgttgcaactgttgttgttgttggtatgcagctacgtttgccaaagcaagtgggttggatgcaagcagctgttgttgcaagta

SEQ ID NO: 12787 - DNA, 561 bp, Zea mays
  Clone ID: LIB3061-116-Q6-N7-E10
gaatctggaaatgtaacttcttatttctggttggccacatacatcatccaaaaaactttattattgaattacaactaataatcaatctaaaagagggcaccaccaatgatgtgttgttggtaggaggctgctgggtttgtcaaagcaagttggacaaagggcaacaattgttgtagttgtaagagggttgcggggttagccgcaaactgcttgtagaaaggcagcaactgttgctgtgtcaagaaggaagcacgacttgctgcagctagctcgctaaatggcagtagtatttgctgctgcaaataagcagcggggttcagtgcggccaattggttaaatggaagaagttgttgttgctgagagtaggcagtagctagctggctaaatggtaatagttgttgctgcaaataagcagcagggttcagtgtagacagttggttgaatggaagaaattgttgttgctgagagtagggagaaaggtttgccagagctacttggttgatcacaggtagcacgagttgctgcagctgttgtgccctgatggtttggaccaatgactgc

SEQ ID NO: 12788 - DNA, 472 bp, Zea mays
  Clone ID: LIB3061-116-Q6-N7-E2
gaaaaggaaagctccaatctaacccacattcattcggatccactcaatataacgacgaacacaactggccatactagaccccaatgacgacgcaacacacccagccagacggccttcgcaaattcctcttgtccggccaaaggtctctggcattccaatactacagaaaagtcttcgggctataagtaaactgaaacggggaacacagcgacagagagagagagagaaactagggaaaacgctaacagctagccagctgctctccagcagcgacgagatggagccgcaacgctctagggcgccatgcctgcccagttccacagcctgccttggttggtcaccagttcccttgtacagcgattcggtcgagctcttggggacgtcgaccgtcgctcgcggctagctatggagcatcggttgggcggtccagctaaccggtcttagcgtctccgttggcgagcacaggtttctc

SEQ ID NO: 12789 - DNA, 501 bp, Zea mays
  Clone ID: LIB3061-116-Q6-N7-E4
cattaaaaccaaaactttattatgaccatgcatatattattggtcataccacacatgataatgtgtgtcgtcttactgcattattacatatatagatagagagagatggatagaggagatttcccaaatatcatgaatcagtagtagggcggaatggcagcggagacgccacaggggttggtgcggtagctgggcagctggtactggtagagtccacccatggccggcatgttctgcgccatcatcatggccatggggttgagaccctgggctgccagcagctgctgctgctgctgcatcagagctggctcgtacaggctgctgctggcggcagcggcacgctcaagctgcatcatcatctgcagctgctgcgcgacggactgcacgtccatcatcctcatctgctgctggcagcactgttgccggagcggctggaacatggcgctcggctgcccacacccggcgtagtagggcgccgccgccagcgggctgcactgcggc

SEQ ID NO: 12790 - DNA, 594 bp, Zea mays
  Clone ID: LIB3061-116-Q6-N7-E5
agaatctagaaatgtactttcttatttctgggaagccacaaacatcagataaaaaactttattattgaactataactcataagaaatctaaaagagggcaccaccaatgatgggttgttggtagaacactgctgggtttgtcaaagcaagttggttgaatggcagcaattgttgcagttgtaagagggtgccagcgttaggccccacgtgctggtagaacggcaacaactgtggttgtgtaaaaaaggtaccagggctaacaccacctagctggctgaatggtagtagttgttgctgttgtaaataagcaggaaagtccaatgctgctagttggttgaatggaaaaaattgctgggggtaggcagcaggtagctggctgaatggtagttgttgttgttgcaaataaaaagcaaagttcaatgaacctagttggttgaatggaaaaaactgctgttgctgaaagtaggcagcaaggtttgctagcacaagttgttgtagttgttgtgccctgatgttttgtgccaataaatgcaccaaaggtaactgttgtaatagggctgatgattgttggaggaccaagggtaataaaggtaa

SEQ ID NO: 12791 - DNA, 586 bp, Zea mays
  Clone ID: LIB3061-116-Q6-N7-E6
gagataaatctcaaccaatatattgattatttctaggaaacacatgccggtatgagggcaccattatcgagtacatctcatatgtaatctaaaagatggcacctccaacgatgggttgctgcctcgacaagacaggattcatcaaagagaaccggttgtatggcagcaattgttgctgctgtaggaaggcagcgaccaatgggttagccactgccaatggattaagtaactgttgtcgctgttgtaggtacgcaacagagttcgacatagttagttggttgaatggaagcagctgttgcaagtaggcaacagggtttgccacagctagctgagttagagctggtacaatctgttgcaacaattcttgttgcaggtatgtaggtgcattggccacagcgagcgggctagatgaaagcagttgttgctgttgtaggtaggcggcagggttcaccatggctagttgactaagcgctggcagaaactgttgcagttgttggtgttgctggtttgcaactacgtttgctagagcaagtgggttggatgcaagcagctgctgttgcaagtaggcgacagggttcaccatggc

SEQ ID NO: 12792 - DNA, 533 bp, Zea mays
  Clone ID: LIB3061-116-Q6-N7-E8
gaagagagcaataatgctttcggttgcattatttcttcgcctcgcgagaccaccggctagttaggcgagtaaaaccattacaacacgcgcacacacttgacaataacaagagggaaaaaaaagaagaagaagctccctagctaagctagaaagacgggtatatatctggtggcaatggtcacctcacctagggctgctctgcatgctcggggtcaggatcagccacacgtaccgtacgtacacgcttctattgtctccaatcacatcaccggaaaattttcttctttttttctgtaacaatcacatgactccgtcgtcgcaagaacaacaagggtggcatggcaaaggtgttttcgtcgacatcacagcacacatctcacaccgtgtagttctgctggatggtgtcgatgtccaggcccttgagcttgaccaccgactccacgtggcccttgaggggtgttgagctcccgcagcctcgcgatctcggcgcgcctcttggcctgctccgcgatctcggacagctcgcggtagct

SEQ ID NO: 12793 - DNA, 383 bp, Zea mays
  Clone ID: LIB3061-116-Q6-N7-E9
agaatctggaaatgtaacttcttatttctggttggccacatacatcatccaaaaaactttattattgaattacaactaataagcaatctaaaagagggcaccaccaatgatgtgttgttggtaggaggccgctgggtctgtcaaagcaagttggacaaagggcaacaattgttgtagttgtaagagggttgcggggttagccgcaaactgctggtagaaaggcagcaactgttgctgtgtcaagaaggaagcacggtttgctgcagctagctggctaaatggtagtagtatttgctgctgcaaataagcagcggggttcagtgcggccaattggttaaatggaagaagttgttggtgctgaaagtaggcagtagctagctggc

SEQ ID NO: 12794 - DNA, 593 bp, Zea mays
  Clone ID: LIB3061-116-Q6-N7-F10
aaaaataaatcagcagcatatcccctcttttatgtataatccacaagttcacaagtccacaaatatataatagatagtagatatttcacacaagttcaccgcaacattaaaagagatacacaacatgctacatagtttattacaaaagcgcaaacaacatagcgaagagtctaatttcaatgtatcaagtcgccgcaatagcatcttcgtccaagtccattgcattcatatcttcacttatggttctaatttcagtttctaaatctttctctgaagcaatcttccaatccttggtacaaaccaaggcctcaataatttcaggtttaagttttgaacgaaaggcatcaacaatacgtccactagagctaaatgctgactccgaagcaacagtagaaacttgcatagataacacatcacgagcaagggtcgaaaggataggaagatttgtcacttgccccctccaccaagataggatatcaaatggagcatcaccttcattgaccttcaccaaaccctcactcatatacacatccaattctgaaaccttcttcacattgtttgctgctgcatacaactcatcaagatcaacctca

SEQ ID NO: 12795 - DNA, 602 bp, Zea mays
  Clone ID: LIB3061-116-Q6-N7-F11
catatacttgccaatttttgttctttttatagccatgacaactatatcagagagaacgttacatgagccaaattgacacactgaaaaaaaggctccaaattttcatgccggcatgctcctgctcttcctatgtacattggcaccaatgggctcaagcagcaacaatcatccatccttatattgcattattgctcaattctcccaatgatgcgaactgccgctgccgctaccggaggactgcgccgatggcgagaacaggctgttgagccactgcaaggatggcggcaaccggctgccgttctcttcggcttcggctggctccgcattgcctggaatacttgccctaccatcaccgccgccgttgtcattgccttcaccatccgcatcgacactgacaaaaccaccgtcgccgctgctgcatgagcccttgtcgtcggtggccggcagctggaaccggcagacagggcaggagctgtgcatctcgagccacggaacgatgcaattggagtggaacctgtgcctgcagggcatctcccgagcgcgctcgccggccgcgtagtcctccaggcagacggggcagctggccgtgtcgtcatcgttgc

SEQ ID NO: 12796 - DNA, 455 bp, Zea mays
  Clone ID: LIB3061-116-Q6-N7-F2
acactagtactggggggttttattcctcagtaaaacatgggacacttccactccatacaagggcatatacgctggcacaaaaaagaaaaacgcgaacacataaacttgtaaaactacccacacgcgcagagccatttccggcattgagtcatcccaattcccacctcactgttcaaagctccacctttttgggctgatgaccatttccggggccagttccgatgcttttctttgccttggggccaccgttttcttcggggatcccgacgacgcgcgggcccttgatctgcttgggcgccagctttctgaattgcacggggaggacccccctttcgaggctggcggcgacggaatcaaggtcggcgtttttggggaggcggaaccggcgccagaacctgccgtaggagcgctcctcgcggggccaggggtcgcccttgggcttctaaacgcgcccc

SEQ ID NO: 12797 - DNA, 509 bp, Zea mays
  Clone ID: LIB3061-116-Q6-N7-F4
aacaccaaaattttatttttacttttttttttacacatttttttaatttttaactccttttaagacaaaaaaaaaaaaagggggggcccttattgccaaaaccccccaaaaaaaaaaaaacgggggggaaaacaaattttttaaataaaaaccccccaaaatgaattgcctgccgaaaaaaaaattcggaaaaaaaaagggcccaaacccccaaattaagggggggttttccccctttcaaaaaatccccccccacctttaaaagctttttaaaaaccaaaaaaacaaaaaagggggggggaagccccccccccgaattaggaaaaaaacccttttaaaaatccctgggaaaaaaaatggggccaaaaccccccaaaaaaaaaaaaaacaattttgtaaaaaaccccgacaactattggggttaaaaaaaccccttggaaaaaaaggctttcccaagggggccccctgttcctaaaaaaaaaaaaaaaaatttctaaaaataaaccccc

SEQ ID NO: 12798 - DNA, 415 bp, Zea mays
  Clone ID: LIB3061-116-Q6-N7-F5
ggtgggggggaggggagattcttttagggttggaaggggaagagaaaaagaacaaaaaaaaaaaaagggaaacccgggaaggatggaaaaaaaaaaaccggcccacaaaagcagggagggccaggataaccaaacaaaaaaaacaaataaaccatttgcaagctcaataataaaaaacaaagggcatttcaagagcctgggagggcagggtttcccctccaaaaatacccgggaaaaaggcgaacccgcagaaagaatccaggggggacccggaacaacgggacaaggggggcagggaaaaccctcagtcccttccggggggggcggggaaaggcccctagggggcccccgggccccccgaaagggccccgagggaaccccccaaccacgagggggggcacggcgggaaaccccc

SEQ ID NO: 12799 - DNA, 567 bp, Zea mays
  Clone ID: LIB3061-116-Q6-N7-F6
atgggtgcttttttttttgtgtgtagggacgaactgatgcaccacttccgtttgctgagagtgttgggggaatctttcccgtagagaggggtcacatatttgctcattttgcttgctagaccggcagtgttggcagtgtcgcgcttattttgctagctagatggacataaataaaaatctactcactactagctccgaggccgtatttatttgaatagcctcagtctatttattaccatgcgctaattttactgcaattatctgcagtaggggatcatggtaaattgtcagagtttggaggcgttcgcggtaactttgctcagagcggtcgctgccttggacccagactggcgtcccaggtgcctgcagatgaactcgccggcggccatcaccttgcccaggtcgacgcccgtcttgacgcccagcccggtgagcatgtacactacgtcctccgtcgccacattccccgacgcacccttcgcgtacgggcagccaccgaggccggcgacggaggagtccaccacgcttactcccatctgaagagagatgagaatgttcgagagggac

SEQ ID NO: 12800 - DNA, 556 bp, Zea mays
  Clone ID: LIB3061-116-Q6-N7-F7
gaatctagaaatgtactttcttatttctgggaagccacaaacatcatccaaaaaacttcattattgaagtataactcataagcaatctaaaagagggcaccaccaatgatgggttgttggtagaacgctgttgggtttgtcaaagcaagttggttgaatggcagcaattgttgcagttgtaagagggtgccagcgttaggcgcagcgtgcaggtagaacggcaacaactgttgttgtgtcaagaaggcaacagggctcacatcagctagctggctgaatggtggtagctgttgctgttgtaaataagcagcagagttcaatgctgccagttggttgaatggaagaaattgctgggggtaggcagcagctagctgactgaatggtagttgttgttgcaaataagcagcagagttcaatgcagccagttggttgaatggaagaaactgctgttgctgagagtaggcagcaaggtttcctagcacaagttgttgtagttgttgtgccttgatgttttgtgccaacaaatgcaccaaaggtaactgctgtaatagggctg

SEQ ID NO: 12801 - DNA, 608 bp, Zea mays
  Clone ID: LIB3061-116-Q6-N7-F9
ggacctatataatccaggattacataatcttatttgctggataagaactcactaagtttcaagggtagtgtgggtaaaacgccaaaaaataatctaaaataaacatccaatgacctgcttacaaaaggccacaacatttccctcctacctcggtcggtacctccagtctgacagaaaataaacagctcacgttgcagctccatgttagcaccaagataacaggaaaccttcgagcttgaacagggaacgaaaaagcacaggttgctggctgtaagaaacagtggtgcgactcagaaaccccccttgctagcggttgatgggggtatgcatccgctcgacgattctgttgatagcggcccgagtcattacaagggtgtcatgctggaggatactgtagacgttgaggccaatggaaggaagtacgttaacgtagtgaaggttttgagtggccaactttagcttcttatcaatgtcgcctccatccaccaacagaaccttctttgagtcatccatctgtctaatgtattgcacaatgtttttcgtcttgtggctaggaacttccaagtcctcaaagatcaagagcttcccctcagcagttcgagcagaca

SEQ ID NO: 12802 - DNA, 548 bp, Zea mays
  Clone ID: LIB3061-116-Q6-N7-G1
agcatcaaatatttcgtcaacatcgattataacgtcaaaacaaacgatgttcagggcatcgagtatttcatgggcaacaagtttactgtgccgaatcactaagttcaaattcacactttgatggtactcaccagaaatttattctgctcagagcaagcgcattgctggcaaatgacacaagaaaccagtccctacccaccgcggcaaaatgtgaaatgacgttagccaggaacagccatccttacgccttcacttgaggaggagcatcgccttgaagagcaggatcagatttgacagcatctagtgccttgaagaactcctcaggaagagcaacaggctcggtgctgaggaacatgcttaggaattgggggtgtcgtcttcaatcaacctcacattcgtagtcatcgggaacaccccatggatcccattcaatcattttagcgatgagcttgagctcgtcctcggcctcctcgatgagctcctcgacctgcccgcatccgattcggtcctcgatgcgcttccagtcctcctcctcctggcagatctgg

SEQ ID NO: 12803 - DNA, 600 bp, Zea mays
  Clone ID: LIB3061-116-Q6-N7-G10
agaaatgtactttcttatttctgggacgccacaaacatcatccaaaaaacttcattattgaactataactcataagcaatctaaaagagggcaccaccaatgatgggttgttggtagaacactgttgagtttgtcaaagcaagttggttgaatggcagcaattgttgcagttgtaagagggtgccagcgttaggcatagcgtgcaggtagaacggcaacaactgttgttgtgtcaagaaggcagcagggctcacatcagctagctggctgaatggtagtagttgttgctgctgtaaataagcagcagagttcaatgctgctagttggttgaatggaagaaattgctgggggtaggcagcaactagctggctgaatggtaattgttgttgcaaataagcagcagagttcaatgcagccagttggttgaatggaagaaactgatgttgctgagagtatgcagcaaggtttgctagcacaagttgttgtagttgttgtgccctgatgttttgtgccaccaaatggaccaaaggtaactgctgtaatagggctgacggttgttggaggaacaagggtgataatggtaagatgcctgttgcgatt

SEQ ID NO: 12804 - DNA, 576 bp, Zea mays
  Clone ID: LIB3061-116-Q6-N7-G11
cattccttcaaaggaaacacacagcggcacgctcttatttccggtgtttccaccatcagatggtctctgcgccctagcacagcaccgggcgcatggctcacgcatgcctttggcaatatacacatagaccacgcagtagaaaaaaaaaaaagaaaggaaaaccttgccgaacttaacatcattgtccaagaaaacacggcctatttcgtcatatcatcattgttccgagttattggatttcaaaggcggacttcactgactggcgggatcggagggggtcgtcgctgcacacgccgtcctagtagcctccctggatgtagtcattgagccggttcagctcctccctgtgctcggccaccaccgcgcgcacgacgtcgccgatggagaccatccccagcatccccgtgccgtcgatcaccgggatgtgtctgacgcggttttctgcgcagacgattggcacagcggatcataaccaattttccagtgctctcacgattctagtagtattttttttctgacagaagaacacgggcaaccaggttacctgtcatgagctgcattgcctgcaggaccttg

SEQ ID NO: 12805 - DNA, 426 bp, Zea mays
  Clone ID: LIB3061-116-Q6-N7-G12
agaatctggaaatgtaacttcttatttctgggtggccacatacatcatccaaaaaactttttttttgaattacaactaataatcaatctaaaagagggcccccccaatgatgtgttgttggtaggaggctgctgggtttgtcaaagcaagttggacaaagggcaacaattgttgtagttgtaaaagggttgcggggttagccccaaactgcttgtaaaaaggcaacaactgttgctgtgtcaaaaaggaaacacgacttgctgcaactagctcgctaaatggcagtagtatttgctgctgcaaataaacagcggggttcaatgcggccaattggttaaatggaaaaagttgttgttgctgaaagtaggcaatacctagctggctaaatgggaataggtgttgctgcaaataaacaacagggttcaa

SEQ ID NO: 12806 - DNA, 466 bp, Zea mays
  Clone ID: LIB3061-116-Q6-N7-G2
cccaaacatcctttttccctatatattatcccttcccatttaaagggttcattcaggtcattgctcacactgccacccagggggaggggggacactccgttactcatcgccgttaaacgggggaactagctttagccctatggggggctagtcaggggctccattacattattactacaggccatagtttcctcagtagtaaacaccgccggcagctgctttgcaggggcagggacctggttgttgcagttgcaaaccgcacatcgccgtcagttgctgcgctacctgggccgccatcagcgccgggagctccccctgcggttgttgctgcaggaaggactgcaggaccacaccgtatgtcgcctggtaccggggcagcggctccacctgcctgatctgggggcagcactgttgctgcagcgcctggcactggggcgagccgtagggcgtccccgccgggctgcac

SEQ ID NO: 12807 - DNA, 117 bp, Zea mays
  Clone ID: LIB3061-116-Q6-N7-G3
aaaatccgcactccaaaccagcaacgcttatattcgtcaggcacaaaagtggagcatggtctccatggcttcgctcaaagcagcacagtatgggtattaaactgatcaatttacagc

SEQ ID NO: 12808 - DNA, 591 bp, Zea mays
  Clone ID: LIB3061-116-Q6-N7-G4
gcagagcaaattcatatcatatattcatatgcataaacctccgttaatatttgtcgtccactaatttttaaactaaaacgtgacaaataaaaaagaacggatagagtatatagaggacaataagtgaaacagttgattataaaaagatatagaagaacaaagctagcagtcttgtttaggtgcagcaacttgctgactttctcatggaaaggcgctacggacgcacaagcacgaagccgagtttctggcacagcatcttgctgacccgagaggtcaaaaacagccacgggagtattccaaccacaacattgccggtggcagtatcaacacctctccaggaaaacatttttccgaagggctgtagaagatgttgtggaactgcagttacaggagtactccaaaagcacagaacgagcacagcataaattatgaccttagtaaccaacaaaaattttgtgtatttgtcgtataaggattgcttccctttaaggtcatgttcctgcatttttgccagttccttctccttggcagcagccaggcgcttgagtttagcagcttgtgcaaatgtggacggcgttgacaactgatcag

SEQ ID NO: 12809 - DNA, 596 bp, Zea mays
  Clone ID: LIB3061-116-Q6-N7-G6
atagatctctaatcttttattactgagaagttgcacatatcagtatgagaactttattattacagtataaagcataaaaaaatctagaagatggcaccaccaatggtgggctgctgcaataaggtggtaggattcgtcaaagcaagttggttaaatggcagcaattgttgttgttgtaagaaggcgacattgtttgccacatcctgtgggtagaatggtagcaactgttgctgttgcaagaaggcgttaatgtttcccacaacctgtgggtaaaatggcagcaattgttgttgttgttgcaagaaagcagcaatgtttgccacaacttgtagatggaatggaagcaactgttgctgcagtaagaaggcagcagggctcctgacaagttggttgaatggtagtagctgttgtgcctgcaagtaagcagcagggttcaccccagctagttgattgaatggaagaaattgttgttgctggaggtaagcagcaaggttcgctgcaactacttgattgattgttggaagcaactgttgttgtagttgttgtgctgcgattctttggagatatagattcattaaggatgggttgttgcaata

SEQ ID NO: 12810 - DNA, 604 bp, Zea mays
  Clone ID: LIB3061-116-Q6-N7-G7
aagaatctagaaatgtactttcttatttctgggaagccacaaacatcagataaaaaactttattattgaactataactcataagaaatctaaaagagggcaccaccaatgatgggttgttggtagaacactgctgggtttgtcaaagcaagttggttgaatggcagcaattgttgcagttgtaagagggtgccagcgttaggcgcaacgtgctggtagaacggcaacaactgtggttgtgtcaagaaggtagcagggctcacaccagctagctggctgaatggtagtagttgttgctgctgtaaataagcaggagagttcaatgctgctagttggttgaatggaagaaattgctgggggtaggcagcaggtagctggctgaatggtagttgttgttgttgcaaataagaagcagagttcaatgaacctagttggttgaatggaagaaactgctgttgctgagagtaggcagcaaggtttgctagcacaagttgttgtagttgttgtgccctgatgttttgtgccaataaatgcaccaaaggtaactgttgtaatagggctgatgattgttggaggaacaagggtgataaaggtaagatgccagc

SEQ ID NO: 12811 - DNA, 429 bp, Zea mays
  Clone ID: LIB3061-116-Q6-N7-G8
gttcttgggttggttttttagggggtgggggcttttctcgcaggttttttttttttttttggaaaaaggttttgttcgtggggtccccccttgcgattgtttttttttcttgaataagctggggccggctctcccctttgtttgtcacaaggggggggtttaatataaacaactgttttttgggggcatttttttttgtcttttgtgggtgggtcccacctggtgtgttccgcccccgcacttttttttatattttcgttggtgggttggccacccctagttgtttttacacaggtgttttttggttggggaaattttttttgttggcggggtgggtgggcccccctttttattttgggatttgtttttttttttgtgataccttttttttttggggaccagggggtgtttgctcccccccgggggtgt

SEQ ID NO: 12812 - DNA, 577 bp, Zea mays
  unsure (1)..(577): unsure at all n locations; Clone ID: LIB3061-116-Q6-N7-H1
cacattagaatctggaaatgtaacttcttatttctggttggccacatacatcatccaaaaaactttattattgaattacaactaataagcaatctaaaagagggcaccaccaatgatgtgttgttggtaggagagccgctgggtctgtcaaagcaagttggacaaagggcaacaattgttgtagttgtaagagggttgcggggttagccgcaaactgctggtagaaaggcagcaactgttgctgtgtcaagaaggaagcacggtttgctgcagctagctggctaaatggtagtagtatttgctgctgcaaataagcagcggggttcagtgcggccaattggttaaatggaagaagttgttgttgctgagagtaggcagtagctagctggctaaatggtaatnagttgttgctgcaaataagcagcagggnttcagtgtagacagttggttgaatggaagaaattgttgttgctgagagtagggaggaaaggtttgccagagctaccttggttgatcccagaggtagcacgagttngctgcagctgttgtgccctgatggggttgtaccaatgactgc

SEQ ID NO: 12813 - DNA, 452 bp, Zea mays
  Clone ID: LIB3061-116-Q6-N7-H11
caggcacaaaagtggagcatggtctccatggcttcgctcaaagcagcacagtttggtaattaaactgatcaatttacagcatgatgtatccccaaatccaggcccccaatgtcgattcaacatgtaactaacatttgctgctacaacattctaccctacaacattgaaggacacaaaagagcaaaaagaaagaaaaaatgccttggatgacacttttattgctccgatgatctccaacagactgatctgcaaatcacgcatgtaaccaggtgctgatcattgtcaaatgtcaagacacacagctgcatgtcgcacgttcacttaatataactgttccactagggagtaaagcatccttgatcactgggacaattccacctttgatgaagtacccgtctgtctcccttgcagcttcttgaacattgtcagcattgagtatcttaacattgtct

SEQ ID NO: 12814 - DNA, 587 bp, Zea mays; identical to SEQ ID NO: 12719
  Clone ID: LIB3061-116-Q6-N7-H2

SEQ ID NO: 12815 - DNA, 608 bp, Zea mays
  Clone ID: LIB3061-116-Q6-N7-H3
cacattaaaatctggaaatgtaacttcttatttctggttggccacatacatcatccaaaaaactttattattgaattacaactaataagcaatctaaaagagggcaccaccaatgatgtgttgttggtaggaggccgctcggtctgtcaaagcaagttggacaaagggcaacaattgttgtagttgtaagagggttgcggggttagccgcaaactgctggtagaaaggcagcaactgttgctgtgtcaagaaggaagcacggtttgctgcagctagctggctaaatggtagtagtatttgctgctgcaaataagcagcggggttcagtgcggccaattggttaaatggaagaagttgttgttgctgagagtaggcagtagctagctggctgaatggtaatagttgttgctgcaaataagcagcagggttcagtgtagacagttggttgaatggaagaaattgttgttgctgagagtagggagaaaggtttgccagagctacttggttgatcacaggtagcacgagttgctgcagctgctgtgccctgatggtttggaccaatgactgcaccaaagatagggctggcgattgttgaaacaacaagggtg

SEQ ID NO: 12816 - DNA, 597 bp, Zea mays
  Clone ID: LIB3061-116-Q6-N7-H4
gattcattaaaaccaaaactttattatgaccatgcatatattattggtcataccacacatgataatgtgtgtcgtcttactgcattattacatatatagatagagagagatggatagaggagatttcccaaatatcatgaatcagtagtagggcggaatggcagcggagacgccacaggggttggtgcggtagctgggcagctggtactggtagagtccacccatggccggcatgttctgcgccatcatcatggccatggggttgagaccctgggctgccagcagctgctgctgctgctgcatcagagctggctcgtacaggctgctgctggcggcagcggcacgctcaagctgcatcatcatctgcagctgctgcgcgacggactgcacgtccatcatcctcatctgctgctggcagcactgttgccggagcggctggaacatggcgctcggctgcccacacccggcgtagtagggcgccgccgccagcgggctgcactgcggctgcctcaggtactccgcgtaggggtacagcccgccggcgcccatcatcgtcgtcaggccggcgccagcgccgtacaagccctgcagccccgc

SEQ ID NO: 12817 - DNA, 541 bp, Zea mays
  unsure (1)..(541): unsure at all n locations; Clone ID: LIB3061-116-Q6-N7-H5
ctagaaatgtactttcttatttctgggaagccacaaacatcagacaaaaaactttattattgaactataactcataagaaatctaaaagagggcaccaccaatgatgggttgttggtagaatgctgctgggtttgtcaaagcaagttggttgaatggcagcaattgttgcagttgtaagagggtgccagcgttaggcgcagcgtgctggtagaacggcaacaactgtggttgtgtcaagaaggtagcagggctcacaccagctagctggctgaatggtagtagttgttgctgctgtaaataagaaggagagttcaatgctgncagttggttgaatgaaaaaaatggctgggggtaggcagcagatagctggctgaagggtagttgttgttgttgaaaataagaagcagagttcaatgcagctagtttggttgaagggaaaaaactgctgttgctgaaagtaggcagcagggttggttagcacaagttgttgaagttgtggagccctgattttttggccaataaatgcaccaaaggtaactg

SEQ ID NO: 12818 - DNA, 571 bp, Zea mays
  Clone ID: LIB3061-116-Q6-N7-H6
aatctagaaatggactgactgattcatgcgacgccgcagacataatgcaaagagcttatttattgagctaaggctgataaccaatcgaaaatagggcaccaccaacgaggggttgttgctagaacactcttgtgtttgtcaaaggaaggtcgttaaaatggaaccacttgctgcaggtgcaaaaggcggccagcgttaggcataccgggcaggtaaaacgccacccactgttgttgcggcaagaaggcagcagggctgacatcagctagctggctgaatggtagaagctgttgctgctgcaaataaccaggagagctcaatgctgctaccctgactgaatggaagaaattcttggggttagccagcaactagctggctcaatggtaattgttgttccaaataagcaccacagttcaatgcagccagttggttgaatggaagaaactgatgttgctgaaagtatgcagcaaggtttgctagcacaagttgctgtagttggtgggccctgatgttcttgcccaccaaatggaccaaaggtaactgctgtaatagggctgacggttgttggagg

SEQ ID NO: 12819 - DNA, 320 bp, Zea mays
  Clone ID: LIB3061-116-Q6-N7-H7
cctatatattattcctttccatttcaatggttcattcaggtcattgctcacactgccacccatggtgatgggtgacactacgttactcatcgccgctaaatgagtaaactagcgagctaggtagctagtcagcggctccattacattattactacagtacatagtttcctcagtagtagacaccgccggcagctgcgttgcaagggcagggacctggctgctgcagctgcaggccgcacatcgccgtcagctgctgcgctacctgggccgccatcagcgccgcgagctcgccctgcggctgctgctgcaggaaggactgc

SEQ ID NO: 12820 - DNA, 384 bp, Zea mays
  Clone ID: LIB3061-117-Q6-N7-A5
aagaatctagaaatgtactttcttatttctgggaagccacaaacatcatccaaaaaacttcattattgaactataactcataagcaatctaaaagagggcaccgccaatgatgggttgttggtagaacgttgttgggtttgtcaaagcaagttggttgaatggcagcaattgttgcagttgtaagagggtgccagcgttaggcgcagcgtgcaggtagaacggcaacaactgttgttgtgtcaagaaggcaacagggctcacatcagctagctggctgaatggtggtagctgttgctgttgtaaataagcagcagagttcaatgctgccagttggttgaatggaagaaattgctgggggttggcagcagctagctgactgaatg

SEQ ID NO: 12821 - DNA, 594 bp, Zea mays
  Clone ID: LIB3061-117-Q6-N7-A9
gttcccaatcaactacattactcagtaattttaattgtgcactgaaaaccaaaaccgcatataggtctcaaaaaactctaaacattggtaaaacaggaaccgatacgactgccagcaacataaaagtttccagcgcagagtgcaccaggatacaagctccgttcaacggttggccttggcaacacgctcaatctcgtccttcttcttgatggcgtaactgttggatgagcccttggcagcgttgatcagctcatctgcaaggcactcggcaatggttttgatgttccggaaagcactctccctggcaccagtggtgaggaggtagatggcctggttcaccctcctcaggggtgagatatccacggcctgcctcctcacaacaccagcggaaccaatacgggtggcatcctcacggggtccactgttgatgatcgcgtcgacgacgacctggatggggttggcatcggtgagcaggtgaatgatctccagggtatgcttgatgatgcggacagccatgaccttcttgccgttgttgcgcccgtgcatcatgagggagtttgtgaggcgctcgacgatcgggcactgcgccttgcg

SEQ ID NO: 12822 - DNA, 567 bp, Zea mays
  Clone ID: LIB3061-117-Q6-N7-B1
agcagaacaaaagataagtacttccatgcataacgatgttcagcacgagataagcaggttcacacaagacaaggcactgtaataccccatacacttaaaattcatgttgcacaaagcaaaataagataggctaaagcaaaacgtctggattcgcattccaactgtagattggacttaagcaacggcctcgaggaaagccttcccaggagcacgcttctcaagtcttccatggttaccgagcagctttgcgttgacaccatcaggaacaattctaccctcactcttgtacttcaggtagtcggcacggctgaacttggtgaagccccactttctgctctcaataatcttttggcggccagggaacttgaacttggcgcgtcgcagagcttcactggcatgtgcagcattgttgtccttgcatcgaacagaaaggagtacctgaccaatgtccaccctagcacaggtgccctgaggcttgccaaaggcacccctcattccagtctggagcctatcagccccagcacacgaaagcatcttgttgatacgaaggacatggaaggggtgaac

SEQ ID NO: 12823 - DNA, 555 bp, Zea mays
  Clone ID: LIB3061-117-Q6-N7-B10
agaaatgtactttcttatttctgggaagccacaaacatcagacaaaaaactttattattgaactataactcataagaaatctaaaagagggcaccaccaatgatgggttgttggtagaacgctgctgggtttgtcaaagcaagttggttgaatggcagcaattgttgcagttgtaagagggtgccagcgttaggcgcagcgtgctggtagaacggcaacaactgtggttgtatcaagaaggtagcagggctcacaccagctagctggctgaatggtagtagttgttgctgctgtaaataagcaggagagttcaatgctgccagttggttgaatggaagaaattgctgggggtaggcagcaggtagctggctgaatggtagttgttgttgttgcaaataagaagcagagttcaatgcagctagttggttgaatggaagaaactgctgttgctgagagtaggcagcaaggtttgctagcacaagttgttgtagttgttgtgccctgatgttttgtgccaataaatgcaccaaaggtaactgatgtaatagggctgat

SEQ ID NO: 12824 - DNA, 607 bp, Zea mays
  Clone ID: LIB3061-117-Q6-N7-B11
aagaatctagaaatgtactttcttatttctgggaagccacaaacatcatccaaaaaacttcattattgaagtataactcataagcaatctaaaagagggcaccaccaatgatgggttgttggtagaacgctgttgggtttgtcaaagcaagttggttgaatggcagcaattgttgcagttgtaagagggtgccagcgttaggcgcagcgtgcaggtagaacggcaacaactgttgttgtgtcaagaaggcaacagggctcacatcagctagctggctgaatggtggtagctgttgctgttgtaaataagcagcagagttcaatgctgccagttggttgaatggaagaaattgctgggggtaggcagcagctagctgactgaatggtagttgttgttgcaaataagcagcagagttcaatgcagccagttggttgaatggaagaaactgctgttgctgagagtaggcagcaaggtttcctagcacaagttgttgtagttgttgtgccttgatgttttgtgccaacaaatgcaccaaaggtaactgctgtaatagggctgacggttgttggaggaacaagggtgataaaggtaagatgcctgctgcgat

SEQ ID NO: 12825 - DNA, 519 bp, Zea mays
  Clone ID: LIB3061-117-Q6-N7-B12
aacttcttatttctaggaggccacatacatcagccaaaaaacttcattattgaattacaactaataagcaatctaaaagatggcaccgccaatgatgtgttgttggtagaaggctgctgggtttgtcaaagcaagttggacaaagggcagcaactgttgcagttgtaagagggttgcggggttagccacaaactgctggtagaacggaagcaattgttgttgtttcaaaaaggaagtggggcttgttgtagctagctggccaaatggtagtagtatttgctgctggaaataagcagaggggttcagtgcggccaattggttaaatggaagaaattgttgctgctgagagtaggcagtagctagctggctgaatggtagtagttgttgttgttgtaaataagcagcagggttcagtgtagacagttggttgaatggaagaaattgttgttgctgagagtagggagaaaggtttgccagagctacttggctgatcactggtagcacgagttgttgcagctg

SEQ ID NO: 12826 - DNA, 613 bp, Zea mays
  Clone ID: LIB3061-117-Q6-N7-B2
cgagataaatctcaaccaatatattgattatttctaggaaacacatgccggtatgagggcaccattatcgagtacatctcatatgtaatctaaaagatggcacctccaacgatgggttgctgcctcgacaagacaggattcatcaaagagaaccggttgtatggcagcaattgttgctgctgtaggaaggcagcgaccaatgggttagccactgccaatggattaagtaactgttgtcgctgttgtaggtacgcaacagagttcgacatagttagttggttgaatggaagcagctgttgcaagtaggcaacagggtttgccacagctagctgagttagagctggtacaatctgttgcaacaattcttgttgcaggtatgtaggtgcattggccacagcgagcgggctagatgaaagcagttgttgctgttgtaggtaggcggcagggttcaccatggctagttgactaagcgctggcagaaactgttgcagttgttgttgttgctggtttgaaactacgtttgctagagcaagtgggttggatgcaaccagctgctgttgcaagtaggcaacaggggtcaccatggctaggttggttaatgctggtaggaact

SEQ ID NO: 12827 - DNA, 571 bp, Zea mays
  Clone ID: LIB3061-117-Q6-N7-B3
atcgagataaatctcaatcaatatattgattatttctaggaaacacacgtcggtatgagggcaccattatcgagtacatctcatatgtaatctaaaagatggcacctccaacgatgggttgctgcctcgacaagacaggattcatcaaagagaactggttgtatggcagcaattgttgctgctgtaggaaggcggcgaccaatgggttagccactaccaatggattaagtaactgttgtcgctgttgtaggtacgcagcagagttcgacagagtcagttggttgaatggaagcagctgttgcaagtaggcaacagggtttgccacagctagttgagtcagagctggtacaatctgttgcaacaattgttgttgcaggtatgtaggtgcattgcccacagcgagcgggctagatgaaagcagttgttgttgttgtacgtaggcggcagggttcaccatggctagttgactgagcgttggcagaaactgttgtagctgttgttgttgctggtttgcaactacgttcgccagagcaagtgggttggatgcaagcagctgctcttgcaagtaggc

SEQ ID NO: 12828 - DNA, 473 bp, Zea mays
  Clone ID: LIB3061-117-Q6-N7-B4
gaattatggtttttttacgcgccggagggggggcggccaaaaaaaaagaagggtaacggggagaggaaaaaatttcttaaagaaggggggaaaaaaaaatggggggataaggggggaaaaaaattcggaatgaaaaaaatagatggctcccaaaaaaaaaaaaaaataacgtgacaggggcacaaaatataaaaggggggagcataaagaggaaagcctgagaaaaataatgagtgagctaacaaacaccaattgtgaagagaaaaaaaaaaggtggccagtcggaaaaaaagaagggccacccgcggggaggaggggggggtttttttggggagaggaggggtgttttttttgcgcaaagaagggggcacaatgagtgattaaatccgctcggtcggtcagaaagggggaaaaaaaacagaccactttatggtggcaatacgggaaaaaacagaattaggggataaaacagg

SEQ ID NO: 12829 - DNA, 599 bp, Zea mays
  Clone ID: LIB3061-117-Q6-N7-B6
gaaaatatgaaatagctcactttttatgtttcttcgctatggttatacaaactcagtatagttctgaaaaaataaccgagtgtctgcaccaaactaccaaaaagtttcatattgtaaacgtgaatcggtgcatggccgttccaccagattgaaagaaatcatttgtcactgttatactcggtggttggcaatgctgaaagtaatccggcacagatcaactttcatcagcaggagagcctgacgcttcagcagctttcttttccttctgtttctctctgcgcttcttgtttcgcaatgcatttttgctcatctcccccccagcaggagctagtccaccaaagagcttgtcctgaagttctgcagaacccttagcatgaggtgggcggtatgctgtaggttttggcgctgtaattgcaggggccttgcttgatgtttgtgctgacttggaaccttgtgctgaaacttgtttttttgtttcttcaatctttaaggtactcaaggatgttgtcaggtcagcaatgtcagtgaatctttcagctgcttcaggtttccaatcagcctgatacagcctttcaaacatcttcttaaactgcagagat

SEQ ID NO: 12830 - DNA, 560 bp, Zea mays
  Clone ID: LIB3061-117-Q6-N7-B9
gagataaatctcaatcaatatattgattatttttaggaaacacatgccgctatgagggcaccattatcgagtacatctcatatgtaatctaaaagatggcaccaccaacgatgggttgctgccacgacaaggcagggttcatcaaagagaactggttgtatggcagcaattgttgctgctgtaggaaggcagcgaccaatgggttagccaccgctagtggattaagtaactgttgtcgctgttgtaggtacgcagcagagttcgacacagtcagttggttgaatggaagtagttgttgcaagtaggcagcagggtttgccacagctagctgagtaagagctggtacaatttgttgcagcaactgttgttgcaacaactgttgttgcaggtatgtaggtgcattgcccatagcgagcgggctagatgaaagaagttgttgctgttgtaggtaggcgatagggttcaccatggctagttgactgagcgctggtagaaactgttgcaactgttgttgttgttggtatgcagctacgtttgccaaagcaagtgggttggatgca

SEQ ID NO: 12831 - DNA, 563 bp, Zea mays
  Clone ID: LIB3061-117-Q6-N7-C11
gaaaaggtacaagatgggcattttttataacagcattcaggtttttgtgtcatagccagtaaacggaataacaattttttttttatagattcaaagcggaaaaatacaattgaatttgctgacaggcctccttgcttgagctttcaaaactgtggtcacctgaaagatgtggacctaagcctttttcttcgatgacttcttgtggggtttcttctggggcttaagcttatcaaatttcgatgacatgcctttctctttccttctctgcttctcctttttcaccttgtacattgtaattgccttgccgacatcaagtagttcatcagagtttctggcaagtagagagttcaggattttgtcattctgctgcttctccaggctgcccattcccttcccttcggcaactgggaggaactttctgtgtttgccagggtgctttggaggtttctcgccaggcaacttctcatcaaacttcccaccacttgctgttgctgatgaagccatgccgacaacactctcaagatcctcttttctagatttttttggaaggtcaacttttgttc

SEQ ID NO: 12832 - DNA, 585 bp, Zea mays
  Clone ID: LIB3061-117-Q6-N7-D10
aggaggacgatgaccgatcgagattatattaataataaagggtacgaaagataattgatcgagcaggcaattgctagtaggtagcctgctgttcagatcaaatcaaagtcggcgcaggtaaacaccaagcgcatcgacgagcctgctggtcgcgcgtccatagaaccccacgatgctgctgccgaccggcgcggtgatgcagaaccgcgtcccgttctcgacgccccatggcccccatgtcctgctgctggtgagaattctgaacgaggtcagcgtggtggcgccttcaaatgtgccgtacgttcctgagacctccctgacatcctcggcgtcgccaagatcgatcgttcgaaggttgccgccaagtccaccccatcgcccagcggcgcgcctctggccacctctgtcagtatacgtgaactcgatggagtcgacggcgccaccggcacgaacggtgaggctgtgcatgcgctgcggtggctccgtcgtcgtgatgtcctgcgccgaccctcctttgccaccccataacccaatcttggtgacagagatgctggagtcctgcttgtttggttgctgtgatgagcc

SEQ ID NO: 12833 - DNA, 620 bp, Zea mays
  Clone ID: LIB3061-117-Q6-N7-D11
agaaatgtactttcttatttctgggaagccacaaacatcagacaaaaaactttattattgaactataactcataagaaatctaaaagagggcaccaccaatgatgggttgttggtagaatgctgttgggtttgtcaaagcaagttggttgaatggcagcaattgttgcagttgtaagagggtgccagcgttaggcgcagcgtgctggtagaacggcaacaattgtggttgtgtcaagaaggtagcagggctcacaccagctagctggctgaatggtagtagttgttgctgctgtaaataagcaggagagttcaaagctgtcagttggttgaatggaagaaattgctgggggtaggcagcagatagctggctgaatggtagttgttgttgttgcaaataagaagcagagttcaatgcagctagttggttgaatggaagaaactgttgttgctgagagtaggcagcaaggtttgctagcacaagttgttgtagttgttgtgccctgatgttttgtgccaataaatgcaccaaaggtaactgctgtaatagggctgatgattgttggaggaacaagggtgataaaggtaagatgccagctgcgattgcctgttggatcctata

SEQ ID NO: 12834 - DNA, 599 bp, Zea mays
  Clone ID: LIB3061-117-Q6-N7-D12
agaaatgtactttcttatttctgggaagccacaaacatcagataaaaaactttattattgaactataactcataagaaatctaaaagagggcaccaccaatgatgggttgttggtagaacactgctgggtttgtcaaagcaagttggttgaatggcagcaattgttgcagttgtaagagggtgccagcgttaggcgcaacgtgctggtagaacggcaacaactgtggttgtgtcaagaaggtagcagggctcacaccagctagctggctgaatggtagtagttgttgctgctgtaaataagcaggagagttcaatgctgctagttggttgaatggaagaaattgctgggggtaggcagcaggtagctggctgaatggtagttgttgttgttgcaaataagaagcagagttcaatgaacctagttggttgaatggaagaaactgctgttgctgagagtaggcagcaaggtttgctagcacaagttgttgtagttgttgtgccctgatgttttgtgccaataaatgcaccaaaggtaactgttgtaatagggctgatgattgttggaggaacaagggtgataaaggtaagatgccagctgc

SEQ ID NO: 12835 - DNA, 554 bp, Zea mays
  Clone ID: LIB3061-117-Q6-N7-D2
ggcaagaccagcaagatttcctgttccatcaaaatcagtttaggcaaacgacattacgacgagtgcagaccaccactcgtcagaatctagagagattgaaaaaaaagggttcttttctgcttttggtgctcccacgacaaaatcacctgagtagctctcgagcaaacacgaccatacatttattgcgaccgtacaaacattgtaacaaaaggcagcagcgagctagtatagctccacaagaaaacatcctcatcctcttcctttcttagtagggctccactggtgccctgaactttgctccggcgtagaccgcggcatcaccgagctcttcctcgatcctgagcagctggttgtatttggccaggcgctcagaccggcaaggggctcccgtcttgatttggcccgtagacaggccaactgagaggtcagcaatgaaggtgtcctctgtctcgccactcctgtggcttgccatcactccccatccggcgcgcttggacatcctgacagcttcgatactctcggtcacagacccgatttggttcaccttcaagagg

SEQ ID NO: 12836 - DNA, 440 bp, Zea mays
  Clone ID: LIB3061-117-Q6-N7-D3
ggaaaagggggaaaaaagggtttatttttaacggggggggaggggtgcaaaaaaaattcctttcaggaaggaagggggtcccaagttaataacccaaaattttgccgggaaaaaaacgggcaaaaaaccggaaaatgggcccccgaatttgttgaaaaaaaagccgccgggagattaaaatggcataagtttttgccaaatgatctcgggggccattgggtttttggttgattaaaaaaaactttggggaaaaattaaaaaaaaagggtgacgttgaaaagggggattccaactacaggttactggggctttttaatttccttaaaaataccccaagaaagggaatttggggcgaagtttttgccaaaaaaattgacaaactttatttttggggccatcagggccatgaaaattgggggatcaaaaaggggggcagaacc

SEQ ID NO: 12837 - DNA, 605 bp, Zea mays
  Clone ID: LIB3061-117-Q6-N7-D4
ctagaaatgtactttcttatttctgggaagccacaaacatcatccaaaaaacttcattattgaagtataactcataagcaatctaaaagagggcaccaccaatgatgggttgttggtagaacgctgttgggtttgtcaaagcaagttggttgaatggcagcaattgttgcagttgtaagagggtgccagcgttaggcgcagcgtgcaggtagaacggcaacaactgttgttgtgtcaagaaggcaacagggctcacatcagctagctggctgaatggtggtagctgttgctgttgtaaataagcagcagagttcaatgctgccagttggttgaatggaagaaattgctgggggtaggcagcagctagctgactgaatggtagttgttgttgcaaataagcagcagagttcaatgcagccagttggttgaatggaagaaactgctgttgctgagagtaggcagcaaggtttcctagcacaagttgttgtagttgttgtgccttgatgttttgtgccaacaaatgcaccaaaggtaactgctgtaatagggctgacggttgttggaggaacaagggtgataaaggtaagatgcctgctgcgatcgga

SEQ ID NO: 12838 - DNA, 606 bp, Zea mays
  Clone ID: LIB3061-117-Q6-N7-D5
aacaaagatggtagatgccatgccataaatcatgtcaatatatgtgcatgctgaaccaataacagaaaacacaattgaaaaaacaaaatcatcagaacatttggttctgctataaaaatggttcttatgcttctttgtagcctatacatagttcctccatatgcttttatgattccccatgaaaagtaagaacacgatgccgaataagcgcgcacacacacaatggatagaaacttgactgagttcagctacatgcatctccatggataccctcaattccattttgttgttaataagggccatcaggcggaggtaatgaatggtcaattgatcataaaacaacacactatataaacatgaaggatccaagacgtgcagtctatgtacgttgcttgccttagcaaaccagcggacaaaccctattcctacagctggcagaactgaatttgaagcagaagaacttattatctggaggcaatcatttttatgaccagtacgccaatgcaatgcatgatgtttctcataacagtaccttgctttcttgcagctactacatattttatcacctttccaggtaccacaccagtggcatacaggagctcctgg

SEQ ID NO: 12839 - DNA, 480 bp, Zea mays
  Clone ID: LIB3061-117-Q6-N7-D6
aagcaccaaacaagatagcatacttgtcattgtattgaaaacatacgcattggtgcattacaagctttagaacagggctgagcatgcgcaaagcagtatatagacgatacgtcccttattcttacatagtactgtactatacacattcgtcagacctgtgccatacagccatactaaacaaagtcttcttgattctcatacgccttcacataaggcccaaggtgtgtgtcgtgccctggtgagtgccagacccagggccatgtagctggtaagtctggctcggcacaacctggagaacacctggttgctccttgagatccttgacctgctggggggtgagcttcgcggagaagccgctggcggcgttcttgtagtggtagagcactgcgtccctggccttctgttcgctgcccaggacgggggtgagggtgcggatgtggaactcctcaaggtcggcgtcctcggggcggtcaacgtaca

SEQ ID NO: 12840 - DNA, 576 bp, Zea mays
  Clone ID: LIB3061-117-Q6-N7-D7
agaagcacataagaatctagaaatgtactttcttatttctgggaagccacaaacatcatccaaaaaacttcattattgaactataactcataagcaatctaaaagagggcaccgccaatgatgggttgttggtagaacgttgttgggtttgtcaaagcaagttggttgaatggcagcaattgttgcagttgtaagagggtgccagcgttaggcgcagcgtgcaggtagaacggcaacaactgttgttgtgtcaagaaggcaacagggctcacatcagctagctggctgaatggtggtagctgttgctgttgtaaataagcagcagagttcaatgctgccagttggttgaatggaagaaattgctgggggtaggcagcagctagctgactgaatggtagttgttgttgcaaataagcagcagagttcaatgcagccagttggttgaatggaagaaactgctgttgctgagagtaggcagcaaggtttcctagcacaagttgttgtagttgttgtgccttgatgttttgtgcaacaaatgcaccaaagtaactgctgtaatagggctgacggttgttg

SEQ ID NO: 12841 - DNA, 450 bp, Zea mays
  Clone ID: LIB3061-117-Q6-N7-D8
gaagccactgggcatagtagattcgagtttttttttgttttgtattttgcagctatcgaaaccaagggtagttcaactgtccttgattcatatacacaacatttattttctacagtagtttgttttgttacctttgcgagaacagcttttatgtgcgcaaattcccaaatattaaatgcccgcccggtccaagccaagtccaagctttatcctcttgctggggcctttatttttttgagcagagcctttgcagcgagaacctttgccacattctggttggggcctgttccagtcccggagtacacagttcgcgcagccgttacctgtgcaaccacccttgtgactccagctacactgtcacgagttggagagtaccatggcttagggtagtgtttgtgctcgcataattccttcagttccgacacggggtcaggctccatggtcccgggg

SEQ ID NO: 12842 - DNA, 625 bp, Zea mays
  Clone ID: LIB3061-117-Q6-N7-E10
atattgagataaatctcaatcaatatattgattatttctaggaaacacatgccggaatgagggcaccattatcgagtacatctcatatgtaatctaaaagatggcacctccaacgatgggttgttttctcgacaagacagggtttatcaaagagaactggttgtatggcagcaattgttgctgctgtaggaaggcagcgaccaatgggttagccactgctagtggattaagtaactgttgtcgctgttgtaggtacgcagcagagttcgacatagtcagttggttgaatggaagcagctgttgcaagtaggcagcagggtttgccacaactagctgagtcagagctggtacaatctgttgcaacaattgttgttgcaggtatgtaggtgcattggccacagcgagcgggctagatgaaagcagttgttgctgttgtaggtaggcggcagggttcaccatggctagttgactgagcgctggcagaaactgttgcagctgttgttgtggctggtttgcaactacgtttgccagagcaagtgggtttgatgcaagcaactgctgttgcaagtaggccgcagggttcaccatggctaggtggctcagtgctggtaggaatagttgttgc

SEQ ID NO: 12843 - DNA, 531 bp, Zea mays
  Clone ID: LIB3061-117-Q6-N7-E5
ccctatatattattcctttccatttcaatggttcattcaggtcattgctcacactgccacccatggtgatgggtgacactccgttactcatcgccgctaaacgagtgaactagctatagccctataggtagctagtcagcggctccattacattattactacagtacatagtttcctcagtagtagacaccgccggcagctgcgttgcaagggcagggacctggctgctgcagctgcagaccgcacatcgccgtcagctgctgcgctacctgggccgccatcagcgccgcgagctcgccctgcggctgctgctgcaggaaggactgcaggaccacaccgtatgttgcctggtaccggtgcagcggctccacctgcctgatctggtggcagcactgctgctgcagcgcctggcactgaggcgagccgtagggcgattacatcgggctgcactggtgccttaggaactagactcactggcccaggaacggtctgttctctctttctactccttaagattcatactgttggttc

SEQ ID NO: 12844 - DNA, 467 bp, Zea mays
  unsure (1)..(467): unsure at all n locations; Clone ID: LIB3061-117-Q6-N7-E6
cgccgcgagggtcacaccgttctgatcccttccagctcacaaagctcggcagatattttacacaaactgattttcagttccttacaagttggaccactacacctccccaatttctcttcagnnccggctatgatnncaccagggnncctgacaaacatataattaaattgttggcatgcaaatttccgatttcttccccttatattggtgttgcttacacttactttctccactgtctgaaatataagcacacttgcttacacttgcttctccattgtcaagacgcgtgcatttcaccaaccaaatccatcctggacgagccaaagggctgaaagaagtcgtggtcagcagcagccaggccctggaacacgccctcctcctccaagaagctcaggaaccctcccgggttgagatccatccacaggtcgccgcggccgaggtcgtaatcgccgaagccagctccttgc

SEQ ID NO: 12845 - DNA, 528 bp, Zea mays
  Clone ID: LIB3061-117-Q6-N7-E8
caacattaggcgtcccttcccgtgacaaatcgatcctgccccaagctgtcatcagaattgcattacaggtaatctattccagaggtcaaagaaattaggaaccatcttggctcatctgaatggaacttgtggtagagcaagcgcggaaagaaaaatactaggcatccagatcaatctatgtaaccatacggtaactggcagcgcttttgacttattctgcgctagtctgattgaaaccttcccggaatgtagcttcgattcagcctactcgtgcaggaagcctttctcctcaaggtaagtaaccacttgccccgccatgtcagaaggcgaagggcatacaccatctatttccttgatctcaatctcacaattcagtggtgcttcataagggtcatctattcctgtaaaaccctttattttcccagcacgagcaagcttatagaggccctttgggtcccttgcttcacataattccaaggacatattcaagaaaacttcaataaagctaccatccgataacaatgcacg

SEQ ID NO: 12846 - DNA, 574 bp, Zea mays
  Clone ID: LIB3061-117-Q6-N7-E9
agcacaccacaacgatgatttatacttcattactggcgatcttagagcaaaataactatcaaccacatttggagactagaagcacataagaatctagaaatgtgctttcttatttctgggaagccacaaacatcagacaaaaaactttattattgaactataactcataagaaatctaaaagagggcaccaccaatgatgggttgttggtagaacgctgctgggtttgtcaaagcaagttggttgaatggcagcaattgttgcagttgtaagagggtgccagcgttaggcgcagcgtgctggtagaacggcaacaactgtggttgtatcaagaaggtagcagggctcacaccagctagctggctgaatggtagtagttgttgctgctgtaaataagcaggagagttcaatgctgccagttggttgaatggaagaaattgctgggggtaggcagcaggtagctggctgaatggtagttgttgttgttgcaaataagaagcagagttcaatgcagctagttggttgaatggaagaaactgctgttgctgagagtaggcagcaaggtttgctagcac

SEQ ID NO: 12847 - DNA, 600 bp, Zea mays
  Clone ID: LIB3061-117-Q6-N7-F1
aaatctcaatcaatatattgattatttctaggaaacacacgtcggtatgagggcaccattatcgagtacatctcatatgtaatctaaaagatggcacctccaacgatgggttgctgcctcgacaagacaggattcatcaaagagaactggttgtatggcagcaattgttgctgctgtaggaaggcggcgaccaatgggttagccactaccaatggattaagtaactgttgtcgctgttgtaggtacgcagcagagttcgacagagtcagttggttgaatggaagcagctgttgcaagtaggcaacagggtttgccacagctagttgagtcagagctggtacaatctgttgcaacaattgttgttgcaggtatgtaggtgcattgcccacagcgagcgggctagatgaaagcagttgttgttgttgtacgtaggcggcagggttcaccatggctagttgactgagcgttggcagaaactgttgtagctgttgttgttgctggtttgcaactacgttcgccagagcaagtgggttggatgcaagcagctgctcttgcagtaggcgggagggttcaccatggctaggtggctcaatgctggta

SEQ ID NO: 12848 - DNA, 594 bp, Zea mays
  Clone ID: LIB3061-117-Q6-N7-F11
gggccttccaacagaacagaatatgagatgagatgaatcttatttgtgactgagtgccaagccaaccaagcagaggcagcgttacaatccaagccactgtcggaagcccatgcattaaatcaaaacagcgtcatcaccctctgccagtgccagcccaagcacagcgtgccaaatggcaactagcaaatcagaaaccgtcaccgatgcctttttgtttgtcaggtaaggcacaatgtacttcttcatgtcacctttggagataccaagatgacctcccggcacagacacaaacttcacccgccctgcttcatccagtgtcttcaaaccaatccagtcttcctcatacagtttcgtcttctgaggtggtagaactggatcaaaggctccatcagggtagtaaccaaaccatgccgtttctcgtggtatcaggactgcatcatcctgaaacataatcagaaccaaattctctaagctactgaatctttccttgtaggtggcatttcttttatctggaatttcattggtaagttttggaagaaacctacaactcttcagataatctgccatatcagttgggattttgaggtagccact

SEQ ID NO: 12849 - DNA, 92 bp, Zea mays
  Clone ID: LIB3061-117-Q6-N7-F12
aaagggggggtttttttttttaaaacccccatttgggatataaggggggggtaaaaaaaattttttaaaaaaaaaaaccccatttttttttt

SEQ ID NO: 12850 - DNA, 607 bp, Zea mays
  Clone ID: LIB3061-117-Q6-N7-F2
agataaatctcaatcaatatattgattatttctaggaaacacatgccgctatgagggcaccattatcgagtacatctcatatgtaatctaaaagatggcacctccaacgatgggttgctgccacaacaaggcagggttcatcaaagagaactggttgtatggcagcaattgttgctgctgtaggaaggcaacgaccaatgggttagccaccgctagtggattaagtaactgttgtcgctgttgtaggtacgcagcagagttcgacacagtcagttggttgaatggaagcagctgttgcaagtaggcagcagggtttgccacagctagctgagtcagagctggtacaatctgttgcagcaactgttgttgcaggtatgtaggtgcattaaccacagcgagagggctagatgaaatcagttgttgctgttgtaggtaggcggcagggttcaccatggctagttgactgagcgctggtagaaactgttgcaattgttgttgttgttggtatgcaactatgtttgccagagcaagtgggttggatgcaagcaactgctgttgcaagtaggcgacagggttcaccacagctagttggctcagtgctggtaga

SEQ ID NO: 12851 - DNA, 268 bp, Zea mays
  Clone ID: LIB3061-117-Q6-N7-F3
ctaggaggccacatacatcagccaaaaaacttcattattgaattacaactaataagcaatctaaaagagggcaccgccaatgatgtgttgttggtagaaggctgctgggtttgtcaaagcaagttggacaaagggcagcaactgttgcagttgtaagagggttgcggggttagccacaaactgctggtagaacggaagcacttgttgttgtgtcaagaaggaagcggggcttgttgtagctagctggccaaatactactaccatttgg

SEQ ID NO: 12852 - DNA, 608 bp, Zea mays
  Clone ID: LIB3061-117-Q6-N7-F7
aaatgatcagatcagagtgatttatataatttacaaatttgatcgagttacattacatttagttcccggccgacaacgtctttttatgccatttgtttgacacacacacacactactactaccagtagcagagcagtagttcctaggcaaacagcagagggaggagacaaacaagagcagcagcacttcagttacggaaggaagaaggtgaaacaagagatggatcacgcatgcaccggtatggacaggttgttggcgatgcagcccgtcctgaagatcttggcgaaggagcgccagagcctgagctcctggtgcgccgtcaccggcatcccctccttcacgcagtggtcgtacttctccagcaccgacacaatgtagctgaactccggccgccgcgccgggttcgccgaccagcacttcttgatcaggttgttgagcaccggcgggcacgagctcgacagcggcgggcgcaggttcttctccgacgcggcgtacgcggcctgcaccggcgtcatgccctggaacgggaggaggcaggtggtgagctcccagagcacgatgccgaagctgtacacgtccaccttgcgcgtgtagggcttctccttggt

SEQ ID NO: 12853 - DNA, 519 bp, Zea mays
  Clone ID: LIB3061-117-Q6-N7-F8
gggaaatataacttcttatttctaggaggccacatacatcagccaaaaaacttcattattgaattacaactaataagcaatctaaaagagggcaccgccaatgatgtgttgttttttttttgttgatgggtttgtcaaagcaagttggacaaagggcatcaactgttgcagctgtaagaaggttgcggggttagccacaaactgctggtagaacggaagcacttgttgttgcgtcaagaaggaagcggggcttgttgtagctagctggccaaatggtagtagtctccgctgctggaaataagcagaggggttcagtgccggcaattagctaaatggaaaaaattggtgctgctgagagtaggcagcagctagctggctgaatggtagtagttgttgttgctgcaaataagcagcaaggctcaatatagacagctggttgaatggaagaaatcgttgctgctgagagtagggggaaaggtctgccagagctacttgggttatcactggtaggaccagttg

SEQ ID NO: 12854 - DNA, 574 bp, Zea mays
  Clone ID: LIB3061-117-Q6-N7-F9
catccaaaaaacttcatttttgaactttaactcataagcaatctaaaagagggccccaccaatgatgggttgttggtagaacactgttgattttgtcaaagcaagttggttgaatggcagcaattgttgcagttgtaagagggtgccagcgttaggcatagcgtgcaggtagaacggcaacaactgttgttgtgtcaagaaggcagcagggctcacatcagctagctggctgaatggtagtagttgttgctgctgtaaataagcagcagagttcaatgctgctagttggttgaatggaaaaaattgctgggggtaggcagcaactagctggctgaatggtaattgttgttgcaaataagcagcagatttcaatgcacccagttggttgaatggaaaaaactgatgttgctgaaagtatgcagcaaggtttgctagcacaagttgttgtatttgttgtgccctgattttttgtgccaccaaatggaccaaaggtaactgctgtaatagggctgacggttgttggaggaacaagggtgataatggtaagatgcctgttgcgattgcctgttggatc

SEQ ID NO: 12855 - DNA, 501 bp, Zea mays
  Clone ID: LIB3061-117-Q6-N7-G10
ccacccaaaaaacttcattttggacctttacctcataagcaatctaaaggggggcccccccaagggggggttgtgggtaaaacactgtggggttggcaaaagcaggtgggttgaagggcaacaattgttgcagttgaaaaaggggcccagcgttaggcatagcgggcaggtaaaacggcaacaactgttgttgtgtaaaaaaggcagcagggctcacataacctagctggctaaatggaagtagttgttgctgctgaaaataaccagcaaagtcaaatgctgctagtgggttaaatggaaaaaattgctgggggtaggcacaaactagctggctaaagggaaattgtgggggcaaataaccagcaaagttaaatgcacccagttggttgaatggaaaaaactgatgttgctaaaagtatccacaagggtttgctaccacaagttgttgtatttgttgccccctgattttttgggccacaaagggcccaaaggaaactgctg

SEQ ID NO: 12856 - DNA, 526 bp, Zea mays
  Clone ID: LIB3061-117-Q6-N7-G11
ctagaaatgtactttcttatttctgggaagccacaaacatcagacaaaaaactttattattgaactataactcataagaaatctaaaagagggcaccaccaatgatgggttgttggtagaacactgctaggtttgtcaaagcaagttggttgaatggcagcaattgtttcagttgtaagagggtgccagcgttaggcgcagcgtgctggtagaacggcaacaactgtggttgtgtcaagaaggtagcagggctcacaccagctagctggctgaatggtagtagttgttgctgctgtaaataagcaggagagttcaatgctgccagttggttgaatggaagaaattgttgggggtaggcaacaggtagctggctgaatggtagttgttgttgttgcaaataagaagcagagttcaatgcagctagttggttgaatggaagaaactgctgttgctgagagtaggcagcaaggtttgctagcacaagttgttgtagttgttgtgccctgatgttttgtgccaataaatg

SEQ ID NO: 12857 - DNA, 613 bp, Zea mays
  Clone ID: LIB3061-117-Q6-N7-G5
aaactgaagcacagtagtgaagactggctggccatcagtagagactgtttggagacttccatcactgtaaacggaagtgaggggcatatcttttccagtagagtcaacaagtccaacagcaacaggtatgaacataggctccttaaccggctggccaggagtgggtggtacttcttggctaagtttcaaagagaatgtctgagaactaggatcatatgaagatgccaccttgactataggcgtacctgcttgagagtaccattgtaaaaagtttggcagttgtgcattatttgcatcacacatggctgcatagaagtcttcacaagtgacagcttgcccatcatgccttttaaaataaagatccatgccctttcggaaccctgatgctccaaacatggtcttgtacattctgacaacttcagcacccttctcgtaaaccgtaacagtatagaagttgtccatcttgatataagaatggggacggataggatgtgccataggcccggcgtcctgtgggaattgatagattctaagtttggagacatcagcaatacgttttaccgtacgacagccaagatctgaagagaactcctgatccctgaaaacggtcagt

SEQ ID NO: 12858 - DNA, 412 bp, Zea mays
  Clone ID: LIB3061-117-Q6-N7-H1
gtggttgtgggggttgttttttttgttttttttttggccacaaaagggggggggtgtagggggggccccccccaagggggaaaaaaatttttgaaaccccccggggggggaagagaaaaaaaaaaggggggaggggtgtttttttttgggggggggggcctttttttaagaaaaaaaaattttttttggggggacaaaaaaaggacaataaaaaaaggggggccccccaattttttttttgtagaaaaaaggttgttgttttaaaaaaaaaagggggaaaaggggggcacctttggggttaataaaggggggggggggggggggaaaaaattgggggaaaaaaaaaaaaattttttgttttaaaaaaaaaagggggggggttttgttaaacacagcccccgggggggccccc

SEQ ID NO: 12859 - DNA, 609 bp, Zea mays
  unsure (1)..(609): unsure at all n locations; Clone ID: LIB3061-117-Q6-N7-H10
agagcaaaataactatcaaccacantttggagactagaagcacataagaatctagaaatgtactttcttatttctgggaagccacaaacatcagacaaaaaactttattattgaactataactcataagaaatctaaaagagggcaccaccaatgatgggttgttggtagaacactgctaggtttgtcaaagcaagttggttgaatggcagcaattgttgcagttgtaagagggtgccagcgttaggcgcagcgtgctggtagaacggcaacaactgtggttgtgtcaagaaggtagcagggctcacaccagctagctggctgaatggtagtagttgttgctgctgtaaataagcaggagagttcaatgctgccagttggttgaatggaagaaattgttgggggtaggcaacaggtagctggctgaatggtagttgttgttgttgcaaataagaagcagagttcaatgcagctagttggttgaatggaagaaactgctgttgctgagagtaggcagcaaggtttgctagcacaagttgttgtagttgttgtgccctgatgttttgtgccaataaatgcaccaaaggtaactgctgtaatagggctgatg

SEQ ID NO: 12860 - DNA, 550 bp, Zea mays
  unsure (1)..(550): unsure at all n locations; Clone ID: LIB3061-117-Q6-N7-H11
gcagcaccaagaagcaccatttttttccttaggatttaacttagaataaagcctgacgggggtaacagcacccatcgatccgcagtccatgctggttgatgcatgggtctgctggagccgaggatgaacacagcacttacaactgacacagagcgaccttcaatcaaaaacacagatgggcaacaacaaacacgagacgaacgaagataaacactctggactagggtaaacaacacggtagcgaacaggataacttggccgcgcgggccccaccgttcagttcctccagttcccgtcggagttgccgtagccgccgccacggttgccaccgtcgtagccgtcgtcaccaccaccgtagccgccgtcgtcaccaccgtagccgccgtcaccgtcgtagccgccgccgccattacggtgcccgccaccggcgtagccgccgtcttcacggtcaccaccgtacccgccgtcgtcgtcgtcttcacgggcgncgngggactgggcctcgttgacggtgatgttgcggccgtccagctccttgccgttcatgccc

SEQ ID NO: 12861 - DNA, 70 bp, Zea mays
  Clone ID: LIB3061-117-Q6-N7-H12
tttttttttttttttttttttttttttttttttttttttttttttttttttttttttttttttttttttt

SEQ ID NO: 12862 - DNA, 509 bp, Zea mays
  Clone ID: LIB3061-117-Q6-N7-H2
cgagataaatctcaatcaatatattgattatttttaggaaacacatgccgctatgagggcaccattatcgagtacatctcatatgtaatctaaaagatggcaccaccaacgatgggttgctgccacgacaaggcagggttcatcaaagagaactggttgtatggcagcaattgttgctgctgtaggaaggcagcgaccaatgggttagccaccgctagtggattaagtaactgttgtcgctgttgtaggtacgcagcagagttcgacacagtcagttggttgaatggaagtagttgttgcaagtaggcagcagggtttgccacagctagctgagtaagagctggtacaatttgttgcagcaactgttgttgcaacaactgttgttgcaggtatgtaggtgcattgcccatagcgagcgggctagatgaaagaagttgttgctgttgtaggtaggcgatagggttcaccatggctagttgactgagcgctggtagaaactgttgcaactg

SEQ ID NO: 12863 - DNA, 615 bp, Zea mays
  unsure (1)..(615): unsure at all n locations; Clone ID: LIB3061-117-Q6-N7-H3
atcaaaatgcaaagagctttatttgacaaccatgtatgtacatacagacacgacgacgatcgaacatataagaccatgataggtcatatgacatatataagacctttatctagcatatctgtagtacccgtcctgctgctgaaaccagactaaagttggcgcaggtagacaccgatcgcagcgacgagcctggtcgtcgcgcgtccatagaatcccacgatgctgctgccgatgggcgcggtgatgcagaaacgtgtgccgctctcgatgccccatggcccccaagctctggcggtgctggtgacaatcctgaacgaggtaagggtagtcgcaccttcgaatgcgccgtacgttccagaaacttccttgacgtattcagcgtcgccaagatcgagcttccggacgttgccgccaagtccaccccatcgcccagcggtgcgcgtctgaccacctgtgtcggtactgtaggtgaactcgatggagtccacggcaacgccggcgcggacggtcaggctctgcagacgcctcggcggctccgtcgtcgcgatgtnctgcgccgacccttcctcttcaccccacactccgaccttggtgacgacgacggtggagctgatg

SEQ ID NO: 12864 - DNA, 558 bp, Zea mays
  Clone ID: LIB3061-117-Q6-N7-H4
cagacaaaaaactttattattgaactataactcataagaaatctaaaagagggcaccaccaatgatgggttgttggtagaacgctgctgggtttgtcaaggcaagttggttgaatggcagcaattgttgcagttgtaagagggtgccagcgttaggcgcagcgtgctggtagaacggcaacaactgtggttgtatcaagaaggtagcagggctcacaccagctagctggctgaatggtagtagttgttgctgctgtaaataagcaggagagttcaatgctgccagttggttgaatggaagaaattgctgggggtaggcagcaggtagctggctgaatggtagttgttgttgttgcaaataagaagcagagttcaatgcagctagttggttgaatggaagaaactgctgttgctgagagtaggcagcaaggtttgctagcacaagttgttgtagttgttgttgttgctcctcctggattatggattgaaccatgttgtagattgcttggtgaatgtattgtggctcaatctgcctaagatcatgacaacattgttgctg

SEQ ID NO: 12865 - DNA, 476 bp, Zea mays
  Clone ID: LIB3061-117-Q6-N7-H5
aatcatgttctctcagaagcatcagcaaacgtttcaagcctttttttttaaactgtgcgtaaacaccaagcacgcacattaccacatgcaatgcaacgcaatgcattctcgtgttctaatgacaacgcggccggatcagctggtggcgttgttgctagtcatcggtcatcagcctttgcactatcagctctaccacggcaggggcattgacggtgacagcgaccttcacggtgggcatgccactccaggctgtgatctctccgtaccttttcttggtgttgtcgaaaacagtaaggcccttggtgatcccgactgtctgtaccctcacaacgccttctgtgtaagtcagcagcgatgggttcaccgcagcaataaccgtcgttggatcgtgaagatacgctccttttatgaagtgagcgtccctgtggtaatcaaaataaacgcccattatcttgcacaagttgcgggcgtttttg

SEQ ID NO: 12866 - DNA, 437 bp, Zea mays
  Clone ID: LIB3061-117-Q6-N7-H6
caaaaaaatccctaagaacaaatagagcaactgcttaaccacaggtgagtgttaccaatgaagctaacctacaatgtcaattggactacactctgaagcacaatccactttccgaatgttgtccacatacacaggcaatgggaacatagccaatttaactagcaaaaagatatggtgttacacaaggcaagcttttcagataccattgagccttctctagttactttataaagatccggctatttgggcactttagagcttttctctccaagagaaaagctgcacacgcagcagatgactactatgtacagttaagcctgatcatcaataataaaaactagaattcttctggcggagttgcatttttccaaagaatagaacgaacttgcactatagatctgggtggatctaggaacttcgattggactggtttacct

SEQ ID NO: 12867 - DNA, 566 bp, Zea mays
  Clone ID: LIB3061-117-Q6-N7-H7
ctagaaatgtactttcttatttctgggaagccacaaacatcagacaaaaaactttattattgaactataactcataagaaatctaaaagagggcaccaccaatgatgggttgttggtagaatgctgttgggtttgtcaaagcaagttggttgaatggcagcaattgttgcagttgtaagagggtgccagcgttaggcgcagcgtgctggtagaacggcaacaattgtggttgtgtcaagaaggtagcagggctcacaccagctagctggctgaatggtagtagttgttgctgctgtaaataagcaggagagttcaaagctgtcagttggttgaatggaagaaattgctgggggtaggcagcagatagctggctgaatggtagttgttgttgttgcaaataagaagcagagttcaatgcagctagttggttgaatggaagaaactgttgttgctgagagtaggcagcaaggtttgctagcacaagttgttgtagttgttgtgccctgatgttttgtgccataaatgcaccaaaggtaactgctgtaatagggctgatgattgttgga

SEQ ID NO: 12868 - DNA, 573 bp, Zea mays
  Clone ID: LIB3061-117-Q6-N7-H8
gcacacctcacaccaagaaaaccctcagttttaagcatgaacagtttggaagttttacatagctgagaaaagagacggaactgtagcttttatgagcgctgctactaatactcttcacagagcatggctctgtcatagtagtattattaatcaccagatgcaccaacagcaggcgatccggctgccaacgagcagaggcaccctcagacaagcacctgagctgcagctagcctagcgatcgggaccctgaaaggggagcaagaaacgtaatccagcccagtcttggcgaagaaagcaaccgatgaaggctctccaccatgttctccacaaatgcccaccttcaagttaggcctagctttgcggcccctctctgtagcaagcttaaccagctcgcccactcctctctggtcgagaacctcgaaggggtcatgctggaggatgccctgagccagataaatggggatgaacttccccacatcatccctgctgtagccaaaggtcatctgcgtgaggtcgttcgttccaaaggagaagaattcagcctgctccgcgatctcgtcagccactagagct

SEQ ID NO: 12869 - DNA, 411 bp, Zea mays
  unsure (1)..(411): unsure at all n locations; Clone ID: LIB3061-117-Q6-N7-H9
aaagtcgaaagtacagttntgtttctttttttaaaaaaatgtataaacatgtcttacatcacagaccagaacatcttggttaggtgacagcagatagttttggatgaagctgagctatgcacaaacggaggtcagaagtctaaacaccacaaaatttgactaatctgttcctcgaatcgacaaaacccttggaagaagagactataatattcatctgcgctgtactatactatgaatacttctgtcatataactctcagcagctgcagtgcttgctgcacttcatgcaccacagcaaaatttctactcacagatgtaacgatagcagcagaattgtggtgccatgtactcaatccacgtgttgttttcttgtgagccgtagatttacataccaatttgcaaggcagcgcag

SEQ ID NO: 12870 - DNA, 665 bp, Zea mays
  Clone ID: LIB3061-088-Q1-K7-A10
cttctattagtaccatcaatcatcattcatcttagtagtataggcaccaaatcaaatctgcaacatcaattatctaactccaaaaaccatgaagctggtgcttgtggttcttgctttcattgctttagtatcaagtgtttcttgtacacagacaggcggctgcagctgtggtcaacaacaaagccatgagcagcaacatcatccacaacaacatcatccacaaaaacaacaacatcaaccaccaccacaacatcaccagcagcagcaacaccaacaacaacaagttcacatgcaaccacaaaaacatcagcaacaacaagaagttcatgttcaacaacaacaacaacaaccgcagcaccaccaccaacaacaacaacaacagcaccaacaacaacatcaatgtgaaggccaacaacaacatcaccaacaatcacaaggccatgtgcaacaacacgaacagagccatgagcaacaccaaggacagagccatgagcaacaacatcaacaacaattccagggtcatgacaagcagcaacaaccacaacagcctcagcaatatcagcagggccaggaaaaatcacaacagcaacaatgtcattgccaggagcagcaacagactacaaggtgcagctataactactatagcagtagctcaaatctaaaaa

SEQ ID NO: 12871 - DNA, 268 bp, Zea mays
  unsure (1)..(268): unsure at all n locations; Clone ID: LIB3061-088-Q1-K7-A2
ccacnacccnacgcaaccgccccggccccagccacanccccagccacacccangcccgngccaacagccgcanccaagcccgngccagcngcagggaaccagcggcganggcagcaccccgaaccggggccagggcgacgagaaacagaggcaacagagcagaccgacggcgacgcccaaccgcacgacagagagccagacgaagcggcagcagcgaagcacagaagcacaggcaggaggagccaaaagaccgggaccaggcgaacaa

SEQ ID NO: 12872 - DNA, 524 bp, Zea mays
  unsure (1)..(524): unsure at all n locations; Clone ID: LIB3061-088-Q1-K7-A3
acacacctangcaaacaaacaaacacacacacacagcatcgcgatcccgctgtcccagcagctggagtacttcagggagtaccagacgaagctggcggcggtggccggcgccgggcaggcgcgctccatcctcagcggcgcgctgtacatcgtcagtgccggcgccagcgacttcgtgcagaactactacataaacccgctgctgttcaagacgcagacggccgaccagttctccgaccgcctcgtggccatcttcggccgcaccgtgcaggagctctacggcatgggggcgcgccgcgtcggcgtcacgtcgctgccgccgctgggctgcctgccggcgtccatcacgctgttcgggcacagcgccgccgggtgcgtgtccaggctcaacagcgacgcgcagagcttcaaccggaagatgaacggcaccgtggacgcgctggcgcggcggtacccggacctcaagatcgccgtcttcgacatctacacgccgttgtacgacctgtccacggacccccagtcgc

SEQ ID NO: 12873 - DNA, 530 bp, Zea mays
  Clone ID: LIB3061-088-Q1-K7-A9
gcgtccggatcatgcaaacaaagtttggccctgttgccttcttcttgcttacaaaatcaagtaccctgagaacttttttcttctgaggggcaatcatgaatgcgcctcaataaacagaatatatggattctatgatgaatgcaagcgtcgatttaatgtgcggctatggaaggtcttcacagagtgttttaacactctacctgtggctgctcttatcgatgataaaatattatgtatgcacggtggactctctcctgatctagcacacttggatgagataaagaacttgcagcgtccaactgatgtaccagatcaaggtctactgtgtgacttgctttggtcagatccaggaaaagatgctcaagggtggggcatgaatgatagaggggtctcatatacctttggtgctgacaaggttacagaattcttgcaaaagcatgatcttgatcttatctgtcgggctcaccaggttgtccaggatgggaatgaatttttttgctgacaaacagctagtaaccatattttcggac

SEQ ID NO: 12874 - DNA, 477 bp, Zea mays
  unsure (1)..(477): unsure at all n locations; Clone ID: LIB3061-088-Q1-K7-B1
aggacgcngaaacanggcattctcaagggaaatcagttattctggtgagggcggagaccagccctgaggacgtcggcggcatgcacgcggctgccggaatcctcacagaattaggtgttttgacctcccatgccgccgtggtggcacgcgggtggggaaaatgctgngtctcgggatgctctgggattcgtgtaaatgacgcagagaaggttgtgaagattggaggcaatgtgctgggcgaaggtgagtggctatcgctgaatggatcgaccggcgaagtgatcctcggaaagcagccgctctccccaccagccctcagtggcgatctgggaacattcatgtcctgggtgggatgacgttagaaagctcaagggcctggcaaacgcggatacccctgagggatgattggctgggcgggaaaacgggggagaaaggaatcgggtatgccggacagagcacatgttcttcgcttcggat

SEQ ID NO: 12875 - DNA, 320 bp, Zea mays
  Clone ID: LIB3061-088-Q1-K7-B10
gcagccttgaactctcctgcttatttacagcagcaacaactactaccattcagccagctagctggtgtgagccctgctaccttcttgatacaaccacagttgttgccgttctaccagcacgctgcgcctaacgctggcaccctcttacaactgcaacaattgctgccattcaaccaacttgctttgacaaacccagcagcgttctaccaacaacccatcattggtggtgccctcttttagatttcttatgagttatagttcaataataaagttttttgtctgatgtttgtggcttcccagaaataagaaagtacatttct

SEQ ID NO: 12876 - DNA, 638 bp, Zea mays
  Clone ID: LIB3061-088-Q1-K7-B11
gcaacatataaagtggaatccagcagcaacaacagagcaacaatggcgaccaagatattttccctccttatgctccttgctctttctgcatgtgttgctaacgcgacaattttccctcaatgctcacaagctcctatagcttcccttcttcccccataccttccatcaatgatagcttcagtatgtgaaaacccagctcttcagccctataggctccaacaagcaatcgcagcaagcaacatacctttatcacccttgttgtttcaacaatcgccagccctatctttggtgcagtcattggtacaaaccatcagggcacagcagctgcagcaactcgtgctacctgtgatcaaccaagtagctctggcaaacctttctccctactctcagcaacaacaatttcttccattcaaccaactgtctacactgaaccctgctgcttatttgcagcaacaactattaccattcagccagctagctactgcctactctcagcaacaacaacttcttccatttaaccaattggccgcactgaaccccgctgcttatttgcagcagcaaatactactaccatttagccagctagctgcagcaaaccgtgcttccttcttgacacagcaacagttgctgcctttcta

SEQ ID NO: 12877 - DNA, 674 bp, Zea mays
  Clone ID: LIB3061-088-Q1-K7-B3
gcggcagatgcgcagagcgcaaccgagcgagagagagaggacggcgacggcggagatgatggggtggggagaggaggtggtggctctgtccctgcgaggctacggctatggcaacgaggaggacgaccggccggagaagccgcggcggtacggggtgacggagatgcggagccccttctactccttccgccccgcaaaccaggcgctccaggaaatattggattctcttagtccattcgttgatggtttgaagttctctggcggatgccatagtttgatgggaaaggagttggttagagagatcactgatctagcacacaggcatgacatttatgtgagcacaggtgattgggcagagcatttgctgcgccaaggaccctcttctttcaagcaatatgtagaggaatgcaaggccttagggtttgacacaattgagctgaatgctgggtctctcaacctccctgaagaggctctgttgagactagtccgcctcatcaagagtagtggtttaagggcaaagccaatgttttcggtgaagtttgacagttctgatattcctgcgtctggtgatagggcctttggggcttacatagctccagtcaaagggaagacctcagaaagagttgaagatgttgacctgctgattaggagggcagagagatgcttggaagcag

SEQ ID NO: 12878 - DNA, 667 bp, Zea mays
  Clone ID: LIB3061-088-Q1-K7-B4
gaccaactagcaacatagaaagcacaatagtgtaccaacaatggcagccaaaatattttgcttccttatgctccttggtctttctgcaagtgttgctaccgcaaccattttcccacaatgctcacaagctcctatagcttcccttcttcccccatacctctcaccagcggtgtcttcaatgtgtgaaaccccaattgttcaaccctacaggatccaacaggcaatcgcaacaggcatcttaccattatcacccttgttcctccaacaaccgtcagccctattacagcagttacctttggtccatttggtggcacaaaacatcagggcacaacaactacaacaacttgtgctagcaaaccttgctgcatactctcagcaacatcagtttcttccattcaaccaactggctgcattgaactctgctgcttatttgcaacaacaattaccattcagccagctagttgctgcctacccccagcaatttcttccattcaaccaactagcagcattgaactctgctgcttatttacagcagcaacaactactaccattcagccagctagctgatgtgagccctgctgccttcttgacacaacaacagttgttgccgttctacctgcacgctatgcctaacgctggcaccctcttacaactgcaacaattgcta

SEQ ID NO: 12879 - DNA, 654 bp, Zea mays
  Clone ID: LIB3061-088-Q1-K7-B5
cccgggaaaagatctcacctctccagagtcccgggataattcgctttcgatccccacagaggcacagacgagacgacagagatgaaggacggaacgtcgtcggggggaggggcgttcgctgcgggcagcgatccaaggcagccgtcgacggcgaagccatacgcgccgccgaagctgtcgccccaggacctacccatcgactatgcaggcttcctcgccgtcgtcttcggcgtcctcggcgtcatgctccgctacaaggtgtgctcgtggatcgcaatcatcttctgcgctcagtcgttggcaaacatgaagaactttgagaacgatctgaagcagctttctatggccttcatgtttgctgttatgggtctggtgacgaactattttggccccgctcgtccaggcagtacaaagcgctaagctgtggaagaacaccatgcgcttcattcttcataggatatctagccgatctttttggtgcttccgatagctttggtgctgacattatgtatgtccgatttgagcaaacgtcataggtatggacatcaaattaatggaccggtacatgtatgatgctcaataatttatttgtgcaatactagtaaacgcaaagactgtttgaacgagtacttggtttcttcggatatgttgatc

SEQ ID NO: 12880 - DNA, 661 bp, Zea mays
  Clone ID: LIB3061-088-Q1-K7-B6
ccttctatcagtaccatcaatcatcattcatcttagtagtataggcaccaaatcaaatctgcaacatcaattatctaactccaaaaaccatgaagctggtgcttgtggttcttgctttcattgctttagtatcaagtgtttcttgtacacagacaggcggctgcagctgtggtcaacaacaaagccatgagcagcaacatcatccacaacaacatcatccacaaaaacaacaacatcaaccaccaccacaacatcaccagcagcagcaacaccaacaacaacaagttcacatgcaaccacaaaaacatcagcaacaacaagaagttcatgttcaacaacaacaacaacaaccgcagcaccaacaacaacaacaacaacaacagcaccaacaacaacatcaatgtgaaggccaacaacaacatcaccaacaatcacaaggccatgtgcaacaacacgaacagagccatgagcaacaccaaggacagagccatgagcaacaacatcaacaacaattccagggtcatgacaagcagcaacaaccacaacagcctcagcaatatcagcagggccaggaaaaatcacaacagcaacaatgtcattgccaggagcagcaacagactacaaggtgcagctataactactatagcagtagctcaaatct

SEQ ID NO: 12881 - DNA, 594 bp, Zea mays
  Clone ID: LIB3061-088-Q1-K7-B7
atcactgtgccacctagccgtggtgaaccctgtcacctacttgcaacagcagctgcttgcatccaacccacttgctctggcgaacgtagctgcataccagcaacaacaacagctgcaacagtttatgccagtgctcagtcaactagccatggtgaaccctgccgtctacctacaactactttcatctagcccgctcgcggtgggcaatgcacctacgtacctacaacaacagttgctgcaacaaattgtaccagctctgactcagctagctgtggcaaaccctgctgcctacttacaacagttgcttccattcaaccaactggctgtgtcaaactctgctgcgtacctacaacagcgacaacagttacttaatccattggcagtggctaacccattggtcgctaccttcctgcagcagcaacaacaattgctgccatacaaccagttctctttgatgaaccctgccttgcagcaacccatcgttggaggtgccatcttttagattacatatgagatgtactcgacaatggtgccctcataccgacatgtgtttcctagaaaaatcaatatattgattgagatttatctcgatat

SEQ ID NO: 12882 - DNA, 665 bp, Zea mays
  Clone ID: LIB3061-088-Q1-K7-B9
cggacgcgtggataccaactaccaacatacatagtgaagtacactagcaacatcttagcaccaatggcagccaagatttttgcgctccttgccctccttgctctttcagcaagtgttgctaccgcgactattattccacaatgctcacaacaatacctctctccagtgatagccgcgagatttgaatacccatctatacaatcctacaggctacaagaggccatcacagcaagcatcttacggtcgttagcattgaccgtccaacaaccatatgccctattgcaacaaccatccttagtgaatctgtatctccaaagaatcacagcacaacaactacaacaacggttgcttccaacaattaatcaagtagttgcagcgaaccttgctgcttaccttcagcaacaacaatttcttccattcaatcaactagctggggtgaaccctgctgcttacttgcaggcacaacagctactaccattcaaccaacttgtcgggagccctgctgccatcttattgcagcaacagttgctgccattccgtctacaagttgttgcaaacattgctgctttcttgcaacaacaacaattgctgccattttacccacaggttgtgggaaacattaacgccttcttgcaacaacaacaattgctgccattctacccaca

SEQ ID NO: 12883 - DNA, 577 bp, Zea mays
  Clone ID: LIB3061-088-Q1-K7-C11
atcgccatccctatctttggtgcagtcattggtacaaaccatcaaggcacagcagctgcagcaactcgtgctacctgtgatcaaccaagtagctctggcaaacctttctccctactatcagcaacaacaatttcttccattcaaccaactatctacactgaaccctgctgcttatttgcagcaacaactattaccattcagccagctagctactgcctactctcatcaacaacaacttcttccatttaaccaattggccgcactgaacctcgctgcttatttgcagcagcaaatattactaccatttagccagctagctgcagcaagccgtgcttccttcttgacacagcaacagttgctgcctttctaccagcagtttgcggctaaccccgcaaccctcttacaactacaacaattgttgccctttgtccaacttgctttgacaaacccagcagcctcctaccaacaacacatcattggtggtgccctcttttagattgcttattagttgtaattcaataataaagttttttggatgatgtatgtggccaaccagaaataagaagttacatttccc

SEQ ID NO: 12884 - DNA, 661 bp, Zea mays
  Clone ID: LIB3061-088-Q1-K7-C12
cccggattttgagtcttcagaaacacaccttgcgaagcgcactagcaacgacctaacaacaatggctaccaagatattagccctccttgcgcttcttgccctttttagtgagcgcaacaaatgcgttcattattccacaatgctcacttgctcctagtgccattattccacagttcctcccaccagttacttcaatgggcttcgaacacctagctgtgcaagccaacatgcaacaacaagcgcttgcggcgagcgtcttacaacaaccaattgcccaattgcaacaacaatccttgccacatctaacaatacaagccatcacaacgcaacagcaacaacagttcctaccagcactgagccacctagccatggtgaaccctgccgcctacttgcaagagcagctgcttgcatccaacccacttgctctggcgaacgtagttgcaaaccatcaacaacaacagctacaacagtttctgccaacgctcagtcaactagccatggtgaaccctgccgcctacgtacaacaacaacaactgctttcatctagcccgctcgctgtgggcaatgcacctacatacctgcaacaacaattgttgcaacagattgtaccagctctgactcaactagctgtggcaaaccctgttgcctacttgcaacagct

SEQ ID NO: 12885 - DNA, 667 bp, Zea mays; identical to SEQ ID NO: 9541
  Clone ID: LIB3061-088-Q1-K7-C2

SEQ ID NO: 12886 - DNA, 650 bp, Zea mays
  Clone ID: LIB3061-088-Q1-K7-C5
gatcatcaaagcggcagtgcgtagagaggatcgtcgaacagaacagcatgaagatggtcatcgttctcgtcgtgtgcctggctctgtcagctgccagcgcctctgcaatgcagatgccctgcccctgcgcggggctgcagggcttgtacggcgctggcgccggcctgacgacgatgatgggcgccggcgggctgtacccctacgcggagtacctgaggcagccgcagtgcagcccgctggcggcggcgccctactacgccgggtgtgggcagacgagcgccatgtaccagccgctccggcaacagtgctgccagcagcagatgaggatgatggacgtgcagtccgtcgcgcagcagctgcagatgatgatgcagcttgagcgtgccgctgccgccagcagcagcctgtacgagccagctctgatgcagcagcagcagcagctgctggcagcccatggtctcaaccccatggccatgatgatggcgcagaacatgccggccatgggtggactctaccagtaccagtaccagctgcccagctaccgcaccaacccctgtggcgtctccgctgccattccgccctactactgattcatgatatttgggaaatctcctctatccatccctctctatctatatatgtaataatgc

SEQ ID NO: 12887 - DNA, 613 bp, Zea mays
  Clone ID: LIB3061-088-Q1-K7-C6
tcgcacactctcactagatctctctcacatgcatatgcatgcattagcttttccccaccagcatgcactagctgactagcatctgtgtaatcggtgaccgctcttgacttgttggctcctcgctcccacggtagctaaagctagctaggtgggtggtagcaccaccatggcctcgcccaagcattctcatcgccatcatcgtgcggcggcgacgaagcatcgtcggccgctggcgctgcggcgtgcgatgctgcattcgtgcgtgtgcttcctggtgggtctcgtgaccggcctggccccttccgactggacggacgccgcctcgcgcgcggccgtgcacgcgaacggcgcggccacggcgcatgtgttccgcgcgctgcacgccatgaaccagacggcggcggcgggggcactgggccagctgctggcgctgcagcactaccagcagcagccagtggtggagaaggagaaggagaaggagaagcctctggatctggtggtggtggtgacgactacgacaacgtcgacggggctgtcggagcgcgagcggcggtcggcgggtctgacgcgcacggcgcacgcgctgcgtctggtgttccctccctggtgtggc

SEQ ID NO: 12888 - DNA, 596 bp, Zea mays
  Clone ID: LIB3061-088-Q1-K7-C7
gttcctatcagcactgagccacctagccatggtgaaccctgccgcctacttgcaagagcagctgcttgcatccaacccacttgctctggcgaacgtagttgcaaaccagcaacaacaacagctacaacagtttctgccaacgctcagtcaactagccatggtgaaccctgccgcctacgtacaacaacaacaactgctttcatctagcccgctcgctgtgggcaatgcacctacatacctgcaacaacaattgttgcaacagattgtaccagctctgactcaactagctgtggcaaaccctgttgcctacttgcaacagctgcttccattcaaccaactgactctgtcgaactctgctgcgtacctacaacagcgacaacagttacttaatccattggtagtggctaacccattggtcgccgccttcctacagcagcaacaattgctgccatacaaccagttctctttgatgaatcctgtcttgtcgaggcagcaacccatcgttggaggtgccatcttttagattacatatgagatgtactcgataatggtgccctcataccgacgtgtgtttcctagaaatatcaatatattga

SEQ ID NO: 12889 - DNA, 630 bp, Zea mays
  unsure (1)..(630): unsure at all n locations; Clone ID: LIB3061-088-Q1-K7-C8
acttggtcctgcagctcaagaagagagttttgtgcatttgggggccgggggcaagagagagagagagagccatggcggcggaccagcagccgcagctgcaggaggagatgaacgacgctgccggcggcggcctcaggctgcctccagggttccgcttccacccgagcgacttcgagattgtcagcttctacctcaccaacaaggtgctcaacacgcgcttcacctgcaccgccatcacggaggccgacctaaacaagattgagccatgggacctcccgagcaaggcgaagatgggcgagaaagagtggtacttcttctaccagaaggaccgcaagtacccgacggggctgagggcgaaccgggccaccgaggccggttactggaaggcgacgggcaaggacaaggaggtctacaacgccgcggaaggggtggcggtactggtcggcatgaagaagacgctcgtcttctacaggggcagggctcccaggggtgacaagacaaactgggtcatgcacgagtacaggctcgaaggcagcggcaggctccccgccggcctcgcgtccgcaaccggctcagccggcgcaaacgccgggnggccttgaaagcttctgcttataaggatgagtgggt

SEQ ID NO: 12890 - DNA, 148 bp, Zea mays
  Clone ID: LIB3061-088-Q1-K7-C9
gctttgactaacctagcagtgttctaccaacaacccatcattggtggtgccctcttttagatttcttatgagttatagttcaataataaagttttttgtctgatgtttgtggcttcccagaaataagaaagtacatttctagattctt

SEQ ID NO: 12891 - DNA, 650 bp, Zea mays
  Clone ID: LIB3061-088-Q1-K7-D10
caactattaacatagaaagcacaatagtgtaccaacaatggcagccaaaatattttgcctccttatgctccttggtctttctgcaagtgctgctacggcgaccattttcccgcaatgctcgcaagctcctatagcttcccttcttcccccgtacctctcaccagcggtgtcttcggtatgtgaaaacccaattcttcaaccctacaggatccaacaggcaatcgcagctggcatcttacctttatcacccttgttcctccaacaatcatcagccctattacaacagttacctttggtgcatttattggcacaaaacatcagggcacaacaactacaacaacttgtgctagcaaaccttgctgcctactctcagcaacagcagtttcttccattcaaccaactaggttcattgaactctgcttcttatttgcaacaacaacaactaccattcagccagctacctgctgcctacccccagcaatttcttccattcaaccaactagcagcattgaactctcctgcttatttacagcagcaacaactactaccattcagccagctagctggtgtgagccctgctaccttcttgacacaaccacagttgttgccgttctaccagcacgttgcgcctaacgctggcaccctcttac

SEQ ID NO: 12892 - DNA, 666 bp, Zea mays
  Clone ID: LIB3061-088-Q1-K7-D11
caactagtaacatagaaagcacaatagtgtaccaacaatggcagccaaaatattttgcctccttatgctccttggtctttctgcaagtgctgctacggcgaccattttcccacaatgctcacaagctcctatagcttcccttcttcccccgtacctctcaccagcggtgtcttcggtatgtgaaaacccaattcttcaaccctataggatccaacaggcaatcgcagctggcatcttacctttatcacccttgttcctccaacaatcatcagccctattacagcagttacctttggtgcatttattggcacaaaacatcagggcacaacaactacaacaacttgtgctagcaaaccttgctgcctactctcagcaacaacagtttcttccattcaaccaactagctgcattgaactctgcttcttatttgcaacaacaacaactaccattcagccagctatctgctgcctacccccagcaatttcttccattcaaccaactgacagctttgaactctcctgcttatttacagcagcaacaactactaccattcagccagctagctggtgtgagccctgctaccttcttgacacaaccacaattgttgccgttctaccagcacgctgcgcctaacgctggcaccctcttacaactgcaacaattgct

SEQ ID NO: 12893 - DNA, 493 bp, Zea mays
  unsure (1)..(493): unsure at all n locations; Clone ID: LIB3061-088-Q1-K7-D12
ctntattttccttgtttcaacaatcgccagccctatctttggtgcagtcattggtacaaaccatcaaggcacagcagctgcagcaactcgtgctacctgtgatcaaccaagtagctctggcaaacctttctccctactatcagcaacaacaatttcttccattcatccaactatctacactgaaccctgctgcttatttgcagcaacaactattaccattcagccagctagctactgcctactctcatcaacaacaacttcttccatttaaccaattggccgcactgaacctcgctgcttatttgcagcagcaaatattactaccatttagccagctagctgcagcaagccgtgcttncttcttgacacagcaacagttgctgcctttctaccagcagtttgcggctaaccccgcaaccctcttacaactacaacaattggtgccctttgtccaacttgctttgacaaacccagcagcctcctaccaacaaca

SEQ ID NO: 12894 - DNA, 694 bp, Zea mays
  Clone ID: LIB3061-088-Q1-K7-D2
ccgggagaaagcacaatagtgtaccaacaatggcagccaaaatattctgcctccttatgctccttggtctttctgcaagtgctgctacggcgaccattttcccgcaatgctcgcaagctcctatagcttcccttcttcccccgtacctctcaccagcggtgtcttcggtatgtgaaaacccaattcttcaaccctacaggatccaacaggcaatcacagctggcatcttacctttatcacccttgttcctccaacaatcatcagccctattacatcagttacctttggtgcatttattggcacaaaacatcagggcacaacaactacaacaacttgtgctagcaaaccttgctgcctactctcagcaacagcagtttcttccattcaaccaactagctgcattgaactctgcttcttatttgcaacaacaacaactaccattcagccagctacctgctgcctacccccagcaatttcttccattcaaccaactggcagcattgaactctcctgcttatttacagcagcaacaactactaccattcagccagctagctggtgtgagccctgctaccttcttgatacaaccacagttgttgccgttctaccagcacgctgcgcctaacgctggcaccctcttacaactgcaacaattgctgccattcaaccaacttgctttgacaacccagcagcg

SEQ ID NO: 12895 - DNA, 584 bp, Zea mays
  Clone ID: LIB3061-088-Q1-K7-D3
agatggttctgcaaaacgacattgacttactcaatccaccggcagagcttgagaagctaaagcacaagaagaagcggctagtccagtcccccaactccttcttcatggatgtcaagtgccagggctgtttcagcataaccactgtgttcagccactcccagactgtggttgtgtgcccaggctgccaaactgttctctgccaaccaaccggtgggaaggccaggctcaccgaggggtgctccttccgtcgcaagggcgattaggtcctgcttctcttaacgtgagaagagataaatttggtgttttgcaactttctcaggatatgtgctgtgctcggtgaggattttgttaattattatggctgttagcgtggcctgacaatgcttgtgtaaacctgcactttgtttgagcgtagtgagacagctaatatgggtcaaggcaaatgaaatcaactggtggcgttatttgtcagggtttaactgaaagtgccatttgtttggttggcttggataatgctttccatttaggtggcgttcggttcagcaaacacagtggtaatggtaacgtaaagataaacagcacta

SEQ ID NO: 12896 - DNA, 333 bp, Zea mays
  Clone ID: LIB3061-088-Q1-K7-D4
gccaggttttgcagcaacaatgttctcatgatcttaggcagattgagccacaatacattcaccaagcaatctacaacatggttcaatccataatccaggaggagcaacaacaacaaccatgtgagttatgtggatctcaacaagctactcaaagtgcggtggcaatcttgacagcagcacaatacctaccatcaatgtgcggcttgtaccactcatactaccaaaataatccatgcagcagcaatgacattagtggtgtttgcaattgaagaattgtgtctacctagccgttatactcatataacggtgttaagcaataaagtaccatacatt

SEQ ID NO: 12897 - DNA, 677 bp, Zea mays
  unsure (1)..(677): unsure at all n locations; Clone ID: LIB3061-088-Q1-K7-D6
cctccgccaccgcccaactacattccatcttcggctggatcctcgctagcatcagacggattctacttgagatcgccagggtatcctttcatgaggtacagcactgggagccatggttttccatactccccagccgactctgggattgggtattcccatatgctgttcacaccagagaatttggcagctatcacagatgactttgcagaagataaccttttgggagaaggtggatttgggtgtgtgttcaagggcattttgccggatggtcgccctgtcgccgtcaagaagctcaagattgggaatgggcaaggcgagcgtgagttcaaggctgaggtcgatactatcagcagagtacatcataggcatttggtttctctagtaggctattgcactgcggagggccagcgaatgcttgtttatgattttgttcccaacaacacactatattaccacctccatgtaagtgaaacatcactggattggcggacaagggttaagattgcagctggagcagcccgagggattggttacctccatgaagattgtcatccacgtattattcatagagatattaaatcatccaatattntgttggacaacaactttgaagctcaagtttctgattttggacttgcaaggttagcggctgattccatacacatgtaccacacgtg

SEQ ID NO: 12898 - DNA, 626 bp, Zea mays
  Clone ID: LIB3061-088-Q1-K7-D8
cgccgcctccagtacaagcggcggcgctcgcagcgagcgccaggagagcaagcggcggctgtggctgccagacaccaccgtttcatctaccgcctccgttctatatgccgcctccgttctatctgccgccgcagcagcagccgcagccatggcaataccccactcaaccaccgcagctaagcccgtgccagcagttcggatcctgcggcgtcggcagcgtcggcagcccgttcctgggccagtgcgtcgagttcctgaggcaccagtgcagcccggcggcgacgccctacggctcgccacagtgccaggcgctgcagcagcagtgctgccaccagatcaggcaggtggagccgctgcaccggtaccaggcgacatacggtgtggtcctgcagtccttcctgcagcagcagccgcagggcgagctcgcggcgctgatggcggcccaggtagcgcagcagctgacggcgatgtgcggtctgcagctgcagcagccaggtccctgcccttgcaacgcagctgccggcggtgtctactactgaggaaactatgtactgtagtaataatgtaatggagccggtgactagctacctatagggctatagctagttcactcgtttagcggcgat

SEQ ID NO: 12899 - DNA, 663 bp, Zea mays
  Clone ID: LIB3061-088-Q1-K7-D9
cccaggttggcaggtcggcgaggagggcaggaagaccgaagaccgagccgtgcgggggctcgggacgggaacgggacaggaccccaaaatctcagatccttcctgcccgcccgcccgtgcccgtcgacgcgtcgttcttgccggccgcgcctcacctccgccctctcctcctccagggggatcggatacgccacaggctgcgcgatggtgctgtgggtcttcggctacggctccctcatctggaaccccggcttcgacttcgacgacaaaatcctcggcttcatcaagggctacaagcgcacctttaatctcgcttgcattgaccacagaggcacaccggagcatccggcgaggacctgcacgcttgaaaccgacgacgaggccatatgctggggaattgcatattgtgtcaagggtggtccagaaaaagagctaaaagcaatgcagtacttggagagaagagagtgtgagtacgaccagaagatatccattgatttctacaaggaaggagatcccttgaaaccagctgtgacaggcgtcttagtgttcgtttccactccagatccaattggcaacaagtactatcttggccctgctcctttgcaggatatggcaaggcaaattgctacagccaatggccctactggctataatagggattac

SEQ ID NO: 12900 - DNA, 618 bp, Zea mays
  Clone ID: LIB3061-088-Q1-K7-E10
gccaccattccggaggcgagagagcagccatggcgcggtgcctcgcgctcgtcgccctcctcgtactcggcctcgccgccgccgcctccgcggccgacgcgcccttcgtcgtcgcgcacaagaaaatttcgctctcccgccccaagccgggcgtcgagcgcgtcgctgtctccctcgacctctacaaccagggatccgcgactgcctatgatgtgtccattaatgacgactcttggccaacagaagtgtttgagcttgtcactggagagaaatcgaagacattggaaaggcttgaccctggtgccactgcttcacacacatatgtcctggagaccaaaacacagggcaggttccagggttcaccagctatcattacataccgtgttcccacaaagacagctcttcaggaggcatactcaactcccatcttcccactggatattctcgctgagagacctccagagaagaagtttgaatgggctaagaggcttgtgatgaaatacgggtcacttgtgtctgttgtctcttttgttggactgtttatctaccttgtcgcgagcccgtcgaagagcagctcataggcaagcaagaagagacgctgatctacttataggtcgc

SEQ ID NO: 12901 - DNA, 654 bp, Zea mays
  Clone ID: LIB3061-088-Q1-K7-E11
gcggattctatactcagacgctaaattcttcattattaaatcttacagtgaagatgatgttcacaagagcgttaagtacaatgtgtgggctagcactcccaatggtaataagaaacttgatgctgcctatcaagaggctaaagaaaaatcaagtgaaactcctgtttttcttcttttctctgtgaatgcaagtggccagtttgtcggccttgctgaaatggtgggtcgtgttgattttgaaaaaacagtagagcattggcaacaggacaaatggactggttgtttccctgtcaagtggcacattgtgaaggatgttccaaacagcttgctgaagcacatcattcttgagaacaatgaaaacaagccagtgacgaacagcagagatacacatgaggtgaagcttgagcaaggccttcaagtgcttaagattttcaaggatcatgtctgcaagacatccatactggatgacttcggcttttatgataatcgtgagaagatgatgcaagagaggaaagccaaacagcagcagtcgctgaaaaaggtcattgatgtgaagctgcccagcgtcaccgacatggagagaagtcctaaaggagagactggatcaacagaagttactggggttgagactgacgtcttgaacaaagagcgttt

SEQ ID NO: 12902 - DNA, 676 bp, Zea mays
  Clone ID: LIB3061-088-Q1-K7-E12
ccgggccaacaagcaacatagaaagttttatccagtagcaacaatagagcaacaatggcgaccaagatactttccctccttatgctccttgctctttctgcatgtgttgctaacgcgacaattttccctcaatgctcacaagctcctatagcttcccttcttcccccataccttccatcaatgatagcttcagtatgtgaaaacccagctcttcaaccctataggctccaacaagcaatcgcagcaagcaacatacctttatcacccttgtttcaacaatcgccagccctatctttggtgcagtcattggtacaaaccatcaaggcacagcagctgcagcaactcgtgctacctgtgatcaaccaagtagctctggcaaacctttctccctactatcagcaacaacaatttcttccattcaaccaactatctacactgaaccctgctgcttatttgcagcaacaactattaccattcagccagctagctactgcctactctcatcaacaacaacttcttccatttaaccaattggccgcactgaacctcgctgcttatttgcagcagcaaatattactaccatttagccagctagctgcagcaagccgtgcttccttcttgacacagcaacagttgctgcctttctaccagcagtttgcggctaaccccgcaaccc

SEQ ID NO: 12903 - DNA, 418 bp, Zea mays
  Clone ID: LIB3061-088-Q1-K7-E2
tggttgatctctgcttcttatttgcaacaacaacaactaccattcagccagctacctgctgcctacccccagcaatttcttccattcaaccaactggcagcattgaactctcctgcttatttacagcagcaacaactactaccattcagccagctagctggtgtgagccctgctaccttcttgatacaaccacagttgttgccgttctaccagcacgctgcgcctaacgctggcaccctcttacaactgcaacaattgctgccattcaaccaacttgctttgacaaacccagcagcgttctaccaacaacccatcattggtggtgccctcttttagatttcttatgagttatagttcaataataaagttttttgtctgatgtttgtggcttcccagaaataagaaagtacatttctaa

SEQ ID NO: 12904 - DNA, 513 bp, Zea mays
  Clone ID: LIB3061-088-Q1-K7-E3
agcgaactatgagattcatcagagtggcgatggccccgagcgcgtcgatgctgttcctgagctaccaccagctccacaggccgacggaggtggggacgccgccgccgccgccgcgcagggaggcggctgcccccggcggcttctggaggaggatgagcgtgagcagcgtgctctcacccgctttgttgcagtggcggccggagggggaggcgacactgcacgagcgcgacgccggcgaggagatcaagtcatcggcgccggccgacgctgataaggagctggaaagcaagttcgaggaggcgttgcgcctcagctgctggtcttcatgagcatccatccatcatggggaacggagagacgcgagcgtgccgccgaatcgaagcgacctctcctctaaacagccgtcctgtatatcttctccgtgtatcaaaatccacccttttgctttagatttttgtacatttgtaatcgtcacatccgctcaaatatgttatatatattttagtttggagc

SEQ ID NO: 12905 - DNA, 645 bp, Zea mays
  unsure (1)..(645): unsure at all n locations; Clone ID: LIB3061-088-Q1-K7-E4
cgtcccgtccatgccgccgccgcgactcccatcaccgcccccgccgatgctcccatcaccgcccccgccgatgctcccatcaccgcccacgccgatgctcccgtcaccgcccccgccgcggctcccatcaccgccgccgccttcgccacctccaccatcaccaccgccgccgtctccacctcccccacttacgtctcctccgccgccatcaccgccaccgccgtcaccaccgccacctccactgctgccgtcaccgccaccaccacaaccacattccccgcctccaccgttgtcgtcaccaccgccaccaccaccactgccgcattccccacctccaccatccccagcccccgcgccagtctaccatccgccaccaccaccacagtgcccaccatgccccgtcctgccgccaccgctaccctgcacaccaacgcatccatggccaccgccgccaccatattaccccggcccattcccacccacagaccctgtccgatacgcatcacctcctcccccacagcagcaccatccatggccatcagtatacccagttcatatggatcgccgncgccccctccgctgcattgatagaaagaatctcagaagcacggaacggaaggatagttggttctgctctcgcccctc

SEQ ID NO: 12906 - DNA, 667 bp, Zea mays
  Clone ID: LIB3061-088-Q1-K7-E5
tcgggcggcgcatgcgcgggctcgtcgtccggcggcggcggcggaggtggagggggcggcagggagggcgactgggactgcggcagctgcggcaaccggaactacgccttccgctcgctctgcaaccgttgcaagcagccgcgcctcctcgtcgaccctaacaccccgcgcgactccaagtggctaccccgtgccggggactggatctgcaccggttgcagtaacaataattatgcatccagaaagaactgcaaaaagtgtggcctatccaaggaggaagcagcaatgccagcattgcaaatggcagggatggctatgccagcttatgcaacttatatcgcaagactacagagccttgctgcttctgcttctgcatataagatgaactttgggatggctgccaactcacctttgcagcagcaactacttgcaaatgcaaactggtcctatgggatggctggtagatatgggatgcagtcttctggttggccacttggcaacagcagcccaaatcagtttccaggtgttccaaaggattggcgtaatggagactggctctgcagctgtggatttcataattattcatctcgtactcagtgcaaagagtgtggtgcacctataccatcaggcattccctccacaacaatgaaagctacgacatctgatg

SEQ ID NO: 12907 - DNA, 424 bp, Zea mays
  Clone ID: LIB3061-088-Q1-K7-E6
cgggtcgaccacgcgtactggctgcatacttggtcaacaacatagccatgagcagcaacatcatccacaacaacatcatccacaaaaacaacaacatcaaccaccaccacaacatcaccagcagcagcaacaccaacaacaacaagttcacatgcaaccacaaaaacatcagcaacaacaagaagttcatgttcaacaacaacaacaacaaccgcagcaccaccaccaacaacaacaacaacaacaacaattgctgccattcaaccaacttgctttgacaaacccagcagcgttctaccaacaacccatcattggtggtgccctcttttagatttcttatgagttatagttcaataataaagttttttgtctgatgtttgtggcttcccagaaataagaaagtacatttctagattcttacaaa

SEQ ID NO: 12908 - DNA, 638 bp, Zea mays
  Clone ID: LIB3061-088-Q1-K7-E7
gcttggttgcattgacaagcgtgtgatcgagaggttcgagaaggaggctgctgaaatgaacaagcggtccttcaagtacgcgtgggtgctcgacaagctcaaggctgagcgtgagagaggtatcaccattgatatcgctctgtggaagtttgagaccaccaagtactactgcacggtcattgatgcccctggacaccgtgacttcatcaagaacatgatcactggtacctcccaggctgactgtgctgtccttatcattgactccaccactggtggttttgaggctggtatctccaaggatggccagacccgtgaacatgctctccttgcgttcacccttggagtgaagcagatgatttgctgctgcaacaagatggatgcaaccactcccaaatactccaaggcacgttatgaagagattgtgaaggaagtctcatcctacctcaagaaagttgggtacaaccctgataagattgcctttgttcccatttctggttttgagggcgacaacatgattgagaggtccaccaaccttgactggtacaaatgcccaaccctgcttgaggctcttgaccagatcaccgaacccaagatgccttcggacaagcccctgcttctgcccctccaggatgtgtaca

SEQ ID NO: 12909 - DNA, 626 bp, Zea mays
  Clone ID: LIB3061-088-Q1-K7-E8
ccgctacatttgcgatacgaagggcgcattcgtgcagcctgcgttctacgaagcgttcggcctgactgtgatcgagtccatgacgtgcggtctgccaacgatcgcgacctgccatggtggccctgctgagatcatcgtggacggggtatctggcctgcacattgacccttaccacagcgacaaggccgcggatatcctggtcaacttctttgacaaatgcaaggcagatccgagctactgggacaagatctcacagggcggcctgcagagaatctatgagaagtacacctggaagctctactccgagaggctgatgaccctgaccggcgtgtacgggttctggaagtacgtgagcaacctggagaggcgcgagacccgccgctacatcgagatgttctacgccctgaagtaccgtagcctggcaagccaggttccgctgtccttcgattagtacggggaaagaagaagaagaagaagcccaggccggagaaccatcgcctgcatttcgatctgtttcaccgcaattcgcattgttagtcgtgtattggagttatgtgtaccttggttccaagaactttggttccttctcgttttttttccttgtttgagcgtttttgggcagcgct

SEQ ID NO: 12910 - DNA, 363 bp, Zea mays
  Clone ID: LIB3061-088-Q1-K7-E9
tgcggtttcgctggacacggatgcgattgtgatgggccttgaggagcacttcgacattagcgtggaggagtccagcgcgcagacaattgccaccgttgaagacgccgctgacctcattgacaagcttgttgctgtgaaggcataggccgcatctcttctatcattgtcttaccactctaggtttctatggtctgaagacttgtgattttctccgcactgctgttgctattcccgtgtcgtaataatacgagatgttttaagcggctgaacacacggtggtgtaatctgttactggtaaggtgcattgttgtatgaattgtttctcacccggaagaaccagaccatcggggattctagcatcgt

SEQ ID NO: 12911 - DNA, 604 bp, Zea mays
  Clone ID: LIB3061-088-Q1-K7-F11
ccgggtcgatctcgcgtccgaacaaattgcctccccagatatactccaagaggaagaagacgggtgggatttctttcaataccactgttcctttgactcatattgatgagaagctgtgctatcagattctgcacgagtacaaaattcacaatgctgaggtgttattccgtgaagatgctactgtggatgatctcattgacgttatcgaagggaaccggaagtacataaagtgcgtctacgtatataacaagatcgatgttgttggtatcgatgacgttgataatcttgctcggcaaccaaattcactagtgatcagctgcaatttgaagctgaacttggacagactacttgcgagaatgtgggaggagatgggcctagtgagggtgtatacaaagccacagggccagcagcctgatttcacagacccatttgttctttccaccgacagaggtggctgcacggtggaggacttctgcaatcatatccatagaagtttgctcaaggacgtgaagtatgtgctcgtatggggaaccagcgcaaggcactatccacagcattgcggcctcggccatggccttaacgacgagggtgtcgtccagatagt

SEQ ID NO: 12912 - DNA, 368 bp, Zea mays
  unsure (1)..(368): unsure at all n locations; Clone ID: LIB3061-088-Q1-K7-F2
cgagtttctgaggcatcagtgcagcccgacggcgacgccctactgctcgcctcagtgccagtcgttgcggcagcagtgttgccagcagctcaggcaggtggagccgcagcaccggtaccaggcgatcttcggcttggtcctccagtccatcctgcagcagccgactccatgcccctacgctgctgccggcggtgtcccccactgaagaaactatgtgctgtagtatagccgctggctagctagctagttgagtcatttagcggcgatgattgagtaataatgtgtcacgcatcaccatgggtggcagtgtcagtgtgagcaatgacctgaatgaacaattgaaatgaaaagaaaaaagtattngttcc

SEQ ID NO: 12913 - DNA, 663 bp, Zea mays
  Clone ID: LIB3061-088-Q1-K7-F4
ttcgcgtccgcacattttgtgctagcaaaccttgctgcctactctcagcaacagcagtttcttccattcaaccaactagctgcattgaactctgcttcttattgagaccaactagcaacatagaaagcacaatagtgtaccaacaatggcagctaaaatattttgcctccttatgctccttggtctttctgcaagtgctgctacggcgaccattttcccacaatgctcacaagctcctatagcttcccttcttcccccgtacctctcaccaacggtgtcttcggtatgtgaaaacccaattcttcaaccctacaggatccaacaggcaatcgcaacaagcaacttacctttatcacacctgttctttcaacaatcgccagccctatctttggtgcagtcattggtacaaaccatcagggcagaacagttgcagcaactcgtgctaccagtgatcagccaagtagctctggcaaacctttccccctactctcagcaacaacaatttcttccattcaaccaactgtctatactgaaccctgctgcttatttgcagcaacaacaactactaccattcagccagctagctactgcctactctcagcagcaacaatttcttccatttaaccaattggccgcactgaacccctctgcttatttccagca

SEQ ID NO: 12914 - DNA, 288 bp, Zea mays
  Clone ID: LIB3061-088-Q1-K7-F6
ccgggaggaggtttacgatgagtctgttccggcaattgttcacagcaagtgcttctaggtttctgccaagttcgtcaagtgcttttagggttcgccatgttcatcatcgctacctagtcttaagttatgcccccttcatttgctgagatatgtgtggcagatttgcatcgttttggtatttcgtggctccatgtgtgagcatgctgtgtcctataacctggtttatgagatgagttgttaaacttgcttggcttgattggttttacctgtaagagctgatagttatat

SEQ ID NO: 12915 - DNA, 640 bp, Zea mays
  Clone ID: LIB3061-088-Q1-K7-F7
ccgggtcgacttcgcgtccgggcgattattttcccgcaatgctcgcaagctcctatagcttcccttcttcccccgtacctctcaccagcggtgtcttcggtatgtgaaaacccaattcttcaaccctacaggatccaacaggcaatcacagctggcatcttacctttatcacccttgttcctccaacaatcatcagccctattacatcagttacctttggtgcatttattggcacaaaacatcagggcacaacaactacaacaacttgtgctagcaaaccttgctgcctactctcagcaacagcagtttcttccattcaaccaactagctgcattgaactctgcttcttatttgcaacaacaacaactaccattcagccagctacctgctgcctacccccagcaatttcttccattcaaccaactggcagcattgaactctcctgcttatttacagcagcaacaactactaccattcagccagctagctggtgtgagccctgctaccttcttgatacaaccacagttgttgccgttctaccagcacgctgcgcctaacgctggcaccctcttacaactgcaacaattgctgccattcaaccaacttgctttgacaaacccagcagcgttctaccaacaac

SEQ ID NO: 12916 - DNA, 567 bp, Zea mays
  Clone ID: LIB3061-088-Q1-K7-F8
gcgtgtttgaggagtccaagctggcggagtacgtgtacaagcgcacgggcaagcacgcggccgtcgtcaagtccgagccggccccggcgccggagggcggcggcggcgacaaggcggccaaggaggaggagaagaaggatgcaggcggagccggaagcgaggagaagaaggacggcaaggaggaggaagagaagaaggacggcggcgagaagaatgaggagaagaaggacggcggcgacggagacggcgacaagaaggacgaggccggcgacaaggacaaggacccggccgccagcctgtacatgcactacccgcggttcccgttcgctggagggtactaccagccgccggcctacccgccgcctccggggtacccgtacgcctaccagccggcctacccgccgccgttctacgcgccgtcgcaccaccacctgcaccagcagcagcccatggcgccgcagatcttcatcgacgagaaccccaacgcctgctccgtcatgtagttgtcactcaaatgtcatgtaaaaaaaaaagaaccgtaggaccctgtctttgcgcggggtcctg

SEQ ID NO: 12917 - DNA, 614 bp, Zea mays
  Clone ID: LIB3061-088-Q1-K7-F9
gcactgttccacgctgaacaaggcgctgagcggggcgctggtggcgctgtgcggcgcctcctgcgccttctcctgcttcaccgacagctacgtgggcgcggacgggcgcgtgtactacggcgtggtgacgcggcggggcctgcgcaccttcacgcccgacccggacgccgccgcccgggacctgtcggcgtaccgcctccgcgccggcgacttcgcgcacgccgcgctctcgctgctcgtcttcgccaccctcgcgctcctcgacgccgacaccgtcgcctgcctctacccggcgctggagctcgccgagcccaccatgatggccgtgctcccgcccgtcgtcggcgccgtcgcgggctacgtcttcatggtgttccccaacaaccggcacggcgtcgggtaccagcccacgcccgccaccgaggacttccagcacaaatactagccagccggttcgtcgtcgttgcagagtactgtactgcgcgtgtgtctttgattgtctgtctgtctgattcattcatttgcttggtggtgtgggggtgccgtctttgtacgtcgtctctgcttgttcattcgggctttcattaacttacggaatcaggtctgtaataatt

SEQ ID NO: 12918 - DNA, 644 bp, Zea mays
  Clone ID: LIB3061-088-Q1-K7-G11
agctcatatcaaacaccgcgaagccgcccccgctcccaaacccgaccgagcaaagcgcaaagccccccaaccgcggatcaatccgcagcatcgatggcgcccaaggcggagaaaaagccggcggcgaagaagcccgcggaggaggagcccgcgaccgagaaggcggagaaggctccggcagggaagaagccgaaggcggagaaacgcctccccgcgggcaagtccggcgccggcgagggcaagaagggcaagaagaaagccaagaagagcgtggagacctacaagatctacatcttcaaggtgctcaagcaggtgcaccccgacatcggcatctcgtccaaggccatgtccatcatgaattccttcatcaacgacatcttcgagaagctcgccgcggaggccgccaagctcgcccgctacaacaagaagcccaccatcacctcccgcgagatccagacctccgtccgcctcgtcctacccggcgagctcgccaagcacgccgtctctgaaggcacaaaggcggtcaccaagttcacttcgtcttagattggttgccttccctctcgtttgtactggtgtctggtagtagatctcatctagttgggggtgctgttgctagtcggtcgtgggtccctttggtatga

SEQ ID NO: 12919 - DNA, 665 bp, Zea mays; identical to SEQ ID NO: 10317
  Clone ID: LIB3061-088-Q1-K7-G2

SEQ ID NO: 12920 - DNA, 649 bp, Zea mays
  Clone ID: LIB3061-088-Q1-K7-G6
attgattccaactagcaacatagcaagcacaatagtgtaccaacaatggcagccaaaatattttgcttccttatgctccttggtctttctgcaagtgttgctaccgcaaccattttcccacaatgctcacaagctcctatagcttcccttcttcccccatacctctcaccagcggtgtcttcaatgtgtgaaaccccaattgttcaaccctacaggatccaacaggcaatcgcaacaggcatcttaccattatcacccttgttcctccaacaaccgtcagccctattacagcagttacctttggtccatttggtggcacaaaacatcagggcacaacaactacaacaacttgtgctagcaaaccttgctgcatactctcagcaacatcagtttcttccattcaaccaactggctgcattgaactctgctgcttatttgcaacaacaattaccattcagccagctagttgctgcctacccccagcaatttcttccattcaaccaactagcagcattgaactctgctgcttatttacagcagcaacaactactaccattcagccagctagctgatgtgagccctgctgccttcttgacacaacaacagttgttgccgttctacctgcacgctatgcctaacgctggcaccc

SEQ ID NO: 12921 - DNA, 665 bp, Zea mays
  Clone ID: LIB3061-088-Q1-K7-G8
gatcgattcaaacaaagtttggagactatatgccttcttcttgcttacaaaatcaagtaccctgagaacttttttcttctgaggggcaatcatgaatgcgcctcaataaacagaatatatggattctatgatgaatgcaagcgtcgatttaatgtgcggctatggaaggtcttcacagaatgttttaacactctacctgtggctgctcttatcgatgataaaatattatgtatgcacggtggactctctcctgatctagcacacttggatgagataaagaacttgcagcgtccaactgatgtaccagatcaaggtctactgtgtgacttgctttggtcagatccaggaaaagatgctcaagggtggggcatgaatgatagaggggtctcatatacctttggtgctgacaaggtttcagaattcttgcaaaagcatgatcttgatcttatctgtcgtgctcaccaggttgtcgaggatgggtatgaattttttgctgacagacagcttgtcaccatattctcggcccccaattattgtggtgaatttgataatgctggtgcaatgatgagtgtcgatgaaactttgatgtgctcattccaaattctgaaacctgctgagagaaaaaacaaattatggggtccaacaaaatgtgatagtgaaagcca

SEQ ID NO: 12922 - DNA, 570 bp, Zea mays
  Clone ID: LIB3061-097-Q1-K7-A11
caactagcaacatagaaagcacaatagtgtaccaacaatggcagccaaaatattttgcttccttatgctccttggtctttctgcaagtgttgctaccgcaaccattttcccacaatgctcacaagctcctatagcttcccttcttcccccatacctctcaccagcggtgtcttcaatgtgtgaaaccccaattgttcaaccctacaggatccaacaggcaatcgcaacaggcatcttaccattatcacccttgttcctccaacaaccgtcagccctattacagcagttacctttggtccatttggtggcacaaaacatcagggcacaacaactacaacaacttgtgctagcaaaccttgctgcatactctcagcaacatcagtttcttccattcaaccaactggctgcattgaactctgctgcttatttgcaacaacaattaccattcatccagctagttgctgcctacccccagcaatttcttccattcaaccaactagcagcattgaactctgctgcttatttacagcagcaacaactactaccattcagccagctagctgttgtgag

SEQ ID NO: 12923 - DNA, 341 bp, Zea mays
  Clone ID: LIB3061-097-Q1-K7-A12
gacggcaagaccgccgtgcccgtgccggcggtgctgcggacgtcgggcaccctgtggggcgacggctcggacacgttcgccgccgtctgctcgcggcgcggcgagaagggcatcaaccaggactgctccatcgtctgggagggattcgggtgccaggagggcaccatcttctgcggcgggttcgacggccacggcccgtggggccactacgtggccaaggcggtgcgcgactagctgacgtcgacgttgttgagccactggcaggaggcgctggtctctcgtcttactgatgggcgacggcaagaagaaggtctgacactgtcagtataaaactgttgaaa

SEQ ID NO: 12924 - DNA, 311 bp, Zea mays
  Clone ID: LIB3061-097-Q1-K7-A2
acaactgcaacaattgctgccattcaaccaacttgctttgacaaacccaacagcattctaccaacaacccatcattggtggtgccctcttttagatttcttatgagttatagttcaataataaagttttttgtctgatgtttgtggcttgccagaaataagaaagtacatttctaaaaaaaaaaaaaaaaaaaaaaaataaaaaaaaaaaaaaaaaaataaaaaaaaatgaaaaataaaaaaaaaaaatctttttaaaaaaaaaaaataaataaaacaaatttatttatggggggggccgttttaggggac

SEQ ID NO: 12925 - DNA, 567 bp, Zea mays
  Clone ID: LIB3061-097-Q1-K7-A4
caaaaacacaccaagcgaagcgcactagcaacgacctaacaccaatggctaccaagatattagccctccttgcgcttcttgcccttttagtgagcgcaacaaatgcgttcattattccacagtgctcacttgctcctagtgccattattccacagttcctcccaccagttacttcaatgggcttcgaacatccagccgtgcaagcctacaggctacaactagcgcttgcggcgagcgccttacaacaaccaattgcccaattgcaacaacaatccttggcacatctaaccctacaaaccattgcaacgcaacaacaacaacaacaacagtttctgccatcactgagccacctagccgtggtgaaccctgtcacctacttgcaacagcagctgcttgcatccaacccacttgctctggcgaacgtagctgcataccagcaacaacaacagctgcaacagtttatgccagtgctcagtcaactagccatggtgaaccctgccgtctacctacaactactttcatctagcccggtcgcggtgggcaatgcacctacgtacctacaacaac

SEQ ID NO: 12926 - DNA, 658 bp, Zea mays
  Clone ID: LIB3061-097-Q1-K7-A5
gagaccaactagcaacatagaaagcacaatagtgtaccaacaatggcagccaaaatattttgcttccttatgctccttggtctttctgcaagtgttgctaccgcaaccattttcccacaatgctcacaagctcctatagcttcccttcttcccccatacctctcaccagcggtgtcttcaatgtgtgaaaccccaattgttcaaccctacaggatccaacaggcaatcgcaacaggcatcttaccattatcacccttgttcctccaacaaccgtcagccctattacagcagttacctttggtccatttggtggcacaaaacatcagggcacaacaactacaacaacttgtgctagcaaaccttgctgcatactctcagcaacatcagtttcttccattcaaccaactggctgcattgaactctgctgcttatttgcaacaacaattaccattcagccagctagttgctgcctacccccagcaatttcttccattcaaccaactagcagcattgaactctgctgcttatttacagcagcaacaactactaccattcagccagctagctgatgtgagccctgctgccttcttgacacaacaacagttgttgccgttctacctgcacgctatgcctaacgctggcaccctcttacaactgc

SEQ ID NO: 12927 - DNA, 487 bp, Zea mays
  unsure (1)..(487): unsure at all n locations; Clone ID: LIB3061-097-Q1-K7-A7
naaggcctagcccaacttccccgagccccccgccggcgcgccgccgcccgcccgcgccggggtgctcccgccggtcgggcacgctcgcgtgcgtgcgcctctctacggccaccagcagcagccggcgccggtgggcggcggaggacagcagcgtcaggcattccccgtcccacatttgccggcgcccccgggcgcgttctctcagcttttttaccgtccagctgcaggtccagcgttcgccgccgccgccgccgccggtggaagcaacggcgcaggcttctacggtatggctcccatgatcggccccgggcccgaggtgcccatgcccacctatgcagggagctcccaactcagcagctctgacaagaaaaacaaggcggctgtccatccctcggcggccaccgagcctaagctgatcatcttnatcgagtgtggtggtgagccccgggtcgaggataacttcaacggggacagcggggcgtctacc

SEQ ID NO: 12928 - DNA, 615 bp, Zea mays
  Clone ID: LIB3061-097-Q1-K7-A9
cagcatttaaaaacacaccaagcgaagcgcactagcaacgacctaacaccaatggctaccaagatattagccctccttgcgcttcttgcccttttagtgagcgcaacaaatgcgttcattattccacagtgctcacttgctcctagtgccattattccacagttcctcccaccagttacttgaatgggcttcgaacatccagccgtgcaagcctacaggctacaactagcgcttgcggcgagcgccttacaacaaccaattgcccaattgcaacaacaatccttggcacatctaaccctacaaaccattgcaacgcaacaacaacaacaacaacagtttctgccatcactgagccacctagccgtggtgaaccctgtcacctacttgcaacagcagctgcttgcatccaacccacttgctctggcgaacgtagctgcataccagcaacaacaacagctgcaacagtttatgccagtgctcagtcaactagccatggtgaaccctgccgtctacctacaactactttcatctagcccgctcgcggtgggcaatgcacctacgtacctacaacaacagtttgctgcaacatattgtaccagctctgactcaactagc

SEQ ID NO: 12929 - DNA, 547 bp, Zea mays
  Clone ID: LIB3061-097-Q1-K7-B1
cccgggccctcccccgcgttccacttcgcttagatctagcccttgggattcgccagcggcgaggcctaagtcatcggcggcgagccaaactccacgagcggaggaagaggaggggaagctgagacgaggaggcagctatggggcagcagtcgctgatctatgcgttcgtggcccgtggcacggtcgtactggccgagtacacggagttcaccggcacaagcaacaacaagttcacctacaactgcgacggccacaccttcaactacctcgtggaagacggattcacatactgtgttgttgctgttgaatcagtggggcaacaaattcccattgctttcatggatagggttaaggaggatttcacaaaaaggtatggtggcgggaaagctgctactgctgcggctaacagcctcaaccgagagttcagattaaaacttaaagagcacatgcagtattgtgtggatcaccctgaagaggttagcaagctggccaaagtggaggcacaggtttctgaagtcaagggtgttatgatggaaaaaattgaaaa

SEQ ID NO: 12930 - DNA, 605 bp, Zea mays
  unsure (1)..(605): unsure at all n locations; Clone ID: LIB3061-097-Q1-K7-B10
gtgaaaacccaattcttcaaccctacaggatccaacaggcaatcacagctggcatcttacctttatcacccttgttcctccaacaatcatcagccctattacatcagttacctttggtgcatttattggcacaaaacatcagggcacaacaactacaacaacttgtgctagcaaaccttgctgcctactctcagcaacagcagtttcttccattcaaccaactagctgcattgaactctgcttcttatttgcaacaacaacaactaccattcagccagctacctgctgcctacccccagcaatttcttccattcaaccaactggcagcattgaactctcctgcttatttacagcagcaacaactactaccattcagccagctagctggtgtgagccctgctaccttcttgatacaaccacagttgttgccgttctaccagcacgctgcgcctaacgctggcaccctcttacaactgcaacaattgctgccattcaaccaacttgctttgacaaacccagcagcgttctaccaacaacccatcattggtggtgccctcttttagatttcttatgagttatagntaataataaagtttttgtctgat

SEQ ID NO: 12931 - DNA, 666 bp, Zea mays
  Clone ID: LIB3061-097-Q1-K7-B12
gtcaaaagctcgacaaaatggatcaaaagctaaggtacggggccgacctaaaaagaaaactgatgactgggacagtttacgaaaaaaagtgctttctaatggtggggacaaacaaagaagtcatgatgcaagggatactgttgattgggaggcagttaggcaagcagaagtacgggaaatatctgaaactatcagagagagaggaatgaataatatgctagcagaacggataaaggaattcttgaaccgattggtgacagaccatggaagcattgatcttgaatggctaagagatgttcaaccagacaaagcaaaggacttccttctaagcattagagggcttggactcaaaagtgttgagtgtgttcgcctcttgacactacatcatatggcttttccagtggacacaaatgttggtcggatatgtgtgaggcttggatgggtgccacttcaaccactgccagagtctcttcagttgcacctcttggaaatgtatcccatgctggagcacatacagaagtacctctggcctcgactatgcaaactagatcaacgtacattgtatgagcttcactaccaaatgattacttttggaaaggttttctgcacaaaaagtaagcctaattgcaattcatgtccaatgagagctgattgtaagcactttgt

SEQ ID NO: 12932 - DNA, 253 bp, Zea mays
  unsure (1)..(253): unsure at all n locations; Clone ID: LIB3061-097-Q1-K7-B2
cccggtggcgataacaacataagatatgaaggccctaaacatgctnatgaaggccattgctgaagacacacaagcggtgcagtaggcacagggcaacaatattagagtgtgacaaggatgcaaatgtanctatacgaaaaagggccctggaactagtatacctactatgtgaacgatgcaaatgataagccatagtctaaggaacttgatgaaaaccttgaaaagagagatcaaatatttaaggaagacctta

SEQ ID NO: 12933 - DNA, 621 bp, Zea mays
  Clone ID: LIB3061-097-Q1-K7-B3
cagcggtgtcttcagtatgtgaaaacccaattcttcaaccctacaggatccaacaggcaatcgcagcaggcatcttacctttatcacccttgttcctccaacaaccgtcagccctattacagcagttacctttggtgcatttgttggcacaaaacatcaaggcacaacaactacaacaactggtgctaggaaaccttgctgcctactctcagcaacagcagtttcttccattcaaccaactggctgcattgaactctgctgcttatttgcaacaacaactaccattcagtcagctagctgctgcctacccccagcaatttcttccattcaaccaactggcagcattgaactctgctgcttatttacaacagcaacagctaccaccattcagccagctagctgatgtgagccctgttgccttcttgacacaacaacagttgttgccgttctacctgcacgctgcgcctaacgctggcaccctcttacaactgcaacaattgctgccattcaaccaacttgctttgacaaacccaacagcgttctaccaacaacccatcattggtggtgccctcttttagattgcttatgagttatacttcaataatgaagttttttggatga

SEQ ID NO: 12934 - DNA, 651 bp, Zea mays
  Clone ID: LIB3061-097-Q1-K7-B4
ctcctcatccaggcttgttagccgcgcccctccaactagcgtgctagacctttgacgccgtttccccgtcgtccaagctccaccatgcccacacgtccgtcctgctcctccatgcacacgcccatgcatccttatctccctggaaacttcactcgtgtacggctccctggtgataatattcagcgatgcttcgccagggcaccgttcccctgcgcgctcgctggacgccgtcgcacatgctccctgctcggcctccccggcgtgctgctccctcgccttggtgcccctgcgagctccttctctctggcccggtttccagctcgggcctcgctagatgccgatgccgcttttctgacctcgtctcgatactcaatcgctgcagcacgccatgccgtgtgtgctgcactgtcatcattcgctatcctcatctttgctaatttttctcgtcgtttctcgtctacaaccttgtcagctcctgcgtgtcgtgcgcgtcttgtgttcgggtcgagccccaggattttgaggaaaaggaagctccagtgcattggccggtgaaatgaataaaatggattttgaagaaaaggaagctccaatgcatcaaccggtgaaatgaataaaatggtggtaattatggtccttgtgaaatctgag

SEQ ID NO: 12935 - DNA, 459 bp, Zea mays
  Clone ID: LIB3061-097-Q1-K7-B5
gacagtttgttgaatggaagaaatcgtctacactgaaccctgctgcttatttgcagcaacaactattaccattcagccagctagctactgcctactctcagcaacaacaacttcttccatttaaccaattggccgcactgaaccccgctgcttatttgcagcagcaaatactactaccatttagccagctagctgcagcaaaccgtgcttccttcttgacacagcaacagttgctgcctttctaccagcagtttgcggctaaccccgcaaccctcttacaactacaacaattgttgccctttgtccaacttgctttgacagaccgagcggcctcctaccaacaacacatcattggtggtgccctcttttagattgcttattagttgtaattcaataataaagttttttggatgatgtatgtggccaaccagaaataagaagttacatttccagatttta

SEQ ID NO: 12936 - DNA, 83 bp, Zea mays
  Clone ID: LIB3061-097-Q1-K7-B6
gattttttatgcttattactgaaacaataaatttctcatactgatatgtgcaacttctcagtaataaaagattagagatctat

SEQ ID NO: 12937 - DNA, 636 bp, Zea mays
  unsure (1)..(636): unsure at all n locations; Clone ID: LIB3061-097-Q1-K7-B9
gtgaaatctcancccttcaacactacaggatccagcaagcaatcgcaacaagcaacttacctttatcacacctgttctttcaacaatcgccagccctatctttggtgcagtcattggtacaaaccatcagggcagaacagttgcagcaactcgtgctaccagtgatcagccaagtagctgtggcaaacctttccccctactcttacaactgcaacaattgctgccattcaaccaacttgctttgacaaacccagcagcgttctaccaacaacccatcattggtggtgccctcttttagatttcttatgagttatagttcaataataaagttttttgtctgatgtttgtggcttcccagaaataagaaagtacatttctnaaaaaaaaaannnnnnnnnnnnnnnnnnnnnaaaaaaaaaaaaaaaaaaaaaaaaaaaaaaaaaaaaaaaaaaaaaaaaaaaaaaaaaaaaaaaaaaaaaaaaatggtgggggggttttaatttaaaaaaatttaaattacgtttagatggggaggaaattattatattttaaaagtaaccaaaacataaattggggggggcggccttttatataacaaaaattgaaatacccgcgccgggcccaatcttatttttt

SEQ ID NO: 12938 - DNA, 495 bp, Zea mays
  unsure (1)..(495): unsure at all n locations; Clone ID: LIB3061-097-Q1-K7-C1
cagaaactacctagcgaagctcaccagcaacgacctaacaacaatggcttccaagacattatccctccttgcgcttcttgccctttttgtgagtgcaacaaatgcgttcattattccacaatgctcacttgctccgagtgccattattccacagttcctccctccagttacttcaatgggcttcgaacacccagctgtgcaagcctataggctacaacaagcgcttgcggcgagcgtcttataacaaccaattgcccaattacaacaacaattcttggcacatctaaccatacaaaccatggtaacgcatgaggaacaagcactgagccacctagccgtggtgaaccctatcgtctactagcaacaacagttgctggcattcaacccacttgctttggcaaacctagnttgataccaacaacaacaacagttgcaacagtgtttaccagtgctcagttcacttgcccatggtgaaccctatccaccgacctacac

SEQ ID NO: 12939 - DNA, 612 bp, Zea mays
  Clone ID: LIB3061-097-Q1-K7-C10
caacaggcaatcgcagctggcatcttacctttatcacccttgttcctccaacaatcatcagccctattacaacagttacctttggtgcatttattggcacaaaacatcagggcacaacaactacaacaacttgtgctagcaaaccttgctgcctactctcagcaacagcagtttcttccattcaaccaactaggttcattgaactctgcttcttatttgcaacaacaacaactaccattcagccagctacctgctgcctacccccagcaatttcttccattcaaccaactagcagcattgaactctcctgcttatttacagcagcaacaactactaccattcagccagctagctggtgtgagccctgctaccttcttgacacaaccacagttgttgccgttctaccagcacgttgcgcctaacgctggcaccctcttacaactgcaacaattgctgccattcaaccaacttgctttgacaaacccagcagtgttctaccaacaacccatcattggtggtgccctcttttagatttcttatgagttatagttcaataataaagttttttatctgatgtttgtggcttcccagaataagatagtacatttctag

SEQ ID NO: 12940 - DNA, 256 bp, Zea mays
  Clone ID: LIB3061-097-Q1-K7-C12
ctgatatcttgttttgcttgagtttgcggaagttctggtcccatttaacacatactcagctgtcaacctactcaggcctttggggattgtaactataacctagagttgcattcctctacaagtaactcggtattgttactaaccatataagctatccgttgttccttgttttttgttcgagacaaaggctgttgctggtaaatgttaccaatcatataagctctcagtcgttccttttcttgattttgtttgagac

SEQ ID NO: 12941 - DNA, 579 bp, Zea mays
  Clone ID: LIB3061-097-Q1-K7-C2
cttgctcctagtgccattattccacagttcctcccaccagttacttcaatgggcttcgaacatccagccgtgcaagcctacaggctacaactagcgcttgcggcgagcgccttacaacaaccaattgcccaattgcaacaacaatccttggcacatctaaccctacaaaccattgcaacgcaacaacaacaacaacaacagtttctgccatcactgagccacctagccgtggtgaaccctgtcacctacttgcaacagcagctgcttgcatccaacccacttgctctggcgaacgtagctgcataccagcaacaacaacagctgcaacagtttatgccagtgctcagtcaactagccatggtgaaccctgccgtctacctacaactactttcatctagcccgctcgcggtgggcaatgcacctacgtacctacaacaacagttgctgcaacaaattgtaccagctctgactcagctagctgtggcaaaccctgctgcctacttacaacagttgctttcattcaaccaactggctgtgtcaaactctggtgcgtacctacaacagcgacaacagttactt

SEQ ID NO: 12942 - DNA, 502 bp, Zea mays
  Clone ID: LIB3061-097-Q1-K7-C3
cggacgcgtggcaagtagctctggcaaacctttccccctactctcagcaacaacaatttcttccattcaaccaactgtctatactgaaccctgctgcttatttgcagcaacaacaactactaccattcagccagctagctactgcctactctcagcagcaacaatttcttccatttaaccaattggccgcactgaacccctctgcttatttccagcagcaaatactactaccatttggccagctagctacaacaagccccgcttccttcttgacacaacaacaagtgcttccgttctaccagcagtttgtggctaaccccgcaaccctcttacaactgcaacagttgctgccctttgtccaacttgctttgacaaacccagcagccttctaccaacaacacatcattggcggtgccctcttttagattgcttattagttgtaattcaataatgaagttttttggctgatgtatgtggcctcctagaaataagaagttatatt

SEQ ID NO: 12943 - DNA, 593 bp, Zea mays
  Clone ID: LIB3061-097-Q1-K7-C4
cccacgctttcgattgagaccaacacgcaacatagaaagtggaatccagtagcaacaatagagcaacaatggcgaccaagatactttccctccttatgctccttgctctttctgcatgtgttgctaacgcgacaattttccctcaatgctcacaagctcctatagcttcccttcttcccccataccttccatcaatgatagcttcagtatgtgaaaacccagctcttcaaccctataggctccaacaagcaatcgcagcaagcaacatacctttatcacccttgtttcaacaatcgccagccctatctttggtgcagtcattggtacaaaccatcaaggcacagcagctgcagcaactcgtgctacctgtgatcaaccaagtagctctggcaaacctttctccctactatcagcaacaacaatttcttccattcaaccaactatctacactgaaccctgctgcttatttgcagcaacaactattaccattcagccagctagctactgcctactctcatcaacaacaacttcttccatttaaccaattggccgcactgaacctcgctgcttatttgcagcagcaaatattacta

SEQ ID NO: 12944 - DNA, 652 bp, Zea mays
  unsure (1)..(652): unsure at all n locations; Clone ID: LIB3061-097-Q1-K7-C5
agcaaagcggcagtgcgtagagaggatcgtcgaacagaacagcatgaagatggtcatcgttctcgtcgtgtgcctggctctgtcagctgccagcgcctctgcaatgcagatgccctgcccctgcgcggggctgcagggcttgtacggcgctggcgccggcctgacgacgatgatgggcgccggcgggctgtacccctacgcggagtacctgaggcagccgcagtgcagcccgctggcggcggcgccctactacgccgggtgtgggcagccgagcgccatgttccagccgctccggcaacagtgctgccagcagcagatgaggatgatggacgtgcagtccgtcgcgcagcagctgcagatgatgatgcagcttgagcgtgccgctgccgccagcagcagcctgtacgagccagctctgatgcagcagcagcagcagctgctggcagcccagggtctcaaccccatggccatgatgatggcgcagaacatgccggccatgggtggactctaccagtaccagctgcccagctaccgcaccaacccctgtggcgtctccgctgccattccgccctactactgattcatgatatttgggaaatctcctctatccatctctctctatctatatatgtaataatgcagnaagacgaca

SEQ ID NO: 12945 - DNA, 601 bp, Zea mays
  Clone ID: LIB3061-097-Q1-K7-C6
gccaagaacaccctcaagatcatgcccttcaagctcccgcccgtcggcccttatgatgtccgcgtgcgcatgaaagcagtggggatttgcggcagcgatgtgcactacctcagggagatgcgcatcgcgcacttcgtggtgaaggagccgatggtgatcgggcacgagtgcgcgggcgtggtcgaggaggtgggcgccggcgtgacgcacctgtccgtgggcgaccgcgtggcgctggagccgggcgtcagctgctggcgctgccgccactgcaagggcgggcggtacaacctgtgcgaggacatgaagttcttcgccaccccgccggtgcacggctcgctggcgaaccaggtggtgcacccggccgacctgtgcttcaagctccccgacggggtgagcctggaggagggcgccatgtgcgagccgctgagcgtgggcgtgcacgcgtgccgccgcgcgggggtggggcccgagacgggcgtgctcgtggtgggcgccggccccatcggcctggtgtcgctgctggcggcgcgggccttcggcgcgccgcgcgtggtggtcgtggacgtggacgagcaccgcctggccgtggccaggtcgc

SEQ ID NO: 12946 - DNA, 188 bp, Zea mays
  unsure (1)..(188): unsure at all n locations; Clone ID: LIB3061-097-Q1-K7-C7
ccgggtcgcccagcgtncgttccatttaaccaattggaagaacnngtgttgtnagagtnggcngnngctagntggntgggtggtnatagtggttggtgnanataagcaggagggtttagtgtagatagttggttgaatggaagaaattgatgatgttgatagtaaggagaaaggtttgttatagctac

SEQ ID NO: 12947 - DNA, 662 bp, Zea mays
  Clone ID: LIB3061-097-Q1-K7-C8
gcaacatataaagtggaatccagtagcaacaatagagcaacaatggcgaccaagatattttccctccttatgctccttgctctttctacatgtgttgctaacgcgacaattttccctcaatgctcacaagctcctatagcttcccttcttcccccataccttccatcaattatagcttcaatatgtgaaaacccagctcttcaaccatataggcttcaacaagcaatcgcagcaagcaacatacctttatcgcccttgttgtttcaacaatcgccagccctatctttggtgcagtcattggtacaaaccatcagggcacaacagctgcagcaactcgtgctacctctgatcaaccaagtagctctggcaaacctttctccctactctcagcaacaacaatttcttccattcaaccaactgtctacactgaaccctgctgcttatttgcagcaacaactattaccatttagccagctagctactgcctactctcagcaacaacaacttcttccatttaaccaattggccgcactgaaccccgctgcttatttgcagcagcaaatactactaccatttagccagctagctgcagcaaaccgtgcttccttcttgacacagcaacagttgctgcctttctaccagcagtttgcggctaaccccgc

SEQ ID NO: 12948 - DNA, 404 bp, Zea mays
  unsure (1)..(404): unsure at all n locations; Clone ID: LIB3061-097-Q1-K7-D1
caacaagcttcatagaaaggggaanccagnagcaacaanagagcaacaanggcgaccaangaannnncccnccnnaggcgccnagcncnnncnacaagngnngcnaacgcgacaannnncccncaaggcncacaagcnccnanagcnacccnncnacccccaaaccnnccaacaannagagcggcaanangngaaaacccagcncnncaaccaaanaggcnncaacaagcaancgcagcaagcaacaaaccnnnancgcccnngnngnnacaacaaacgccagcccaaacnnnggngcagncannggnacaaaccancagggcacaacagcngcagcaacccgngccaccncngancaaccaagnagcacgggcaaaccnaacccccaacacacagcaacaaca

SEQ ID NO: 12949 - DNA, 558 bp, Zea mays
  Clone ID: LIB3061-097-Q1-K7-D10
cgatctttctgctagtgttggagcgaagagaatacactacagtactacatggcgaagcagcagcagcagggcatggcggcagtggcgctggtagtgctggtggtgctggcggcgacggcggccgagacggcgtcggcggcttcgtgcaacgccgggcagctggcggcgtgcgcgccggcgatcactgccggcgcgacgccctccgcgtcgtgctgctccaacctcaaggcgcagcaggggtgcttctgccagttcgtgaagaaccccacctacgggcgctacatcaacagccccaacgcgcgcaaggtcgtcgcctcctgcggcgtctccgtgccgcgctgctagtactagtacgtgtgctgtgcatgcatgtacgtgcgcacgtgggctgatcttcctgcttgtttcgtgtcttgccgcgcgccatcaggtgtttgtgtcacttttctgtttagtctctctacatgtgtactggcctcgtgtaccgctcctctatagtcgtgtcgtgtacgggctaattaatatatatacgacgaataaaggatgagttcggccact

SEQ ID NO: 12950 - DNA, 578 bp, Zea mays
  unsure (1)..(578): unsure at all n locations; Clone ID: LIB3061-097-Q1-K7-D11
tatggatgagctcagtgaggatgacaagttgacggtcgctcgtgcaagaaagattcagcgtttcctgagccagcctttccatgtcgctgaagttttcacaggtgctccagggaagtatgtggagctgaaggaaagtgtgaagagtttccagggtgttttggatggcaagtatgatgacctccctgagcagtcattctacatggttggaggcattgaggaagtcattgctaaggccgagaaaatcgccaaggagtctgcttcataaggcggcttcttgcttgttgaatcctgtacaatcaagttccatttttggatttaagcgattgtttatgcttttcgcagttaggcagcacgagttggaggtccatctcctgctgagatgcttgtttttctctttgttgttcaaacactttacacccaaataagcaactgcagtgacattaattttggctgcaccaaagttacatgaactgaagaaacttgtggcctgtgtgacgcggatcaatcagaacataaagttacggcttctggttggtaaanaaaaannnnnnnnnnnnnnnnnnnnnnnnnnnnnnnna

SEQ ID NO: 12951 - DNA, 446 bp, Zea mays
  Clone ID: LIB3061-097-Q1-K7-D2
gcagtttcttccattcaaccaactacgttcattgaactctgcttcttatttgcaacaacaacaactaccattcagccagctacctgctgcctacccccagcaatttcttccattcaaccaactagcagcattgaactctcctgcttatttacagcagcaacaactactaccattcagccagctagctggtgtgagccctgctaccttcttgacacaaccacagttgttgccgttctaccagcacgttgcgcctaacgctggcaccctcttacaactgcaacaattgctgccattcaaccaacttgctttgacaaacccagcagtgttctaccaacaacccatcattggtggtgccctcttttagatttcttatgagttatagttcaataataaagttttttatctgatgtttgtggcttcccagaaataagaaagtacatttctag

SEQ ID NO: 12952 - DNA, 653 bp, Zea mays
  Clone ID: LIB3061-097-Q1-K7-D4
gatcgtcttaggcgtggcggagccgcacccgcgcggccgggttcgacgacccggactccgccgtgcacctctgcttcgccgtgaacgcgcggcccatgctgcacgcgtcgctcccgcggggcggcgccgggttctacggcaactgctactacatcatgcgcgtgtcggcgcccgcggggaaggtggcgggcgcctcggtcgcggaggtggtgaggatgatcaaggacgggaagcgccggatgcccgcggagttcgcgcgctgggcggcgggggagctgggcgccggcggcgtcgacccctaccagatcacgtccgactaccgcacgctgctggtgtccgactggacgcgcctcggcttcgcggaggtggactacggatggggcccgcccgcgcacgtcgtgccgctgacaaacctggactacatcgccacgtgcatcctcgtgaagccctgggcccacaagccaggggcgcggctcatcacgcagtgcgtcaccccggaccgcgtcgccgccttccacgaggccatgctcgacaccagctgctgatcggagagaagagatgagtctgggggctctatttgcatgcatcgtctgtgtctgtgtggtgggaagccgccgcctacttacagaaatatgtgacattattcatgatat

SEQ ID NO: 12953 - DNA, 428 bp, Zea mays
  Clone ID: LIB3061-097-Q1-K7-D5
acgaaacccaatcctgcttcgatcccgtcggccggcgatggagggccggcggccgggcgcgcccgtggcgggcctgcccatcggcttccgcttccgccccaccgacgaggagctgctgctgcactacctccgccgcaaggcgctggcctgcccgctccccgccggcgtcatccccgacgccgacctcgcgcgcctccacccgtgggacctcctccccgccgccgcaccagggggatccggagccgacgccgacggggagcgcttcttcttccaccgcccggcgacgcagtgctggcgcaagggcggcggcgcggccagggcggccggcaccggcgtctggaggccgtccggcaaggagaccctcgtcctgtccccgcgctgcaagcgccccgtcggcaccaagcggacgctcgtattctgcccccgcc

SEQ ID NO: 12954 - DNA, 621 bp, Zea mays
  unsure (1)..(621): unsure at all n locations; Clone ID: LIB3061-097-Q1-K7-D6
caacactctccgatagcaagtagcgccgccgacgtttcgagagcagagtatccaagctagccaagcgcgcacctcggtgacctagctagctacctagctagttcaggcgacgatatggcgtctggtcaggagagcaggaaggagctggaccgcaaggctcgcgagggcgagaccgtcgtccccggcgggaccggcggcaagagcgtcgaggcccaggagcacctcgccgaagggcgcagccgcggaggccagactcgcagggagcagctggggcagcaggggtacagcgagatggggaagaagggcggtctgagcaccacggacgagtccggcggcgagcgcgccgccagggagggcgtcagcatcgacgagtccaagttcaccaagtagtcctatcgcgtgcgtgcgtacgcagcgttcgtagctgtctgcgtagtgtaccttggccgtagctagtgctactctctactttggagtagctgaatgataataatgtagctagcagcatgcatgtaggcgatcatacatacgtacgtacacaggtacgtgtgtgtgatcatgtatgcttncagaagggtatcctagcttaatcagtcacgtcgtcaagtcgtcaatatggca

SEQ ID NO: 12955 - DNA, 670 bp, Zea mays
  Clone ID: LIB3061-097-Q1-K7-D7
cttttcgaccacgcgtccgctgctactgcgaccattttcccgcaatgctcgcaagctcctatagcttcccttcttcccccgtacctctcaccagcggtgtcttcggtatgtgaaaacccaattcttcaaccctacaggatccaacaggcaatcacagctggcatcttacctttatcacccttgttcctccaacaatcatcagccctattacatcagttacctttggtgcatttattggcacaaaacatcagggcacaacaactacaacaacttgtgctagcaaaccttgctgcctactctcagcaacagcagtttcttccattcaaccaactagctgcattgaactctgcttcttatttgcaacaacaacaactaccattcagccagctacctgctgcctacccccagcaatttcttccattcaaccaactggcagcattgaactctcctgcttatttacagcagcaacaactactaccattcagccagctagctggtgtgagccctgctaccttcttgatacaaccacagttgttgccgttctaccagcacgctgcgcctaacgctggcaccctcttacaactgcaacaattgctgccattcaaccaacttgctttgacaaacccagcagcgttctaccaacaacccatcattggtggtgccctctttt

SEQ ID NO: 12956 - DNA, 496 bp, Zea mays
  Clone ID: LIB3061-097-Q1-K7-D8
gttacctttggtccatttggaggcccaaaacatcagggcacaacaactacaacaacttgtgctagcaaaccttgctgcatactctcagcaacatcagtttcttccattcaaccaactggctgcattgaactctgctgcttatttgcaacaacaattaccattcagccagctagttgctgcctacccccagcaatttcttccattcaaccaactagcagcattgaactctgctgcttatttacagcagcaacaactactaccattcagccagctagctgatgtgagccctgctgccttcttgacacaacaacagttgttgccgttctacctgcacgctatgcctaacgctggcaccctcttacaactgcaacaattgctgccattcaaccaacttgctttgacaaacccaacagtgttctaccaacaacccatcattggtggtgccctcttttagattgcttatgagttatagttcaataatgaagttttttggatg

SEQ ID NO: 12957 - DNA, 648 bp, Zea mays
  unsure (1)..(648): unsure at all n locations; Clone ID: LIB3061-097-Q1-K7-E1
caacaagcaacatagaaagtggaatacagtagcaaaaatagagcaacaatggcggccaagatattttccatccttatgctccttgctctttctgcatgtgttgctaacgcgaccatttttcctcaatactcacaagctcctatagctgcccttcttcccccataccttccatcaatgaccgctttagtatgtgaaaacccagcccttcaaccctacaggatccagcaagcaatcgcaacaagcaacttacctttatcacacctgttctttcaacaatcgccagccctatctttggtgcagtcattggtacaaaccatcagggcagaacagttgcagcaactcgtgctaccagtgatcagccaagtagctctggcaaacctttccccctactctcagcaacaacaatttcttccattcaaccaactgtctatactgaaccctgctgcttatttgcagcaacaacaactactaccattcagccagctagctactgcctactctcagcagcaacaatttcttgcattnaaccaattggccgcactgaacccctctgcttatttccagcaggcaatcctactaccatttggccagctaggctacaacaaggcccgcttccttcttgacacaacaaccagtgcttgcgttcta

SEQ ID NO: 12958 - DNA, 629 bp, Zea mays
  Clone ID: LIB3061-097-Q1-K7-E11
atttggagctgaactacggaaggcgatacggtttgcttgggttgaatggctgtggaaaatctactcttctcacagcaataggctgcagagaacttcctatccctgaacacatggacatataccatctaagccatgagattgaagcttctgacatgtctgcactgcaagccattgttagttgtgacgaagaaagagtgaagttggaaaaggaagctgaaattttggctgcacaggatgatggtggtggtgaagcattggagcgtgtttatgagcgtctagatgcaatggatgctggaactgcagaaaagcgagctgctgaaattttatttggtctgggttttgacaaacaaatgcaagcaaagaaaactaaagatttctctggaggttggcgtatgaggattgctttagcaagagcactgtttatgaatccaacaatccttttgcttgatgagcccacaaaccatctagatcttgaggcttgtgtctggttggaagagacactgaagaaatttgaccgcatacttgttgtcatatcacactcccaagattttctaaatggagtgtgtactaacattatccatatgcaaaacaagaagctcaagttatacaccggtaactacgatcagtat

SEQ ID NO: 12959 - DNA, 580 bp, Zea mays
  Clone ID: LIB3061-097-Q1-K7-E2
caatgataccaaaatccagcttcttgatcttccccttatcattgaaggagcttctgaaggcaaggggcgtggtaggcaggttattgctgttgcaaagtcatcagatcttgtgctgatggttctggatgcctcaaagagtgaaggacatcgtcaaatattaactagagaactggaagctgttggactccgtcttaacaaaaggcctccccagatatacttcaagaggaagaagacgggtgggatttctttcaataccactgttcctttgactcatattgatgagaagctgtgctatcagattctgcacgagtacaaaattcacaatgctgaggtgttattccgtgaagatgctactgtggatgatctcattgacgttatcgaagggaaccggaagtacataaagtgcgtctacgtatataacaagatcgatgttggtggtatcgatgacgttgataatcttgctcggcaaccaaattcactagtgatcagctgcaattgaagctgaacttggacagactacttgctaaaatgtgggaggagatgggcctagtgagggtgtatacaaagccacagggccagc

SEQ ID NO: 12960 - DNA, 666 bp, Zea mays
  Clone ID: LIB3061-097-Q1-K7-E3
ctttcctttcctggcagcgacgagcgacgacagtggcaggcgggcgggcgggcgagcgtcgacggcgttctctaggtcttcgttgtccccttcaccggcggctgccaacgccctttgccaggtcttcgttgtcaccttcgccggcgactgtcacggccccttcgccagctcttcgtctgccccttccccggtaccgggactgaagataagatggctgccttgccattggccaccgcagaagcatgtgatgctaatgctgctttaattatgaatggtgatcttcgttctctccaacctatcttccgaatctatggaggccggcagatttttgctggccctgttgtgacactgaagatctttgaggataacgttctgctccgcgagttccttgaggagaaaggtcacggcagggtcctggtggttgatgccggtgggagcatgcgttgtgcagttttgggtggcaaccttgcccagctgatgcagaataatgggtgggctggaatcgttgtcaatggctgcatcagggacgtcgacgagataaatggctgcgacgttggtgtccgggctctgaactcacaccctatgaagtcaaacaagaagggcgtcggtgagaagcatgtccctgtgacctttgcagggacaagaatctgcgatggagaatggctc

SEQ ID NO: 12961 - DNA, 530 bp, Zea mays
  Clone ID: LIB3061-097-Q1-K7-E4
gaccaactagcaacatagaaagcacaatagtgtaccaacaatggcagccaaaatattttgcttccttatgctccttggtctttctgcaagtgctgctaccgcaaccattttcccacaatgctcacaagctcctatagcttcctttcttcccccatacctctcaccagcggtgtcttcagtatgtgaaaacccaattcttcaaccctacaggatccaacaggcaatcgcagcaggcatcttacctttatcacccttgttcctccaacatccgtcagccctattacagcagttacctttggtgcatttgttggcacaaaacatcaaggcacaacaactacaacaacttgtgctaggaaaccttgctgcctactctcagcaacagcagtttcttccattcaaccaactggctgcattgaactctgctgcttatttgcaacaacaactaccatttcatcagctagctgttgcctacccccagcaatttcttccattcaaccaactggcaggattgatctctgctgcttatttac

SEQ ID NO: 12962 - DNA, 613 bp, Zea mays
  Clone ID: LIB3061-097-Q1-K7-E5
attgagaccaactagcaacatagaaagcacaatagtgtaccaacaatggcagccaaaatattttgcctccttatgctccttggtctttctgcaagtgctgctacggcgaccattttcccgcattgctcgcaagctcctatagcttcccttcttcccccgtacctctcaccagcggtgtcttcggtatgtgaaaacccaattcttcaaccctacaggatccaacaggcaatcgcagctggcatcttacctttatcacccttgttcctccaacaatcatcagccctattacaacagtgacctttggtgcatttattggcacaaaacatcagggcacaacaactacaacaacttgtgctaacaaaccttgctgcctactctcagcaacagcagtttcttgcattcaaccaactaggttcattgaactctgcttcttatttgcaacaacaacaactaccattcagccagctacctgctgtctacccacagcattttcttcattcaaccaactagcagcattgaactctcctgcttatttacagcagcaacaactactaccattcagccagctagctggggtgagccctgctaccttcttgacacaaccacagttgtt

SEQ ID NO: 12963 - DNA, 670 bp, Zea mays
  Clone ID: LIB3061-097-Q1-K7-E6
attgatatcaactagcaacatagaacgcacaatagtgtaccaacaatggcagccaaaatattttgcttccttatgctccttggtctttctgcaagtgttgctaccgcaaccattttcccacaatgctcacaagctcctatagcttcccttcttcccccatacctctcaccagcggtgtcttcaatgtgtgaaaacccaattgttcaaccctacaggatccaacaggcaatcgcaacaggcatcttaccattatcacccttgttcctccaacaaccgtcagccctattacagcagttacctttggtccatttggtggcacaaaacatcagggcacaacaactacaacaacttgtgctagcaaaccttgctgcatactctcagcaacatcagtttcttccattcaaccaactggctgcattgaactctgctgcttatttgcaacaacaattaccattcagccagctagttgctgcctacccccagcaatttcttccattcaaccaactagcagcattgaactctgctgcttatttacagcagcaacaactactaccattcagccagctagctgatgtgagccctgctgccttcttgacacaacaacagttgttgccgttctacctgcacgctatgcctaacgctggcaccctcttacaactgcaacaattgc

SEQ ID NO: 12964 - DNA, 670 bp, Zea mays
  Clone ID: LIB3061-097-Q1-K7-E7
acaatcacaaggccatgtgcaacaacacgaacagagccatgagcaacaccaaggacagagccatgagcaacaacatcaacaacaattccagggtcatgacaagcagcaacaaccacaacagcctcagcaatatcagcagggccaggaaaaatcacaacagcaacaatgtcattgccaggagcagcaacagactacaaggtgcagctataactactatagcagtagctcaaatctaaaaaattgtcatgaattcctaaggcagcagtgcagccctttggtaatgccttttctccaatcacgtttgatacaaccaagtagctgccaggtattgcagcaacaatgttgtcatgatcttaggcagattgagccacaatacattcaccaagcaatctacaacatggttcaatccataatccaggaggagcaacaacaacaaccatgtgagttatgtggatctcaacaagctactcaaagtgcggtggcaatcttgacagcagcacaatacctaccatcaatgtgcggcttgtaccactcatactaccaaaataatccatgcagcagcaatgacattagtggtgtttgcaattgaagaattgtgtctacctagccgttatactcctataacggtgttaagcaataaagtaccatacattatgatgtttgtactatg

SEQ ID NO: 12965 - DNA, 595 bp, Zea mays
  Clone ID: LIB3061-097-Q1-K7-E9
tagcatcatagaaagcacaatagtctaccaacaatggcagccaaaatattttgcctccttatgctccttggtctttctgcaagtgctgctacggcgaccattttcccacaatgctcacaagctcctatagcttcccttcttcccccgtacctctcaccagcggtgtcttcggtatgtgaaaacccaattcttcaaccctataggatccaacaggcaatcgcagctggcatcttacctttatcacccttgttcctccaacaatcatcagccctattacagcagttacctttggtgcatttattggcacaaaacatcagggcacaacaactacaacaacttgtgctagcaaaccttgctgcctactctcagcaacaacagtttcttccattcaaccaactagctgcattgaactctgcttcttatttgcaacaacaacaactaccattcagccagctatctgctgcctacccccagcaatttcttccattcaaccaactgacagctttgaactctcctgcttatttacagcagcaacaactactaccattcagccagctagctggtgtgagccctgctaccttcttgacacaaccac

SEQ ID NO: 12966 - DNA, 160 bp, Zea mays
  Clone ID: LIB3061-097-Q1-K7-F10
ctgccattcaaccaacttgctttgacaaacccatcagcgttctaccaacaacccatcattggtggtgccctcttttagatttcttatgagttatagttcaataataaagttttttgtctgatgtttgtggcttcccagaaataagaaagtacatttctag

SEQ ID NO: 12967 - DNA, 191 bp, Zea mays
  Clone ID: LIB3061-097-Q1-K7-F11
ggaaactatgtactgtagtaataccgtaatggagccgctgactagctacctatagggctatagctagttcactcgtttagcggcgatgagtaacggagtgtcacccatcaccatgggtggcagtgtgagcaatgacctgaatgaaccattgaaatggaaaggaataatatatagggaaaaaggatgtttgg

SEQ ID NO: 12968 - DNA, 665 bp, Zea mays
  unsure (1)..(665): unsure at all n locations; Clone ID: LIB3061-097-Q1-K7-F2
atactttcttctggtgataaggagcagcaaagtgatctgcaggctttgctatgtggtgttctgcaggtcatcatccagaaactgagcagcacagatgcaaagtccatagtttctcagactgctgatcagctgatgatgctgtttctgcgtgtctttgcctgccacaattctactgttcatgaagaagcaatgcttgcaattggtgctcttgcatatgctactggtccagattttgtgaaatacatgcctaacttcttcacatacttggaggctggtttgcagaattatgaagaataccaagtgtgttccatctctgttggtgtggttggtgatatttgccgtgcattggaagataaaattttgcccttttgtgatcgcattatgactgttcttcttaaggacctatcaagctctatgctcaatcggtctgtgaagcctccgattttctcatgctttggagacattgctcttgctattggtgagaattttgagaaatacctaccatatgccatgccgatgcttcaaggagctgctgaacttcttggcactcttgatcagagtgatgatgatatggttgattatggcaaccagctcagacgtggcattnttgaggcatactctggtatactccagggcatcaagggcccaaaagctcagctgatgat

SEQ ID NO: 12969 - DNA, 793 bp, Zea mays
  unsure (1)..(793): unsure at all n locations; Clone ID: LIB3061-097-Q1-K7-F4
ttcgggncgtgtcttgagtctggagctgatgcgatnnctagggtttgggttagcggtagatggtcccctgcagtgcatggatggatgctcatagnngcggaaggctcnncggcgaggcccnntggcgtgcgggcgggcggtgatgccacngagtatgcgtgtgatgccccatggggtatggcngtgagtgcnggggtggcattgcngtcatgggtagccatggacatggtntcgcgtgtcccatttcgccaacattcatgtcgcattcaatgaatgaaggcncnnatcccggcttaatcgggatagaaatcgccaatggaccgcttaatggatgacnncgtgcatggaatgtgcngtcnnntccgatgttcattcnntccttcattcacttanngcgaatgcgaatgtgatcaagtgccatgatgggatgaatgcggaatgaccattcaatgnnngcgatcgatctgcttgtnngggccatggcccacgctngggggtttgaaagacctacattgannacccctcaagggtgtnnacctgcagaatgtacccagagagnaatggagggnnngatagcaagttaaccctgcaaaannnctagcgatggctcaattaaaaaatgggatgcccttggtcatttgtgggagcaagtaagctcagnctgcacaagggggatgggccaacaggggagcatacaaccaaggaatgggttatatgcaaccccagtaccataacggggatatctcaaactaatggaggtatggaccttttctgcgacagctgctcttacctg

SEQ ID NO: 12970 - DNA, 550 bp, Zea mays
  Clone ID: LIB3061-097-Q1-K7-F5
cttgccttcatggttttcttctgcagcgaagaagtttattaagcgcattctcgatcctaatcctgatacgaggataacaattgcagaaattttggaagatgaatggttcaaaaaagactataaaccaccacgttttgaacaaggtgaaggtgttagccttgacgacattgatgctgcgttgaatgattcagaggaccgtcttgtggcagagaaaagagagaaaccagaatccatgaacgcatttgctcttatttcgaggtcgcagggtttcaaccttggaaatttgtttgagaaggagatgatgggaatggtaaagagggaaacatctttcacgtctcaatgcacagcacaggagatcatgacaaaaatagaggatgcatgtgggccactcggtttcaacgtgcggaaacaaaattacaagatgaaattgaaaggtgacaaatctggaagaaaaagtcacttatctgttgcaactgatgtttttgaggttgccccatcactttacatggttgagcttcgtaaaaccggatgagacacatttggatttcac

SEQ ID NO: 12971 - DNA, 577 bp, Zea mays
  Clone ID: LIB3061-097-Q1-K7-F7
ccagccgtcgtcatgtcgaagcgaggtaggggaggttcggctgggaacaagttccgcatgtcactgggtctaccggtggcggccacggtgaactgcgcggacaacacgggcgccaagaacctctacatcatctccgtcaagggcatcaagggccgcctcaaccgcctcccgtccgcctgtgtcggcgacatggtcatggccaccgtaaagaagggaaagcccgacctcaggaagaaagtgatgcccgccgtcatcgtccgccagcgcaagccgtggcgtcgcaaggacggtgtctacatgtacttcgaagataatgctggagtgattgtgaatcccaagggtgagatgaaaggttctgcaatcactggacctatcggcaaggagtgtgctgacctttggcctaggatcgccagtgcagcaaatgccatcgtttgagagcttgttggaatgtgtttagacttgagtatgatcatctcaattgtgtgttgcaggtgttgtaagggtgctattggacttgatggctccttttatgtttggtcactcaattctgtagtgaacagaaatttctggttgcctc

SEQ ID NO: 12972 - DNA, 649 bp, Zea mays
  Clone ID: LIB3061-097-Q1-K7-F8
ctcgattttggtgccctcataaccgcatgtgtttcctagaaataatcaatatattgattgagatttgaaaaaaaaaaaaaaaaaaaaaaaaaaataaaaaaaaaaaaaaaaaaaaaaaaaaaaaaaaaaaaaaaaaaaaaaaaaaaaaaaaaaaaaggaaaaaaaaaaaaaaaaaaaaaaaaaatgaaaaaaaaaaaaaaaaaaaaaaaaaaaaaaaaaaaacaaaaaaaaaaaaaaaaaaaaaggggccccccccttaaaaaacccaaatttatctccccgggggtccaaaaaaaaaattttttttttggggccccaaaaaaaaaaaccccggcccattttttaaaaacccgaaactgaaaaaaccccggggttcccccatttaaaccccttgaaaaaaacccccctttccccccttggttttaaataaaaaaagccccccccaaatcccctttaaaaaaatttgcccccctaaatggaaaaaggcccccccccttttggggcctattaaacccggggggtttgggttttccccccctttaacccccttaattttccaagcccctaacccccctttttttagttttttccccttcccttttaaaccatttagccggtttccccccgaaaacttaaaatagggggcccc

SEQ ID NO: 12973 - DNA, 158 bp, Zea mays
  Clone ID: LIB3061-097-Q1-K7-G1
gcgcgagtgctgccgaaggcggtgaccttcgtgacgggcaacgccaagaagctggaggaggtacgagccatactagggtctaacgtaccattaacagtcgttaaagctcgacctgacaaaactgaaaggggagccagagatcatataacaaagagaaa

SEQ ID NO: 12974 - DNA, 654 bp, Zea mays
  Clone ID: LIB3061-097-Q1-K7-G10
caactagcaacatagaaagcacactagtgtaccaacaatggcagctaaaatattttgcctccttatgctccttggtctttctgcaagtgctgctacggcgaccattttcccacaatgctcacaagctcctatagcttcccttcttcccccgtacctctcaccaacggtgtcttcggtatgtgaaaacccaattcttcaaccctacaggatccaacaggcaatcgcagctggcatcttacctttatcacccttgttcctccaacaatcatcagccctattacagcagttacctttggtgcatttattggcacaaaacatcagggcacaacaactacaacaacttgtgctagcaaaccttgctgcctactctcagcaacagcagtttcttccattcaaccaactagctgcattgaactctgcttcttatttgcaacaacaacaactaccattcagccagctatctgctgcctacccccagcaatttcttccattcaaccaactgacagcattgaactctcctgcttatttacagcagcaacaactactaccattcagccagctagctggtgtgagccctgctaccttcttgacacaaccacagttgttgccgttctaccagcacgctgcgcctaacgctggcaccctcttacaact

SEQ ID NO: 12975 - DNA, 602 bp, Zea mays
  Clone ID: LIB3061-097-Q1-K7-G12
ctcatgtcctcaccagataagatcttgtgagggtgatgggattgacaggttggaaaaattaagtattgggggcagaaagcaggagaaagctttgagaaataggtgctttggtggtagagttgctgcaactacacaatgtattcttacctcagatgcttgtcctgaaactcttcattctcaaacacagtcctctaggaaaaattatgctgatgcaaaccgtgtatctgctatcattttgggcggaggcactggatctcagctctttcctctgacaagcacaagagctacgcctgctgtacctgttggaggatgttacaggcttattgatatccctatgagtaactgcttcaacagtggtataaataagatatttgtgatgagtcagttcaattctacttcgcttaaccgccatattcatcgtacataccttgaaggcgggatcaactttgctgatggatctgtacaggtattagcggctacacaaatgcctgaagagccagctggatggttccagggtacatcatactctatcagaaaatttatctgggtgctctaggattatgacaatcacaaatgcatggacaacattgcaattttgattg

SEQ ID NO: 12976 - DNA, 592 bp, Zea mays
  Clone ID: LIB3061-097-Q1-K7-G2
ccgggttgagaccaactagcaacatagaaagcacaatagtgtaccaacaatggcagccaaaatattttgcctccttatgctccttggtctttctgcaagtgctgctacggcgaccattttcccgcaatgctcgcaagctcctatagcttcccttcttcccccgtacctctcaccagcggtgtcttcggtatgtgaaaacccaattcttcaaccctacaggatccaacaggcaatcacagctggcatcttacctttatcacccttgttcctccaacaatcatcagccctattacatcagttacctttggtgcatttattggcacaaaacatcagggcacaacaactacaacaacttgtgctagcaaaccttgctgcctactctcagcaacagcagtttcttccattcaaccaactagctgcattgaactctgcttcttatttgcaacaacaacaactaccattcagccagctacctgctgcctacccccagcaatttcttccattcaaccaactggcagcattgaactctcctgcttatttacagcagcaacaactactaccattcagccagctagctggtgtgagccctgct

SEQ ID NO: 12977 - DNA, 608 bp, Zea mays
  Clone ID: LIB3061-097-Q1-K7-G4
ccacgaacccactctctctccccacgatggcaaaaatggcgatggcgtcctcccgcctcccggctctcctctgcctcgccgccgtcgccgtcgccgtcgcggcggaggccgccgccgccgccggagaaggcggcctccgcctgccccgcgacgccacgttcccggcggcgcaggcggagcggctcatccgcgcgctcaacctcctgcctaaggagaaggaggcggggccggccgcgggcggcggcgacgggcccagcgtggcgcccggggagctcctagagcgtcgcgtccggctgcccggcgcgcccgccggcgtcggggacctcggccaccacgccggatacttccgcctgccgcacacgcacgacgccagaatgttctacttcttcttcgaatcgaggggcaagaagaaggaggacgaccccgtcgtgatctggctcaccggagggcccggctgcagcagcgagctggccgtcttctacgagaatgggcccttcaccattgccaacaacatgtcgcttggctggaacatattcggttgggacacgatctcaaaatcatatttgttgatcagccaaccggaactggctttagctacagctctgatg

SEQ ID NO: 12978 - DNA, 614 bp, Zea mays
  Clone ID: LIB3061-097-Q1-K7-G5
gttcctaccagcactgagccacctagccatggtgaaccctgccgcctacttgcaagagcagctgcttgcatccaacccacttgctctggcgaacgtagttgcaaaccagcaacaacaacagctacaacagtttctgccaacgctcagtcaactagccatggtgaaccctgccgcctacgtgcaacaacaacaactgctttcatctagcccgctcgctgtgggcaatgcacctacatacctgcaacaacaattgttgcaacagattgtaccagctctgactcaactagctgtggcaaaccctgttgcctacttgcaacagctgcttccattcaaccaactgactctgtcgaactctgctgcgtacctacaacagcgacaacagttacttaatccattggtagtggctaacccattggtcgccgccttcctacagcagcaacaattgctgccatacaaccagttctctttgatgaatcctgtcttgtcgaggcagcaacccatcgttggaggtgccatcttttagattacatatgagatgtactcgataatggtgccctcataccgacgtgtgtttcctagaaataatcaatatattgattgagatttatctcgaa

SEQ ID NO: 12979 - DNA, 601 bp, Zea mays
  Clone ID: LIB3061-097-Q1-K7-G6
gagaccaacaagcaacatagaaagtggaatccagtagcaacaacagagcaacaatggcgaccaagatattttccctccttatgctccttgctctttctgcatgtgttgctaacgcgacaattttccctcaatgctcacaagctcctatagcttcccttcttcccccataccttccatcaatgatagcttcagtatgtgaaaacccagctcttcagccctataggctccaacaagcaatcgcagcaagcaacatacctttatcacccttgttgtttcaacaatcgccagccctatctttggtgcagtcattggtacaaaccatcagggcacagcagctgcagcaactcgtgctacctgtgatcaaccaagtagctctggcaaacctttctccctactctcagcaacaacaatttcttccattcaaccaactgtctacactgaaccctgctgcttatttgcagcaacaactattaccattcagccagctagctactgcctactctcagcaacaacaacttcttccatttaaccaattggccgcactgaaccccgctgcttatttgcagcagcaaatactactaccatttagccagctagctgc

SEQ ID NO: 12980 - DNA, 637 bp, Zea mays
  Clone ID: LIB3061-097-Q1-K7-G7
cccacgcgtccgattttgagcattcagaaacacacctagcgaagcgcactagcaacgacctaacaacaatggcttccaagacattatccctccttgcgcttcttgccctttttgtgagtgcaacaaatgcgttcattattccacaatgctcacttgctccgagtgccattattccacaggtcctccctccagttacttcaatgggcttcgaacacccagctgtgcaagcctataggctacaacaagcgcttgcggcgagcgtcttagaacaaccaattgcccaattacaacaacaatccttggcacatctaaccatacaaaccatcgcaacgcagcagcaacaagcactgagccacctagccgtggtgaaccctatcgcctacttgcaacaacagctgcttgcatccaacccacttgctttggcaaacgtagctgcataccaacaacaacaacagttgcaacagtttctaccagcgctcagtcaactagccatggtgaaccctatcgcctacctacaacagcaacaacttctttcatctagcccgctcgctatgggcaatgcacctacatacctgcaacaacagttgttgcaacaacagttgctgcaacaattgtaccagctcttactcagctagct

SEQ ID NO: 12981 - DNA, 345 bp, Zea mays
  Clone ID: LIB3061-097-Q1-K7-H10
caaatgcgttcattattccacaatgctcacttgctcctagtgccattattccacagttcctccctccagttacttcaatgggctttgaacacccagctgtgcaagcctacaggctacaacaagcgcttgcggtgagcgttttacaacaaccaattgcccaattacaacaacaatgctgggcacatgtaaccatacaaaccatgtgtagcgcatcagcaacaacaatttttaccagcactgagccaactagctgtggtgaaccctgttgactacttgcaacagtagttgtttgtcatgcaacctacttgatctgataaacatatttgcgtaccaacagcaacaaca

SEQ ID NO: 12982 - DNA, 590 bp, Zea mays
  unsure (1)..(590): unsure at all n locations; Clone ID: LIB3061-097-Q1-K7-H11
cgctncttgccctnnnngagagcgcaacaaatgcgnncatnatnccacaatgctcacttgctcctagtgccattattccacagttcctcccaccagttacttcaatgggcttcgaacacctagctgtgcaagccaacatgcaacaacaagcgcttgcggcgagcgtcttacaacaaccaattgcccaattgcaacaacaatccttgccacatctaacaatacaagccatcacaacgcaacagcaacaacagttcctaccagcactgagccacctagccatggtgaaccctgccgcctacttgcaagagcagctgcttgcatccaacccacttgctctggcgaacgtagttgcaaaccagcaacaacaacagctacaacagtttctgccaacgctcagtcaactagccatggtgaaccctgccgcctacgtacaacaacaacaactgctttcatctagcccgctcgctgtgggcaatgcacctacatacctgcaacaacaattgttgcaacagattgtaccagctctgactcaactagctggggcaaaccctgttgcctacttgcaacagctgcttccattcaaccaactg

SEQ ID NO: 12983 - DNA, 201 bp, Zea mays
  Clone ID: LIB3061-097-Q1-K7-H3
atctcatgaactggccagcgacgccacagttgctttgagctgaagttgaattgatggaattgaactaatcactttttgtagttactggtactatcttatcgtaccagttccttatcgttgggatacttgctgtcaccaccttatttgcgggaggagatattacaggatatgcattcgagattagatccttcaacacacatt

SEQ ID NO: 12984 - DNA, 80 bp, Zea mays
  Clone ID: LIB3061-097-Q1-K7-H4
gtgagcatatgacctgaatgaacaattgaaatgaaaagaaaaaaagtactcaactagctagctagcgaggtgctattact

SEQ ID NO: 12985 - DNA, 610 bp, Zea mays
  Clone ID: LIB3061-097-Q1-K7-H9
attgagaccagcaagcaacatagaaagtagaatccattagcaacaatagagcaacaatggcgaccaagatattttccctccttatgctccttgctctttctacatgtgttgctaacgcgacaattttccctcaatgctcacaagctcctatagcttcccttctttccccataccttccatcaattatagcttcagtatgtgaaaacccagctcttcaaccatataggcttcaacaagcaatcgcagcaagcaacatacctttatcgcccttgttgtttcaacaatcaccagccctatctttggtgcagtcattggtacaaaccatcagggcacaacagctgcagcaactcgtgctacctgtgatcaaccaagtagctctggcaaacctttctccctactctcagcaacaacaatttcttccattcaaccaactgtctacactgaaccctgctgcttatttgcagcaacaactattaccatttagccagctagctactgcctactctcagcaacaacaacttcttccatttaaccaattggccgcactgaaccccgctgcttatttgcagcagcaaatactactgccatttaacgagctagctgcagcaag

SEQ ID NO: 12986 - DNA, 644 bp, Zea mays
  unsure (1)..(644): unsure at all n locations; Clone ID: LIB3061-101-Q1-K7-A11
aacagcactttttaaagtggatacagtagcaacagtggagcagcggtggcggccaagatattttccatccttatgctccttgctctttctgcatgtgttgctaacgcgaccatttttcctcaatactcacaagctcctatagctgcccttcttcccccataccttccatcaatgaccgcttcagtttgtgaaaacccagcccttcaaccctacaggctccaacaagcaatcgcaacaagcaacttacctttatcacccctgttctttcaacaatcgccagccctatctttggtgcagtcattggtacaaaccatcagggcacaacagctgcaacaactcgtgctaccagtgatcagccaagtagctctggcaaacctttctccctactctcagcaacaacaatttcttccattcaaccaactgtctacactgaaccctgctgcttatttacaacaacaacaactactaccattcagccagctagctactgcctactctcagcagcaacaatttcttccatttaaccaattggccgcactgaacccctctgcttatttccagcagcaaatactactaccatttggccagctagctacaacaagccccacttnctttttggaacaacaacatttgcttccgttcta

SEQ ID NO: 12987 - DNA, 411 bp, Zea mays
  Clone ID: LIB3061-101-Q1-K7-A2
gtcgacccacgccgtccgcaacaattaccattcagccagctagttgctgcctacccccagcaatttcttccattcaaccaactagcagcattgaactctgctgcttatttacagcagcaacaactactaccattcagccagctagctgatgtgagccctgctgccttcttgacacaacaacagttgttgccgttctacctggacgctatgcctaacgctggcaccctcttacaactgcaacaattgctgccattcaaccaacttgctttgacaaacccaacagtgttctaccaacaacccatcattggtggtgccctcttttagattgcttatgagttatagttcaataatgaagttttttggatgatgtttgtggcgtcccagaaataagaaagtacatttctagattct

SEQ ID NO: 12988 - DNA, 618 bp, Zea mays
  unsure (1)..(618): unsure at all n locations; Clone ID: LIB3061-101-Q1-K7-A3
tgtttacgccaagtacggctacggccagtccccagtcagcccctcgttcgttcgtcctgatagcttgaaaccgtcatggccatggggcttcccggcctccgctgctgccgccttcccgctcgcgggtcgctcactccactctgtgccgccctcgctcgcaggcccctcccgcggacctcggctctccgctactcctccctcgaagcccaagctggggacactgttggggaggaggtcctgcgcatgttccttgaggagaggcaactgcacggcgatttcgtcaccaagatctctgacatggtctggaggaggaatggcgacaatgttgatgcggttgaggcgaccacggaccaaggcagtgctgtagatgttgctcagcctgaagacgtgcgggaagatgttgtggacgagggaatgttgagactagcggcaaccggaggttgggtgtccggtgacagcagccctcctttgagcaagaggctttcagctaaggattggcngaatgagagagacaaaaggaaggaactgaatcttttgaaatatgaagccactcaagatgaattgctgctcttgaccccgggattggagcagcatgtagtttatacttgtctcctggtt

SEQ ID NO: 12989 - DNA, 318 bp, Zea mays
  Clone ID: LIB3061-101-Q1-K7-A5
cttccagcagtttgcggctaaccccgcaaccctcttacaactacaacaattgttgccctttgtccaacttgctttgacagacccagcggcctcctaccaacaacacatcattggtggtgccctcttttagattgcttattagttgtaattcaataataaagttttttggatgaaaaaaaaaaaaaaaaaaaaaaaaaaaaaaaaaaaaaaaaaaaaaaaaaaaaaaaaaaaaaaaaaataaaaatataaaaggaatgaagatatattataatgtagggtttgtttttgtggttttttttttttttttgtgtttttttt

SEQ ID NO: 12990 - DNA, 522 bp, Zea mays
  Clone ID: LIB3061-101-Q1-K7-A6
gtgaggtccttaatggggatcggctagttgatgcgccttacaagcttgatttccgttcggaagttgagtccaaggcggtttgctcaaagaagcttaccaaagaggatgtagtgaagttccggaatgcagtagcgaaggactactacttccagatgtactatgatgatctcccactgtggggcttcattggtaaagttgagaagggaggcaaggccgatccgagcgagtggaagtactacctgtacaggcacatcatcttcgatatcctgtacaacaacgaccgggtgattgaaatcaatgtgcacactgatcagagtgcattggttgacctgacggaggataaggagacaaatgtggatttcctgtactcagtcaagtggaaggagacaccaacaccatttgagaagaggatggagaagtactccagctcctccaacatgccgcaccacctggaggttcattggttctcaatcataaactcttgtgttactgtcctcctcctcacagggttccttgcaacaa

SEQ ID NO: 12991 - DNA, 657 bp, Zea mays
  unsure (1)..(657): unsure at all n locations; Clone ID: LIB3061-101-Q1-K7-A7
tcgaccacacgcgtccttttttagcaacatagnaaagcacaatagtgtaccaacaatggcagccaaaatttttgcctccttatgctccttggtctttctgcaagtgctgctacggcgaccattttcccgcaatgctcgcaagctcctatagcttcccttcttcccccgttcctctcaccagcggtgtcttcggtgtgtgaaaacccaattcttcaaccctacaggatccaacaggcaatcacagctggcatcttacctttatcacccttgttcctccaacaatcatcagccctattacatcagttacctttggtgcatttattggcacaaaacatcagggcacaacaactacaacaacttgtgctagcaaaccttgctgcctactctcagcaacagcagtttcttccattcaaccaactagctgcattgaactctgcttcttatttgcaacaacaacaactaccattcagccagctacctgctgcctacccccagcaatttcttccattcaaccaactggcagcattgaactctcctgcttatttacagcagcaacaactactaccattcagccagctagctggtgtgagccctgctaccttcttgatacaaccacagttgttgccgttctaccagcacgctgcgcctaacgctggc

SEQ ID NO: 12992 - DNA, 612 bp, Zea mays
  Clone ID: LIB3061-101-Q1-K7-A8
tcttcccccatacctctccccgggggtgtggtggagtatgtgaaaacccaattcttcaaccctacaggatccaacaggcaatcgcagcaggcatcttacctttatcacccttgttcctccaacaaccgtcagccctattacagcatttttttttggtgcatttgttggcgcagggggatgagggcacaacaactacaacaacttgtgctaggaaaccttgctgcctactctcagcaacagcagtttcttccattcaaccaactggctgcattgaactctgctgcttatttgcaacaacaactaccattcagtcagctagctgctgcctacccccagcaatttcttccattcaaccaactggcagcattgaactctgctgcttatttacaacagcaacagctaccaccattcagccagcttgctgatgtgagccctgttgccttcttgacacaacaacagttgttgtcgttctacctgcacgctgcgcctaacgctggcacccttttacaactgcaacaattgttgccattcaaccaacttgctttgacaaacccaacatcgttcttccaacaacccatcattgggggtgccctctttttagatgcttttgag

SEQ ID NO: 12993 - DNA, 584 bp, Zea mays
  Clone ID: LIB3061-101-Q1-K7-A9
ccgtttcgacccacgcgttctttgttaataacaacagttatgacaaatgtcggcgaagatttgacctgggtgatgcagactatcttaggtatcatggtatgcaagagtttgatcaggcaatgcaacatcttgagcaaaaattgaattcatgacatctgatcaccagtatatttcccggaaacatgaggaggataaggtgattgtgttcgaaaagggagatttggtatttgtgttcaacttccactgcaacaacagctattttgactaccgtattggttgtcgaaagcctggggtgtataaggtggtcttggactccgacgctggactatttggtggatttagcaggatccatcacgcagccgagcacttcaccgccgactgttcgcatgataataggccatattcattctcggtttatacaccaagcagaacatgtgtcgtctatgctccagtggagtgatagcggggtactcgttgctgcgcggcatgtgtggggctgtcgatgtgaggaaaaaccttttccaaaaccggcagatgcatgcatgcatgctacaataaggttctgatactttaatcgatgctgg

SEQ ID NO: 12994 - DNA, 644 bp, Zea mays
  Clone ID: LIB3061-101-Q1-K7-B1
ggcagccaaaatttttgcctccttatgctccttggtatttctgcaagtgctgctacggcgaccattttcccgcaatgctcacaagctcctatagcttcccttcttcccccgtacctctcaccagcggtgtcttcggtatgtgaaaacccaattcttcaaccctacaggatccaacaggcaatcgcagctggcatcttacctttatcacccttgttcctccaacaatcatcagccctattacagcagttacctttggtgcatttattggcacaaaacatcagggcacaacaactacaacaacttgtgctagcaaaccttgctgcctactctcagcaacagcagtttcttccattcaaccaactagctgcattgaactctgcttcttatttgcaacaacaacaactaccattcagccagctacctgttgcctacccccaacaatttcttccattcaaccaactggcagcattgaactctcctgcttatttacagcagcaacaactactaccattcagccagctagctggtgtgagccctgctaccttcttgacacaaccacagttgttgccgttctaccagcacgctgcgcctaacgctggcaccctcttacactgcaacattgctgccattcaccaacttgcttt

SEQ ID NO: 12995 - DNA, 673 bp, Zea mays
  Clone ID: LIB3061-101-Q1-K7-B10
attgagaccaatagcaacatagaaagcacaatagtgtaccaacaatggcagccaaaatattttgcttccttatgctccttggtctttctgcaagtgctgctaccgcaaccattttcccacaatgctcacaagctcctatagcttcctttcttcccccatacctctcaccagcggtgtcttcagtatgtgaaaacccaattcttcaaccctacaggatccaacaggcaatcgcagcaggcatcttacctttatcacccttgttcctccaacaaccgtcagccctattacagcagttacctttggtgcatttgttggcacaaaacatcaaggcacaacaactacaacaacttgtgctaggaaaccttgctgcctactctcagcaacagcagtttcttccattcaaccaactggctgcattgaactctgctgcttatttgcaacaacaactaccattcagtcagctagctgctgcctacccccagcaatttcttccattcaaccaactggcagcattgaactctgctgcttatttacaacagcaacagctaccaccattcagccagctagctgatgtgagccctgttgccttcttgacacacacagttgttgccgttctacctgcacgctgcgccctacgctggcaccctcttacaactgcaacaattgctgccat

SEQ ID NO: 12996 - DNA, 691 bp, Zea mays
  unsure (1)..(691): unsure at all n locations; Clone ID: LIB3061-101-Q1-K7-B11
cccgttcgacccagcgtcctgtaccaactagcaacatagnaaagcacaatagtgtaccaacaatggcagccaaaatattttgcctccttatgctccttggtctttctgcaagtgctgctacggcgaccattttcccgcaatgctcgcaagctcctatagcttcccttcttcccccgtacctctcaccagcggtgtcttcggtgtgtgaaaacccaattcttcaaccctacaggatccaacaggcaatcgcagctggcatcttacctttatcacccttgttcctccaacaatcatcagccctattacaacagttacctttggtgcatttattggcacaaaacatcagggcacaacaactacaacaacttgtgctagcaaaccttgctgcctactctcagcaacagcagtttcttccattcaaccaactaggttcattgaactctgcttcttatttgcaacaacaacaactaccattcagccagctacctgctgcctacccccagcaatttcttccattcaaccaactagcagcattgaactctcctgcttatttacagcagcaacaactactaccattcagccagctagctggtgtgagccctgctaccttcttgacacaaccacagttgttgccgttctaccagcacgttgcgcctaacgctggcaccctcttacaactgcaacaattgct

SEQ ID NO: 12997 - DNA, 647 bp, Zea mays
  Clone ID: LIB3061-101-Q1-K7-B4
cttctatcagtaccatcaatcatcattcatcttagtagtataggcaccaaatcaaatctgcaacatcaattatctaactccaaaaaccatgaagctggtgcttgtggttcttgctttcattgctttagtatcaagtgtttcttgtacacagacaggcggctgcagctgtggtcaacaacaaagccatgagcagcaacatcatccacaacaacatcatccacaaaaacaacaacatcaaccaccaccacaacatcaccagcagcagcaacaccaacaacaacaagttcacatgcaaccacaaaaacatcagcaacaacaagaagttcatgttcaacaacaacaacaacaaccgcagcaccaccaccaacaacaacaacaacagcaccaacaacaacatcaatgtgaaggccaacaacaacatcaccaacaatcacaaggccatgtgcaacaacacgaacagagccatgagcaacaccaaggacagagccatgagcaacaacatcaacaacaattccagggtcatgacaagcagcaacaaccacaacagcctcagcaatatcagcagggccaggaaaaacacaacagcaacaatgtcattgccaggagcagcaacagactacaaggtgcagctattactactatagcag

SEQ ID NO: 12998 - DNA, 612 bp, Zea mays
  Clone ID: LIB3061-101-Q1-K7-B7
tcgacccagcgtccttttagtcttggatccgcatgttctagcagaggtaatggcactgaaggcaaccagcttaagcctaggattgatgatgaaacggctgatgctgtaaaggcttctgcttcggctgtttctgctattgccaaaacaaaccaacaactgcttgcttcaaaggatgaagaaaagaagatactagtgacgttgacacaagctctagattcccaagccaaggagttaaaatccttgaccgattcaatcggtcataccagggaacccataaatattaccagggatgataggttttctcagtaccgcccactggaagaccatgcccctactgttataaggaatggggcaattaacagttcatggagagcctctcagcaaactaacatgtatggtgtgtcaaatggcgactttggttccgtgaggtcttcatttgcgccagcacctgctgaacctacagctggatcattttcaagatcctatggcgagccgatgtccactgcacaacgaagcgataggtcttctggcagtaagccatgggagatgcattcgtattcacaacaggggcctggttatggatccaactcccatttgagtgatgatggttca

SEQ ID NO: 12999 - DNA, 340 bp, Zea mays
  unsure (1)..(340): unsure at all n locations; Clone ID: LIB3061-101-Q1-K7-B8
gtggacttatcccggntgatggaacggggggggggggggtgtttgagctgcatgcgggaaaaattcccgggccctttactcataaatttcgacatgctgatcctttggctcttcgtcttcttgagcgtttgcttgcatttgatcctaaagtccttttcttttgcagaagaggctgtgggggggggctgctttgcttcccttgctnatgtggaacgtgntgcctcttgtctcccgctttctgaacttgtgtttgtatttggttgaaagaggctggccttagatgttgttcggtgtctgttctcttcggtggttttggtgtgtcatccaccgctgctggggg

SEQ ID NO: 13000 - DNA, 532 bp, Zea mays
  unsure (1)..(532): unsure at all n locations; Clone ID: LIB3061-101-Q1-K7-C1
ctaaacccatcagggcaccagcagctgcagcaacctcgtgccctacctgtgatcaaccaagtagctctggcaaacctttctccctactctcagcaacaacaatttcttccattcaaccaactgtctacactgaaccctgctgcttatttgcagcaacaactattaccattcagccagctagctactgcctactctcagcaacaacaacttcttccatttaaccaattggccgcactgaaccccgctgcttatttgcagcagcaaatactactaccatttagccagctagctgcagcaaaccgtgcttccttcttgacacagcaacagttgctgcctttctaccagcagtttgcggctaaccccgcaaccctcttacaactacaacaattgttgccctttgtccaacttgctttgacagaccgagcggcctcctaccaacaacacatcattggtggtgccctcttttagattgcttattagttgtaattcaataataaagttttttggatgatgtatgtggccaaccagnnna

SEQ ID NO: 13001 - DNA, 691 bp, Zea mays
  unsure (1)..(691): unsure at all n locations; Clone ID: LIB3061-101-Q1-K7-C10
cccgtttcgacccagcgtccgtttagcgtccggcaacatagnaaagcacaatagtgtaccaacaatggcagccaaaatttttgcctccttatgctccttggtctttctgcaagtgctgctacggcgaccattttcccacaatgctcacaagctcctatagcttcccttcttcccccgtacctctcaccagcggtgtcttcggtatgtgaaaacccaattcttcaaccctataggatccaacaggcaatcgcagctggcatcttacctttatcacccttgttcctccaacaatcatcagccctattacagcagttacctttggtgcatttattggcacaaaacatcagggcacaacaactacaacaacttgtgctagcaaaccttgctgcctactctcagcaacaacagtttcttccattcaaccaactagctgcattgaactctgcttcttatttgcaacaacaacaactaccattcagccagctatctgctgcctacccccagcaatttcttccattcaaccaactgacagctntgaactctcctgcttatttacagcagcaacaactactaccattcagccagctagctggtgtgagccctgctaccttcttgacacaaccacaattgttgccgttctaccagcacgctgcgcctaacgctggcaccctcttacactgcaacattgctg

SEQ ID NO: 13002 - DNA, 447 bp, Zea mays
  Clone ID: LIB3061-101-Q1-K7-C11
gcgagcggcgcccttgtttttttttttatgagttataggtcaataataaagttttttgtctgatgtttgtggcttcccagaaataagaaatacatttctagattcttaaaaaaaaaaaaaaaaaaaaaaaaaaaaaaaaaaaaaaaaaaaaaaaaaaaaaaaaaaaaattttttttaaaaaaaaaaaaaaaaaaagaggagggagaaaaaaaaaaaaaaaaaaaaaaagaaaaacaaaaaaaaaaaaactaaacccgaaaaaacaaaaaaaagaatgaaaaaaaaaaaaaaaaaaaaaaaaaagggggggcgcctctttaaagtgtatgtgttctttggcgggcgcggggggcaaattttttttttttaggactcccctaaaataaaaaagcggcgggttttccaaactttttggcgaggaaaaagcctgggtgtgcccattttttt

SEQ ID NO: 13003 - DNA, 578 bp, Zea mays
  unsure (1)..(578): unsure at all n locations; Clone ID: LIB3061-101-Q1-K7-C12
tgactatcttactaacatatatgtgcgtttgaaccgcaaacggttcaaagggcgtactggagaagaagactgcagaatttctctttcaacactctaccatgttcttgtaacaacttgcgtggtgatggctccatttacaccattctttactgaagttctttatcaaaatttgcggaaggtgtcaagtaattctgaggagagcatccacttttgcaagttcccttccacaactggcgagagagatgagcgtgttgagcaaagtgtaaagaggatggtgaccataattgatcttgcacgtaatattcgtgagcggcataacaaagctctcaaaacaccactcaaggaaatggtggttgtgcatccagacaatgacttccttgaagacatcactggcaaactaaaggagtatgtcatggaggaaatcaatgttaagaatgtcactccatgtaatgaccccttgatgtatgcttctctgcgagccgagcctaatttcagcgtgctaggaaaaagacttggaaaagaatgggaaaagtatcaaatgtggtgaagaagagactcangacagatcttactttgaa

SEQ ID NO: 13004 - DNA, 484 bp, Zea mays
  Clone ID: LIB3061-101-Q1-K7-C2
tttgtttagcaagaccggcggcctcggcgacgtcctcggcggcctgccgccggccatggccgcgaacgggcaccgtgtcatggtcgtctctccccgctacgaccagtacaaggacgcctgggacaccagcgtcgtgtccgagatcaagatgggagacgggtacgagacggtcaggttcttccactgctacaagcgcggagtggaccgcgtgttcgttgaccacccactgttcctggagagggtttggggaaagaccgaggagaagatctacgggcctgtcgctggaacggactacagggacaaccagctgcggttcagcctgctatgccaggcagcacttgaagctccaaggatcctgagcctcaacaacaacccatacttctccggaccatacggggaggacgtcgtgttcgtctgcaacgactggcacaccggccctctctcgtgctacctcaagagcaactaccagtcccacggcatctac

SEQ ID NO: 13005 - DNA, 504 bp, Zea mays
  unsure (1)..(504): unsure at all n locations; Clone ID: LIB3061-101-Q1-K7-C3
ccttttcgacccacgcgttcgctaccagttacttcatgggcttccaacacctagctgtgcaagccaacatgcaacaacaagcgcttgcggcgagcgtcttacaacaaccaattgcccaattgcaacaacaatccttgccacatctaacaatacaagccatcacaacgcaacagtttctctgttcctaccagcactgagccacctagccatggtgaaccctgccgcctacttgcaagagcagctgcttgcatccaacccacttgctctggcgaacgttgttgctnaccagcttcaacaacagctacaacagtttctgcctacgctcagtcaactagccatggtgaaccctgccgccttcgttcaacaacaacaactgctttcatctagcccgctcgctgtgggcattgctcctacattcctgcaacaacaattgttgcagcngattgttccggctttgactcaactggctgtggctaaccctgttgcctacttgcacaggtgctt

SEQ ID NO: 13006 - DNA, 534 bp, Zea mays
  Clone ID: LIB3061-101-Q1-K7-C4
tctctatttcctgcggttggtcctggccctgcaaatccgccaggaggaaacctaccgatgcccagcagcatgcctccgtgggccaagtgggtggccggggccgtcatacttgtcgatcccgtatctacaggaggttcagaactttagaagatggagagttctttgaggtggccatcgaggtggtggggcggtggcggaggcggcggagaaggtcgccggcgaggtcgccggcgcgtttcccggctacgacggtctcagggaagcggccttgaagattaagacggtcgcggttgagatcgtggaagacgccgagaaagccgaggccctaattgagaaggttgacgagatcaagaatgaggtttgttcaattgtggatcctattatcgacaaggttgtcttggacaatgaatttttttgacaggtggtgaactgtagatgtaaacatttgttgggctggtctggttgggaatggtttcggttatttgttcaggtgttaaagttcttttcggtttgctaaccgctttgttttttaaa

SEQ ID NO: 13007 - DNA, 638 bp, Zea mays
  unsure (1)..(638): unsure at all n locations; Clone ID: LIB3061-101-Q1-K7-C5
cttttaaacgggtaccgcaggganaatccagcgaaatgnngcggcgccgccgccgtnncatatccagcggcctnntgaagccggagaatcggccctgacnnggcctcgctcgagnatnntctcccgtaatnncgcctaccaccgagnaaggggtcattttggaggggagcagctgcanngctgaagaaatacccattcaggagaactanttcnncaaaattcgtgatgtagaaaaaagagttnagagagtcttactttangaaatgaaactgacatctggaccaaagaaagcagcactagagcatctgaggaagaagattgaaatatcaacagagaaaatacgtttagctaaggtgaaagaggaacatgcaaaaaagacttgggaagttgctgcacaagttgttaaagacgaagaggatgctaagcagaaattatgtgatgacctaaaccatctagtccaggagagtgctgcttcccaatatgcaagattggaggagctgaagaaacgtttagaatctctaaatcccataagggattctgttaatgtgtcaggtgtttatactgcacagcatgctactctgaattcagtacctcagcaaccaactgcacaaaatcctgcagatgtaactggccgtcag

SEQ ID NO: 13008 - DNA, 267 bp, Zea mays
  Clone ID: LIB3061-101-Q1-K7-C6
gacccacgcgttcgctggcgttggagtgccatcttttacgcttacatatgagatgtactcgacaatggtgccctcataccgacatgtgtttcctagaaataatcaatatattgattgagatttatctcgctcttgaaaaaaaaaaaaaaaaaaaaaaaaaataataatatttttttttaaaaaaaattactggggggggggggagataataaaaagggtggtggttggtgtggttctgttgttgggccgtttgtctgctgcgttttt

SEQ ID NO: 13009 - DNA, 635 bp, Zea mays
  Clone ID: LIB3061-101-Q1-K7-C7
taacacacctagcgaacgcactagcaacgacctaacaacaatggctaccaagatattatccctctttgcgcttcttgccctttttgtgagcgcaacaaatgcgttcattattccacaatgctcacttgctcctagtgccattattccacagttcctccctccagttacttcaatgggcttcgaacacccagctgtgcaagcctacaggctacaacaagcgcttgcggcgagcgtcttacaacaaccaattgcccaattacaacaacaatccttggcacatctaaccatacaaaccatcgcaacgcaacagcaacaacaatttctaccagcactgagccaactagctgtggtgaaccctgtcgcctacttgcaacagcagttgcttgcatccaacccacttgctctggcaaacatagttgcataccaacaacaacaacaattgcaacagtttctaccagcgctcagtcaactagccatggtgaaccctgccgcctacctacaacagcaacaactgatttcatctagccctctcgctgtggttaatgcacctacatacctgcaacaacagttgctgcaacagattgtaccagctctgactcagctagctgtggcaaaccctgctgcctacttgcaac

SEQ ID NO: 13010 - DNA, 658 bp, Zea mays
  unsure (1)..(658): unsure at all n locations; Clone ID: LIB3061-101-Q1-K7-C8
tcgacccagcgtccttttgtcagcagcttctgcttgctctggggggaaggagagagagagagcgagagagatctagtagagaggctagctaggtggtcctcgaacgaagatgttggcggtgttcagcgggcaggtggtggaggtgccggcggagctggtggcggcgggcagtcggacgccgtcgcccaagacgaaggcgtcgcagctggtggggcgcttcctggccgcctccgagccggccgtgtccgtgcagctcggcgaccacggccacctcgcctactcccacaccaaccaggcgctcctccgccccaggtcgttcgcggcgaaggacgaggtgttctgcctgttcgagggggtgctggacaacctgggtcgtctgagccagcagcacgggctgtcaagcaagggcgccaacgaggtgctcctcgtcatcgaggcctacaagacgctgcgcgaccgcgcgccctacccggccagcttcatgctcgcccagctcaccggctcctacgccttcgtcctcttcgacaagtccaccaactccctgctcgtcgcatccgaccccgagggcagggtgccgctcttctgggggatcaccggcgacggctgcgtcgncttctccgacgacatcgacatgctcaaaggtcatgcggcaagtcgc

SEQ ID NO: 13011 - DNA, 691 bp, Zea mays
  Clone ID: LIB3061-101-Q1-K7-C9
cgacccacgcgtttctttgtagcaacaatagagcaacaatggcgaccaaggaattttccctccttatgctccttgctctttctacatgtgttgctaacgcgacaattttccctcaatgctcacaagctcctatagcttcccttcttcccccataccttccatcaatgatagcttcagtatgtgaaaacccagctcttcaaccctataggctccaacaagcaatcgcagcaagcaacatacctttatcacccttgtttcaacaatcgccagccctatctttggtgcagtcattggtacaaaccatcaaggcacagcagctgcagcaactcgtgctacctgtgatcaaccaagtagctctggcaaacctttctccctactatcagcaacaacaatttcttccattcaaccaactatctacactgaaccctgctgcttatttgcagcaacaactattaccattcagccagctagctactgcctactctcatcaacaacaacttcttccatttaaccaattggccgcactgaacctcgctgcttatttgcagcagcaaatattactaccatttagccagctagctgcagcaagccgtgcttccttcttgacacagcaacagttgctgcctttctaccagcagtttgcggctaaccccgcaaccctcttacaactacaacaattgtttgcctttgt

SEQ ID NO: 13012 - DNA, 350 bp, Zea mays
  unsure (1)..(350): unsure at all n locations; Clone ID: LIB3061-101-Q1-K7-D1
cgacccagcgttctttttgtaccagnatcaagtctactgtgtgacttactttggtcagatccaggaaaagagttcaagggtggggcatgaatgatagaggggtcttatatacctttggtgctgacaaggtttnagaattnctgcaaaggcatgatcttgatcttatttgtngagctcatcaggttgtcgaggatgggtatgaattntttgttgacagatagtttgtaaccatattctgtgtttccaattattgtggtgaatttgataatgatggcgcaatgatgagtgttgactaaacttttatgagtttctttcaaattttgaaaattgttgagagaaaacaaatttat

SEQ ID NO: 13013 - DNA, 655 bp, Zea mays
  unsure (1)..(655): unsure at all n locations; Clone ID: LIB3061-101-Q1-K7-D11
tttttaacaagcaacatagnaaagtggcacatacagtagcaacaatagnagcaacaatggncggccaagatattttccatccttatgctccttgctctttctgcatgtgttgctaacgcgaccatttttcctcaatactcacaagctcctatagctgcccttcttcccccataccttccatcaatgaccgcttcagtttgtgaaaacccagcccttcaaccctacaggctccaacaagcaatcgcaacaagcaacttacctttatcacccctgttctttcaacaatcgccagccctatctttggtgcagtcattggtacaaaccatcagggcacaacagctgcaacaactcgtgctaccagtgatcagccaagtagctctggcaaacctttctccctactctcagcaacaacaatttcttccattcaaccaactgtctacactgaaccctgctgcttatttacaacaacaacaactactaccattcagccagctagctactgcctactctcagcagcaacaatttcttccatttaaccaattggccgcactgaacccctctgcttatttccagcagcaaatactactaccatttggccagctagctacaacaagccccacttccttttttgaaacaacaacattgcttccgttct

SEQ ID NO: 13014 - DNA, 445 bp, Zea mays
  unsure (1)..(445): unsure at all n locations; Clone ID: LIB3061-101-Q1-K7-D12
tcgttgttggctcnccccgccgtcgcccggggggggggggggtgtcggcttttgccccgagcgctcggtgccgccttcgtcccatggtggctcggctccgccgtctggcttccagccgccgccgtggtccctgtgggcaccgtcgggtcatctctttttttttccaccncccacagagggggggggtggcgtctggccttcgctcacgccaacggcttccggctcacctggatcgccgtccacaccgactactcctggcgcgccaggtttgtcattcccgccgtcttccccctgcgcgccagggtcgttgcctttcacgccgactactccgggctcgccaggttcgacgttcccgccgtcgacccccggtgtccctgggtgcgttggcccctcgccgttgtcttcagggtcgacgtttccgtcgtcgacttccggtgcgcctggg

SEQ ID NO: 13015 - DNA, 392 bp, Zea mays
  unsure (1)..(392): unsure at all n locations; Clone ID: LIB3061-101-Q1-K7-D2
ccgtttcgacccagcgttctgtatagcanaacggcagtgcgtagagaggatcgtcgaacagaacagcatgaagatggtcatcgttctcgtcgtgtgcctggctctgtcagctgccagcgcctctgcaatgcagatgccctgcccctgcgcggggctgcagggcttgtacggcgctggcgccggcctgacgacgatgatgggcgccggcgggctgtacccctacgcggagtacctgaggcagccgcagtgcagcccgctggcggcggcgccctactacgccgggtgtgggcagccgagcgccatgttccagccggtccggcaacagtgcttcctgcagcagatgaggatgatggacgtgctgttctttgtgcagtatctgcatatgatgatgc

SEQ ID NO: 13016 - DNA, 611 bp, Zea mays
  unsure (1)..(611): unsure at all n locations; Clone ID: LIB3061-101-Q1-K7-D3
ggtaaatgatctaattcatggactttatcctgaggctgtaaccattggtgaagagttagtggaatgcctacatttgcccttcctgttcacgatggtggggtaggttttgactatcggatgcatatggctgtggctgacaaatggattgaccttctcaagcaaagtgatgaaacttggaagatgggtgatattgtgcacacactgacaaataggaggtggttagagaagtgtgtaacttatgctgaaagtcatgatcaagcattagtcggcgacaagactattgcgttttggttgatggacaaggatatgtatgatttcatggccctcgatagaccttcaactcctaccattgatcgtgggatagcattacataagatgattagacttatcacaatgggtttaggaggagagggctatcttaatttcatgggaaatgagtttggacatcctgaatggatagattttccaagaggtccgcaaagacttccaagtggtaagtttattccagggaataacaacagttatgacaaatgtcgtcgaagatttgacctgngtgatgcagactatcttaggtatcatggtatgcaagagtttgatcaggcaatgcaaca

SEQ ID NO: 13017 - DNA, 620 bp, Zea mays
  Clone ID: LIB3061-101-Q1-K7-D4
tttttggttcggctaggagggcaggcagaccgtagaccgagccgtgcgggggctcgggacgggaacgggacatgaccccaaaatcctagatccttcctgcccggccggccgtgcccgtcgacgcgtcgctcttgccggccgcgcctcacctacggcctgtcctgctccagggggatcggatgcgccacaggctgctcgatggtgctgtggggcttggggtacggctccctgatctggaaccccggcttcgacttcgacgacaaaattctaggctttatgaagggctacaagcgcacctttaatctcgcttgcattgaccacagtggcacaccgtagcatccggcgaggacctgcacgcttgaaaccgacgacgaggccatatgctggggaattgcatattgtgtcaagggtggttcagaaaaagagctaaaagcaatgcatttcttggcgagaagagagtgtgagttccaccagaagatttccattgatttctacaaggaaggagatcccttgaaaccagctgtgacaggcgtcttagtgttcgtttccacttcagatccaattggcaacaagtactatcttgggcctgttccttgcaggatatggcaaggcaaattgct

SEQ ID NO: 13018 - DNA, 818 bp, Zea mays
  unsure (1)..(818): unsure at all n locations; Clone ID: LIB3061-101-Q1-K7-D5
cccggtgctggnacccgtcagccttatcatattagctcattctacctccagaattggnagaaaactcgacaccatgnaaggtgccctgatcnnngttgcccnnttgctctcnnnctggcgcctcgcnntgcgagggcgccgccnnntccagtacaaaagcggcngnngctgtggggctgccagnacacccacnncgtttcaatctaccccgcctnnccgttctattatgtccgccnnntccgttctattctgcncnngccgcagnncagcagcccccgcagccattgnngcaatnnaccccacnntcaaccannccgcagnnctaagcnnnccgtgcnncagcangnnttcggaattcctngnncggcgtnncggcagnncgtcggcaagcccccgttcctttgggccccagtgcgtnncgagttccnnntgaggcannccagtgcannngcccggnncggcgacccgccctttacggcnttcgccacaaagtgcnccaggcgccttgcagcannngcagtgctttgcccaccagaatnncaggcagnngtggagnnccgctgcnnaccggtacccaaggcgaaacatacggtngnntggtcctnnngcagtccccttcccctgcagncnnagcagccccgcagnnggcgaagcctcnngcggcgcttgatttggcggcccccaggtanngcgcagcagctttgacggcgaatgtgcggccctgcaagctgcagcagnccaggtcccctgcccttgcaacgcagctngccggcggtgtctactactgaggaaactatgtactgtagtaataatgtaat

SEQ ID NO: 13019 - DNA, 594 bp, Zea mays
  Clone ID: LIB3061-101-Q1-K7-D6
cccagcgtccggcgatttcgatctcgcagccaccttttttttgttctgttgtgtatctagtagttggaggagatatgcagtttgcacttgcattggacacgaactcaggtcctcaccagataagatcttgtgagggtgatgggattgacaggttggaaaaattaagtattgggggcagaaagcaggagaaagctttgagaaataggtgctttggtggtagagttgctgcaactacacaatgtattcttacctcagatgcttgtcctgaaactcttcattctcaaacacagtcctctaggaaaaattatgctgatgcaaaccgtgtatctgctatcattttgggcggaggcactggatctcagctctttcctctgacaagcacaagagctacgcctgctgtacctgttggaggatgttacaggcttattgatatccctatgagtaactgcttcaacagtggtataaataagatatttgtgatgagtcagttcaattctacttcgcttaaccgccatattcatcgtacataccttgaaggcgggatcaactttgctgatggatctgtacaggtattagcggctacacaaatgcctg

SEQ ID NO: 13020 - DNA, 499 bp, Zea mays
  Clone ID: LIB3061-101-Q1-K7-D7
ttacaactacaacaacttgtgctagcaaaccttgctgcctactctcagcaacagcagtttcttccattcaaccaactagctgcattgaactctgcttcttatttgcaacaacaacaactaccattcagccagctacctgctgcctacccccagcaatttcttccattcaaccaactggcagcattgaactctcctgcttatttacagcagcaacaactactaccattcagccagctagctggtgtgagccctgctaccttcttgatacaaccacagttgttgccgttctaccagcacgctgcgcctaacgctggcaccctcttacaactgcaacaattgctgccattcaaccaacttgctttgacaaacccagcagcgttctaccaacaacccatcattggtggtgccctcttttagatttcttatgagttatagttcaataataaagttttttgtctgatgtttgtggcttcccagaaataagaaagtacatttctag

SEQ ID NO: 13021 - DNA, 268 bp, Zea mays
  Clone ID: LIB3061-101-Q1-K7-D8
tttttgtcgtgcttccttcttgacacagcaacagttgctgcctttctacaagcagtttgcggctaaccccgcaaccctcttacaactacaacaattgttgccctttgtccaacttgctttgacaaacccagcagcctcctaccaacaacacatcattggtggtgccctcttttagattgattattagttgtaattcaataataaagttttttggatgatgtatgtggccaaccagaaataagaagttacatttccagattctaatgtg

SEQ ID NO: 13022 - DNA, 565 bp, Zea mays
  Clone ID: LIB3061-101-Q1-K7-D9
gcgtgttcgttgaccacccactgttcctggagagggtttggggaaagaccgaggagaagatctacgggcctgtcgctggaacggactacagggacaaccagctgcggttcagcctgctatgccaggcagcacttgaagctccaaggatcctgagcctcaacaacaacccatacttctccggaccatacggggaggacgtcgtgttcgtctgcaacgactggcacaccggccctctctcgtgctacctcaagagcaactaccagtcccacggcatctacagggacgcaaagaccgctttctgcatccacaacatctcctaccagggccggttcgccttctccgactacccggagctgaacctcccggagagattcaagtcgtccttcgatttcatcgacggctacgagaagcccgtggaaggccggaagatcaactggatgaaggccgggatcctcgaggccgacagggtcctcaccgtcagcccctactacgccgaggagctcatctccggcatcgccaggggctgcgagctcgacaacatcatgcgcctcaccggcatcaccgg

SEQ ID NO: 13023 - DNA, 535 bp, Zea mays
  unsure (1)..(535): unsure at all n locations; Clone ID: LIB3061-101-Q1-K7-E10
ccgggttcgacccacgccgtcttgtcgaaccagnanatcatcagagtggcgatggccccgagcgcgtcgatgctgttcctgagctaccaccagctccacaggccgacggaggtggggacgccgccgccgccgccgcgcagggaggcggctgcccccggcggcttctggaggaggatgagcgtgagcagcgtgctctcacccgctttgttgcagtggcggccggagggggaggcgacactgcacgagcgcgacgccggcgaggagatcaagtcatcggcgccggccgacgctgataaggagctggaaagcaagttcgaggaggcgttgcgcctcagctgctggtcttcatgagcatccatccatcatggggaacggagagacgcgagcgtgccgccgaatcgaagcgacctctcctctaaacagccgtcctgtatatcttctccgtgtatcaaaatccacccttttgctttagatttttgtacatttgtaatcgtcacatccgctcaaatatgttatatatattttagtttggagc

SEQ ID NO: 13024 - DNA, 493 bp, Zea mays
  unsure (1)..(493): unsure at all n locations; Clone ID: LIB3061-101-Q1-K7-E12
tcgacccagcgttcgtattttgcggctaaccccgcaccctggttgcgaggtgggcaattgctgccattcaaccaacttgctttgacaaacccaacagcattctaccaacaacccatcattggtggtgccctcttttagatttcttatgagttatagttcaataataaagttttttgtctgatgtttgtggcttgcgcggaaataagaaagtacatttctagattcttagannnaaaaaaaaaaaaaaaaaaaaaaaaaaaaaaaaaaaaaaaaaaaaaaaaaaaaaattaaaaaaaactaaaaccccaataaaacaaaaaaatgtttttttttttaaaattcgcatcgttttctactttccttacaacatataaaaaaaaaaaaaaaaaaaaaaagggggggcccttttttgggttccttctttttacccgggtttcttgggggtttttttttttttttgtgttcccctaaaaaaaaaaccgggcccgggttt

SEQ ID NO: 13025 - DNA, 582 bp, Zea mays
  Clone ID: LIB3061-101-Q1-K7-E2
tttgcggcattttataatgcaaacttgggaataaccaagaagccaataccagatttcagcttctatgaccgttttgctccaatttatacacaacctcgacacctgccaccttcaaaggttcttgatgctgatgtgacagacagtgttattggtgaaggatgtgttattaaaaactgcaagataaaccattctgtagttggactccgatcttgcatatctgaaggtgctatcatagaggacagtttactaatgggtgcggactactatgagacagaagctgataaaaaactccttgccgaaaaaggtggcattcctattggtattgggaaaaattcatgcatcaggagagcaatcattgacaagaatgctcgaattggagacaatgttaagatactcaatgctgacaatgttcaagaagctgcaatggagacagacgggtacttcatcaaaggtggaattgtcacagtgatcaaggatgctttactccctagtggaacagttatatgaagtgaacgtgcgacatgcagctgtgtgtctcgacattcgacaatgatcagcaacctgttaccatgcgtgatctgc

SEQ ID NO: 13026 - DNA, 655 bp, Zea mays
  unsure (1)..(655): unsure at all n locations; Clone ID: LIB3061-101-Q1-K7-E4
cccgggcactagcaacgacctaacaacaatggctaccaagnaattatccctctttgcgcttcttgccctttttgtgagcgcaacaaatgcgttcattattccacaatgctcacttgctcctagtgccattattccacagttcctccctccagttacttcaatgggcttcgaacacccagctgtgcaagcctacaggctacaacaagcgcttgcggcgagcgtcttacaacaaccaattgcccaattacaacaacaatccttggcacatctaaccatacaaaccatcgcaacgcaacagcaacaacaatttctaccagcactgagccaactagctgtggtgaaccctgtcgcctacttgcaacagcagttgcttgcatccaacccacttgctctggcaaacatagttgcataccaacaacaacaacaattgcaacagtttctaccagcgctcagtcaactagccatggtgaaccctgccgcctacctacaacagcaacaactgatttcatctagccctctcgctgtggttaatgcacctacatacctgcaacaacagttgctgcaacagattgtaccagctctgactcagctagctgtggcaaaccctgctgnctacttgcaacagctgcttccattcaaccaactgactgtgtcg

SEQ ID NO: 13027 - DNA, 538 bp, Zea mays
  unsure (1)..(538): unsure at all n locations; Clone ID: LIB3061-101-Q1-K7-E5
cccggtgtcgacccaacgcgtccgttgtctggggtgtntgctgtgctggtgggtgtgccacataaggacgctgagttcaagacccacccgatgaacttcctgaacgaaaggaccctgaaggggaccttctttggcaactacaagccacgcactgatctgccaaatgtggtggagctgtacatgaaaaaggagctggaggtggagaagttcatcacgcacagcgtcccgttcgccgagatcaacaaggcgttcgacctgatggccaagggggagggcatccgctgcatcatccgcatggagaactagatttcgctgtctagtttgtgatctggcctgggcttggggttaataaaagaggcaatgctagcctgccctttcgatgaggaggtacatacacgctggcgatggaccgcgcttgtgtgtcgcgttcagtttggcttttgccaagcagtagggtagcttcccgtgtcggtaattatatggtatgaaccatcaccttttggctctacatggtatgaacgtaagatacaaattccaa

SEQ ID NO: 13028 - DNA, 424 bp, Zea mays
  unsure (1)..(424): unsure at all n locations; Clone ID: LIB3061-101-Q1-K7-E6
ccgggttcgacccacgccgtcctttagcttaccgcaccaacccctgtggncgtctccgctgccattccgccctactactgattcatgatgatggcgcagaacatgccggccatgggtggactctaccagtaccagctgcccagctaccgcaccaacccctgtggcgtctccgctgccattccgccctactactgattcatgatatttgggaaatctcctctatccatctctctctatctatatatgtaataatgcagtaagacgacacacattatcatgtgtggtatgaccaataatatatgcatggtcataataaagttttggttttaatgaaaaaaaaaaaaaaaaaaaaaaaaaaaaaaaaaaaaaaaaaaaaaaaaaaaaaaaaaaaaaaaaaaaaaaaaaaaaaatanaaaaaaataaa

SEQ ID NO: 13029 - DNA, 627 bp, Zea mays
  Clone ID: LIB3061-101-Q1-K7-E7
cacatagagagtagaatccattagcaacaatagagcaacaattgcgaccaagatattttccctccttatgctccttgctctttctacatgtgttgctaacgcgacaattttccctcaatgctcacaagctcctatagcttcccttcttcccccataccttccatcaattatagcttcagtatgtgaaaacccagctcttcaaccatataggcttcaacaagcaatcgcagcaagcaacatacctttatcgcccttgttgtttcaacaatcaccagccctatctttggtgcagtcattggtacaaaccatcagggcacaacagctgcagcaactcgtgctacctgtgatcaaccaagtagctctggcaaacctttctccctactctcagcaacaacaatttcttccattcaaccaactgtctacactgaaccctgctgcttatttgcagcaacaactattaccatttagccagctagctactgcctactctcagcaacaacaacttcttccatttaaccaattggccgcactgaaccccgctgcttatttgcagcagcaaatactactgccatttagcgagctagctgcagcaagtcgtgctttcttcttgacacagcaacagttgct

SEQ ID NO: 13030 - DNA, 374 bp, Zea mays
  Clone ID: LIB3061-101-Q1-K7-E8
ttactgcctactctcagcaacaacaacttcttccatttaaccaattggccgcactgaaccccgctgcttatttgcagcagcaaatactactaccatttagccagctagctgcagcaaaccgtgcttccttcttgacacagcaacagttgctgcctttctaccagcagtttgcggctaaccccgcaaccctcttacaactacaacaattgttgccctttgtccaacttgctttgacagacccagcggcctcctaccaacaacacatcattggtggtgccctcttttagattgcttattagttgtaattcaataataaagttttttggatgatgtatgtggccaaccagaaataagaagttacatttccagattct

SEQ ID NO: 13031 - DNA, 626 bp, Zea mays
  Clone ID: LIB3061-101-Q1-K7-F10
gaccattagctttatctactccagagcgcagaagaacccgatcgacaccatgagggtgttgctcgttgccctcgctctcctggctctcgctgcgagcgccacctccacgcatacaagcggcggctgcggctgccagccaccgccgccggttcatctaccgccgccggtgcatctgccacctccggttcacctgccacctccggtgcatctcccaccgccggtccacctgccgccgccggtccacctgccaccgccggtccatgtgccgccgccggttcatctgccgccgccaccatgccactaccctactcaaccgccccggcctcagcctcatccccagccacacccatgcccgtgccaacagccgcatccaagcccgtgccagctgcagggaacctgcggcgttggcagcaccccgatcctgggccagtgcgtcgagttcctgaggcatcagtgcagcccgacggcgacgccctactgctcgcctcagtgccagtcgttgcggcagcagtgttgccagcagctcaggcaggtggagccgcagcaccggtaccaggcgatcttcggcttggtccttcagtccatcctgcagcagcagccgcaaagcggcccagtcgcgggggctg

SEQ ID NO: 13032 - DNA, 570 bp, Zea mays
  unsure (1)..(570): unsure at all n locations; Clone ID: LIB3061-101-Q1-K7-F11
tgtattgtgtngagtacgaccagaaagactgcatggatttctacaaggaaggagatcccttgaaaccagctgtgacaggcgtcttagtgttcgtttccactccagatccaattggcaacaagtactatcttggccctgctcctttgcaggatatggcaaggcaaattgctacagccaatggccctactggctataatagggattacctgttctcaatggagaaggcattagccagcattagccacgaagatgattcgatcatagagcttgcaaacgaggtgaggaaggtgctcaacagaacaaaggagaccaagatcactggtgccaatgcttccctgaaatcacatgcccctcttgtgcacctgtccgcgcttccagaaggcaccgttgtggactcgagatagcgagagccttggacgttggacctctactcggaatctacttccagctcttgcatgtttgtggccatcatgtactgattttcccttttcaacagttgtcgtgaggctgtatcttctggagttaaaaaaatgctaaaagccggcactaataatgatattaacttgaaaa

SEQ ID NO: 13033 - DNA, 561 bp, Zea mays
  Clone ID: LIB3061-101-Q1-K7-F2
acccagcgttctttctccctacctggtgaaccctgccgcctacttgcaagagcagctgcttgcatccaacccacttgctctggcgaacgtagttgcaaaccagcaacaacaacagctacaacagtttctgccaacgctcagtcaactagccatggtgaaccctgccgtctacgtacaacaacaacaactgctttcatctagcccgctcgctgtgggcaatgcacctacatacctgcaacaacaattgttgcaacagattgtaccagctctgactcaactagctgtggcaaaccctgttgcctacttgcaacagctgcttccattcaaccaactgactctgtcgaactctgctgcgtacctacaacagcgacaacagttacttaatccattggtagtggctaacccattggtcgtcgtcttcctacagcagcaacaattgctgccatacaaccagttctctttgatgaatcctgtcttgttgaggcagcaacccatcgttggaggtgccatcttttagattacatatgagatgttctcgataatggtgccctcataccgacg

SEQ ID NO: 13034 - DNA, 634 bp, Zea mays
  unsure (1)..(634): unsure at all n locations; Clone ID: LIB3061-101-Q1-K7-F3
ttttctagnaagcacaatagtgtaccaacaatggcagccaaaatattttgcctccttatgctccttggtctttctgcaagtgctgctacggcgaccattttcccgcaatgctcgcaagctcctatagcttcccttcttcccccgtacctctcaccagcggtgtcttcggtatgtgaaaacccaattcttcaaccctacaggatccaacaggcaatcacagctggcatcttacctttatcacccttgttcctccaacaatcatcagccctattacatcagttacctttggtgcatttattggcacaaaacatcagggcacaacaactacaacaacttgtgctagcaaaccttgctgcctactctcagcaacagcagtttcttccattcaaccaactagctgcattgaactctgcttcttatttgcaacaacaacaactaccattcagccagctacctgctgcctacccccagcaatttcttccattcaaccaactggcagcattgaactctcctgcttatttacagcagcaacaactactaccattcagccagctagctggtgtgagccctgctaccttcttgatacaaccacagttgttgccgttctaccagcacgctgcgcctaacgctggca

SEQ ID NO: 13035 - DNA, 600 bp, Zea mays
  unsure (1)..(600): unsure at all n locations; Clone ID: LIB3061-101-Q1-K7-F4
tcgacccacgccgtccgtgtgtttgaatggnaagnaaattnngtctacactgnnaaccctgctnnngcttatttaccaacnnaacaacaannntactaccatnntcagccagcntnnagctactggcctacnntctcagcagcaacaatnnttcttccattttanaaccaattggnnccgcactgnannacccctctgnncttatttcnncagcagcaaatactanctacnncatttggccagctagctacaacaaggcccnncacttcctttttgaaacaacaacaattgncttccgttctaccagcagtttgtggctaaccccgcaaccctcttacaactgcaacagttgctgccctttgtccaacttgctttgacaaacccagcagccttctaccaacaacacatcattggcggtgccatcttttagattgcttattagttgtaattcaataatgaagttttttggctgatgtatgtggcctcctagaaataagaagttacatttccaaattctaatgtgctattggcctgcaagggtgttcgataattattttccctaagattgggaagcaagctataaatcatccttatagtgtg

SEQ ID NO: 13036 - DNA, 601 bp, Zea mays
  unsure (1)..(601): unsure at all n locations; Clone ID: LIB3061-101-Q1-K7-F6
gcgattgcagtaaggcgtgtgcgcaagnaagatttgcgacatgttgccaaagccactggtgcaactatggtgtctacttttgcggacatggaaggtgaagaaacattcgattcatcattccttggccatgctgatgaagttgtggaggaaagaattgctgacgatgatgttattctggtgaaaggcacaaagaacaccagcgcggtctctataatacttaggggcgcaaatgactacatgcttgatgagattgaacggtccttgcatgatgccctgtgcattgtgaagagaaccctggaatcaaatatggttgttgctgggggtggtgcagttgaagctgcgctgtcagtttatctggagaaccttgcaacaaccctgggttctcgggaacaattggcaattgctgaatttgctgagtctttgttaatcataccaaaggtactatctgttaatgctgcaaaagatgcaactgagcttgtagcaaagcttagggcatatcatcatactgctcaaacaaaggccgacaagcaacattattcaagtatgggccttgacctctctaanggtatcattcgcaacaaccttgagtatggcgtgatag

SEQ ID NO: 13037 - DNA, 638 bp, Zea mays
  unsure (1)..(638): unsure at all n locations; Clone ID: LIB3061-101-Q1-K7-G1
aagcaacatagaaagtggaatccagtagcaacaatagagcaacaatggcgaccaagatattttccctccttatgctccttgctctttctacatgtgttgctaacgcgacaattttccctcaatgctcacaagctcctatagcttcccttcttcccccataccttccatcaattatagcttcaatatgtgaaaacccagctcttcaaccatataggcttcaacaagcaatcgcagcaagcaacatacctttatcgcccttgttgtttcaacaatcgccagccctatctttggtgcagtcattggtacaaaccatcagggcacaacagctgcagcaactcgtgctacctctgatcaaccaagtagctctggcaaacctttctccctactctcagcaacaacaatttcttccattcaaccaactgtctacactgaaccctgctgcttatttgcagcaacaactattaccatttagccagctagctactgcctactctcagcaacaacaacttcttccatttaaccaattggccgcactgaaccccgctgcttatttgcagcagcaaatactactaccatttagccagctagctgcagcaaaccgtgcttncttcttgacacagcacagttgctgcctttta

SEQ ID NO: 13038 - DNA, 666 bp, Zea mays
  Clone ID: LIB3061-101-Q1-K7-G10
cccggtctttttgtgagcgcatcaaatgcgttcattattccacaatgctcacttgctcctagtgccattataccacagttcctccgaccagttacttcaatgggcttcgaacacctagctgtgcaagcctacaagctacaacaagcgcttgcggcgagcgtcttacaacaaccaattaaccaattgcaacaacaatccttggcacatctaaccatacaaaccatcgcaacacaacagcaacaacagttcctaccagcactgagccaactagatgtggtgaaccctgtcgcctacttgcaacagcaggtgcttgcatccaacccacttgctctggcaaacgtagctgcataccaacaacaacaacaattgcaacagtttctgccagcgctcagtcaactagccatggtgaaccctgccgcctacctacaacagcaacaactgctttcatctagccctctcgttgtgggtaatgcacctacatacctgcaacaacaattgctgcaacagattgtaccagctctgactcagctagctgtggcaaaccctgctgcctacttgcaacagctgcttccattcaaccaactgactgtgtcgaactctgctgcgtacctacaacagcgacaacagttacttaatccactagcagtgcctaacccattggtcact

SEQ ID NO: 13039 - DNA, 608 bp, Zea mays
  Clone ID: LIB3061-101-Q1-K7-G11
ccggttcgacccagcgtccttttggcggtgctcatgggctccaatggcctcaccaagggatccctcgccttcctcaattaccctgcacagatcatgttcaagtcaaccaaggttctaccggtgatggtgatgggagccttcatccctggtctgaggcgcaagtacgcgttccaagagtacgtgtcggccgtgatgctcgtcgtcggcctcatactcttcacgctcgcggacgcgcagacgtcgcccaacttcagcatggccggcgtggccatggtgtccggggcgctcgtcatggatgctttccttggcaacctgcaagaagcaatcttcaagatgaacccggacacgactcagatggagatgctgttctgctccactgtcgttggccttccgttcctagcggtgcccatggtgttaacaggagagctcgtgacggcttggacttcctgctcccagcatctgtacgtgtacgcggtgctggtgttggaggcgatggccacgttcgtcggccaggtctccgtgctctccctcatcgcgcttttcggtgcagcaaccacagccatggtgacgacggcgaggaaggcggtgacgctgctgctgtcgtacct

SEQ ID NO: 13040 - DNA, 509 bp, Zea mays
  Clone ID: LIB3061-101-Q1-K7-G3
atctgtttccgcatcggcagcgttctctgcagcggcgatgccgctcctcgagattcttgagcttgggattgtatcgcactcagtgatcatcgggctatctttgggcgtctcacagaatccttgcaccatcaaacctctaggtgctgctctctccttccaccagttttttgagggctttgcattgggcggctgcatttccgaggctcagttcaagagtttctctgcactccttatggctttcttcttcgctatcacaacacctgctgggattaccgtggggtctggtatcgcgttgttctacaatcccaacagccctagggcacttgtggtagagggaattctggattccatttcggctggtattctgatctacatggccttggtggacctcatcgcagctgattttctcagcaagaggatgagctgtaacttgaggcttcaagccggctcatacattgccttgttccttggtgccatggccatggcatctctagccaatctggcttatc

SEQ ID NO: 13041 - DNA, 476 bp, Zea mays
  Clone ID: LIB3061-101-Q1-K7-G4
tttttcctacttgcaacagtaggtgcttggatgcaacccacttgctctggcaaacgtagctgcataccaacaacaacaacaattgcaacagtttctgccagcgctcagtcaactagccatggtgaaccctgccgccttcctacaacagcaacaactgctttcatctatccctctcgtggggggtggatgcacctacatacctgcaacaacaattgctgcaacagattgtaccagctctgactcagctagctgtggcaaaccctgctgcctacttgcaacagctgcttccattcaacctactgactgtgtcgaactttgctgcgtacctacaacagctacaacagttacttaattcactagcagtgcctaactcattggttacttgtctttcttcagcagcagcaattgctaccatacagcctgttttctttgatgaaccctgactcgggtcggcagctacccatcgttggaggtgc

SEQ ID NO: 13042 - DNA, 600 bp, Zea mays
  Clone ID: LIB3061-101-Q1-K7-G5
gtttctgccatcactgagccacctagccgtggtgaaccctgtcacctacttgcaacagcagctgcttgcatccaacccacttgctctggcgaacgtagctgcataccagcaacaacaacagctgcaacagtttatgccagtgctcagtcaactagccatggtgaaccctgccgtctacctacaactactttcatctagcccgctcgcggtgggcaatgcacctacgtacctacaacaacagttgctgcaacaaattgtaccagctctgactcagctagctgtggcaaaccctgctgcctacttacaacagttgcttccattcaaccaactggctgtgtcaaactctgctgcgtacctacaacagcgacaacagttacttaatccattggcagtggctaacccattggtcgctaccttcctgcagcagcaacaacaattgctgccatacaaccagttctctttgatgaaccctgccttgcagcaacccatcgttggaggtgccatcttttagattacatatgagatgtactcgacaatggtgccctcataccgacatgtgtttcctagaaataatcaatatattgattgagatttatctcg

SEQ ID NO: 13043 - DNA, 622 bp, Zea mays
  Clone ID: LIB3061-101-Q1-K7-G6
atagaaacacaatagtgtaccaacaatggcagccaaaaattttgcctccttatgctccttggtctttctgcaagtgctgctacggcgaccattttcccgcaatgctcgcaagctcctatagcttcccttcttcccccgtacctctcaccagcggtgtcttcggtatgtgaaaacccaattcttcaaccctacaggatccaacaggcaatcacagctggcatcttacctttatcacccttgttcctccaacaatcatcagccctattacatcagttacctttggtgcatttattggcacaaaacatcagggcacaacaactacaacaacttgtgctagcaaaccttgctgcctactctcagcaacagcagtttcttccattcaaccaactagctgcattgaactctgcttcttatttgcaacaacaacaactaccattcagccagctacctgctgcctacccccagcaatttcttccattcaaccaactggcagcattgaactctcctgcttatttacagcagcaacaactactaccattcagccagctagcttggtgtgagccctgctaccttcttgatcaaccacagttgttgccgttctaccgcacgctgcgcctaacgc

SEQ ID NO: 13044 - DNA, 633 bp, Zea mays
  Clone ID: LIB3061-101-Q1-K7-G7
cataccatagtgaagtacactagcaacatcttagcaccaatggcagccaagatttttgcgctccttgccctccttgctctttcagcaagtgttgctaccgcgactattattccacaatgctcacaacaatacctctctccagtgatagccgcgagatttgaatacccatctatacaatcctacaggctacaagaggccatcacagcaagcatcttacggtcgttagcattgaccgtccaacaaccatatgccctattgcaacaaccatccttagtgaatctgtatctccaaagaatcacagcacaacaactacaacaacggttgcttccaacaattaatcaagtagttgcagcgaaccttgctgcttaccttcagcaacaacaatttcttccattcaatcaactagctggggtgaaccctgctgcttacttgcaggcacaacagctactaccattcaaccaacttgtcgggagccctgctgccatcttattgcagcaacagttgctgccattccgtctacaagttgttgcaaacattgctgctttcttgcaacaacaacaattgctgccattttacccacaggttgtgggaaacattaacgccttcttgcacaacacaattgctgccattcta

SEQ ID NO: 13045 - DNA, 655 bp, Zea mays
  unsure (1)..(655): unsure at all n locations; Clone ID: LIB3061-101-Q1-K7-G9
gtgggggtgatggtttagtaaatgattgggtatctgcttccactgcctcagaatacgatgaagacatggaagatgggcgggatctggtagtaggatcttctgatgatttcaaaaagtctcgaatgggttatctttcttcatatgatgattttgttgaggatgaggtttttgctgaacaagaacaatcactacgcagctcaattccaaacccacctgcaaatttcagaccgagagaagatcaactgactggaagagcgccacgttctttcttttccctgtcaacattccgaagcaagggaggtgatgccaggctcaggtgatcctcagaaagacagaagacaccagaggtggagtgtataaaatatcttccgaggttaggtatgagtatcaaattttcagggcggtacgcggacgctgctagcttgtgattataaatatataaatatatatgttgtgtatctatggcaattcatataagctaccagttgagccccccattgttactgtttgattattctttttccgtaatattcttttacctcctgtgtagagttggacttagagatctttttgcagtctgttcttccaactggcccaaaactactgtatttttcgntgtttttgtgatataatatgtatctcctcttgtttcttc

SEQ ID NO: 13046 - DNA, 158 bp, Zea mays
  Clone ID: LIB3061-101-Q1-K7-H1
ggttcatctgccgccggcaccatgccactaccctactcaaccgtcctggcctaagcctcatccccagccacacccatgcccgtgccaacagccgtatccaagcccgtgccagctgcagggaacctgtggcgttggcagcaccccgatcctgggccagt

SEQ ID NO: 13047 - DNA, 637 bp, Zea mays
  unsure (1)..(637): unsure at all n locations; Clone ID: LIB3061-101-Q1-K7-H11
tttctcctatagcttcccttcttcccccataccttgcatcaattatagcttcagtatgtgaaaacccagctcttcaaccatataggcttcaacaagcaatcgcagcaagcaacatacctttatcgcccttgttgtttcaacaatcaccagccctatctttggtgcagtcattggtacaaaccatcagggcacaacagctgcagcaactcgtgctacctgtgatcaaccaagtagctctggcaaacctttctccctactctcagcaacaacaatttcttccattcaaccaactgtctacactgaaccctgctgcttatttgcagcaacaactattaccatttagccagctagctactgcctactctcagcaacaacaacttcttccatttaaccaattggccgcactgaaccccgctgcttatttgcagcagcaaatactactgccatttagcgagctagctgcagcaagtcgtgcttccttcttgacacagcaacagttgctgcctttctacaagcagtttgcggctaaccccgcaaccctcttacaactacaacaattgttgccctttgtccaacttgctttgacaaacccagcagcctnctaccaacaacacatcattggntggtgccctctttt

SEQ ID NO: 13048 - DNA, 122 bp, Zea mays
  Clone ID: LIB3061-101-Q1-K7-H2
ccagcgtccgttttcatctgccgctgacaccatgccacttgcttactcaaccgtctttgactcagtcttattcctagccacacccatgcccgtgccaacagccgctttcaaacccgtgccaa

SEQ ID NO: 13049 - DNA, 260 bp, Zea mays
  Clone ID: LIB3061-101-Q1-K7-H3
tcggttaccaactagcaacatagtaaagcacaatagtgtaccaacaatggcagccaaaatattttgcttccttatgctccttggtctttctgcaagtgctgctaccgcaaccattttcccacaatgctcacaagctcctatagcttactttcttcccccattcctatcaccagcggtgtcttcagtatgtgaaaacccaattctttaaccctactagatccaacaggcaattttagctggcatattacctttatcaacct

SEQ ID NO: 13050 - DNA, 458 bp, Zea mays
  Clone ID: LIB3061-101-Q1-K7-H4
taagctcctatagcttcccttcttcccccataccttccatcaatgatagcttcagtatgtgaaaacccaattcttcaaccctataggatccaacaggcaatcgcagctggcatcttacctttatcacccttgttcctccaacaatcatcagccctattacagcagttacctttggtgcattgattggcacaaaacatcagggcacaacatctacaacaacttgtgctagcaaaccttgctgcctactctcagcaacaacagtttcttccattcaaccaactagctgcattgaactctgcttcttatttgcaacaacaacaactaccattcagccagctatctgctgcctaccctcagcaatttcttacattcaaccaactgacagcttgtgaactgtcctgcttatttacagtatcaacaactactatcatttagccagctagctggtgtgagccctg

SEQ ID NO: 13051 - DNA, 150 bp, Zea mays
  unsure (1)..(150): unsure at all n locations; Clone ID: LIB3061-101-Q1-K7-H5
tttcgagtttcntgaggctcactgcaggccgacggcgacgccctactgctcgcctcagtgccagtcgttgcggcagcagtgttgccagcagctcaggcaggtggagccgtagcaccggttccaggcgatctttggattggtcctgcagtc

SEQ ID NO: 13052 - DNA, 588 bp, Zea mays
  Clone ID: LIB3061-101-Q1-K7-H6
ttcgacccagcgtccttttccttactatactattcttctattgatcttgctgggaggttgccttcgaataacaccaaaagcccaaagctccaaagaagctacagtaataatgattcgcggtcagcaaagagtcgtttacgcatccctgttaagggtcgcatacagctggtggtaagcaacccagagaagactccacttcatactttcttctgcaactatgacttgagtgacatgcctcctggaaccaagactttcgtgcggcaaaaggtcactctctccccctctgccttgccttctaatccagtggaagaaggaagcaagacttgtgatgttaattctggtcacaaatcttctcagtcagtttcatgtggaaatgaacctagcgaacggggagctcgttctgaatgctgcaacggtggacagaactgcaactcaaatgatgaatcagaaaaggagatctgaaaacaagatgtcgatcattggatagtgattctaatgaatcaaataagtctagttctccaggaaataagtaagaccagtctgattctgatggttgctgctgtcaaatggataagtttggcatgggag

SEQ ID NO: 13053 - DNA, 633 bp, Zea mays
  unsure (1)..(633): unsure at all n locations; Clone ID: LIB3061-101-Q1-K7-H7
gggctttcttctagacgagctcttctggttccttaagtttgtgggccgtggctatttaatctccaactgcatccccagatattcaccaaattctgtgagactgggaactccgggattggtttggataaggtgttctgggaatggggaaccaatgcccaaacgggacccttgggagtgactactacaaccgccccgcttccaggttcgctgatggttgccttgaggacgatcgctactctgacttgaagaagtttgacaagccatggcctgaggtgaactcgtttaagcccactgctgttggtattttgaagaggggattggatccaacgtcaatcactgtccttgaaaggaagacggccgacgtaagggaacattatatcatcggtcggaggcttggtcaaggccagtttggcacaacattcctctgcaccgagatcagtacagggtgtgagtatgcatgcaagacaatcccaaagcgaaagctcatcaccaaggaggatgttgaggatgtgcgccgtgagatccagataatgcaccatttgtcaggccacaagaatgttgtttccatcaaggatgtatacgaggatgggcnagcggtgtatattgtgatggagctctgcgccggtggggagc

SEQ ID NO: 13054 - DNA, 270 bp, Zea mays
  Clone ID: LIB3061-101-Q1-K7-H8
gtcgacccagcgtccttatgcatggtttgtatattccgtataaccagtagttggtaagctatgtgtgtgtatggatgtactagctagtacatgcaccgtatcattgcatgtgtggtatatgtctcgtttggtgttagtaatctgcttggttgtgctgatgactgatggttgtaagaagcagattcgagtttggtacaatattatcgtgaacctatatattatatatatgttaattatagtatgttgtttaattatatgaacttgattgcc

SEQ ID NO: 13055 - DNA, 116 bp, Zea mays
  Clone ID: LIB3061-101-Q1-K7-H9
cgacccacgcgtttggtggtgagttatagttcaaaaatccgggggggggggggggggaaatggctgcccggggatgtggggtacttttgttacttggtctttctgcaagtgctgcg

SEQ ID NO: 13056 - DNA, 575 bp, Zea mays
  Clone ID: LIB3061-102-Q1-K7-A1
attttgagcattcagaaacacacctagcgaagcgcactagcaacgacctaacaacaatggctaccaagatattatccctctttgcgcttcttgccctttttgtgagcgcaacaaatgcgttcattattccacaatgctcacttgctcctagtgccattattccacagttcctccctccagttacttcaatgggcttcgaacacccagctgtgcaagcctacaggctacaacaagcgcttgcggcgagcgtcttacaacaaccaattgcccaattacaacaacaatccttggcacatctaaccatacaaaccatcgcaacgcaacagcaacaacaatttctaccagcactgagccaactagctgtggtgaaccctgtcgcctacttgcaacagcagttgcttgcatccaacccacttgctctggcaaacatagttgcataccaacaacaacaacaattgcaacagtttctaccagcgctcagtcaactagccatggtgaaccctgccgtctacctacaacagcaacaactgatttcatctagccctctcgctgtggttaatgcacctacatacctg

SEQ ID NO: 13057 - DNA, 652 bp, Zea mays
  unsure (1)..(652): unsure at all n locations; Clone ID: LIB3061-102-Q1-K7-A11
cccagcgtccgccgccgccatcgcttcaagcagcgaaccctagccgccctcagcgacggattgcagatctcccagccatgacgttcaagcggaggaacggcggacgcaacaagcacgggcgcggccacgtcaagtacatacgctgctccaactgcgccaagtgctgtccaaaggataaggctatcaagcggttcttggtgaggaacattgttgagcaggctgctgtgagggacgtgcaggaggcttgtgtgcatgatggatatgttcttcccaaattgtacgcaaaggttcatcactgtgtctcatgcgcaatccatgcgcacattgtccgtgtccgctctcgtgagaacaggaggaaccgtgagcccccgcagcgtttcaggcgccgggatgatggcccaaggccaggtcagggcccaccgcgcccaggtgctgctgccacagcagctccccctgctgccgctcctcgtacctaagttcaggaatgcgtttcagggcttagttctctcacctatgggataatggactnttcctgttttgaaaaccaagtactgtacccccttgatgtcaaaaatttagcacaatttggggggtcgttcttttgtcatccagtcagtggctgcgttgatttatgacttcattgatttttttt

SEQ ID NO: 13058 - DNA, 133 bp, Zea mays
  Clone ID: LIB3061-102-Q1-K7-A9
ttcgacaccatgagggtgttgctcggtgcgctgggtgtcctggctctcgctgcgagcgccacctccacgcatacaagcggcggctgcggctgccagccaccgtccccggttcatctaccgttgtcggtgcttt

SEQ ID NO: 13059 - DNA, 665 bp, Zea mays
  Clone ID: LIB3061-102-Q1-K7-B1
ccgccagcccggacggctataaagacgaggccctatctcgaaatcgacggcgatgaagaagaccagttcccctctcctgatcgtcctgttcctcacagcagcagccatggcggccgagccggagaagcaggcggcccccgcggcacaggagacggccgtgcacatcgtgtacgttgaccgccccgaggacgccgaccctgaggagttccacatccgcaccctcacccccgtcctcggcagcgaacagaaggccagggacgcagtgctctaccactacaagaacgccgccagcggcttctccgcgaagctcaccccccagcaggtcaaggatctcaaggagcaaccaggtgttctccaggttgtgccgagccagacttaccagctacatggccctgggtctggcactcaccagggcacgacacacaccttgggccttatgtgaaggcgtatgagaatcaaaaagactttgtttagtatggctgtatggcacaggtctgacgaatgtgtatagtacagtactatgtaagaataagggacggatcgtctatatactgctttgcgcatgctcagccctgttctaaagctggaatgcaccaatgcgtatgttttcaaacaatgacaagtatgctatctttgtttgctgctaaaaaaaaaaaaaagggcgg

SEQ ID NO: 13060 - DNA, 649 bp, Zea mays
  Clone ID: LIB3061-102-Q1-K7-B11
caatccttgccacatctaacaatacaagccatcacaacgcaacagcaacaacagttcctaccagcactgagccacctagccatggtgaaccctgccgcctacttgcaagagcagctgcttgcatccaacccacttgctctggcgaacgtagttgcaaaccagcaacaacaacagctacaacaggttctgccaacgctcagtcaactagccatggtgaaccctgccgcctacgtacaacaacaacaactgctttcatctagcccgctcgctgtgggcaatgcacctacatacctgcaacaacaattgttgcaacagattgtaccagctctgactcaactagctgtggcaaaccctgttgcctacttgcaacagctgcttccattcaaccaactgactctgtcgaactctgctgcgtacctacaacagcgacaacagttacttaatccattggtagtggctaacccattggtcgccgccttcctacagcagcaacaattgctgccatacaaccagttctctttgatgaatcctgtcttgtcgaggcagcaacccatcgttggaggtgccatcttttagattacatatgagatgtactcgataatggtgccctcataccgacgtgtgtttcctagaaataatcaatatattg

SEQ ID NO: 13061 - DNA, 661 bp, Zea mays
  Clone ID: LIB3061-102-Q1-K7-B7
gcacctcgggtctgctgcagcgcctcgtctctgtggtctggcatcagagtccccgggagaagagaatggttgctctgtcggcaggagcgctggctccgctcgcaggttgcaaccgctcaagcttaacttcacccccttgatgtatcgtctttcttggttgcctcgttcgttactcttccccgaattcctttcgttctcaggtctgtctccgctgccgtcgtgcagcgcggctccgttgtactgccgcaggagtccgccacttctcaaggtcgccatcgctaagacgcggccagctgttcaccaatctgctcctgcaagcttccgaaaatgtgcagctatgtcagaacatggacgtcaggaactccggaccaatgagtaccagctggatgatgatgatgagccgttttggctggcagtggtcagagaccttgctgtggattggtagctttcttagctgagcagccgaggcaactgaagcacctggagtggccgggctttctacacacgctgaagacggccacacttactcttgtattggtagctatgtttattgttgcattatcaactattgatgctgccctctgctacatgctgggcctgctacttcgaaaatctgcctagaataatgctggaatatccatgtattgcttgaatatgattt

SEQ ID NO: 13062 - DNA, 314 bp, Zea mays
  unsure (1)..(314): unsure at all n locations; Clone ID: LIB3061-102-Q1-K7-C1
tacatanaagtggaatccagtagcaacaataggagcaacaatggcgaccaagatactttccctccttatgctccttgctctttctgcatgtgttgctaacgcgacaattttacctaaatgctcacaagctcctatagcttcccttgttaccccatacctttcatcaatgatagcttcagtatgtgaaaacccagctcttgaaccctattggcttcaacaagcaatcgcagtaagcaacatacctttattacccttgttggaacaattgacagtcctatctttggtgcaaggattggtacaaaccttaaaggata

SEQ ID NO: 13063 - DNA, 291 bp, Zea mays
  Clone ID: LIB3061-102-Q1-K7-C11
ttttccgcttacaaaccctagcctctactgctgtgagcttccaccgctccgttccccatggaggacgaggacaccggccccggcgatgggggcgaggcctctcctccgcaccacgtcgcggcgtttagcgtccgggcgcgcgacatggtggcgttcccgtccagctcgcgctctgtgacgcaggcggtgaacgggtcccaccggttcgtgatccatggctactctttctcttaggtcattggtcttgggaatcacatttgcagtgtgacatttaccgttgggcggttgtcc

SEQ ID NO: 13064 - DNA, 523 bp, Zea mays
  unsure (1)..(523): unsure at all n locations; Clone ID: LIB3061-102-Q1-K7-C12
ttcagcaagnaatggtctttgaagcctcagattgcttcagtgggctcctgctgccttgttggtgtaatctgtgctgggactctctatgttgcaaacctgggtgactcacgtgcagttcttggaaggcttgttaaggcaactggagaggtcgtggccatgcagttgtcatcggagcacaatgcgtgctatgaggaagttagacaagaactgcagtcatcacatcctgacgatccacatattgtggttctcaaacacaatgtttggcgagtgaagggtctcatccagatctcaagatctattgaagatgtatgtctaaagaaaccagagttcaacaaagaaccacttcacagcaagtttcggctttgagaaacctttcataggccgatccttagttctgaacctcaaattactgtacattgaattcagccaaatgatcaatttgttatatttgcttctgatggtctatgggagcaccttcatcaataaggaaacaatttacctttttcaaagtagtgcacacaat

SEQ ID NO: 13065 - DNA, 590 bp, Zea mays
  unsure (1)..(590): unsure at all n locations; Clone ID: LIB3061-102-Q1-K7-C2
gtggccatcacagcaagcatcttacggtcgttagcattgaccgtccaacaaccatatgccctattgcaacaaccatccttagtgaatctgtatctccaaagaatcacagcacaacaactacaacaacggttgcttccaacaattaatcaagtagttgcagcgaaccttgctgcttaccttcagcaacaacaatttcttccattcaatcaactagctggggtgaaccctgctgcttacttgcaggcacaacagctactaccattcaaccaacttgtcgggagccctgctgccatcttattgcagcaacagttgctgccattccgtctacaagttgttgcaaacattgctgctttcttgcaacaacaacaattgctgccattttacccacaggttgtgggaaacattaacgccttcttgcaacaacaacaattgctgccattctacccacaggatgtggcaaacattgtcgccttcttacaacaacagcaattgctgccatttagccaactcgctttgacgaatcctaccaccttattgcatcagcccaccattgggtggtaccatcttctagattntttatgctttatact

SEQ ID NO: 13066 - DNA, 589 bp, Zea mays
  Clone ID: LIB3061-102-Q1-K7-C3
ttttgagcattcagaaacacacctagcgaagcgcactagcaacgacctaacaacaatggctaccaagatattatccctctttgcgcttcttgccctttttgtgagcgcaacaaatgcgttcattattccacaatgctcacttgctcctagtgccattattccacagttcctccctccagttacttcaatgggcttcgaacacccagctgtgcaagcctacaggctacaacaagcgcttgcggcgagcgtcttacaacaaccaattgcccaattacaacaacaatccttggcacatctaaccatacaaaccatcgcaacgcaacagcaacaacaatttctaccagcactgagccaactagctgtggtgaaccctgtcgcctacttgcaacagcagttgcttgcatccaacccacttgctctggcaaacatagttgcataccaacaacaacaacaattgcaacagtttctaccagcgctcagtcaactagccatggtgaaccctgccgcctacctacaacagcaacaactgatttcatctagccctctcgctgtggttaatgcacctacatacctgcaacaacagttgctg

SEQ ID NO: 13067 - DNA, 450 bp, Zea mays
  unsure (1)..(450): unsure at all n locations; Clone ID: LIB3061-102-Q1-K7-C4
tttatgtacatttctagattctaaaaaaaataaaataaaagagggcaccctcttacaactgcaacaattgctgccattcaaccaacttgctttgacaaacccaacagtgttctaccaacaacccatcattggtggtgccctcttttagattgcttatgagttatagttcaataatgaagttgtttgggtgatgtttgtggcgtcccagaaataagaaagtacatttctagattctaaaaaaaaataaaattttttaaaaaaaaaaaaaaaaaaaaaaaaaaaaaaaaaaaaaaaaagaaaaatannaaaaaaaataaaaaataaaaattaaaaaaatttttaataatttatatattttaagatggtttgagttttttttttttttgtgagtgtagaaaaaaaaaaaaaaaaaaaaaagagggcgtgttttttggagttttattttttttg

SEQ ID NO: 13068 - DNA, 621 bp, Zea mays
  Clone ID: LIB3061-102-Q1-K7-C5
tattttcagcattcaaaacacaccaagcgaagcgcactagcaacgacctaacaccaatggctaccaagatattagccctccttgcgcttcttgcccttttagtgagcgcaacaaatgcgttcattattccacagtgctcacttgctcctagtgccagtattccacagttcctcccaccagttacttcaatgggcttcgaacatccagccgtgcaagcctacaggctacaactagcgcttgcggcgagcgccttacaacaaccaattgcccaattgcaacaacaatccttggcacatctaaccctacaaaccattgcaacgcaacaacaacaacaacagtttctgccatcactgagccacctagccgtggtgaaccctgtcacctacttgcaacagcagctgcttgcatccaacccacttgctctggcgaacgtagctgcataccagcaacaacaacagctgcaacagtttatgccagtgctcagtcaactagccatggtgaaccctgccgtctacctacaactactttcatctagcccgctcgcggtgggcaatgcacctacgtacctacaacaacagttgctgcaacaaattgtaccagctctgactcagctagctgtgg

SEQ ID NO: 13069 - DNA, 337 bp, Zea mays
  Clone ID: LIB3061-102-Q1-K7-C8
tccttttttttagtgagtagctgggcagaggtcagttaatgatcctttcttttctgccccatcttatactccccagacctaccgaaatgcaataattggtaagactggtctggcttctacctctgcgagccttgcctatcagtcctattctctgggtcacgatcctgctcctttgcaggcggggggagggtgtgcctcaagcacaacagtcatgatgcctcctgctggaagatctgctcgatcatcagctaggcttggattcaagcctgggtctggtgagctatgattcccttactgctggcttcaatggttttgttgttttcatgtgcaaacgctt

SEQ ID NO: 13070 - DNA, 645 bp, Zea mays
  Clone ID: LIB3061-102-Q1-K7-C9
attttcccacaatgctcacaagctcctatagcttcccttcttcccccatacctctcaccagcggtgtcttcaatgtgtgaaaccccaattgttcaaccctacaggatccaacaggcaatcgcaacaggcatcttaccattatcacccttgttcctccaacaaccgtcagccctattacagcagttacctttggtccatttggtggcacaaaacatcagggcacaacaactacaacaacttgtgctagcaaaccttgctgcatactctcagcaacatcagtttcttccattcaaccaactggctgcattgaactctgctgcttatttgcaacaacaattaccattcagccagctagttgctgcctacccccagcaatttcttccattcaaccaactagcagcattgaactctgctgcttatttacagcagcaacaactactaccattcagccagctagctgatgtgagccctgctgccttcttgacacaacaacagttgttgccgttctacctgcacgctatgcctaacgctggcaccctcttacaactgcaacaattgctgccattcaaccaacttgctttgacaaacccaacagtgttctaccaacaacccatcattggtggtgcccttttttagattgcttat

SEQ ID NO: 13071 - DNA, 364 bp, Zea mays
  unsure (1)..(364): unsure at all n locations; Clone ID: LIB3061-102-Q1-K7-D1
attgagaccaactagcaacatagnaaagcacaatagtgtaccaacaatggcagccaaaatattttgcttccttatgctccttggtctttctgcaagtgttgctaccganaccattttcccacaatgctcacaagctcctatagcttcccttcttcccccatacctctcaccagcggtgtcttcaatgtgtgaaaccccaattgttcaaccctacaggatccaacaggcaatcgcaacaggcatcttaccattatcaccctggttcctccaacaaccgtcagccctattacagcactaaccttaggtgcatttggtggcacaaaaattatggcacaacaactacaacaacttgttctaacaaacc

SEQ ID NO: 13072 - DNA, 165 bp, Zea mays
  Clone ID: LIB3061-102-Q1-K7-D10
tggttcggctttacaagatgtgatgaacaatcctgccaactttgctaagcaccaagcgaatcctaaggtgggccctatcatcgcaaagatgatggccaagttcaatgggtcccagtgatggttatgtcgcagtcaggttcactgtccaacaaacctttgcttgct

SEQ ID NO: 13073 - DNA, 595 bp, Zea mays
  Clone ID: LIB3061-102-Q1-K7-D11
ttttcttagcacatagtaagcacaatcgtgtaccaacaatggcagctaaaatattttgcctccttatgctccttggtctttctgcaagtgctgctacggcgaccattttcccacaatgctcacaagctcctatagcttcccttcttcccccgtacctctcaccaacggtgtcttcggtgtgtgaaaacccaattcttcaaccctacaggatccaacaggcaatcgcagctggcatcttacctttatcacccttgttcctccaacaatcatcagccctattacagcagttacctttggtgcatttattggcacaaaacatcagggcacaacaactacaacaacttgtgctagcaaaccttgctgcctactctcagcaacagcagtttcttgcattcaaccaactagctgcattgaactctgctttttatttgcaacaacaacaactaccattcagccagctatctgctgcctacccccagcaattttcttgccttcaaccaactgacagcattgaactctcctgcttttttacagcagcaacaactactcccattgattcagctaactggtgtgagccctgtttccttcttgacac

SEQ ID NO: 13074 - DNA, 478 bp, Zea mays
  unsure (1)..(478): unsure at all n locations; Clone ID: LIB3061-102-Q1-K7-D2
ccanacaagcaacatagaagtggaatacagtagcaacaatagagcaacaatggcggccaagatattttccatccttatgctccttgctctttctgcatgtgttgctaacgcgaccatttttcctcaatactcacaagctcctatagctgcccttcttcccccataccttccatcatatgaccgcttcagtttgtgaaaacccagcccttcaaccctacaggctccaacaagcaatcgcaacaagcaacttacctttatcacccctgttctttcaacaatcgccagccctatctttggtgcagtcattggtacaaaccatcagggcacaacagctgcaacaactcgtgctaccagtgatcagccaagtagctctggcgaacctttctgcctactctcagcaacaacaatgtcttgcattcaaccaactgtctacactgaaccctggtgctcatttacaacaacaacaactactaccatt

SEQ ID NO: 13075 - DNA, 627 bp, Zea mays
  unsure (1)..(627): unsure at all n locations; Clone ID: LIB3061-102-Q1-K7-D4
gtgtaccaactagcaacatagnaaagcacaatagtgtaccaacaatggcagccaaaatattttgcttccttatgctccttggtctttctgcaagtgttgctaccganaccattttcccacaatgctcacaagctcctatagcttcccttcttcccccatacctctcaccagcggtgtcttcaatgtgtgaaaacccaattgttcaaccctacaggatccaacaggcaatcgcaacaggcatcttaccattatcacccttgttcctccaacaaccgtcagccctattacagcagttacctttggtccatttggtggcacaaaacatcagggcacaacaactacaacaacttgtgctagcaaaccttgctgcatactctcagcaacatcagtttcttccattcaaccaactggctgcattgaactctgctgcttatttgcaacaacaattaccattcagccagctagttgctgcctacccccagcaatttcttccattcaaccaactagcagcattgaactctgctgcttatttacagcagcaacaactactaccattcagccagctagctgatgtgagccctgctgccttcttgacacaacaacagttgttgccgttctacctgcacg

SEQ ID NO: 13076 - DNA, 625 bp, Zea mays
  unsure (1)..(625): unsure at all n locations; Clone ID: LIB3061-102-Q1-K7-D5
cccggttgacatcagtcacagtttgcattgacgcaatcgcgacaactcgggttgttgtcactggagatgtgagcaacaacgccaaacatgccctgactggccagtctttcaaccgctccttcagcgggagcggggcatccatggacattgtggtgtccagtgtcagagcttacctgagcgccctgaacaagatctgcagtgtggggtggcgccgtgaaagccagcagcgatgtagctgagaccgcaagcgtcccgagcacagaatgagctcccgtttggttcagagtgacatgttgttcaaaatttctgctggaaggatcgtcccttgagcttaggacaggcaggaagtcttgggacctatgtagtgtacaatttctgtgtgtcatataccgtgctcgttgccagtttgtactgtnccatatgtaaaccatagaatctgttgccatttagaagtctggccaaggtcagctgtaatgcttcacatgcttatagcctggaaacattaaacattgaaaaacccgaacatggaataaaggatgcccaaggttgaatttgtcttttgattatttcttggatttggtggttttggttataaaaagaaaaaaaaaaaagggggggcgttttg

SEQ ID NO: 13077 - DNA, 575 bp, Zea mays
  Clone ID: LIB3061-102-Q1-K7-D7
cggaaccggaacatcccgggttcgacccaacgcgtccgatttacctttggtgcatttattggcacaaaacatcagggcacaacaactacaacaacttgtgctagcaaaccttgctgcctactctcagcaacagcagtttcttccattcaaccaactagctgcattgaactctgcttcttatttgcaacaacaacaactaccattcagccagctacctgctgcctacccccagcaatttcttccattcaaccaactggcagcattgaactctcctgcttatttacagcagcaacaactactaccattcagccagctagctggtgtgagccctgctaccttcttgatacaaccacagttgttgccgttctaccagcacgctgcgcctaacgctggcaccctcttacaactgcaacaattgctgccattcaaccaacttgctttgacaaacccagcagcgttctaccaacaacccatcattggtggtgccctcttttagatttcttatgagttatagttcaataataaagttttttgtctgatgtttgtggcttcccagaaataagaaagtacatttc

SEQ ID NO: 13078 - DNA, 610 bp, Zea mays
  unsure (1)..(610): unsure at all n locations; Clone ID: LIB3061-102-Q1-K7-D9
gtccaacagcaacatanaagtggaatccagtagcaacaatagagcaacaatggcgaccaagatattttccctccttatgctccttgctctttctacatgtgttgctaacgcgacaattttccctcaatgctcacaagctcctatagcttcccttcttcccccataccttccatcaattatagcttcaatatgtgaaaacccagctcttcaaccatataggcttcaacaagcaatcgcagcaagcaacatacctttatcgcccttgttgtttcaacaatcgccagccctatctttggtgcagtcattggtacaaaccatcagggcacaacagctgcagcaactcgtgctacctctgatcaaccaagtagctctggcaaacctttctccctactctcagcaacaacaatttcttccattcaaccaactgtctacactgaaccctgctgcttatttgcagcaacaactattaccatttagccagctagctactgcctactctcagcaacaacaacttcttccatttaaccaattggccgcactgaaccccgctgcttatttgcagcagcaaatactactaccatttagccagctagctgcagcaaaccgtgct

SEQ ID NO: 13079 - DNA, 320 bp, Zea mays
  Clone ID: LIB3061-102-Q1-K7-E1
cccggtcgacccagcgtccggctggtatgtgctcaatctgtggtgcaagaaagctttggcactgggtctgaccacattcgtgagaaagatggcatttgggctgtgcttgcatggatttctattattgctttcaagaataaggacaaccttggaggagataagcttgtcactgtttgaagatattgtttgtcagcattgggccacatatggacaccattattacacacgctatgactatgagaatgtcgatgctggggctgttaaggagttgatggcaaacctagtaagcatgcagtcattactttctgatgttaacaagt

SEQ ID NO: 13080 - DNA, 694 bp, Zea mays
  unsure (1)..(694): unsure at all n locations; Clone ID: LIB3061-102-Q1-K7-E10
cccggggnaccaactagcaacatagtaagcacaatagtgtaccaacaatggcagccaaaaattttgcctccttatgctccttggtctttctgcaagtgctgctacggcgaccattttcccgcaatgctcgcaagctcctatagcttcccttcttcccccgtacctctcaccagcggtgtcttcggtatgtgaaaacccaattcttcaaccctacaggatccaacaggcaatcacagctggcatcttacctttatcacccttgttcctccaacaatcatcagccctattacatcagttacctttggtgcatttattggcacaaaacatcagggcacaacaactacaacaacttgtgctagcaaaccttgctgcctactctcagcaacagcagtttcttccattcaaccaactagctgcattgaactctgcttcttatttgcaacaacaacaactaccattcagccagctacctgctgcctacccccagcaatttcttccattcaaccaactggcagcattgaactctcctgcttatttacagcagcaacaactactaccattcagccagctagctggtgtgagccctgctaccttcttgatacaaccacagttgttgccgttctaccagcacgctgcgcctaaacgctgcaccctcttacactgcaacaattgctggcattcaccaacttgcttt

SEQ ID NO: 13081 - DNA, 574 bp, Zea mays
  unsure (1)..(574): unsure at all n locations; Clone ID: LIB3061-102-Q1-K7-E2
ctgtcactattgctgtgaaaggcagtctctcccttctagtgaaagcaagaatgatagtgctgtgcctgatagagcaaagtacaatagagatgacttccctgttcagtacgatgctgcaaagttctttgtcattaaatcgtacagcgaggatgacatccacaagagcgtaaagtacaatgtgtgggcaagcacaaccaacggaaacaagaagcttgatgctgcttaccaagaagctcagtcaaagggatctgcatgccctatattcttgttcttctcagtgaatacaagtgggcagtttgttggtgttgctgaaatgactggcgccgttgattttgagaaaaccctagagtattggcaacaggacaagtggaacggctccttctctgttaagtggcacattgtcaaggacgtgcccaacaatattctcaagcacatcatcctggagaacaatgagaacaagcctgtcacaaacagccgtgacactcaggagatacgcctcgaacaaggccttcagatgctcaagatattcaaagatcatgtcagcaaaacttncatcctcgacgactttgccttc

SEQ ID NO: 13082 - DNA, 592 bp, Zea mays
  unsure (1)..(592): unsure at all n locations; Clone ID: LIB3061-102-Q1-K7-E3
acccagcgttctttttaactngcancatagtaaagcacaatagtgtaccaacaatggcagccaaaatattttgcctccttatgctccttggtgtttntgcaagtgctgctacggcgaccattttcccgcaatgctcacaagctcctatagcttcccttcttgccccgtacctctcaccagcggtgtcttcggtgtgtgaaaacccaatttttcaaccctacaggatccaacaggcaatcgcagctggcatcttacctttatcacccttgttcctgcaacaatcatcagccctattacagcagttacctttggtgcatttattggcacaaaacatcagggcacaacaactacaacaacttgtgctagcaaaccttgctgtctactctcagcaacagttgtttttttcattcaaccaactagctgcattgaactntgctttttatttgcaacaacaacaactaccattcagccagctacctgttgtctacccccaacaatttgtttcatttaaccaactggcagcattgaactctgctgcttatttacagcaggtacaactactaccattcagccagctagctggtgtgaagcc

SEQ ID NO: 13083 - DNA, 587 bp, Zea mays
  unsure (1)..(587): unsure at all n locations; Clone ID: LIB3061-102-Q1-K7-E4
attttgngagagttttagctcacccgattatcaatagtcttattggaaccaagtggagtgggtttatcatatgttacaagcattcaacacgggcaaccttgctttctaccaagaactttgcagggttcacaatgctgctcttactgcacaaccagctttggtgcaggatgagaggaagctgcttgagaaaatcaatattctttgtctgatggagataatctttagtcggccatctgaagatagaactattccattaagtgttattgctgagcagactaagctttcaatcagtgatgtggagtatctccttatgaagagcctctcggttcatcttattgagggaataattgatgaagtggacagtacagttcatgtttcgtgggtccagcccagagtgcttggaatcccacaggttaaggctttgcgcgaccgcctggatgcctgggttggaaaggtgcatactacattgctttcagttgaggcagaaacacctgatcttgttgctgcctaatttagcacctgttacacttccgcgagaggcttggtcagcaaggtgatgagatgcattgtgacacttgtagtcattt

SEQ ID NO: 13084 - DNA, 617 bp, Zea mays
  Clone ID: LIB3061-102-Q1-K7-E5
cagcattcaaaaacacaccaagcgaagcgcactagcaacgacctaacaccaatggctaccaagatattagccctccttgcgcttcttgcccttttagtgagcgcaacaaatgcgttcattattccacagtgctcacttgctcctagtgccattattccacagttcctcccaccagttacttcaatgggcttcgaacatccagccgtgcaagcctacaggctacaactagcgcttgcggcgagcgccttacaacaaccaattgcccaattgcaacaacaatccttggcacatctaaccctacaaaccattgcaacgcaacaacaacaacaacaacagtttctgccatcactgagccacctagccgtggtgaaccctgtcacctacttgcaacagcagctgcttgcatccaacccacttgctctggcgaacgtagctgcataccagcaacaacaacagctgcaacagtttatgccagtgctcagtcaactagccatggtgaaccctgccgtctacctacaactactttcatctagcccgctcgcggtgggcaatgcacctacgtacctacaacaacagttgctgcaacaaattgtaccagctctgactcagctagctgt

SEQ ID NO: 13085 - DNA, 622 bp, Zea mays
  Clone ID: LIB3061-102-Q1-K7-E6
gtaataacccgacgacaccatgagggtgttgctcgttgccctcgctctcctggctctcgctgcgagcgccacctccacgcatacaagcggcggctgcggctgccagccaccgccgccggttcatctaccgccgccggtgcatctgccacctccggttcacctgccacctccggtgcatctcccaccgccggtccacctgccgccgccggtccacctgccaccgccggtccatgtgccgccgccggttcatctgccgccgccaccatgccactaccctactcaaccgccccggcctcagcctcatccccagccacacccatgcccgtgccaacagccgcatccaagcccgtgccagctgcagggaacctgcggcgttggcagcaccccgatcctgggccagtgcgtcgagttcctgaggcatcagtgcagcccgacggcgacgccctactgctcgcctcagtgccagtcgttgcggcagcagtgttgccagcagctcaggcaggtggagccgcagcaccggtaccaggcgatcttcggcttggtcctccagtccatcctgcagcagcagccgcaaagcggccaggtcgcggggctgttggcggcgcagatagcgcagcaactg

SEQ ID NO: 13086 - DNA, 503 bp, Zea mays
  unsure (1)..(503): unsure at all n locations; Clone ID: LIB3061-102-Q1-K7-E7
tttccatcaaacaagtggcgacagacaaagatttgtgagggtgatccgcgctgagaagagatggctaagatcgccgcggcggcggcggcggcgctgtgcttcgcggccctggtggccgtggccgtctgccaaggcgaggtcgagcggcagaggctcagggacctgcagtgctggcaggaggtccaggagagcccgctcgacgcgtgccgccaggtcctcgaccggcagctaaccggcggcggcggcggcggcggcgttggcccgttccggtggggcaccgggctccggatgcggtgctgccagcagctccaggacgtgagccgcgagtgccgctgcgccgccatccggagcatggtcaggggatacgaggaggccatgccgccgctggagaaaggctggtggccatgggggcggtntttnttttttttgtttttttgtgttttttgtggtttttttgttttttgttttttgttgtttgttgtgttttttttgttttttttttt

SEQ ID NO: 13087 - DNA, 645 bp, Zea mays
  unsure (1)..(645): unsure at all n locations; Clone ID: LIB3061-102-Q1-K7-E8
gcacatanaagtggaatccagtagcaacaatagagcaacaatggcgaccaagatactttccctccttatgctccttgctctttctgcatgtgttgctaacgcgacaattttccctcaatgctcacaagctcctatagcttcccttcttcccccataccttccatcaatgatagcttcagtatgtgaaaacccagctcttcaaccctataggctccaacaagcaatcgcagcaagcaacatacctttatcacccttgtttcaacaatcgccagccctatctttggtgcagtcattggtacaaaccatcaaggcacagcagctgcagcaactcgtgctacctgtgatcaaccaagtagctctggcaaacctttctccctactatcagcaacaacaatttcttccattcaaccaactatctacactgaaccctgctgcttatttgcagcaacaactattaccattcagccagctagctactgcctactctcatcaacaacaacttcttccatttaaccaattggccgcactgaacctcgctgcttatttgcagcagcaaatattactaccatttagccagctagctgcagcaagccgtgcttccttcttgacacagcaacagttgctgcctttctaccagcagtttgc

SEQ ID NO: 13088 - DNA, 654 bp, Zea mays
  unsure (1)..(654): unsure at all n locations; Clone ID: LIB3061-102-Q1-K7-E9
cccggngtcgacccacgccgtccgcattccattagctttatctactccagagcgcagaagaacccgatcgacaccatgagggtgttgctcgttgccctcgctctcctggctctcgctgcgagcgccacctccacgcatacaagcggcggctgcggctgccagccaccgccgccggttcatctaccgccgccggtgcatctgccacctccggttcacctgccacctccggtgcatctcccaccgccggtccacctgccgccgccggtccacctgccaccgccggtccatgtgccgccgccggttcatctgccgccgccaccatgccactaccctactcaaccgccccggcctcagcctcatccccagccacacccatgcccgtgccaacagccgcatccaagcccgtgccagctgcagggaacctgcggcgttggcagcaccccgatcctgggccagtgcgtcgagtttctgaggcatcagtgcagcccgacggcgacgccctactgctcgcctcagtgccagtcgttgcggcagcagtgttgccagcagctcaggcaggtggagccgcagcaccggtaccaggcgatcttcggcttggtcctccagtccatcctgcagcagcagccgcaaagcgcccagtcgcggggctgttgg

SEQ ID NO: 13089 - DNA, 371 bp, Zea mays
  Clone ID: LIB3061-102-Q1-K7-F1
atcatcccggacgccgcgggccccgacgcctgggccaacgcggcgtcggccgcgggcgccgacgccagcatctgggccaccgaggacgactaccgccagtggagcgccgaaccaggctacggcgaccggaacccctcgtcgcgggcggggagcgagcagccgccgccgggcaagaaggctcgcggcgggggcggcggcagcgatagcggcggcggtggcagcacgagcaagtcgcgcgccattggcaagatgttcttcaagaccaagctctgctgcaagttccgggccgggacctgtgcctacgtcaccaactgcaacttcgcgcatgggatgaaggatctgcggaagccaccggccaactgtcaggagat

SEQ ID NO: 13090 - DNA, 279 bp, Zea mays
  unsure (1)..(279): unsure at all n locations; Clone ID: LIB3061-102-Q1-K7-F11
attgaaagatcttttgtntttcttggcccactttgtcacacatggtaagttgcttgttgtgccatggttacccaatttgcacatgggtatctttgtcatacgtttgtagggtgggtctttgaatttgatgcgcttgtacgttttcttttgtcgattgggggcgggggatgaatctgtcctcttgtcacatttttacttctaaagtgcatgttttgaaaaggctgttgtggggtgctctttgtttctgttttcgtttttttggtcttttggtttgttttt

SEQ ID NO: 13091 - DNA, 345 bp, Zea mays
  Clone ID: LIB3061-102-Q1-K7-F3
ggtgaatttggtggtcttttttgtggataagaagcttacagaacttcctgatcgatcggtggggtccacatcaatacttcctctgagtgcaaaggataaagataccaagttgaaagaagaaaatacgagattgctgaatggtaactctatggattcagctgatcggagaccacgaacacaaatgaatggaaagcaaattgataattaaagccaagttgatagtgaaactgagaaagcatgaatatactctgaaggagggggttatgataactaaaagctatttaaacagctgaggtcccttgattgtgttctgatagatgtatcgaaacgattactgattgtatt

SEQ ID NO: 13092 - DNA, 617 bp, Zea mays
  Clone ID: LIB3061-102-Q1-K7-F4
cccgtacctctcaccagcggtgtcttcggtatggtgaaaacccaattcttcaaccctataggatccaacaggcaatcgcagctggcatcttacctttatcacccttgttcctccaacaatcatcagccctattacagcagttacctttggtgcatttattggcacaaaacatcagggcacaacaactacaacaacttgtgctagcaaaccttgctgcctactctcagcaacaacagtttcttccattcaaccaactagctgcattgaactctgcttcttatttgcaacaacaacaactaccattcagccagctatctgctgcctacccccagcaatttcttccattcaaccaactgacagctttgaactctcctgcttatttacagcagcaacaactactaccattcagccagctagctggtgtgagccctgctaccttcttgacacaaccacaattgttgccgttctaccagcacgctgcgcctaacgctggcaccctcttacaactgcaacaattgctgccattcaaccaacttggctttgacaaacccaacagcattctaccaacaacccatcattggtggggccctcttttagatttcttatgagttatagtt

SEQ ID NO: 13093 - DNA, 641 bp, Zea mays
  Clone ID: LIB3061-102-Q1-K7-G10
taagtttccatgaaaacttattttgctatccaaggaactacaggaggcagaggatgctgaaattctagacacatggagagattgaaggatataaatacacagtaccaggagaaactattaacacttagagctcggcaagcgaactatagagatgagttcctgcgcaaggaatctctagcacgccagcagcaataccagcacgccagcatgagccattatgccagcaattccacggctggggagcagcatggttataacccaacggcagcaggcacgcctcctgttgctgctggaggtgcttatggtgaggctcatcggggttatgcttctggccagtatgaatcatttagcgatcgtccagattatccagagttccatgatgggggcagaggtcgtggtcgtagttctgagcagcgtgctcaataccctggtggtcgtgcttataattccggtggccggcgattctagatatgctttgaactttgaaggacgatctatcactctgtcaagcgagctcatatcacctgatgtcagtgtgctgcaccgtgctatactccgaccgagaaacctaagcgctcataaaacttgttctacaattcaggggcatcgaaatactttatgggtttgctagaattcattct

SEQ ID NO: 13094 - DNA, 527 bp, Zea mays
  Clone ID: LIB3061-102-Q1-K7-G11
tctaaactccctgtaggctatgctcgagagtaatcaggctacaaagggtgccaatgaaattccttctgcctcaaatggagacaacgacgagtggtcagaagtacagagattgcagacaaggataacaacattcagaaatactgagattgataaatggcagaggaaaatacaggtgacaacgggtgctgctgcacttaaaggaaagctacatgcatttaatcagaacattagtgaccaagttgctggttacatgagagatccaagtcggatgattaacaggatgtacttgaccaactctgctgttagtgtatttggaaaggatgttggagaacctgaaacagctgaggaggggcacaatatggaaggtgatcctgaacttattgacgattctgagttttatcaacaacttctcaaggagtatcttgagtcatgtaataagggggcctcaaagtcggcattatatgctctaaaaaagcagctgtttaaaagaggaagcttgttgatcgttgtacttgtaaaagctaaaa

SEQ ID NO: 13095 - DNA, 84 bp, Zea mays
  Clone ID: LIB3061-102-Q1-K7-G12
cttctagcaacatagtaagcacagtggggggccaacagtggcagacaaaatattgtgcctccttatgctgcttggggtttctgc

SEQ ID NO: 13096 - DNA, 115 bp, Zea mays
  Clone ID: LIB3061-102-Q1-K7-G2
taccaacaacccatcattggtggtgccctcttttagatttcttatgagttatagttcaataataaagttttttgtctgatgtttgtggcttcccagaaataagaaagtcatttct

SEQ ID NO: 13097 - DNA, 559 bp, Zea mays
  Clone ID: LIB3061-102-Q1-K7-G8
tataagctgcagagccatcatacggggagtggatccttgccgctacagggtcgacggtccgcacggtgacgggtctttcacagtccatttcggtgatctcgcccgcgaggagagccgaaggatactggtggacgtgcagctccctcaagtacagcatgagcaaaaagataagccggtcattcatgtcaaatatgaatatagttctcccaagaaggtgaaggtcaccaacaccctggacatcaagatgaaccgcgtccagaatccgggacaggctgccatgaatccaaatgtgagccgggagctggcccgtcgcgcacaggtggagcacctgagaaaggtgatggatctggccaacaagaaaaaccttggtgcggccaaagatgaggtggagagagccaggaacgccttgaactctatcacccacgacacagatgacgccgtcgattccctcttcaacgagctggacaatatcgaaaaatttctggagacgtactacatctacaacaagctcggccgctcctacctgctggcctgcatctccttccatgaaccccagcgc

SEQ ID NO: 13098 - DNA, 559 bp, Zea mays
  unsure (1)..(559): unsure at all n locations; Clone ID: LIB3061-102-Q1-K7-G9
ctttcgtcgcgtggtccgngacgagcaggggtccctgagggtgctccggcccttcgacgaggtgtccaggctcctccgcggcatccgggactaccgcgtggcggtcctggaggcgaacccgcgctcgttcgtggtgcccagccacaccgacgcgcactgcatctgctacgtggcggaaggcgagggagtggtgacgacgatcgagaacggcgagaggcggtcatacaccatcaagcaaggccacgtcttcgtggcgccggccggggcggtcacctacctggccaacaccgacggccggaagaaactggtcatcgccaagatcctccataccatctccgtgcctggcgagttccagttcttcttcggccccggcgggaggaacccggaatcgttcctgtcgagcttcagcaagagcatccagagagctgcatacaagacctcgagcgaccgtctggagaggctgttcgggaggcatgggcaggacaaggggatcatcgtgcgcgccacggaggagcagacccgcgagctgcggcgccacgcctcgggaggcggccacggc

SEQ ID NO: 13099 - DNA, 382 bp, Zea mays
  Clone ID: LIB3061-102-Q1-K7-H10
ttcctggggtaaacacccaaaatcttcaccctatctggcttgaacgttaggagctaccgctattatgatcctgcaacatgcagccttcacttcgaaggactcctggaagacctcggttctgctccttcaggttcaattgtactgctgcatgcctgtgctcacaaccctactggagtggaggctaccatcgaacagtgggaacagattaggcagctgatgagatcaaaatcactgcttccgttctttgacagtgcctatcaaggctttgcaagtggaagtcttgacaaagatgctcagtcagtgcgtttgtttgttgctgttgtgggtgaactactaatggctcagagcttctctgagaacatggtattgagtggtgagcgtg

SEQ ID NO: 13100 - DNA, 299 bp, Zea mays
  unsure (1)..(299): unsure at all n locations; Clone ID: LIB3061-102-Q1-K7-H12
accggnccggccttcccgtgttcgccccgcgtccttctagttctagatcgcgagcggccggtgcatgggtgcgtgcatgaataacaagggtgtgcgcggtttgtgatgccaaattgtatcctcgtcgtgtgttgaagcgttcgatcgtcggtctagtagtgtgcctgtgtgcagcggcgtgctgttgttcgttcgtctgcctctgttccgtgggggggggttttccatagcacatgcgtgcgtcgagatctaaaatnttcttttaatttttggctttgtttgcgtgttttgttttgttt

SEQ ID NO: 13101 - DNA, 507 bp, Zea mays
  Clone ID: LIB3061-102-Q1-K7-H2
caccaagcgaagcgcactagcaacgacctaacaccaatggctaccaagatattagccctccttgcgcttcttgcccttttagtgagcgcaacaaatgcgttcattattccacagtgctcacttgctcctagtgccagtattccacagttcctcccaccagttacttcaatgggcttcgaacatccagccgtgcaagcctacaggctacaactagcgcttgcggcgagcgccttacaacaaccaattgcccaattgcaacaacaatccttggcacatctaaccctacaaaccattgcaacgcaacaacaacaacaacagtttctgccatcactgagccacctagccgtggtgaaccctgtcacctacttgcaacagcagctgcttgcatccaacccacttgctctggcgaacgtagctgcataccaggaacaacaacagctgcaacagtttatgccagtgctgaaacaactagccatggggaaccctggcgtcttacctacaactact

SEQ ID NO: 13102 - DNA, 372 bp, Zea mays
  Clone ID: LIB3061-102-Q1-K7-H4
cttctatcagtaccatcaatcatcattcatcttagtagtataggcaccaaatcaaatctgcaacatcaattatctaactccaaaaaccatgaagctggtgcttgtggttcttgctttcattgctttagtatcaagtgtttcttgtacacagacaggcggctgcagctgtggtcaacaacaaagccatgagcagcaacatcatccacaacaacatcatccacaaaaacaacaacatcaaccaccaccacatcatcaccagcagcagcaacaccaacaacaacaagttcacatgcatccacaaaaacatcagtaacaacaagaagttcatgtttaacaacaacaacaacaaccgtagcaccaccaccaactaca

SEQ ID NO: 13103 - DNA, 476 bp, Zea mays
  Clone ID: LIB3061-102-Q1-K7-H9
caactagcaacatagtaaagcacaatagtgtaccaacaatggcagccaaaatattttgcctccttatgctccttggtctttctgcaagtgctgctacggcgaccattttcccgcaatgctcgcaagctcctatagcttcccttcttcccccgtacctctcaccagcggtgtcttcggtgtgtgaaaacccaattcttcaaccctacaggatccaacaggcaatcgcagctggcatcttacctttatcacccttgttcctccaacaatcatcagccctattacaacagttacctttggtgcatttattggcacaaaacatcagggcacaacaactacaacaacttgtgctagcaaaccttgctgcctactgtcaacaacagcagtttcttccattcaaccaactaggttcattgaactctgcttgttatttgcaacaacaacaactaccattcaggcaggtacctagtggctacccc

SEQ ID NO: 13104 - DNA, 650 bp, Zea mays
  Clone ID: LIB3061-098-Q1-K7-A1
cagcaagcaacatagaaagtagaatccattagcaacaatagagcaacaatggcgaccaagatattttccctccttatgctccttgctctttctacatgtgttgctaacgcgacaattttccctcaatgctcacaagctcctatagcttcccttcttcccccataccttccatcaattatagcttcagtatgtgaaaacccagctcttcaaccatataggcttcaacaagcaatcgcagcaagcaacatacctttatcgcccttgttgtttcaacaatcaccagccctatctttggtgcagtcattggtacaaaccatcagggcacaacagctgcagcaactcgtgctacctgtgatcaaccaagtagctctggcaaacctttctccctactctcagcaacaacaatttcttccattcaaccaactgtctacactgaaccctgctgcttatttgcagcaacaactattaccatttagccagctagctactgcctactctcagcaacaacaacttcttccatttaaccaattggccgcactgaaccccgctgcttatttgcagcagcaaatactactgccatttagcgagctagctgcagcaagtcgtgcttccttcttgacacagcaacagttgctgcctttctacaagca

SEQ ID NO: 13105 - DNA, 614 bp, Zea mays
  unsure (1)..(614): unsure at all n locations; Clone ID: LIB3061-098-Q1-K7-A10
gcgaagcgtacnagcaacgaccnaacaccaagggcgaccaagnnaagagcccnccnggcgccgcgggcccnnnnagngagcgcaacaaangcgnncattannccacagngcccaccngccccaagggccannannccacagnnccccccaccagnnaccncaaggggccncgaacatccaggggggcaagcctacaggctacaactagcgcttgcggcgagcgccttacaacaaccaattgcccaattgcaacaacaatccttggcacatctaaccctacaaaccattgcaacgcaacaacaacaacaacaacagtttctgccatcactgagccacctagccgtggtgaaccctgtcacctacttgcaacagcagctgcttgcatccaacccacttgctctggcgaacgtagctgcataccagcaacaacaacagctgcaacagtttatgccagtgctcagtcaactagccatggtgaaccctgccgtctacctacaactacttttatctagcccgctcgcggtgggcaatgcacctacgtacctacaacaacagttgctgcaacaaatgtaccagctctgactcagctagctgtggcaaaccctgctgcctac

SEQ ID NO: 13106 - DNA, 311 bp, Zea mays
  unsure (1)..(311): unsure at all n locations; Clone ID: LIB3061-098-Q1-K7-A11
gnggaattcaggagcaaaaagagagcagcaagggcgggccaagaaaganccaaccngaagcagcgggcncgggcggcagggggggccaacgcgaccanggngccncaagacgcacaagcgccnanagccgcccgncaagccccagaccgncgagcaaggaccgcngcagaaggggaggggggggggggncaacccnacaggagccagcaagcaaacgcaacaagcaacgnaccgacagcacaccagggcggggaacaagcgccagcccgagcgggggggcagggaggggnacaaaccaccagggcagagca

SEQ ID NO: 13107 - DNA, 576 bp, Zea mays
  unsure (1)..(576): unsure at all n locations; Clone ID: LIB3061-098-Q1-K7-A2
aggaaaatgtaggctgctgtcagtatttgcactgtgaatttccatgataaggagcatggaactctactggctattggcactgccaagggtttgcagttctggccaaggaggacccttgctggtggattcatccacatatataagtttgtggatgaagggaggtcacttgaacttctacacaagacacaggtggaggaagtacctcttgcattgtgccaattccaggggcgattacttgcaggtgttggttcagtgctcagattatatgatctggggaaaagaaaattgctcagaaaatgtgaaaacaagctttttccgaggacattagtgtctattcatacctaccgtgataggatctatgttggcgatatgcaagagtcatttcactattgcaagtacagacgagatgaaaaccaactctatatatttgctgatgacagtgttcccaggtggcttacaacagcacaacacatagattttgacactatggctggagcagataagtttgggaatatatatnttgctcgtcttcctcaggatatctcagatgagattgaagaagacccaactggaggc

SEQ ID NO: 13108 - DNA, 570 bp, Zea mays
  Clone ID: LIB3061-098-Q1-K7-A3
gaaacacaccaagcgaagcgcactagcaacaacctaacaacaatggctaccaagatattatccctccttgcgcttcttgcgctttttgcgagcgcaacaaatgcgtccattattccacaatgctcacttgctcctagttccattattccacagttcctcccaccaggggcttcaatggccttcgaacacccagctgtgcaagcctataggctacaacaagcgattgcggcgagcgtcttacaacaaccaattgcccaattgcaacaacaatccttggcacatctaacaatacaaaccatcgcaacgcaacagcaacaacagttcctaccagcactgagccacctagccatggtgaaccctgtcgcctacttgcaacagcagctgcttgcatccaacccacttgctctagcaaacgtagttgcaaaccagcaacaacaacaactgcaacagtttctgccagcgcttagtcaactagccatggtgaaccctgccgcctacctacaacagcaacaactgcttttatctagcccgctcgctgtggccaatgcacctacatacctgcaacaagaa

SEQ ID NO: 13109 - DNA, 652 bp, Zea mays
  unsure (1)..(652): unsure at all n locations; Clone ID: LIB3061-098-Q1-K7-A4
gaaaggtgtctnatctgnngaaggtgttgaggctaaaatatggcaggtccctgaaattctctctgaagaagtgcttggaaagatgggcgcgccccctaagcccgacgtgccagtcatcacaccgcaggaacttgcagaggctgacggtatcctctttgggtttccgacaaggttcggaatgatggcagctcagatgaaggcgttcttcgatgccaccggtgggctctggagggagcagagcctcgctggcaagcctgccggcatgttcttcagcactggaacccagggtggtggccaagagactacaccgctgacggcgattacccagttgacgcaccacggcatggtgtttgtgcccgtgggctacaccttcggcgccaagctgttcggcatggaccaggtccagggtggcagcccctacggcgccggcacgttcgccgccgacgggtcgaggtggccgagcgaggtggagctggagcacgccttccaccaggggaaatacttcgcgggcatcgccaagaagctcaagggctctgcttgatctgcacataccccttatcataaaacatttacagattcgtcatacccgtccatagattggtctgagttctctcgtggtgcctggatgctatgtagttcattggtactgctg

SEQ ID NO: 13110 - DNA, 496 bp, Zea mays
  unsure (1)..(496): unsure at all n locations; Clone ID: LIB3061-098-Q1-K7-A5
ccgggncgacccagcgnccgaagcaatatagaaaggagaanccangagcaacaagggagcaacaanggcgaccaaganannggcccnccnaaggccccnggcncnnncnacangngnngcnaacgcgacaannnncccncaaggcncacaagcnccnanagcnncccnncnncccccaaaccnnccancaannanagcggggggangngaaaacccagcncnncaaccananaggcnncaacaagcaancgcagcaagcaacanaccnnnancgcccnggggggggcaacaancaccagcccnancnngggggcagncangggnacaaaccancagggcacaacagcngcagcaacccgggcnaccngngancaaccaagnagcncnggcaaaccnnncncccnacccncagcaacaacaannggnngcanncaaccaacgggcnacacngaacccngcngcnnannngcagcaacaaccangaccaaagagccag

SEQ ID NO: 13111 - DNA, 665 bp, Zea mays
  Clone ID: LIB3061-098-Q1-K7-A7
ccgggtcgaccttgcgtccgattgagtttaacaagcaacataaaacgtggaatacagtagcaaaaatagagcaacaatggcggccaagatattttccatccttatgctccttgctctttctgcatgtgttgctaacgcgaccatttttcctcaatactcacaagctcctatagctgcccttcttcccccataccttccatcaatgaccgctttagtatgtgaaaacccagcccttcaaccctacaggatccagcaagcaatcgcaacaagcaacttacctttatcacacctgttctttcaacaatcgccagccctatctttggtgcagtcattggtacaaaccatcagggcagaacagttgcagcaactcgtgctaccagtgatcagccaagtagctctggcaaacctttccccctactctcagcaacaacaatttcttccattcaaccaactgtctatactgaaccctgctgcttatttgcagcaacaacaactactaccattcagccagctagctactgcctactctcagcagcaacaatttcttccatttaaccaattggccgcactgaacccctctgcttatttccagcagcaaatactactaccatttggccagctagctacaacaagccccgctttcttcttgacacaacaacaagtgc

SEQ ID NO: 13112 - DNA, 568 bp, Zea mays
  Clone ID: LIB3061-098-Q1-K7-A8
accctacaggatccaacaggcaatcgcagctggcatcttacctttatcacccttgttcctccaacaatcatcagccctattacagcagttacctttggtgcatttattggcacaaaacatcagggcacaacaactacaacaacttgtgctagcaaacctggcgggctactctcagcaacagcagtttcttccattcaaccaactagctgcattgaactctgcttcttatttgcaacaacaacaactaccattcagccagctatctgctgcctacccccagcaatttcttccattcaaccaactgacagcattgaactctcctgcttatttacagcagcaacaactactaccattcagccagctagctggtgtgagccctgctaccttcttgacacaaccacagttgttgccgttctaccagcacgctgcgcctaacgctggcaccctcttacaactgcaacaattggtgccattcaaccaacttgctttgacaaacccagcagcattctaccaacaacccatcattggtggtgccctcttttagatttcttatgagttataggtcaat

SEQ ID NO: 13113 - DNA, 353 bp, Zea mays
  unsure (1)..(353): unsure at all n locations; Clone ID: LIB3061-098-Q1-K7-A9
cagaaacatttaagcngcaccnggcgcgcaggagacnagagcagcaggaggcganagaagcnncncannngaggggggagcnccaccaaagggggccgagaaagcccanagcccngnnnggagcccnnncccnaaanacannacnncncagagnagcaaganggccacagaaaanacggaggggggaggnncnnngaagganacnagnganganagnaagaaaanancnacngnggagncnggnaaagaacagcnancagaaaggaaagnaacnngaaaggcnggggggggccccncagacaaccgcaananagacgacancacnaagggnagaagnncaccgncgcggcagc

SEQ ID NO: 13114 - DNA, 529 bp, Zea mays
  unsure (1)..(529): unsure at all n locations; Clone ID: LIB3061-098-Q1-K7-B1
gctcctgggactnnctgcgagtgctgctacggcgaccattttcccacaatgctcacaagctcctatagcttcccttcttcccccgtacctctcaccaacggtgtcttcggtatgtgaaaacccaattctggggggggacaggatccaacaggcaatcgcagctggcatcttacctttatcacccttgttcctgcaacaatcatcagccctattacagcagttacctttggtgcatttattggcacaaaacatcagggcacaacaactacaacaacttgtgctagcaaaccttgctgcctactctcagcaacagcagtttcttccattcaaccaactagctgcattgaactctgcttcttatttgcaacaacaacaactaccattcagccagctatctgctgcctacccccagcaatttcttccattcaaccaactgacagcattgaactctcctgcttatttacagcagcaacaactactaccattcagccagctagctggtgtgagccctgctacctttttgacacaa

SEQ ID NO: 13115 - DNA, 667 bp, Zea mays
  Clone ID: LIB3061-098-Q1-K7-B10
ccgggtcgacctcgcgtccgatcatattgaagtgcactagcaacatgttagcaccaatgggagccaagatttttgccctccttgccctccttgctctttcagcaagcgctgctacctcgacttttattccacaatgctcacaacaatacctctctccggtgacagccgcgggatttcaatacccatctatacaatcctacgtggtacaagaggccatccaagcaagcatcttacggtcattagcattaaccctccaacaaccatatgctctattgcaacagccatccttagtgcatctgtatctccaaagaatcgcggcacaacaactacaacaacagttgctaccaacaatcaatcaagtagttgcagcgaaccttgctgcttacctccagcaacaacagtttcttccattcaatcaactagctggggtgaaccctgctatctacttgcaggcacaacagctactaccatttaaccaacttgtcgggagcccttatgccttcttactgcaacaacagcttctgccattccatctgcaagctgtggcaaacattgttgctttcttgagacaacaacatttgttgccattttacccacaagttgtgggaaacattaatgccttcttgcacagcaacaattgctaccattctacccacagaatgtggca

SEQ ID NO: 13116 - DNA, 467 bp, Zea mays
  unsure (1)..(467): unsure at all n locations; Clone ID: LIB3061-098-Q1-K7-B11
cgggtcgaccttgcgnncgannntgttatncagaacacaccgcgcgaagtgcgctagcaacgaccnaacaacaanggcngcgaggacatnatccctccntgcgcttcttgccctttttgtgagtgcaacaaatgcgttcattattccacaatgctcacttgctccgagtgccattattccacattttctccctgcagggggttcaatgggcttcgaacacccagctgtgcaagcctataggctacaacaagcgcttgcggcgagcgtcttanaacaaccaattgcccaattacaacaacaatccttggcacatttaaccatacaaaccatcgcaacgcagcagcaacaagcactgagccacctagccgtggtgaaccctatcggcttattgcaacaacagctgcttggattcaacccacttgctttgggaaacgtaggtggataccaacaacaaccacagttgcaac

SEQ ID NO: 13117 - DNA, 543 bp, Zea mays
  unsure (1)..(543): unsure at all n locations; Clone ID: LIB3061-098-Q1-K7-B2
gcaagggtccaggtcgccagcgacaacgggaccacggtgttcgacgacgtgctccgtgcggggcagctgctcatcgtaccccagggctacctcgtcgccaccaaggcgcagggagaaggcttccagtacatcgccttcgagacgaaccctgacaccatggtcagccacgtcgccgggaagaactccgtcctgagcgacttgccggccgccgtcatcgccagctcgtatgccatctccatggaggaagctgcagagctcaagaacggtaggaagcatgagctggctgtgcttactcctgctggcagtggcagctaccaacaaggtcaagctggcagcgcccaacagtaggcacaacctcagagtgatctgcctgaataagtactcgtagactgtaataattaaacaaagcttgctcatggttaaactgcgtgttgattagtctttcaactacatagctctaaagtttttgatacaccgagtgatttgccaggaaaaaaatgagcagattgttgtaagcaaaanaaaaaaaaaaanaaaananaa

SEQ ID NO: 13118 - DNA, 374 bp, Zea mays
  Clone ID: LIB3061-098-Q1-K7-B3
tttttcctggtgcataaggcggggcttatggaatgaacatggcagatctggaagaatggaagaagaaagacattactggaatttaccacatatggcagaacatgaacgagaacaggctgctctgtgaaactggggacattgccagcatggcttgctaactttttacaagctgagggagggtctggacaaatcatgtcatgtggcttgcttaaggtacaatgcaaccattgagcgctcagagatagacattgctgctgccatccactacaatggaaacatgaatccctggctggaaattgcaatgatatagtattggacgtactggacaaagtacatcaattatcagcattcctacatttatggatgctagatca

SEQ ID NO: 13119 - DNA, 587 bp, Zea mays
  unsure (1)..(587): unsure at all n locations; Clone ID: LIB3061-098-Q1-K7-B5
cgggtngaccttgcgnccgcaactagtcaacatatgaaagcacaatcgggtaccaacaatggcagccaaaatattttgcctccggatgctccttggtctttctgcaagtgctgctacggcgaccattttcccgcaatgctcgcaagctcctatagcttcccttcttcccccgtacctctcaccagctgtgtcttcggggggggaaaacccaattcttcaaccctacaggatccaacaggcaatcacagctggcatcttacctttatcacccttgttcctccaacaatcatcagccctattacatcagttacctttggtgcatttattggcacaaaacatcagggcacaacaactacaacaacttgtgctagcaaaccttgctgcctactctcagcaacagcagtttcttccattcaaccaactagctgcattgaactctgnttnttatttgcaacaacaacaactaccattcagccagctacctgctgcctacccccagcaatttcttccattcaaccaactggcagcattgaactctcctgcttatttacaggagcaacaactactaccattcagccagctagctg

SEQ ID NO: 13120 - DNA, 481 bp, Zea mays
  unsure (1)..(481): unsure at all n locations; Clone ID: LIB3061-098-Q1-K7-B6
cggcgaccannnncccgcaaagcncgcaagcnccnanagcnncccnncnncccccgnaccncncaccagcggagncnncggtttttgaaaacccaaggggggaaccctacaggatccaacaggcaatcacagatggcatcttaccttgatcacccttgttcctccaacaatcatcagccctattacatcagttacctttggtgcatttattggcacaaaacatcagggcacaacaactacaacaacttgtgctagcaaaccttgctgcctactctcagcaacagcagtttcttccattcaaccaactagctgcattgaactctgcttcttatttgcaacaacaacaactaccattcagccagctacctgctgcctacccccagcaaattcttccttcaaccaactggcagcaatgaactctcctgcttatttacaggagcaacaactactaccattcagccagctagctggtgtgagccct

SEQ ID NO: 13121 - DNA, 661 bp, Zea mays
  Clone ID: LIB3061-098-Q1-K7-B7
ccgggtcgacctcgcgtccggaccaacatgcaacatagaaagtggaatacagtagcaaaaatagagcaacaatggcggccaagatattttccatccttatgctccttgctctttctgcatgtgttgctaacgcgaccatttttcctcaatactcacaagctcctatagctgcccttcttcccccataccttccatcaatgaccgctttagtatgtgaaaacccagcccttcaaccctacaggatccagcaagcaatcgcaacaagcaacttacctttatcacacctgttctttcaacaatcgccagccctatctttggtgcagtcattggtacaaaccatcagggcagaacagttgcagcaactcgtgctaccagtgatcagccaagtagctctggcaaacctttccccctactctcagcaacaacaatttcttccattcaaccaactgtctatactgaaccctgctgcttatttgcagcaacaacaactactaccattcagccagctagctactgcctactctcagcagcaacaatttcttccatttaaccaattggccgcactgaacccctctgcttatttccagcagcaaatactactaccatttggccagctagctacaacaagccccgcttccttcttgacacaacaacaagtgct

SEQ ID NO: 13122 - DNA, 352 bp, Zea mays
  unsure (1)..(352): unsure at all n locations; Clone ID: LIB3061-098-Q1-K7-B9
ccgggtngacctcgcgnccgaaaattctgnaccggagctagaggccgtagtggttctataaaaaaaacgatgtgtaatataacaattgtactaaatatagtaaagaaatcaaaataatctttagatcaatctaagatttcgattcccagtaaaaaaaaaagaaatataatagaaaaatatgggacataaaataaatccacggggttttagacttggtacaacccaaaatcaccaatccttttggttcgcacaaccaaaaaaatattctgaagggctaccaggagaaaaaaaaataccggattggatcaagaaccattttccaaaaaatagggaaaaagggttgaattgaaaa

SEQ ID NO: 13123 - DNA, 492 bp, Zea mays
  unsure (1)..(492): unsure at all n locations; Clone ID: LIB3061-098-Q1-K7-C1
gtgtnttnggtatgtgaaaacnnaattnttgaannntacaggatccaacaggcaatcacagctggcatcttacctttatcaccctgggggctgcaacaatcatcagccctattacatcagttacctttggtgcatttattggcacaaaacatcagggcacaacaactacaacaacttgtgctagcaaaccttgctgcctactctcagcaacagcagtttcttccattcaaccaactagctgcattgaactctgcttcttatttgcaacaacaacaactaccattcagccagctacctgctgcctacccccagcaatttcttccattcaaccaactggcagcattgaactctcctgcttatttacagcagcaacaactactaccattcagccagctagctggtgtgagccctgctaccttcttgatacaaccacagttgttgccggtctaccagcacgctgggcctaacgctggcaccgttttacaactgcac

SEQ ID NO: 13124 - DNA, 524 bp, Zea mays
  Clone ID: LIB3061-098-Q1-K7-C10
gcgccagtcttgctcgcgctctctcgcagctgctacgctaaagcaagtctagtctctagaggaggaggcggagggggaggccatgggcaaggacgacgtggtccagagcggcgcgggcggcggggagttcgccgccaaggactacacggacccgccgccggcgcctctggtggacgcgggggagctgggttcgtggtcgctgtaccgcgcggtgatcgcggagttcatcgcgacgctgctgttcctgtacgtgacggtggcgacggtgatagggtacaagcaccagacggacgcgtcggcgtcgggggccacggccgacgcggcgtgcggcggcgtgggcgtgctgggcatcgcgtgggccttcggcggcatgatcttcgtgctggtctactgcaccgccggcatctcggggggccacatcaacccggccgtcaccttcggccttttcctggcgcgcaaggtgtcgctggtgcgcgcgctgctgtacatggtggcgcaatgccttggcgccctctgcggcgtcg

SEQ ID NO: 13125 - DNA, 484 bp, Zea mays
  Clone ID: LIB3061-098-Q1-K7-C11
ccgggtcgacctcgcgtccgggggcgttgaggcttgctggcttgctgcctacctagctcgtcggggccctatggagatccagcaccaccgggggctgggcaactccaaggttgtcaaggtgcagagcgaggaggcgtgggatctgttcaccgatcaagcgagcaacgaaggccggcccgttgttgcccatttcggggcgtgatggtgcgtgacgtccctgtccatgaactacaagtttgaggagctggcgcagacccaccccgaggtcttgttcctctacgtggacgtcgaccatgtccaaagtgtttcatccaggtacggagtgaaggccatgccgacgttcttccttattaagaacaaggaggtggtggggaagatcgttggggcgaacccaaaccaggtgaagaagctggtggatgcttccgcccagcccttggagactcaaatagtcgtggagtagtagtcgtttcaaactttttttttg

SEQ ID NO: 13126 - DNA, 642 bp, Zea mays
  Clone ID: LIB3061-098-Q1-K7-C2
cgaactagcaacatacatagtgaagtacactagcaacatcttagcaccaatggcagccaagatttttgccatccttgccctccttgctctttcagcaagcgttgctaccgcgactattattccacaatgctcacaacaatacctctctccggtgacagccgcgagatttgaatacccaactatacaatcctacaggctacaagaggccatcgcagcaagcatcttacggtcgttagcattgaccgtccaacaaccatatgccctattgcaacaaccatccttaatgaatctatatctccaaagaatcgcagcacaacaactacaacaacagttgcttccaacaatcaatcaagtagttgcagcgaaccttgctgcttacctccagcaacaacaatttcttccattcaatcaactagctggggtgaaccctgctgcttacttgcaggcacaacagctactaccattcaaccaacttgtcaggagccctgctgccttcttactgcagcaacagttgctttcattccatctacaagttgtggcaaacattgctgctttcttgcaacaacaacaacaattgctgccattttacccacagttgtgggaaacattaacgccttcttgcacagcaacagttgctaccat

SEQ ID NO: 13127 - DNA, 597 bp, Zea mays
  Clone ID: LIB3061-098-Q1-K7-C4
gctgattgtatactgcttagaggatgagcaccgactgctagtatacgagttcatgccccgtgggaacatggaaaaccatctgtttaggagaggctcatacttccaacctctgtcatggaaccttagaatgaaggttgcactgggagcagcaaaaggactagcttaccttcatagtgcagaggcaaaagttatttaccgagattttaagacttcgaacattctccttgacacagattattctgcgaagctttctgattttggattggctaaggatggtcctgtcggtgagaagagccatgtgtccacaagagttatgggaacatatggttatgcagctcctgagtatctttcaacaggtcacctaactgcaaagagcgacatctatagctttggggtagtgcttctggagatgctgtcaggccgccgcgccatcgacaagaaccgtccccagggtgagcacaatctcgtggagtgggctcgaccttacctcacacataagcgcaagatatttcggatcctggatacgaggctggaaggtcaatacaatctgaacggtgcacaaacaattgctgcccttgctctcgaatgcctatccta

SEQ ID NO: 13128 - DNA, 444 bp, Zea mays
  Clone ID: LIB3061-098-Q1-K7-C6
ccgggcagagcatcccgacggcgacgccttactgctcgcctcagtgccagtcgttgcggcagcagtgttgccagcagctcaggcaggtggagccgcagcaccggtaccaggcgatcttcggcttggtcctccagtccatcctgcagcagcagccgcaaagcggccaggtcgcggggctgttggcggctcatatagcgcaggggctgacggcgatgtgcggcctgcagcagccgactccatgcccctacgctgctgccggcggtgtcccccactgaagaaactatgtgctgtagtatagccgctggctagctagctagttgagtcatttagcggcgatgattgagtaataatgtgtcacgcatcaccatgggtggcagtgtcagtgtgagcaatgacctgaatgaacaattgaaatgaaaagaaaaaaagtactccatctgttcc

SEQ ID NO: 13129 - DNA, 457 bp, Zea mays
  unsure (1)..(457): unsure at all n locations; Clone ID: LIB3061-098-Q1-K7-C7
gcagatcttaccttagttgcctcctccgtcttcgctccctccgcagcgtcagatcggccgtcgctcgccgagccctagcgccgccgatctcagcccgtaccagtcttgcagatcggggtcgcgccgcggcggcaagaacgatggccgaggaggccaagtacctggagacggcgcggggggggggttncntgtggtttatgaagtgcccccnggtcgttttccgcgcctggcngggcgnctgcgncttcggcttttntttcgncgccgtttacgccaacccngttgttgncaaggtnggncttttnctttgncttgtttngnccngnagaacggccngaagagcgcccgggagagggganngctcanttnaagatggagttgggacaaactaacattggggattcaccttagagcttttttttgaatatgtttaaaggttttngggctttgtgtgttt

SEQ ID NO: 13130 - DNA, 623 bp, Zea mays
  Clone ID: LIB3061-098-Q1-K7-C8
cagaacataccaagcgaagcgcactagcaacgacctaacaacaatggctaccaagatattagccctccttgcgcttcttgccctttttgtgagcgcaacaaatgcgttcattattccacaatgctcacttgctcctagtgccattattccacagttcctcccaccagttacttcaatgggcttcgaacacctagctgtgcaagccaacatgcaacaacaagcgcttgcggcgagcgtcttacaacaaccaattgcccaattgcaacaacaatccttgccacatctaacaatacaagccatcacaacgcaacagcaacaacagttcctaccagcactgagccacctagccatggtgaaccctgccgcctacttgcaagagcagctgcttgcatccaacccacttgctctggcgaacgtagttgcaaaccagcaacaacaacagctacaacagtttctgccaacgctcagtcaactagccatggtgaaccctgccgcctacgtacaacaacaacaactgctttcatctagcccgctcgctgtgggcaatgcacctacatacctgcaacaacaattgttgcaacagattgtaccagctctgactcaactagctgtggcaaaccctg

SEQ ID NO: 13131 - DNA, 668 bp, Zea mays
  Clone ID: LIB3061-098-Q1-K7-C9
ccgggtcgacctcgcgtccgcagaactttcctagcgaagcgcactagcaacgacctaacaacaatggcttccaagacattatccctccttgcgcttcttgccctttttgtgagtgcaacaaatgcgttcattattccacaatgctcacttgctccgagtgccattattccacagttcctccctccatttacttcaatgggcttcgaacacccagctgtgcaagcctataggctacaacaagcgcttgcggcgagcgtcttagaacaaccaattgcccaattacaacaacaatccttggcacatctaaccatacaaaccatcgcaacgcagcagcaacaagcactgagccacctagccgtggtgaaccctatcgcctacttgcaacaacagctgcttgcatccaacccacttgctttggcaaacgtagctgcataccaacaacaacaacagttgcaacagtttctaccagcgctcagtcaactagccatggtgaaccctatcgcctacctacaacagcaacaacttctttcatctagcccgctcgctatgggcaatgcacctacatacctgcaacaacagttgttgcaacaacagttgctgcaacaaattgtaccagctcttactcagctagctgtggcaaaccctgctgcctacttgcaacaactact

SEQ ID NO: 13132 - DNA, 627 bp, Zea mays
  Clone ID: LIB3061-098-Q1-K7-D1
ccacgcgtccgaatattttgagcattcagaaacacaccaagcgaagcgcactagcaacgacctaacaacaatggctaccaagatattagccctccttgcgcttcttgccctttttgtgagcgcaacaaatgcgttcattattccacaatgctcacttgctcctagtgccattattccacagttcctcccaccagttacttcaatgggcttcgaacacctagctgtgcaagccaacatgcaacaacaagcgcttgcggcgagcgtcttacaacaaccaattgcccaattgcaacaacaatccttgccacatctaacaatacaagccatcacaacgcaacagcaacaacagttcctaccagcactgagccacctagccatggtgaaccctgccgcctacttgcaagagcagctgcttgcatccaacccacttgctctggcgaacgtagttgcaaaccagcaacaacaacagctacaacagtttctgccaacgctcagtcaactagccatggtgaaccctgccgcctacgtacaacaacaacaactgcttttatctagcccgctcgctgtgggcaatgcacctacatacctgcaacaacaattgttgcaacagattgtaccagctctgac

SEQ ID NO: 13133 - DNA, 577 bp, Zea mays
  Clone ID: LIB3061-098-Q1-K7-D11
gagacggtagccaaccaggaggatgccctcgcacggatcgaaaagctttcggaagtaaacccgatgcttggcttccgtggctgcaggcttggtatatcgtaccctgagctaacagaaatgcaaggccgtgccatctttgaagctgctataacgatgaccaaccagggcgttcaagtctttccagagataatggttcctcttgttggaacaccgcaggaattgggacatcaggtggcccttatccgtcaagtcgctaacaaagttttcaccagtatgggtaaaactattgggtacaagatcgggacgatgattgagattcccagggcagctctagtggctgacgagatcgcggagcaggctgaattcttctcctttggaacgaacgacctcacgcagatgacctttggctacagcagggatgatgtggggaagttcatccccatttatctggctcagggcatcctccagcatgaccccttcgaggttctcgaccagagaggagtgggcgagctggttaagcttgctacagagaggggccgcaaagctaggcctaacttgaaggtgggcatttgtggag

SEQ ID NO: 13134 - DNA, 601 bp, Zea mays
  Clone ID: LIB3061-098-Q1-K7-D3
ctgctctttaccatccattggctttaagatttttcttgatgcgcactcattatagatcagatgtgaaccattctgatcaagcacttgagattgcatctgatcgtgtctattacatttttcagactctatatgactgcgaggaagtattagctacatatcgtgaagagggtatttctctctcagtgccgttcgaggagcaaaatctgattgataagcaccattcagaattcttgaaatatatgtcgaatgatcttaaaaccacagatgttctggatcgttgcttcatggagctgctgaaggccataaacagcagtttgaatgatttgaagaaactgcaacagaaaatagaacagcaaaagaagaaacagcaacagcagaagaagcagcaacagaagcaacagcaattgcaaaaacagccagaacattatattcaagctctgattgcactggaaatagaacttaaaaataaactgtctatacttggtctgatgccatcttcatctttggcagaggtactgaagcaattgaaggacaaagcactaaagagagcggggctgactgaagaaaaattgcaagagcagattgagcagagaaacgttgc

SEQ ID NO: 13135 - DNA, 610 bp, Zea mays
  unsure (1)..(610): unsure at all n locations; Clone ID: LIB3061-098-Q1-K7-D4
cgtccgctctgccttanccggacttccaaaccgccattgccctcgncgncgctgaggctgnggaggccagcggcgcagcgcaacatgcgcaatcagtggtcccatctgagcgccgccaaggagcagtggctggccgccgttgctgacggccgtgcccacgcctccgcgctctttaacgtccacggggtcgtgcaggaacatgccgacgatggatttgggggtgctcaaggatatgccggggatccgcgataaggcgaactccaagttggcgcttagagaggagcaatacagcggcatgcttctgtcggcctacaaggagatggtccgtcagctgtcctacttggttgaagcttcccattctatgcgccgtttttctaaagcggctccaaattgccccatcacacagttttctgaccgccaagataatttgaatgattcaggggatggtggaggagccccagtattcaaatggttctctgttttagaatttgagagtcttgcccaggagcttgttcagatgtttgtttcagagcaaaagttgaagaggcttgttctcttggaatttctctcgattgctttaaaggaaggtgtngaactccagacattatta

SEQ ID NO: 13136 - DNA, 402 bp, Zea mays
  unsure (1)..(402): unsure at all n locations; Clone ID: LIB3061-098-Q1-K7-D6
ccgaagctgcggcgatggcggcggagaagccggctcccgtgcgcgtgctctactgcggcgtctgcggcctcccggccgagtactgcgagttcggccccgacttcgagcgctgcaagccctggctgcgcgcgcatgcgcccggcgtctaccccgacgaccttgtcgccgnctnctccgggggatccggcggcggcgacaaggacgtcgacagggtcggggatcgcctncagggcgtcgggatctccgacggctccaccagcgccgcaggggatgcttccgcgtctaagccccaagaggcgaaacgcctgcctggtggtaagctcaagaaaaaggagaagcaagaagnggncatggagaagattgtncgtnacaagcgcaaatgngtnactgtggtgaaggggc

SEQ ID NO: 13137 - DNA, 154 bp, Zea mays
  Clone ID: LIB3061-098-Q1-K7-D7
cgaccatctagaggcggtgcacgtcgcctccatccgtcattgtcatcggcggtggcatctcgggcgttgcagctgcccgtgccctctccaattcttcatttaaggtgactgttttggaatcgagagatcgtattggcgggcgcattcatactga

SEQ ID NO: 13138 - DNA, 633 bp, Zea mays
  Clone ID: LIB3061-098-Q1-K7-D8
ccgggccaactattcacatagaaagcacattagtgtaccaacaatggcagccaaaatattttgcctccttatgctccttggtctttctgcaagtgctgctacggcgaccattttcccgcaatgctcgcaagctcctatagcttcccttcttcccccgtacctctcaccagcggtgtcttcggtatgttaaaacccaattctggagccctacaggatccaacaggcaatcgcagctggcatcttacctttatcacccttgttcctccaacaatcatcagccctattacaacagttacctttggtgcatttattggcacaaaacatcagggcacaacaactacaacaacttgtgctagcaaaccttgctgcctactctcagcaacagcagtttcttccattcaaccaactaggttcattgaactctgcttcttatttgcaacaacaacaactaccattcagccagctacctgctgcctacccccagcaatttcttccattcaaccaactagcagcattgaactctcctgcttatttacagcagcaacaactactaccattcagccagctagctggtgtgagccctgctaccttcttgacacaaccacagttggttgccgttctaccagcaccgtg

SEQ ID NO: 13139 - DNA, 637 bp, Zea mays
  Clone ID: LIB3061-098-Q1-K7-D9
caactagcaacatagaaagcacaatagtgtaccaacaatggcagccaaaatattttgcctccttatgctccttggtctttctgcaagtgctgctacggcgaccattttcccgcaatgctcgcaagctcctatagcttcccttcttcccccgtacctctcaccagcggtgtcttcggtatgtgaaaacccaattcttcaaccctacaggatccaacaggcaatcacagctggcatcttacctttatcacccttgttcctccaacaatcatcagccctattacatcagttacctttggtgcatttattggcacaaaacatcagggcacaacaactacaacaacttgtgctagcaaaccttgctgcctactctcagcaacagcagtttcttccattcaaccaactagctgcattgaactctgcttcttatttgcaacaacaacaactaccattcagccagctacctgctgcctacccccagcaatttcttccattcaaccaactggcagcattgaactctcctgcttatttacagcagcaacaactactaccattcagccagctagctggtgtgagccctgctaccttcttgatacaaccacagttgttgccgttctaccagcacgctgcgcctaacgct

SEQ ID NO: 13140 - DNA, 415 bp, Zea mays
  Clone ID: LIB3061-098-Q1-K7-E1
gcaacatagaaagcacaatagggcaccaacaatggcagccaaaatatcgcgcctccaaatgctccttggcctttctgcaagtgctgctacggcgaccatttctccgcaatgctcgcaagctcctatagcttgccttctttccccgaacctgttaacagcggtgtattgcgtatgtgaaaacgcaattcttcaaccctacaggatccaacaggcaacagcaacttgcataagacctctatcaccatcgttccttcaacaataatcagccatattacaacagtgaccaattgtgcattcattggttgaaaacatcaaggaacaacaactacaaaaactagtgctagcacaccttgctaccaactctgagccacataagcatcgtgaacccaaccaactacgtgcattaaactctgct

SEQ ID NO: 13141 - DNA, 503 bp, Zea mays
  Clone ID: LIB3061-098-Q1-K7-E10
attttgagcattcagaaacacaccaagcgaagcacattagcaacaacctaacaacaatggctaccaagatattatccctccttgcgcttcttgcgctttttgcgagcgcaacaaatgcgttcattattccacaatgctcacttgctccaagttccattattacacagttcctcccaccagttacttcaatgggcttcgaacacccagctgtgcaagcctataggctacaacaagcaattgcggcgagcgttttacaacaaccaatttcccagttgcaacaacaatccttggcacatttaacaatacaaaccattgcaacgcaacagcaacaacaattcctaccagcactgagccacctagccatggtgaaccctgccgcctacttgcaacagcagttgcttgcatcaaacccacttgctctggcaaacgtagttgcaaaccagccacaacaacagctgcaacagtttctgccagcgctcagtcaactagccatggtgaaccct

SEQ ID NO: 13142 - DNA, 642 bp, Zea mays
  Clone ID: LIB3061-098-Q1-K7-E11
tacaacaaccaattaaccaattgcaacaacaatccttggcacatctaaccatacaaaccatcgcaacacaacagcaacaacagttcctaccagcactgagccaactagatgtggtgaaccctgtcgcctacttgcaacagcaggtgcttgcatccaacccacttgctctggcaaacgtagctgcataccaacaacaacaacaattgcaacagtttctgccagcgctcagtcaactagccatggtgaaccctgccgcctacctacaacagcaacaactgctttcatctagccctctcgttgtgggtaatgcacctacatacctgcaacaacaattgctgcaacagattgtaccagctctgactcagctagctgtggcaaaccctgctgcctacttgcaacagctgcttccattcaaccaactgactgtgtcgaactctgctgcgtacctacaacagcgacaacagttacttaatccactagcagtgcctaacccattggtcactgccttcctacagcagcaacaattgctaccatacagccagttctctttgatgaaccctgccttgtcgtggcagcaacccatcgttggaggtgccatcttttagattacatatgagatgtaatcgataatggtgccctcat

SEQ ID NO: 13143 - DNA, 583 bp, Zea mays
  Clone ID: LIB3061-098-Q1-K7-E2
gcagcttttgcttgctctggggggaaggagagagagagagcgagagagagagagagatctagtagagaggctagtaggtggtcctcgaacgaagatgttggcggtgttcagcgggcaggtggtggaggtgccggcggagctggtggcggcgggcagccggacgccgtcgcccaagacgaaggcgtcgcagctcgtggggcgcttcctggccgcgtccgagccggccgtgtccgtgcagctcggcgaccacggccacctcgcctactcccacaccaaccaggcgctcctccgccccaggtcgttcgcggccaaggacgaggtgttctgcctgttcgaaggggtgctggacaacctgggtcggctgagccagcagcacgggctgtcaagcaagggcgccaacgaggtgctcctcgtcatcgaggcctacaagacgctgcgcgaccgcgcgccctacccggccagctttatgctcgcccagctcaccggctcctacgccttcgtcctcttcgacaagtccaccaactccctgcttgtcgcatctgacccccggggcagggtgcccgtcttctgggggatcaccgcc

SEQ ID NO: 13144 - DNA, 536 bp, Zea mays
  Clone ID: LIB3061-098-Q1-K7-E5
cgcaggattagggagcttacctccgtcgtccagaagaggttcaacttccctgagaatggcgtcgagctttacgccgagaaggtcgtcaaccgtgggctctgtgccatcgcgcaggccgagtccctccgttacaagctcctcggaggccttgccgtccgcagggcttgctatggtgttcttggttatgttatggagagtggtgccaagggttgtgaggtgattgtgagtggaaagctcagggcccaaagagccaagtccatgaagttcaaggatggctacatgatctcatctggtcagccagtgaacgagtacattgactcggctgtgagacacgttcttctcagacagggtgttctcggtatcaaggtgaagatcatgcttgactgggacccgaagggcaaggttggcccgatcactcctcttccggacctggtgaccatccacaccccgaaggacgaggacgagccgcgccctccggtcttggcacctcctgaggtgtaaggtcccaactgtgtccttgaaatggcagtttgatc

SEQ ID NO: 13145 - DNA, 256 bp, Zea mays
  Clone ID: LIB3061-098-Q1-K7-E7
gccgttcccacccggccttcttcaggccgtgagacgagacctccgtcgagctagctagctacctgcctctttcagttcgtcagtgcaaattaagcaccaaatgtcgaccgatgcctctgaataaatttaactgcgaggctagctgctgaacatcgatctgctagtattactacggcgaggctgctgaacagcgctcagttcggaatgtatgtataatctgaacgccaagtttaattttatgttacttctaccgatt

SEQ ID NO: 13146 - DNA, 647 bp, Zea mays
  Clone ID: LIB3061-098-Q1-K7-E8
gtcatcgagtattgcaacaagcacgccgagccgaccgggccgggcgacgcggccggcaccaccaacaggtccgccgaggatgagctcaacatcttcgacgcagacttcgtcaatgtagagcactccaccctcttggacctcatcctggctgcaaactacctggacatcaaggggctcctgaacctggcccgccaaaccattacagacttgatcaatgggaagatgcctgaggaggtctgcaagaccaacatcaagaacgacttgaccatcccttccacgtcggccttggccaccacaatgccctcctccgagcgaaagcagatggaggccaggtttatcgcctatatgcaagaaactgctgaggagaggatgactgggtttgctgttcgtggtgaaaaatacagaaagcatggtgaacgtccgccacaaccaccattggagatagttaaatacccagctcttttggaaagagcttggggatgggattcgatactgccgtactgtcctgtgaattcttggcccctatacaagacttacctccaagaatattatgagcgcaattctcgtgaagtattggctcatcaagtggaagctaatgctgcctctggtcccatctcacggggctgatgagatgatctggcactctg

SEQ ID NO: 13147 - DNA, 647 bp, Zea mays
  Clone ID: LIB3061-098-Q1-K7-F1
ggcggcgtcccggagcctggcggaccgcgcgctgcgcggcgtggcggacctgataaagctgctcccgagcggcacggtgttcctgttccagttcctgagcccgctggcgagcaacaacgggcactgcgccacgctgaacaaggcgctgagcggggcgctggtggcgctgtgcggcgcctcctgcgccttctcctgcttcaccgacagctacgtgggcgcggacgggcgcgtgtactacggcgtggtgacgcggcggggcctgcgcaccttcacgcccgacccggacgccgccgcccgggacctgtcggcgtaccgcctccgcgccggcgacttcgcgcacgccgcgctctcgctgctcgtcttcgccaccctcgcgctcctcgacgccgacaccgtcgcctgcctctacccggcgctggagctcgccgagcccaccatgatggccgtgctcccgcccgtcgtcggcgccgtcgcgggctacgtcttcatggtgttccccaacaaccggcacggcgtcgggtaccagcccacgcccgccaccgaggacttccagcacaaatactagccagccggttcgtcgtcgttgcagagtactgtactgcgcgtgtgtctttgattgtctgtctgtctgattcattcatttgctt

SEQ ID NO: 13148 - DNA, 644 bp, Zea mays
  unsure (1)..(644): unsure at all n locations; Clone ID: LIB3061-098-Q1-K7-F10
tccagatcagcaaagcggcagtgcgtagagaggatcgtcgaacagaacagcatgaagatggtcatcgttctcgtcgtgtgcctggctctgtcagctgccagcgcctctgcaatgcagatgccctgcccctgcgcggggctgcagggcttgtacggcgctggcgccggcctgacgacgatgatgggcgccggcgggctgtacccctacgcggagtacctgaggcagccgcagtgcagcccgctggcggcggcgccctactacgccgggtgtgggcagacgagcgccatgtaccagccgctccggcaacagtgctgccagcagcagatgaggatgatggacgtgcagtccgtcgcgcagcagctgcagatgatgatgcagcttgagcgtgccgctgccgccagcagcagcctgtacgagccagctctgatgcagcagcagcagcagctgctggcagcccagggtctcaaccccatggccatgatgatggcgcagaacatgccggccatgggtggactctaccagtaccagtaccagctgcccagctaccgcaccaacccctgtggcgtctncgctgccattccgccctactactgattcatgatatttgggaaatctcctctatccatccctctctatctatatat

SEQ ID NO: 13149 - DNA, 647 bp, Zea mays
  Clone ID: LIB3061-098-Q1-K7-F11
cccacgctttcggcgtgagtgggatgagcaaactcaatcctggaagcggactcatggctatgaccgtgttaatgatgacaaagacattccaatcattgaagccaaattgactgatgagcctggtgttgatccatttgcgcaaagaagggatgagaagaagaagagggttgaaaagcaagaaaaaaacagactggataacttaaagaaagctgcaaaggttggcgctttgccaagtcatatacagcttgctgcgaaggcgttgcccatcacaggaacaaaagctgaccttccaaaaaaatctagaaaagaggatcttgagagtgttgtcggcatggcttcatcagcaacagcaagtggtgggaagtttgatgagaagttgcctggcgagaaacctccaaagcaccctggcaaacacagaaagttcctcccagttgccgaagggaagggaatgggcagcctggagaaacagcagaatgacaaaatcctgaactctctacttgccagaaactctgatgaaccacttgatgtcggcaaggcaattacaatgtacaaggtgaaaaaggagaagcagagaaggaaagagaaaggcatgtcatcgaaatctgataagcttaagccccagaagaaaccccacaagaagtcatcga

SEQ ID NO: 13150 - DNA, 627 bp, Zea mays
  Clone ID: LIB3061-098-Q1-K7-F2
gcagcttctgcttgctctggggggaaggagagagagagagcgagagagagagagagatctagtagagaggctagtaggtggtcctcgaacgaagatgttggcggtgttcagcgggcaggtggtggaggtgccggcggagctggtggcggcgggcagccggacgccgtcgcccaagacgaaggcgtcgcagctcgtggggcgcttcctggccgcgtccgagccggccgtgtccgtgcagctcggcgaccacggccacctcgcctactcccacaccaaccaggcgctcctccgccccaggtcgttcgcggccaaggacgaggtgttctgcctgttcgaaggggtgctggacaacctgggtcggctgagccagcagcacgggctgtcaagcaagggcgccaacgaggtgctcctcgtcatcgaggcctacaagacgctgcgcgaccgcgcgccctacccggccagcttcatgctcgcccagctcaccggcttctacgccttcgtcctcttcgacaagtccaccaactccctgctcgtcgcatctgaccccgagggcagggtgccgctcttctgggggatcccgccgacggctgcgtcgccttctccgacgacatcgacatgctcaaaggc

SEQ ID NO: 13151 - DNA, 660 bp, Zea mays
  unsure (1)..(660): unsure at all n locations; Clone ID: LIB3061-098-Q1-K7-F4
ccggggaacccgttcgacccangagggttttgcgcgntgcccaagcgctcctggctctcgctgcgagcgccacctccacgcatacaagcggcggctgcggctgccagccaccgccgccggttcatctaccgccgccggtgcatctgccacctccggttcacctgccacctccggtgcatctcccaccgccggtccaccgggggccgccggtccacctgccaccgccggtccatgtgccgccgccggttcatctgccgccgccaccatgccactaccctactcaaccgccccggcctcagcctcatccccagccacacccatgcccgtgccaacagccgcatccaagcccgtgccagctgcagggaacctgcggcgttggcagcaccccgatcctgggccagtgcgtcgagtttctgaggcatcagtgcagcccgacggcgacgccctactgctcgcctcagtgccagtcgttgcggcagcagtgttgccagcagctcaggcaggtggagccgcagcaccggtaccaggcgatcttcggcttggtcctccaggccatcctgcagcagcagccgcaaagcgggcaggtcgcggggctgttggcggcgcaaatagcgcagcaactgacggcgatgtgcgggctgcagcaaccgacttcatgcc

SEQ ID NO: 13152 - DNA, 73 bp, Zea mays
  Clone ID: LIB3061-098-Q1-K7-F5
aaaaaaatttaaaaaaaaaaaaaaaaaaggaaaagggaaaaataaaaaaaaaaaaaaaaaaaaaagggggggt

SEQ ID NO: 13153 - DNA, 233 bp, Zea mays
  Clone ID: LIB3061-098-Q1-K7-F6
ccgggtcgacctagcgtccgggggtattcagcaggtagctggctgaatggtagttgttgttgttgcaaataagaagcagagttcaaccaacttgctttgacaaacccagcagcgttctaccaacaacccatcattggtggtgccctcttttagatttcttatgagttatagttcaataataaagttttttgtctgatgtttgtggcttcccagaaataagaaagtacatttct

SEQ ID NO: 13154 - DNA, 655 bp, Zea mays
  Clone ID: LIB3061-098-Q1-K7-F7
tagcaacatagaaagcacaatagtgtaccaacaatggcagccaaaatattttgcctccttatgctccttggtctttctgcaagtgctgctacggcgaccattttcccacaatgctcacaagctcctatagcttcccttcttcccccgtacctctcaccagcggtgtcttcggtatgtgaaaacccaattcttcaaccctataggatccaacaggcaatcgcagctggcatcttacctttatcacccttgttcctccaacaatcatcagccctattacagcagttacctttggtgcatttattggcacaaaacatcagggcacaacaactacaacaacttgtgctagcaaaccttgctgcctactctcagcaacaacagtttcttccattcaaccaactagctgcattgaactctgcttcttatttgcaacaacaacaactaccattcagccagctatctgctgcctacccccagcaatttcttccattcaaccaactgacagctttgaactctcctgcttatttacagcagcaacaactactaccattcagccagctagctggtgtgagccctgctaccttcttgacacaaccacaattgttgccgttctaccagcacgctgcgcctaacgctggcaccctcttacaactgcaac

SEQ ID NO: 13155 - DNA, 640 bp, Zea mays
  Clone ID: LIB3061-098-Q1-K7-F8
gtggaatacagtagcaaaaatagagcaacaatggcggccaagatattttccatccttatgctccttgctctttctgcatgtgttgctaacgcgaccatttttcctcaatactcacaagctcctatagctgcccttcttcccccataccttccatcaatgaccgctttagtatgtgaaaacccagcccttcaaccctacaggatccagcaagcaatcgcaacaagcaacttacctttatcacacctgttctttcaacaatcgccagccctatctttggtgcagtcattggtacaaaccatcagggcagaacagttgcagcaactcgtgctaccagtgatcagccaagtagctctggcaaacctttccccctactctcagcaacaacaatttcttccattcaaccaactgtctatactgaaccctgctgcttatttgcagcaacaacaactactaccattcagccagctagctactgcctactctcagcagcaacaatttcttccatttaaccaattggccgcactgaacccctctgcttatttccagcagcaaatactactaccatttggccagctagctacaacaagccccgcttccttcttgacacaacacaagtgctttcgttctaccagcagtttgt

SEQ ID NO: 13156 - DNA, 140 bp, Zea mays
  unsure (1)..(140): unsure at all n locations; Clone ID: LIB3061-098-Q1-K7-G10
aatctagaaatgtactttcttatttctgggaagccacaaacatcatccaaaaaacttcattattgaagtataactcataagcaatctaaaagagggcaccaccaatgatgggttgttggtagaacgctgttgggtttgtn

SEQ ID NO: 13157 - DNA, 631 bp, Zea mays
  Clone ID: LIB3061-098-Q1-K7-G11
ctcaagcatcagcggcaggagctctgggcagcgtgcgcacgtggggtacctagctcgctctgctagcctaccatggctgatcaccaccggggtgcgacgggaggtggcgggggctacggcgacctccagcgcgggggcggcatgcacggcgaggcgcagcagcagcagaagcagggcgccatgatgacggcgctcaaggccgcgacggccgcgaccttcggcgggtcgatgctggtgctgtccgggctgatcctggccggcaccgtgatcgcgctcacggtggccacccccgtgctggtgatcttcagcccgcgtggtggcccgcgggccggattcggccttggccctcatgggcgggccgggttgcgtcacctccgggcggcctcgggcgtcgcttgcgctgtcccgtgtttctcctgggatggtacaagtagcctgacggggcaagcacgccgccggggcgcccgaccacgctggaccacgccaaggcgagggctggcgtccaaggcccgcgacatcaaggatgcagcacagcaccgcatcgaccaggcgcaggggtcttgagagaagaccacactcgagcggaccgcgcgcgcgacctccttgaaccactgccggcgcggcgggatat

SEQ ID NO: 13158 - DNA, 149 bp, Zea mays
  Clone ID: LIB3061-098-Q1-K7-G12
ggggggccccccacagcccgctttattttatcagcggcaggagctcagggcagcgtgcgcacgtggctgtcctagctcgctctgctagcctaccatggctgattaccagccggggtgcgacagggaggtggtgggggctacggcgacct

SEQ ID NO: 13159 - DNA, 615 bp, Zea mays
  unsure (1)..(615): unsure at all n locations; Clone ID: LIB3061-098-Q1-K7-G2
cgggtcgacccttttgcgtccgattttgttttantttcagaaacacacaaacgcgaagcacattagcaacaacctaacaacaatggctaccaagatattatccctccttgcgcttcttgcgctttttgcgagcgcaacaaatgcgttcattattccacaatgctcacttgctccaagttccattattacacagttcctcccaccagttacttcaatgggcttcgaacacccagctgtgcaagcctataggctacaacaagcaattgcggcgagcgtcttacaacaaccaatttcccagttgcaacaacaatccttggcacatctaacaatacaaaccatcgcaacgcaacagcaacaacaattcctaccagcactgagccacctagccatggtgaaccctgccgcctacttgcaacagcagttgcttgcatcaaacccacttgctctggcaaacgtagttgcaaaccagccacaacaacagctgcaacagtttctgccagcgctcagtcaactagccatggtgaaccctgccgcctacctacaacagcaacaactgctttcatctagcccgctcgctgtggccaatgcacctacatacctgcaacaacaattgtt

SEQ ID NO: 13160 - DNA, 667 bp, Zea mays
  unsure (1)..(667): unsure at all n locations; Clone ID: LIB3061-098-Q1-K7-G3
attaaagttaagattatgcaaaaaatgtaagaagagtcaagtgtcttgacatatacaatctatctgaatgctggagggttttagtactttgggtgctttggtatccttgactttcagttagatatgtccacaaaaagttcagtcagcagtacaaagctacaatcggtgcagatttcgtcacaaaggaggttctgatcgaagacaggctagtcacgttgcagatatgggacaccgcggggcaggagagattccagagtcttggggttgcattctacagaggggccgattgctgtgtgctcgtctatgatgttaactctaacaggtcatttgatacactcaatacatggcatgatgaattcctcaaccaagctagcccatcagatcctaaaacttttcccttcatcttactcggtaacaagattgatgtagatggtggaaaaagcagagtggtttctgataagaaagcaatggagtggtgtgcttctaaaggcaatatcccttattttgaaacttctgcaaaagaggactacaatgttgacaatgctttcctgactgttgccaagcttgctctagagcatgagcgcgatcaggacatttacttccagagtgttgcggatcctgtccctgagactgagcagagaagcngatgtgcatgctagtagttagt

SEQ ID NO: 13161 - DNA, 636 bp, Zea mays
  Clone ID: LIB3061-098-Q1-K7-G6
caaaaacataccaagcgaagcgcactagcaacgacctaacaccaatggctaccaagatattagccctccttgcgcttcttgcccttttagtgagcgcaacaaatgcgttcattattccacagtgctcacttgctcctagtgccattattccacagttcctcccaccagttacttcaatgggcttcgaacatccagccgtgcaagcctacaggctacaactagcgcttgcggcgagcgccttacaacaaccaattgcccaattgcaacaacaatccttggcacatctaaccctacaaaccattgcaacgcaacaacaacaacaacaacagtttctgccatcactgagccacctagccgtggtgaaccctgtcacctacttgcaacagcagctgcttgcatccaacccacttgctctggcgaacgtagctgcataccagcaacaacaacagctgcaacagtttatgccagtgctcagtcaactagccatggtgaaccctgccgtctacctacaactactttcatctagcccgctcgcggtgggcaatgcacctacgtacctacaacaacagttgctgcaacaaattgtaccagctctgactcagctagctgtggcaaaccctgctgcctacttacaac

SEQ ID NO: 13162 - DNA, 659 bp, Zea mays
  Clone ID: LIB3061-098-Q1-K7-G7
cccggattttcagcattcaaaaacacaccaagcgaagcgcactagcaacgacctaacaccaatggctaccaagatattagccctccttgcgcttcttgcccttttagtgagcgcaacaaatgcgttcattattccacagtgctcacttgctcctagtgccattattccacagttcctcccaccagttacttcaatgggcttcgaacatccagccgtgcaagcctacaggctacaactagcgcttgcggcgagcgccttacaacaaccaattgcccaattgcaacaacaatccttggcacatctaaccctacaaaccattgcaacgcaacaacaacaacaacaacagtttctgccatcactgagccacctagccgtggtgaaccctgtcacctacttgcaacagcagctgcttgcatccaacccacttgctctggcgaacgtagctgcataccagcaacaacaacagctgcaacagtttatgccagtgctcagtcaactagccatggtgaaccctgccgtctacctacaactactttcatctagcccgctcgcggtgggcaatgcacctacgtacctacaacaacagttgctgcaacaaattgtaccagctctgactcagctagctgtggcaaaccctgctgcctacttacaacagttgc

SEQ ID NO: 13163 - DNA, 596 bp, Zea mays
  Clone ID: LIB3061-098-Q1-K7-G8
ctagcaacatagaaagcacaatagtgtaccaacaatggcagccaaaatattttgcctccttatgctccttggtctttctgcaagtgctgctacggcgaccattttcccgcaatgctcgcaagctcctatagcttcccttctttccccgtaccttttaccaacggtgtcttcggtatgtgaaaacccaattcttcaaccctacaggatccaacaggcaatcgcagctggcattttacctttatcacccttgttccttcaacaattattaaccctattacaacagttacctttggtgcatttattggcacaaaacattagggcacaacaactacaacaacttgtgctagcaaaacttgctgtctactctcagcaacagcagtttcttccattcaaccaactaggttcattgaactctgcttcttatttgcaacaacaacaactaccattcagccagctacctgctgcctacccccagcaatttcttccattcaaccaactagcagcattgaactctcctgcttatttacagcagcaacaactactaccattcagccagctagctggtgtgagccctgctaccttcttgacacaaccac

SEQ ID NO: 13164 - DNA, 373 bp, Zea mays
  unsure (1)..(373): unsure at all n locations; Clone ID: LIB3061-098-Q1-K7-H1
gacccacgcgnccggcaaggggccaggccgccagcgacacgggagccgggggacgacgacgngcnccgngcggggcagcggcncancggaccccagggcnaccncgccgccaccaaggcgcagggagaaggcnnccagaacancgcccccgagacgaacccngacaccanggncagccacgncgccgggaagagggccgnccngagcgacnngccggccggcgncagcgccagcncgnangccancnccanggaggaagcngcagagcncaagaacgggaggaagcangagcnggcggngcnnacnccngcnggcagnggcagcnaccaacaaggncaagcnggcagcgcccaacaggaggcacaaccccaga

SEQ ID NO: 13165 - DNA, 591 bp, Zea mays
  Clone ID: LIB3061-098-Q1-K7-H2
gcaacatataaagcacaatagtgtaccaacaatggcagccaaaatattttgcttccttatgctccttggtctttctgcaagtgttgctaccgcaaccattttcccacaatgctcacaagctcctatagcttcccttcttcccccatacctctcaccagcggtgtcttcaatgtgtgaaaacccaattgttcaaccctacaggatccaacaggcaatcgcaacaggcatcttaccattatcacccttgttcctccaacaaccgtcagccctattacagcagttacctttggtccatttggtggcacaaaacatcagggcacaacaactacaacaacttgtgctagcaaaccttgctgcatactctcagcaacatcagtttcttccattcaaccaactggctgcattgaactctgctgcttatttgcaacaacaattaccattcagccagctagttgctgcctacccccagcaatttcttccattcaaccaactagcagcattgaactctgctgcttatttacagcagcaacaactactaccattcagccagctagctgatgtgagccctgctgccttcttgacacaacaaca

SEQ ID NO: 13166 - DNA, 659 bp, Zea mays
  Clone ID: LIB3061-099-Q1-K7-A1
ctctcaccagcggtgtcttcggtatgtgaaaacccaattcttcaaccctacaggatccaacaggcaatcgcagctggcatcttacctttatcacccttgttcctccaacaatcatcagccctattacaacagttacctttggtgcatttattggcacaaaacatcagggcacaacaactacaacaacttgtgctagcaaaccttgctgcctactctcagcaacagcagtttcttccattcaaccaactaggttcattgaactctgcttcttatttgcaacaacaacaactaccattcagccagctacctgctgcctacccccagcaatttcttccattcaaccaactagcagcattgaactctcctgcttatttacagcagcaacaactactaccattcagccagctagctggtgtgagccctgctaccttcttgacacaaccacagttgttgccgttctaccagcacgttgcgcctaacgctggcaccctcttacaactgcaacaattgctgccattcaaccaacttgctttgacaaacccagcagtgttctaccaacaacccatcattggtggtgccctcttttagatttcttatgagttatagttcaatataaagttttttatctgatgtttgtggcttcccagaaataagaaagt

SEQ ID NO: 13167 - DNA, 486 bp, Zea mays
  Clone ID: LIB3061-099-Q1-K7-A10
acaacttgtgctagcaaaccttgctgcctactctcagcaacagcagtttcttccattcaaccaactagctgcattgaactctgcttcttatttgcaacaacaacaactaccattcagccagctacctgctgcctacccccagcaatttcttccattcaaccaactggcagcattgaactctgctgcttatttacagcagcaacaactactaccattcagccagctagctggtgtgagccctgctaccttcttgatacaaccacagttgttgccgttctaccagcacgctgcgcctaacgctggcaccctcttacaactgcaacaattgctgccattcaaccaacttgctttgacaaacccagcagcgttctaccaacaacccatcattggtggtgccctcttttagatttcttatgagttatagttcaataataaagttttttgtctgatgtttgtggcttcccagaaataagaaagtacatttct

SEQ ID NO: 13168 - DNA, 559 bp, Zea mays
  unsure (1)..(559): unsure at all n locations; Clone ID: LIB3061-099-Q1-K7-A11
cgggncgacccagcgnncggcaacatagnaaagcacaanagngnaccaacaagggcagccaaanaagnnngcnnccnnangcgccnnggncnnncngcaagngcngcnaccgcaaccannnncccacaangcgcacaagcnccnanagcngccnnncnncccccaaaccncncaccagcggngncnncagnangggaggggggggncnncaacccnacagganccaacaggcaancgcagcaggcancnaaccnnnancacccnnggnccnccaacaaccgncagcccaaaaacagcagnnaccnnnggngcannngnnggcacaaaacancaaggcacaacaacnacaacaacnngngcnaggaaaccnngcngccnacncncagcaacagcagnngcnnccaaacaaccaaccggcngcanngaacccngcngcnaaaangcaacaacaacnaccanncagncagcnagcngnngccaacccccagcanaggcnngcagncaaccaacgggcagcanngaacccngcngcnnanggacaacagcaacagcnaccacc

SEQ ID NO: 13169 - DNA, 635 bp, Zea mays
  Clone ID: LIB3061-099-Q1-K7-A12
attttcagcattcaaaaacacaccaagcgaagcgcactagcaacgacctaacaccaatggctaccaagatattagccctccttgcgcttcttgcccttttagtgagcgcaacaaatgcgttcattattccacagtgctcacttgctcctagtgccattattccacagttcctcccaccagttacttcaatgggcttcgaacatccagccgtgcaagcctacaggctacaactagcgcttgcggcgagcgccttacaacaaccaattgcccaattgcaacaacaatccttggcacatctaaccctacaaaccattgcaacgcaacaacaacaacaacaacagtttctgccatcactgagccacctagccgtggtgaaccctgtcacctacttgcaacagcagctgcttgcatccaacccacttgctctggcgaacgtagctgcataccagcaacaacaacagctgcaacagtttatgccagtgctcagtcaactagccatggtgaaccctgccgtctacctacaactactttcatctagcccgctcgcggtgggcaatgcacctacgtacctacaacaacagttgctgcaacaaattgtaccagctctgactcagctagctgtggcaaaccctgct

SEQ ID NO: 13170 - DNA, 609 bp, Zea mays
  unsure (1)..(609): unsure at all n locations; Clone ID: LIB3061-099-Q1-K7-A2
gcggctgccagccaccgccgccggntcatctaccgccgccggngcatctgccacctccggttcacctgccacctccggtgcatctcccaccgccggtccacctgccgccgccggtccacctgccaccgccggtccatgtgccgccgccggttcatctgccgccgccaccatgccactgggggtgtcaaccgccccggcctcagcctcatccccagccacacccatgcccgtgccaacagccgcatccaagcccgtgccagctgcagggaacctgcggcgttggcagcaccccgatcctgggccagtgcgtcgagtttctgaggcatcagtgcagcccgacggcgacgccctactgctcgcctcagtgccagtcgttgcggcagcagtgttgccagcagctcaggcaggtggagccgcagcaccggtaccaggcgatcttcggcttggtccttcagtccattctgcagcagcagccgcaaagcggccaggtcgcggggctgttggcggcgcanatagcgcagcaactgacggcgatgtgcggcctgcagcagccgactccatgcccctacgctgctgccggcggtgtcccccactgaagaaactatgtgc

SEQ ID NO: 13171 - DNA, 603 bp, Zea mays
  unsure (1)..(603): unsure at all n locations; Clone ID: LIB3061-099-Q1-K7-A3
gcaacatagaaagcacaatagngtaccaacaatggcagccaaaatattttgcctccttatgctccttggtctttctgcaagtgctgctacggcgaccattttcccacaatgctcacaagctcctatagcttcccttcttcccccgtacctctcaccagcggtgtcttcggtatgtgaaaaggcaattcttcaaccctataggatccaacaggcaatcgcagctggcatcttacctttatcacccttgttcctccaacaatcatcagccctattacagcagttacctttggtgcatttattggcacaaaacatcagggcacaacaactacaacaacttgtgctagcaaaccttgctgcctactctcagcaacaacagtttcttccattcaaccaactagctgcattgaactctgcttcttatttgcaacaacaacaactaccattcagccagctatctgctgcctacccccagcaatttctttcattcaaccaactgacagctttgaactctcctgcttatttacaggagcaacaactactaccattcaaccagctagctggtgtgagccctgctaccttcttgacacaaccacaattgttggc

SEQ ID NO: 13172 - DNA, 330 bp, Zea mays
  unsure (1)..(330): unsure at all n locations; Clone ID: LIB3061-099-Q1-K7-A5
ccccccccccccccccaaaaccccaaaaaaagacccccgggggggggggggggggagagggaaacgacccaccccccggggggggggggggggggggggaaaaaaaacccccccccccccccccgggggggggggggccccccccaaaaaaaaaaaaaaagggggnggcancccccccgccccccccgggggggnnncgccccccggcgcgggggggggaaaaagaagaggaccaaccccacccccccccgcggggggggggggggggcccccccccccccccccccccccnaaaaaaaaaaaaaaaaaaaaaaagaggggagggggggg

SEQ ID NO: 13173 - DNA, 640 bp, Zea mays
  Clone ID: LIB3061-099-Q1-K7-A6
caactagcatcatagaaagcacaatactgtaccaacaatggcagccaaaatattttgcttccttatgctccttggtctttctgcaagtgctgctaccgcaaccattttcccacaatgctcacaagctcctatagcttcctttcttcccccatacctctcaccagcggtgtcttcaggatgggggaacccaattcttcaaccctacaggatccaacaggcaatcgcagcaggcatcttacctttatcacccttgttcctccaacaaccgtcagccctattacagcagttacctttggtgcatttgttggcacaaaacatcaaggcacaacaactacaacaacttgtgctaggaaaccttgctgcctactcttagcaacagcagtttctttcattcaaccaactggctgcattgaactctgctgcttatttgcaacacaactaccattcagtcagctagctgctgcctacccccagcaatttcttccattcaaccaactggcagcattgaactctgctgcttatttacaacagcaacagctaccaccattcagccagctagctgatgtgagccctgttgccttcttgacaccaacacagttgttggcggtctacctgcacgctgcgcctaacgctggcaccc

SEQ ID NO: 13174 - DNA, 531 bp, Zea mays
  unsure (1)..(531): unsure at all n locations; Clone ID: LIB3061-099-Q1-K7-A8
cgaacaacaacaacaaccgcagcaccaacggcaacgggggcaacaacagcaccaacaacaacancaaggggaaggccaacaacaacancaccaacaancacaaggccangngcaacaacacgaacagagccangagcaacaccaaggacagagccangagcaacaacancaacaacaaggggaagggcaggacaagcagcaacaaccacaacagccaaagcaanancagcagggccaggaaaaancacaacagcaacaanggcanngccaggagcagcaacagaccacaaggngcagcnanaacnaccanagcagnagcncaaaacnaaaaaanngncangaannccnaaggcagcagngcagcccnnnggnaangccnnnncnccaancacggnnganacaaccaagnagcngccaggnanngcagcaacaanggngncangaacnnaggcaganngagccacaanacanncaccaagcaancnacaacaaggngcaanncanaaaccaggaggagcaacaacaacaacc

SEQ ID NO: 13175 - DNA, 636 bp, Zea mays
  Clone ID: LIB3061-099-Q1-K7-A9
agcaacatagaaagcacaatagtgtaccaacaatggcagccaaaatattttgcttccttatgctccttggtctttctgcaagtgttgctaccgcaaccattttcccacaatgctcacaagctcctatagcttcccttcttcccccatacctctcaccagcggtgtcttcaatgtgtgaaaacccaattgttcaaccctacaggatccaacaggcaatcgcaacaggcatcttaccattatcacccttgttcctccaacaaccgtcagccctattacagcagttacctttggtccatttggtggcacaaaacatcagggcacaacaactacaacaacttgtgctagcaaaccttgctgcatactctcagcaacatcagtttcttccattcaaccaactggctgcattgaactctgctgcttatttgcaacaacaattaccattcagccagctagttgctgcctacccccagcaatttcttccattcaaccaactagcagcattgaactctgctgcttatttacagcagcaacaactactaccattcagccagctagctgatgtgagccctgctgccttcttgacacaacaacagttgttgccgttctacctgcacgctatgcctaacgctggcaccc

SEQ ID NO: 13176 - DNA, 670 bp, Zea mays
  Clone ID: LIB3061-099-Q1-K7-B1
attgagaccaactagcaacatagaaagcacaatagtgtaccaacaatggcagccaaaatattttgcttccttatgctccttggtctttctgcaagtgttgctaccgcaaccattttcccacaatgctcacaagctcctatagcttcccttcttcccccatacctctcaccagcggtgtcttcaatgtgtgaaaacccaattgttcaaccctacaggatccaacaggcaatcgcaacaggcatcttaccattatcacccttgttcctccaacaaccgtcagccctattacagcagttacctttggtccatttggtggcacaaaacatcagggcacaacaactacaacaacttgtgctagcaaaccttgctgcatactctcagcaacatcagtttcttccattcaaccaactggctgcattgaactctgctgcttatttgcaacaacaattaccattcagccagctagttgctgcctacccccagcaatttcttccattcaaccaactagcagcattgaactctgctgcttatttacagcagcaacaactactaccattcagccagctagctgatgtgagccctgctgccttcttgaccaacaacagttgttgccgttctacctgcacgctatgcctaacgctggcaccctcttacaactgcaacaattgct

SEQ ID NO: 13177 - DNA, 647 bp, Zea mays
  Clone ID: LIB3061-099-Q1-K7-B10
gcctcctttccctagcctccacgacgcaagggagagtgacggaaagcgacgcggcgcgagcgaggagggccaaggggaagaggggaagcaccgcaccaggacccttgttcgccgccgccgcctctgatctccgcgaggttgtcaggattcaatatgtcgaccagcacattcgctacttggtgcacgctgttgggcaatgttagaacaacgcaggcctcccagacagcggtgaagagcccttcgtctctaagcttcttcagccaagttacgaaggttccaagcctgaagacctccaagaaactggatgtctccgccatggctgtatacaaggtgaagcttgtcgggcctgaaggtgaagagcacgagtttgatgctccagacgacgcctacatccttgacgcagccgagactgccggtgtggagttgccatactcgtgccgtgctggggcttgctccacctgtgccggcaaaatcgagtctggttcggttgaccagtcggatgggtccttccttgatgacgggcagcaggaggaaggttatgtgctgacatgcgtctcctacccaaagtccgactgcgtcatccacacccacaaggaaggcgacctgtactagggctagggctttccaatttggcgagggacaaaaat

SEQ ID NO: 13178 - DNA, 493 bp, Zea mays
  Clone ID: LIB3061-099-Q1-K7-B11
ctggacaatgacaaggactatgtggcagcagagcatcaggaattacttaatgcttctaagtgctcttttgtatcagggttatttccacaagcaacagaagagaacacaaaatcatcaaaatcctcaattgcaactcgctttaagatacaacttcatgaactcatggagactttgagctctacagagccacattacataagatgtataaaaccaaatagtgtccttaagcctggcatttttgagaataccaatgttctgcagcagcttcgatgttctggtgttcttgaagccattagaatcagctgtgctggttatcccacaaggaaactatttcatgattttctacatcgttttcgtgttcttgctcctgaaattttgaaagagaaaaatgatgaaaaagtctcctgtcaaaaggttttggacaaaatgggactacagggttatcagataggaagaactaaggtatttctgagggctggtcaaatggctgatc

SEQ ID NO: 13179 - DNA, 598 bp, Zea mays
  unsure (1)..(598): unsure at all n locations; Clone ID: LIB3061-099-Q1-K7-B12
ctgcagtttccggtgccggactcccgggcggttgcaaaactccaggaagagtgggtggaaaatgcagaccgctgggtggctggtttcttagagaagtttgaggaagggtgccactcaatggggacggccatcaaggagaggatccaggagaggctcatcaaggcacaatccagcgactttggcagcctcctacagtacgacagctacgattctgatgaagccaaagaaaacgacgaggacgaagacgaactctttgaagacgtcaaggaatagcacatccgtacatatacaatggttttgtagctgcaaattgtgttgtgagtcagttgcctctctctggttggtgatctttatatatggtctcaaaggtaggtcaggttgcaatgtttgtagctgctcttggtgtttgttcaggcaacgcatggttgtaaaagctgtggaaagacttgtgcagtcaaggatacagattccgatggttacctttgggttagaacatatacggctgtaaaattggaagtcgaggtggttaaaactctgaaatcttgtctgttttccttccnaannaaaaaaaanaaanaaaaaaaaaaaanaananngg

SEQ ID NO: 13180 - DNA, 555 bp, Zea mays
  Clone ID: LIB3061-099-Q1-K7-B2
gttggcttctcctccccctccggttcgggttcgggttcgtgaggttctccggggttcggtttcgtgggtgggcggatcgagatggcggcgtcggatgttgagtaccgctgcttcgtcggcggcctcgcctgggccacggacgaccactccctccacaacgccttcagcacctacggcgaggggctcgagtccaagatcatcctcgatcgggagacgcagaggtcccgcggcttcggcttcgtcaccttctccacggaggaggcgatgcggaacgccatcgagggcatgaacggcaaggagctggacggccgcaacatcaccgtcaacgaggcccagtcccgcggcggccgtggaggcggcggcggcggctacggtggtggccgtggaggcggcggctacggcggtggcgggcgccgtgatggcggcggcggctaccgcggtggcggcggcggctacggtggcggcggtggctaccgtggtggtggtggcggctaccgcggtggcaaccgttgcggcggctacggcaacttcgacgggaactggaggaactgagcg

SEQ ID NO: 13181 - DNA, 605 bp, Zea mays
  unsure (1)..(605): unsure at all n locations; Clone ID: LIB3061-099-Q1-K7-B5
gggcccttctttggtgcagcattggtcaaaccatcaaggcacagcagctgcagcaactcgtgctacctgtgatcaaccaagtagctctggcaaacctttctccctactatcagcaacaacaatttcttccattcaaccaactatctacactgaaccctgctgcttatttgcagcaacaactattaccattcaggcggctagctactgcctactctcatcaacaacaacttcttccatttaaccaattggccgcactgaacctcgctgcttatttgcagcagcaaatattactaccatttagccagctagctgcagcaagccgtgcttccttcttgacacagcaacagttgctgcctttctaccagcagtttgcggctaaccccgcaaccctcttacaactacaacaattgttgccctttgtccaacttgctttgacaaacccagcagcctcctaccaacaacacatcattggtggtgccctcttttagattgcttattagttgtaattcaataataaagttttttggatgatgtatgtggccaaccagaaataagaagttacatttccagattctaatgtgaaaaaaaaaaanccannnnnnnaa

SEQ ID NO: 13182 - DNA, 470 bp, Zea mays
  unsure (1)..(470): unsure at all n locations; Clone ID: LIB3061-099-Q1-K7-B6
ccaaaatgcccngacnggccagccnnncaaccgcnccnncagcgggagcggggcanccagggacanngnggngnccagnggcagagcnnacccgagcgcccngaacaagaacngcagnnncgcnggcgccgngaaagccagcagcgangnagcngagaccgcaagcgncccgagcggggagggagcncccgcnnggnncagagngacangnngnncaaaaanncngcnggaaggaagggcccnngagcnnaggacaggcaggaagncnnggggcccacgnagngagngnacaannncngnancncaaanaccgngcncgnngccagnnngnaccgnaccanananaaaccanagaancngnngccacnnagaagncnggccaagggcagcngnaaggcnncacaagcnnanagccnggaaacannagacanngaaaaacccgagcagngaanaaaggangcccaaggnag

SEQ ID NO: 13183 - DNA, 141 bp, Zea mays
  unsure (1)..(141): unsure at all n locations; Clone ID: LIB3061-099-Q1-K7-B8
ctcctgcggcggtggaagattaggaattgagcccgcggcaagctcggggagttactgtgaatccatctgattcccacccacccgcgcagacgcagctgcattccgcgatcccaggcggcgggaggcngctcttgatgctag

SEQ ID NO: 13184 - DNA, 569 bp, Zea mays
  Clone ID: LIB3061-099-Q1-K7-C11
ctagcaacatagaaagcacaatagtgtaccaacaatggcagccaaaatattttgcctccttatgctccttggtctttctgcaagtgctgctacggcgaccattttcccacaatgctcacaagctcctatagcttcccttcttcccccgtacctctcaccagcggtgtcttcggtatgtgagggcccaattcttcaaccctataggatccaacaggcaatcgcagctggcatcttacctttatcacccttgttccttcaacaatcattagccctattacagcagttacctttggtgcatttattggcacaaaacattagggcacaacaactacaacaacttgtgctagcaaaccttgctgcctacttttaacaacaacagtttctttcattcaaccaactagctgcattgaactctgcttcttatttgcaacaacaacaactaccattcaaccagctatctgctgcctacccccagcaatttctttcattcaaccaactgacagctttgaactctcctgcttatttacaggagcaacaactactaccattcaaccagctagctggtgtga

SEQ ID NO: 13185 - DNA, 405 bp, Zea mays
  unsure (1)..(405): unsure at all n locations; Clone ID: LIB3061-099-Q1-K7-C12
caaaacancagggcacaacaaccacaacaacccgngcnagcaaaccnngcngcanacncncagcaacancagnnncnnccaaacaaccaacnggcngcanngaacncngcggggggggggcaacaacaannaccanncagccagcnagnngcngccnacccccagcaannncnnccanncaaccaacnagcagcanngaacncngcngcnnannnacagcagcaacaacnacaaccanncagccagcnagcngangngagcccngcngccnncnngacacaacaacagnngnngccgnncnaccngcacgcnangccnaacgcnggcacccnnnaacaacngcaacaanngcngccanncaaccaacnngcnnngacaaacccaacagngnncnaccaacaaccc

SEQ ID NO: 13186 - DNA, 502 bp, Zea mays
  Clone ID: LIB3061-099-Q1-K7-C2
caaccaagtagctctggcaaacctttctccctactatcagcaacaacaatttcttccattcaaccaactatctacactgaaccctgctgcttatttgcagcaacaactattaccattcagccagctagctactgcctactctcatcaacaacaacttcttccatttaaccaattggccgcactgaacctcgctgcttatttgcagcagcaaatattactaccatttagccagctagctgcagcaagccgtgcttccttcttgacacagcaacagttgctgcctttctaccagcagtttgcggctaaccccgcaaccctcttacaactacaacaattgttgccctttgtccaacttgctttgacaaacccagcagcctcctaccaacaacacatcattggtggtgccctcttttagattgcttattagttgtaattcaataataaagttttttggatgatgtatgtggccaaccagaaataagaagttacatttccagattct

SEQ ID NO: 13187 - DNA, 649 bp, Zea mays
  unsure (1)..(649): unsure at all n locations; Clone ID: LIB3061-099-Q1-K7-C3
caactagcatcatagaaagcacaatattgtaccaataatggcagccaaaatattttgcctcattatgctccttggtctttctgcaagtgctgctacggcgagcattttcccgcaatgctcacaagctcctatagcttcccttcttcccccatacctctcaccagcgatgtcttcagtatgggaaaatccaattcttctaccctacaggatccaacaggcaatcgcagcaggcatcttacctttatcacccttgttcctccaacaatcatcagccctattacagcagttacctttggtgcatttattggcacaaaacatcagggcacaacaactacaacaactcgtgctagcaaaccttgctgcctactctcagcaacagcagttacctttggtgcatttgttggcacaaaacatcagggcacaacaactacaacaactcgtgctagcaaaccttgctgcctactctcagcaacaacagtttctgccattcaaccaactagctgcattgaactctgctgcttatntgcagcaacaacaactactaccattcagccagctagctgctgcctacccccggcaatttttttcattcaaccaactggcagcattgaactctcatgcttatgtacaacaacaacaactactacca

SEQ ID NO: 13188 - DNA, 618 bp, Zea mays
  Clone ID: LIB3061-099-Q1-K7-C4
agaccaacaagcaacatagaaagtggaatccagtagcaacaacagagcaacaatggcgaccaagatattttccctccttatgctccttgctctttctgcatgtgttgctaacgcgacaattttccctcaatgctcacaagctcctatagcttcccttcttcccccataccttccatcaatgatagcttcagtatgtgaaaacccagctcttcagccctataggctccaacaagcaatcgcagcaagcaacatacctttatcacccttgttgtttcaacaatcgccagccctatctttggtgcagtcattggtacaaaccatcagggcacagcagctgcagcaactcgtgctacctgtgatcaaccaagtagctctggcaaacctttctccctactctcagcaacaacaatttcttccattcaaccaactgtctacactgaaccctgctgcttatttgcagcaacaactattaccattcagccagctagctactgcctactctcagcaacaacaacttctttcatttaaccaattggccgcactgtaccccgctgcttatttgcagcagcaaatactactaccatttagccagctagctgcagcaaaccgtgcttcctt

SEQ ID NO: 13189 - DNA, 304 bp, Zea mays
  unsure (1)..(304): unsure at all n locations; Clone ID: LIB3061-099-Q1-K7-C5
tcggctttttggtccctttccagtcnncatccnntgcagnncagcagnnccgcaaaagcggcccagnngtcgcgggggcttgttgnngcggcgccagatttagcgcagcaacctgacgnnngcgatgtnngcggcctnngcagcagccgactttccatgccnncctacgctnngctgccgnngcggtgtcnnccccactgannagaaactatgtnngctgtagtatagcncnngctggctanngctagctnnagttgagtnncatttagcgnngcgatgattggggagtaataatnnggtgtca

SEQ ID NO: 13190 - DNA, 630 bp, Zea mays
  Clone ID: LIB3061-099-Q1-K7-C6
ccgggtcgaccatgcgtccggaccaactatcaacatagaaagcacaatagtgtaccaacaatggcagccaaaatattttgcctccttatgctccttggtctttctgcaagtgctgctacggcgaccattttcccacaatgctcacaagctcctatagcttcccttcttcccccgtacctctcaccagcggtgtcttcggtgggggaaaacccaattcttcaaccctataggatccaacaggcaatcgcagctggcatcttacctttatcacccttgttcctccaacaatcatcagccctattacagcagttacctttggtgcatttattggcacaaaacatcagggcacaacaactacaacaacttgtgctagcaaaccttgctgtctactctcaacaacaacagtttcttccattcaaccaactagctgcattgaactctgcttcttatttgcaacaacaacaactaccattcagacagctatctgctgcctacccccagcaatttcttccattcaaccaactgacagctttgaactctcctgcttatttacagcagcaacaactactaccattcatccagctagctggtgtgagccctgctacctttttgacacaaccacaattgttg

SEQ ID NO: 13191 - DNA, 466 bp, Zea mays
  Clone ID: LIB3061-099-Q1-K7-C7
gtcgccttgcgtccggaaagagttcggtgtttgttttttcaaagtccccaccccccctgctcgtggaacgaaggaaagcacccgtcattctctttgtaggcccttcttttttttttcttttggttcaattgcgctaagttcaatatgtattctgctgagaaatctgagctcgtttgagaactgttggacattgggggggagtgagttttaatcttgaatatagatgacttgttgagggattaaaaaaaaaaaaaaaaaaaaaaaaaaaaaaaaaaaaaaaaaaaaaaaaaaaaaaaaaacaaaaaaaaaaaaaaaaaaaaaaaaaaaaaaaaaaaaaaaaagggggggccgccttaaaggaccaaagctaacgtccccgggcttgcaacgtaatagcttttttaaaggggccccaaaataaaatgaaggggccggcgttttaaaccgtcgggacgggaaaaaccct

SEQ ID NO: 13192 - DNA, 579 bp, Zea mays
  Clone ID: LIB3061-099-Q1-K7-C8
caattccagggtcatgacaagcagcaacaaccacaacagcctcagcaatatcagcagggccaggaaaaatcacaacagcaacaatgtcattgccaggagcagcaacagactacaaggtgcagctataactactatagcagtagctcaaatctaaaaaattgtcatgaattcctaaggcagcagtgcagccctttggtaatgccttttctccaatcacgtttgatacaaccaagtagctgccaggtattgcagcaacaatgttgtcatgatcttaggcagattgagccacaatacattcaccaagcaatctacaacatggttcaatccataatccaggaggagcaacaacaacaaccatgtgagttatgtggatctcaacaagctactcaaagtgcggtggcaatcttgacagcagcacaatacctaccatcaatgtgcggcttgtaccactcatactaccaaaataatccatgcagcagcaatgacattagtggtgtttgcaattgaagaattgtgtctacctagccgttatactcctataacggtgttaagcaataaagtaccatacattatgatgtt

SEQ ID NO: 13193 - DNA, 601 bp, Zea mays
  unsure (1)..(601): unsure at all n locations; Clone ID: LIB3061-099-Q1-K7-C9
gagacattcttgttgaaatgggaacatactttcaagtccaggatgactatctggattgttatggtgatcctgaatttatcggcaagattggaacggacattgaagattacaagtgctcatggctagttgtgcaagcccttgagcgtgctgatgagagccaaaagcgcattctatttgaaaattatggcaagaaagatccagcctgtgtggcaaaagtgaagaacctctacaaagaacttgacctagaggcggtatttcaggagtacgagaatgagagctacaagaagctgattgcagacattgaagcccagccaagcattgcggttcagaaagtgctgaaatccttcttgcacaagatctacaagaggcagaagtagggtgctcttggataaacgagctcaggagtcgttactccttcgcatgcttgacataaccggacttcctcacctggttgctctagtatgatgtggagcgtctagttaaaaaaaatcgatgtagtatgaagcaccttgctgctctgaatattaacaggcaattaaggcaaggtgctgtttcggtttggtggaccgcatgttgcagataataaattagttgttntgtc

SEQ ID NO: 13194 - DNA, 650 bp, Zea mays
  Clone ID: LIB3061-099-Q1-K7-D10
cattcataacacacctagcgaagcgcactagcaacgacctaacaacaatggcttccaagacattatccctccttgcgcttcttgccctttttgtgagtgcaacaaatgcgttcattattccacaatgctcacttgctccgagtgccattattccacagttcctccctccagttacttgaatgggcttcgaacacccagctgtgcaagcctataggctacaacaagcgcttgcggcgagcgtcttagaacaaccaattgcccaattacaacaacaatccttggcacatctaaccatacaaaccatcgcaacgcagcagcaacaagcactgagccacctagccgtggtgaaccctatcgcctacttgcaacaacagctgcttgcatccaacccacttgctttggcaaacgtagctgcataccaacaacaacaacagttgcaacagtttctaccagcgctcagtcaactagccatggtgaaccctatcgcctacctacaacagcaacaacttctttcatctagcccgctcgctatgggcaatgcacctacatacctgcaacaacagttgttgcaacaacagttgctgcaacaaattgtaccagctcttactcagctagctgtggcaaaccctgctgcctacttgcaacaacta

SEQ ID NO: 13195 - DNA, 646 bp, Zea mays
  unsure (1)..(646): unsure at all n locations; Clone ID: LIB3061-099-Q1-K7-D12
gagaccaacaagcaacatagaaagtggaatccagtagcaacaatagagcaacaatggcgaccaagatactttccctccttatgctccttgctctttctgcatgtgttgctaacgcgacaattttccctcaatgctcacaagctcctatagcttcccttcttcccccataccttccatcaatgatagcttcagtatgtgaaaacccagctcttcaaccctataggctccaacaagcaatcgcagcaagcaacatacctttatcacccttgtttcaacaatcgccagccctatctttggtgcagtcattggtacaaaccatcaaggcacagcagctgcagcaactcgtgctacctgtgatcaaccaagtagctctggcaaacctttctccctactatcagcaacaacaatttcttccattcaaccaactatctacactgaaccctgctgcttatttgcagcaacaactattaccattcagccagctagctactgcctactctcatcaacaacaacttcttccatttaaccaattggccgcactgaacctcgctgcttatttgcagcagcaaatattactaccatttagccagctagctgcagcaagccgtgcttncttcttgacacagcaacagttgctgcctttcta

SEQ ID NO: 13196 - DNA, 495 bp, Zea mays
  Clone ID: LIB3061-099-Q1-K7-D2
ctttctccctactatcagcaacaacaatttcttccattcaaccaactatctacactgaaccctgctgcttatttgcagcaacaactattaccattcagccagctagctactgcctactctcatcaacaacaacttcttccatttaaccaattggccgcactgaacctcgctgcttatttgcagcagcaaatattactaccatttagccagctagctgcagcaagccgtgcttccttcttgacacagcaacagttgctgcctttctaccagcagtttgcggctaaccccgcaaccctcttacaactacaacaattgttgccctttgtccaacttgctttgacaaacccagcagcctcctaccaacaacacatcattggtggtgccctcttttagattgcttattagttgtaattcaataataaagttttttggatgatgtatgtggccaaccagaaataagaagttacattttcagattctaatgtgatattgggt

SEQ ID NO: 13197 - DNA, 690 bp, Zea mays
  unsure (1)..(690): unsure at all n locations; Clone ID: LIB3061-099-Q1-K7-D3
ccgggtcgaccatgcgtccgaacacacctagcgaagcgcactagcaacgacctaacaacaatggcttccaagacattatccctccttgcgcttcttgccctttttgtgagtgcaacaaatgcgttcattattccacaatgctcacttgctccgagtgccattattccacagttcctccctccagttacttcaatgggnctgggaacacccagctgtgcaagcctataggctacaacaagcgcttgcggcgagcgtcttagaacaaccaattgcccaattacaacaacaatccttagcacatctaaccatacaaaccatcgcaacgcagcagcaacaagcactgagccacctagccgtggtgaaccctatcgcctacttgcaacaacagctgcttgcatccaacccacttgctttggcaaacgtagctgcataccaacaacaacaacagttgcaacagtttctgccagcgctcagtcaactagccatggtgaaccctatcgcctacctacaacagcaacaacttctttcatctagcccgctcgctatgggcaatgcacctacatacctgcaacaacagttgttgcaacaacagttgctgcaacaaattgtaccagctcttactcagctagctgtggcaaaccctgctgcctacttgcaacaactacttncattcaaccaactgactgtgtc

SEQ ID NO: 13198 - DNA, 665 bp, Zea mays
  Clone ID: LIB3061-099-Q1-K7-D4
cggcgagcttcttacaacaaccaattcgcccaattgcaacaacaatccttgccacatctaacaatacaagccatcacaacgcaacagcaacaacagttcctaccagcactgagccacctagccatggtgaaccctgccgcctacttgcaagagcagctgcttgcatccaacccacttgctctggcgaacgtagttgcaaaccagcaacaacaacagctacaacagtttctgccaacgctcagtcaactagccatggtgaaccctgccgcctacgtacaacaacaacaactgctttcatctagcccgctcgctgtgggcaatgcacctacatacctgcaacaacaattgttgcaacagattgtaccagctctgactcaactagctgtggcaaaccctgttgcctacttgcaacagctgcttccattcaaccaactgactctgtcgaactctgctgcgtacctacaacagcgacaacagttacttaatccattggtagtggctaacccattggtcgccgccttcctacagcagcaacaattgctgccatacaaccagttctctttgatgaatcctgtcttgtcgaggcagcaacccatcgttggaggtgccatcttttagattacatatgagatgtactcgataatggtgccctcataccgacgtgt

SEQ ID NO: 13199 - DNA, 654 bp, Zea mays
  Clone ID: LIB3061-099-Q1-K7-D6
gaaataatgaaagaaatgcaggccaagcctgaccttatcattggcaactacagcgatggcaacctagtcgccactctgctcgcgcacaagttgggagtcactcagtgtaccatcgctcatgccttggagaaaaccaaataccccaactcggacatatacttggacaaattcgacagccagtaccacttctcttgccagttcacagctgaccttattgccatgaaccacaccgatttcatcatcaccagcacattccaagaaatcgcgggaagcaaggacaccgtggggcagtacgagtcccacatcgcgttcactcttcctgggctctaccgtgtcgtccatggcatcgatgttttcgatcccaagttcaacattgtctcccctggagcagacatgagtgtttactacccgtatacggaaaccgacaagagactcactgccttccatcctgaaatcgaggagctcatctacagcgacgtcgagaactccgagcacaagttcgtgctgaaggacaagaagaagccgatcatcttctcgatggcgcgtctcgaccgcgtgaagaacatgacaggcctggtcgagatgtacggcaagaacgcgcgcctgagggagctggcgaaccctcgtgatcgttgccggtgaccacgcaaggag

SEQ ID NO: 13200 - DNA, 99 bp, Zea mays
  Clone ID: LIB3061-099-Q1-K7-D7
gctacggctaccattttcccgcaatgctcgcaagctcctatagcttcccttcttcccccgtacctctcaccagcggtgtcttcggtatgtgaaaaccca

SEQ ID NO: 13201 - DNA, 664 bp, Zea mays
  Clone ID: LIB3061-099-Q1-K7-D8
ccgcaacctttttcccacaatgctcacaagctcctatagcttcccttcttcccccatacctctcaccagcggtgtcttcaatgtgtgaaaccccaattgttcaaccctacaggatccaacaggcaatcgcaacaggcatcttaccattatcacccttgttcctccaacaaccgtcagccctgttacagcagttacctttggtccatttggtggcacaaaacatcagggcacaacaactacaacaacttgtgctagcaaaccttgctgcatactctcagcaacatcagtttcttccattcaaccaactggctgcattgaactctgctgcttatttgcaacaacaattaccattcagccagctagttgctgcctacccccagcaatttcttccattcaaccaactagcagcattgaactctgctgcttatttacagcagcaacaactactaccattcagccagctagctgatgtgagccctgctgccttcttgacacaacaacagttgttgccgttctacctgcacgctatgcctaacgctggcaccctcttacaaactgcacaattgctgccattcaaccaacttgctttgacaaaccaacagtgttctaccaacaacccatcattggtggtgccctcttttagattgcttatgagttatagttc

SEQ ID NO: 13202 - DNA, 638 bp, Zea mays
  Clone ID: LIB3061-099-Q1-K7-D9
gcaacatagaaagcacaatagtgtaccaacaatggcagccaaaatattttgcctccttatgctccttggtctttctgcaagtgctgctacggcgaccattttcccgcaatgctcgcaagctcctatagcttcccttcttcccccgtacctctcaccagcggtgtcttcggtatgtgaaaacccaattcttcaaccctacaggatccaacaggcaatcacagctggcatcttacctttatcacccttgttcctccaacaatcatcagccctattacatcagttacctttggtgcatttattggcacaaaacatcagggcacaacaactacaacaacttgtgctagcaaaccttgctgcctactctcagcaacagcagtttcttccattcaaccaactagctgcattgaactctgcttcttatttgcaacaacaacaactaccattcagccagctacctgctgcctacccccagcaatttcttccattcaaccaactggcagcattgaactctcctgcttatttacagcagcaacaactactaccattcagccagctagctggtgtgagccctgctaccttcttgatacaaccacagttgttgccgttctaccagcacgctgcgcctaacgctggcaccc

SEQ ID NO: 13203 - DNA, 608 bp, Zea mays
  Clone ID: LIB3061-099-Q1-K7-E1
caatgataaaaaataatctggactactgtagtgttttttttttgttgttgaagggaagatctggtgcagcggcgagagctatctcattgagtcatcaagtcgtgggtgccaagcagtttctctgcatttgtgggggaaggaggattgtcacggtttatccctttcccagaccccactcatgtgggagcctccaacattgggtttgcccttgctgtaatttttttgttggaagtccatatcagtggcgagagctatctcattgagtcagcaagtcgtgggtccaaagcagtttctctgcatttgcggggaaatgattgcctcggtttatccttttcccagaccccactcatgtgggagcctccaacattgggtttgcccttgctgcaatttttttgttggaagtccatgtttagtcaatttatttatgatggatttatgcactgtgcagtcctgcttgagcttaattgagattagtttctcaccgcaagagaactgcaactagtaagttcatatatgacattcaaaaaattcagcatctgtccatctgatcacttgggaactaactaagtcagctgtagtttcgattttagtatctgaagtcactgggc

SEQ ID NO: 13204 - DNA, 342 bp, Zea mays
  unsure (1)..(342): unsure at all n locations; Clone ID: LIB3061-099-Q1-K7-E10
ccgggctgnataggggaaggaccggattaagttttgcagcgattttaccgcaagggatgggaaacaacatgcattgcttgataatcttaatcaggaattggcccaaaagtctgtactattgggtgatgggtttaaactggcagctgctgataatgatgtgtttgcaaccggtcatccctttgggaacccgggtagggacaggggggtgcaaaaatattcacatggaccggggggggtggaccacattcaaaacactggtggggctggtacaaccttgcaaaagataaaagggacccaatctgacctttaaccaccttcttattcaaaggaaggttgtaaaaa

SEQ ID NO: 13205 - DNA, 631 bp, Zea mays
  unsure (1)..(631): unsure at all n locations; Clone ID: LIB3061-099-Q1-K7-E11
gntgctcatcaagggaagtgggaagtagcagctcatccaccttcactctcataataacgctgcttaggcgcaatcatgatttaattagaaacttcttgtcaaaggatgttgtttctaactagttgtgcgcactagttgatttagttcatgccgttatggttgtctttccattgctaggaggttattaatgtctattatgttctcttatcatgatatatgtttatattttgttgcttccccatttatgtaattttcaaaggggatgctgtcgaaattttatatatgaatgttagatgtgtagtttagtagcattctgggtgtttgaggatcttggggtgttacatgtacaatggcaccgatgaagatgactttttgtactgcctccgaccggataataaggaaatatttgtatgtcgggagatggcaagaaacataggatttctgaagctcgaagttggtctttcagcaatgtcgaaggatgacctcgcagacagccttgcttacaatagtctgaagggcttaatcttgagcaacactttaagagcacagaaaaatgttgaggatgaaagttgtcaaatagcccttggtaaccttcgttcagaggttatcaaactgagcaatgaagccatag

SEQ ID NO: 13206 - DNA, 246 bp, Zea mays
  unsure (1)..(246): unsure at all n locations; Clone ID: LIB3061-099-Q1-K7-E12
aggctgaaacagcgangacgacgacgacgacgacgacaacgcngccgacggggcgcgccgnggcccngcngcngcnccggcnggccacgacggcgacggaggccgcgaacccgngcaacccggcgcagcncacgccgggcgcggggccggcgcngnncggcggngcggngccgggggggggcngcgcgcancngcnggcgcagnaggggagccngngngggnncgngcgcnggggcncccgcgggg

SEQ ID NO: 13207 - DNA, 667 bp, Zea mays
  unsure (1)..(667): unsure at all n locations; Clone ID: LIB3061-099-Q1-K7-E2
cgttgccccaagccggagtacggagtacggcagtcgcacccccgtcgtcccgttccttgctcgccccaacttcgccgccgcgtccccctcggctcctagtgatgtctggtggtaacgcgtggtcgccgctcccttcgcacggatttgaatccgactccggcggcatggggagccgcgcaggcgagcctgtggcgaggaccaacagcagcggcggtggcggtagcagcaaggactcgggcagcttcgagtgcaacatctgtctggacctggcgcaggatcccgtggtcaccctctgcggccacctcttctgctggccatgcctctacgagtggctccacgtgcacgcgcactcccaggagtgccccgtctgcaaggccgtcgtcgaggaggggaagctcgtccctctctacggccgtggtggcaactccacctcaccccgtgcaaggtcggtggccggtgtggaaatcccgagcaggccgaccgggcagcggccctccactgccccgcagccagaccacagtaatcattacccgccccagaacctctggttcatgggcgctggcgccccccctgtggcttgtggtcggtgggggaattacactttctcggcggccattggaggggtgttcccngtgctgagcttccaggtgcatgngattcccgcagt

SEQ ID NO: 13208 - DNA, 667 bp, Zea mays
  unsure (1)..(667): unsure at all n locations; Clone ID: LIB3061-099-Q1-K7-E3
tcagcatttaaaaacacaccaagcgaagcgcactagcaacgacctaacaccaatggctaccaagatattagccctccttgcgcttcttgcccttttagtgagcgcaacaaatgcgttcattattccacagtgctcacttgctcctagtgccagtattccacagttcctcccaccagttacgggaatgggcttcgaacatccagccgtgcaagcctacaggctacaactagcgcttgcggcgagcgccttacaacaaccaattgcccaattgcaacaacaatccttggcacatctaaccctacaaaccattgcaacgcaacaacaacaacaacagtttctgccatcactgagccacctagccgtggtgaaccctgtcacctacttgcaacagcagctgcttgcatccaacccacttgctctggcgaacgtagctgcataccagcaacaacaacagctgcaacagtttatgccagtgctcagtcaactagccatggtgaaccctgccgtctacctacaactactttcatctagcccgctcgcggtgggcaatgcacctacgtacctacaacaacagttgctgcaacaaattgtaccagctctgactcagctagctgtggcaaaccctgctgcctacttacaacagttgncttcattcaacaactggctg

SEQ ID NO: 13209 - DNA, 403 bp, Zea mays
  Clone ID: LIB3061-099-Q1-K7-E4
cagcaagcatcatagaaagtagaatccattagcaacaatagagcaacaatggcgaccaagatattttccctccttatgctccttgctctttctacatgtgttgctaacgcgacaattttccctcaatgctcacaagctcctatagcttcccttcttcccccataccttccatcaattatagcttcagtatgtgaaaacccagctcttcaaccatataggcttcaacaagcaatcgcagcaagcaacatacctttatcgcccttgttgtttcaacaatcaccagccctatctttggtgcagtcattggtacaaaccatcagggcacaacagctgcagcaactcgtgctacctgtgatcaaccaagtagctctggcaaacctttctccctactctcagcaacaac

SEQ ID NO: 13210 - DNA, 601 bp, Zea mays
  unsure (1)..(601): unsure at all n locations; Clone ID: LIB3061-099-Q1-K7-E5
cgggncgaccctgcgnccggacacagttagcgaagcgcaccagcggcaacctgaacaacaatggctaccaagatattatacctggtggcgcttcttgcgctttttgcgagcgcaacaaatgcgtccattattccacaatgctcactggctcctagttccattattccacagttcctcccaccagttacttcaatggcgggggagaacccagctgtgcaagcctataggctacaacaagcgattgcggcgagcgttttacaacaaccaattgcccaattgcaacaacaatccttggcacatgtaacaatacaaaccatggcaacgcaacagcaacaacagttcctaccagcactgagccacctagccatggtgaaccctgtcgcctacttgcaacagcagctgcttgcatccaacccactagctctagcaaacgtagttgcaaaccagcaacaacaacaactgcaacagtttctgccagcgcttagtcaactagccatggtgaaccctgccgnctaccgacaacagcaacaactgatttcatctagcccgctcgctggggccaatgcacctacatacctgcaacaagaattgttgcaacaga

SEQ ID NO: 13211 - DNA, 522 bp, Zea mays
  Clone ID: LIB3061-099-Q1-K7-E6
tcgcctttcacaaccctctccctcttccatctcatttccgctgcggctgcaacaataaaataataagtctcgtgcaggcgaaggacgtacgacgacgcggacgcaccgtcaaagtctacaggctgcgcaatccctttctccctcttatccccaaggcgaggagctgagggggggggggggcggttctgctgctgttcttgtttccccgctctccaagatgtcgtccccgagcaagcgccgcgagatggaccttatgaagctgatgatgagcgactacaaggtcgagatggtgaacgatgggatgcaggaattcttcgtcgaattcaaggggccggccgaaagtaatagccctcgcgctgaatcccggttgctcttctctctccctgcctcccgtgctgatggtgcacgctcctgattctgatctagatgttgtggggtggaagttcagtttcaggaaaactgccagtctccactgttgatcgtgttcagatattcttgtccgtttagcttcatccttgattg

SEQ ID NO: 13212 - DNA, 586 bp, Zea mays
  Clone ID: LIB3061-099-Q1-K7-E7
gtcagcatcttctgcttgctctggggggaaggagagagagagagcgagagagagagagagatctagtagagaggctagtaggtggtcctcgaacgaagatgttggcggtgttcagcgggcaggtggtggaggtgccggcggagctggtggcggcgggcagccggacgccgtcgcccgaggcgaaggcgtcgcagctcgtggggcgcttcctggccgcgtccgagccggccgtgtccgtgcagctcggcgaccacggccacctcgcctactcccacaccaaccaggcgctcctccgccccaggtcgttcgcggccaaggacgaggtgttctgcctgttcgaaggggtgctggacaacctgggtcggctgagccagcagcacgggctgtcaagcaagggcgccaacgaggtgctcctcgtcatcgaggcctacaagacgctgcgcgaccgcgcgccctacccggccagcttcatgctcgcccagctcaccggctcctacgccttcgtcctcttcgacaagtccaccaactccctgctcgtcgcatttgacccccgaggcagggtgccgctcttctgggggatcaccgc

SEQ ID NO: 13213 - DNA, 526 bp, Zea mays
  Clone ID: LIB3061-099-Q1-K7-E8
ccacgcgttcgaccatatatctccctagccaacacacacataatactccattccattccgttccatctcaaaggatagaacaatgggcggtctctccaccaagcttttcgtggtcctcctcctgctcgtttgttacaccgggacgcaaggcgggccggtgactatggtgtcggcgaggaggggcgagtcgcagagcttccgcttcaagggaccttgctcgagggacgccaactgcgcaaacgtctgcctgaccgaaggtttcaccggcggcgtgtgcaagggcctacgccaccgctgcttctgcaccagggactgctagtactgcctcgtctcgcctcgcctcggctcgtgtcctgcgtgtgcatagccgcagcggatcagtaaaacatgcatgcatgcgttaccgaatatttggcagtaccagcaagttaatggattaaataatatgtaatggaacaaagcctgttttgaacgttgaactgctgagtgctagcagcgctcgtgtttattggcatatatgaactct

SEQ ID NO: 13214 - DNA, 336 bp, Zea mays; identical to SEQ ID NO: 10373
  Clone ID: LIB3061-099-Q1-K7-E9

SEQ ID NO: 13215 - DNA, 644 bp, Zea mays
  unsure (1)..(644): unsure at all n locations; Clone ID: LIB3061-099-Q1-K7-F11
attattgagaccaacaagcaacatagaaagtggaatccagtagcaacaatagagcaacaatggcgaccaagatactttccctccttatgctccttgctctttctgcatgtgttgctaacgcgacaattttccctcaatgctcacaagctcctatagcttcccttcttcccccataccttccatcaatgatagcttcagtatgtgaaaacccagctcttcaaccctataggctccaacaagcaatcgcagcaagcaacatacctttatcacccttgtttcaacaatcgccagccctatctttggtgcagtcattggtacaaaccatcaaggcacagcagctgcagcaactcgtgctacctgtgatcaaccaagtagctctggcaaacctttctccctactatcagcaacaacaatttcttccattcaaccaactatctacactgaaccctgctgcttatttgcagcaacaactattaccattcagccagctagctactgcctactctcatcaacaacaacttcttccatttaaccaattggccgcactgaacctcgctgcttatttgcagcagcaaatattactaccatttagccagctagctgcagcaagccgtgcttncttcttgaccagcaacagttgctgc

SEQ ID NO: 13216 - DNA, 577 bp, Zea mays
  unsure (1)..(577): unsure at all n locations; Clone ID: LIB3061-099-Q1-K7-F12
attgagaccaactagcaacatagaaagcacaatagtgtaccaacaatggcagccaaaatattttgcttccttatgctccttggtctttctgcaagtgttgctaccgcaaccattttcccacaatgctcacaagctcctatagcttcccttcttcccccatacctctcaccagcggtgtcttgaatgtgtgaaaacccaattgttcaaccctacaggatccaacaggcaatcgcaacaggcatcttaccattatcacccttgtttcttcaacaaccggcagccctattacagcagttacctttggtccatttggtggcacaaaacatnaggggacaacaactacaacaacttgtgctagcaaaccttgctggatactcttagcaacatcagtttctttcattcaaccaactggctgcattgaactctgctgcttatttgcgacaacaattaccattcaaccagctagttgctggctacccccagcaatttgtttcattcaaccaactagcagcattgaactctgctggttattttcagggggaacaactactaccatttanccacctagctgatgtga

SEQ ID NO: 13217 - DNA, 397 bp, Zea mays
  unsure (1)..(397): unsure at all n locations; Clone ID: LIB3061-099-Q1-K7-F2
gggcacaacaacgacaacaacnggggcnagcaaaccnngcngccgacgcgcagcaacagcagnnncnnccanncaaccaacnagcngcanggaacncngcgncnnannngcaacaacaacaacnaccanncagccagcnaccggcngccnacccccaggggggcgggcanncaaccaacgggcagcanngaacncnccggcnnannnacagcagcaacaacnacnaccanncagccagcnagcnggngngagcccngcnaccnncnnganacaaccacagnngnngccgnncnaccagcacgcngcgccnaacgcnggcacccncnnacaacggcaacaanngcngccanncaaccaacnngcnnngacaaacccagcagcgnncnaccaacaaccc

SEQ ID NO: 13218 - DNA, 670 bp, Zea mays
  Clone ID: LIB3061-099-Q1-K7-F4
gcaacatataaagcacaatagtgtaccaacaatggcagccaaaatattttgcttccttatgctccttggtctttctgcaagtgctgctaccgcaaccattttcccacaatgctcacaagctcctatagcttcctttcttcccccatacctctcaccagcggtgtcttcagtatgtgaaaacccaattcttcaaccctacaggatccaacaggcaatcgcagcaggcatcttacctttatcacccttgttcctccaacaaccgtcagccctattacagcagttacctttggtgcatttgttggcacaaaacatcaaggcacaacaactacaacaacttgtgctaggaaaccttgctgcctactctcagcaacagcagtttcttccattcaaccaactggctgcattgaactctgctgcttatttgcaacaacaactaccattcagtcagctagctgctgcctacccccagcaatttcttccattcaaccaactggcagcattgaactctgctgcttatttacaacagcaacagctaccaccattcagccagctagctgatgtgagccctgttgccttcttgaacaacaacagttgttgccgttctactgcacgctgcgcctacgctgcaccctctacactgcacaatgctgcattcaccaactgcttgaca

SEQ ID NO: 13219 - DNA, 612 bp, Zea mays
  Clone ID: LIB3061-099-Q1-K7-F6
agaccagcaagcaacatagaaagtagaatccattagcaacaatagagcaacaatggcgaccaagatattttccctccttatgctccttgctctttctacatgtgttgctaacgcgacaattttccctcaatgctcacaagctcctatagcttcccttcttcccccataccttccatcaattatagcttcagtatgtgaaaacccagctcttcaaccatataggcttcaacaagcaatcgcagcaagcaacatacctttatcgcccttgttgtttcaacaatcaccagccctatctttggtgcagtcattggtacaaaccatcagggcacaacagctgcagcaactcgtgctacctgtgatcaaccaagtagctctggcaaacctttctccctactctcagcaacaacaatttcttccattcaaccaactgtctacactgaaccctgctgcttatttgcagcaacaactattaccatttagccagctagctactgcctactctcagcaacaacaacttcttccatttaaccaattggccgcactgaaccccgctgcttatttgcagcagcaaatactactgccatttagcgagctagctgcagcaagtcgtgc

SEQ ID NO: 13220 - DNA, 380 bp, Zea mays
  Clone ID: LIB3061-099-Q1-K7-F7
gaataaatctgcttttgtggtgccggagctctgtgttcagagagatgaagaaataccagaaggattttccgagctggtgtggtgaatgccagcgcgaaaagagggaaaggcagagtcagtgtgttaaagcaacgaagatggcctttctcaggggttctggaggtgcagcgatttaatttgtggtaggtcatttatgttatatactgttttgcgtcatactgaacttcatcgtttaggacttgacaggggcattgtatcgatggccagctttgtgctagtgcgtttattggtgcgatcccagttgtatgtaaatgtaaacattgaccaaatgcagccgaaagaaatgtaatagcgggtcataaactgctatgaatttggat

SEQ ID NO: 13221 - DNA, 635 bp, Zea mays
  Clone ID: LIB3061-099-Q1-K7-F9
cttcttcccccataccttccatcaattatagcttcaatatgtgaaaacccagctcttcaaccatataggcttcaacaagcaatcgcagcaagcaacatacctttatcgcccttgttgtttcaacaatcgccagccctatctttggtgcagtcattggtacaaaccatcagggcacaacagctgcagcaactcgtgctacctctgatcaaccaagtagctctggcaaacctttctccctactctcagcaacaacaatttcttccattcaaccaactgtctacactgaaccctgctgcttatttgcagcaacaactattaccatttagccagctagctactgcctactctcagcaacaacaacttcttccatttaaccaattggccgcactgaaccccgctgcttatttgcagcagcaaatactactaccatttagccagctagctgcagcaaaccgtgcttccttcttgacacagcaacagttgctgcctttctaccagcagtttgcggctaaccccgcaaccctcttacaactacaacaattgttgccctttgtccaacttgctttgacagacccagcggcctcctaccaacaacacatcattggtggtgccctcttttagattgcttattagtt

SEQ ID NO: 13222 - DNA, 606 bp, Zea mays
  unsure (1)..(606): unsure at all n locations; Clone ID: LIB3061-099-Q1-K7-G1
gggacgncagcctagcaannagctcatcgactccagatnggagaactcgacaccatgaaggggctgatcgnngcccttgctctcctggcgctcgctgcgagcgccgcctccagtacaagcggcggctgtggctgccagacaccaccgtttcatctaccgcctccgttctatatgccgcctgggggctatctgccgccgcagcagcagccgcagccatggcaataccccactcaaccaccgcagctaagcccgtgccagcagttcggatcctgcggcgtcggcagcgtcggcagcccgttcctgggccagtgcgtcgagttcctgaggcaccagtgcagcccggcggcgacgccctacggctcgccacagtgccaggcgctgcagcagcagtgctgccaccagatcaggcaggtggagccgttgcaccggtaccaggcgacatacggtgtggtcctgcagtccttcctgcagcagcagccgcagggcgagctcgcggcgctgatggcggcccaggtagcgcagcagctgacggcgatgtgcggcctgcagctgcagcagccaggttccctgcccttgcaacgcagctgccggcggtgtctactactg

SEQ ID NO: 13223 - DNA, 260 bp, Zea mays
  unsure (1)..(260): unsure at all n locations; Clone ID: LIB3061-099-Q1-K7-G10
ccgcaaccannnncccacaangcncacaagcnccnanagcnnccnnncnncccccaaaccncncaccagcggngncnncagnangngaaaacccaaggggggaacccnacagganccaacaggcaancgcagcaggcancnaaccnnnancaccccngnnccnccaacaaccgncagcccnannacagcagnnaccnnnggggcannnggnggcacaaaacannaaggcacaacaacnacaacaacnngggccaggaaac

SEQ ID NO: 13224 - DNA, 630 bp, Zea mays
  unsure (1)..(630): unsure at all n locations; Clone ID: LIB3061-099-Q1-K7-G12
ncccattccgnnnctatggccgcccgcgggggggngacactgcaattattgatttccgcttaatctattgccgtgccgtagaagcggaagctactggacgaggggctggagcggaagcgggaggcggaactcaatgagctttacgatgccatgaaagattgggtcagcgaactcaggagggacaatgcggaactcaacgagaagctggtggagaagcaggatgagctcgagaaggcccgtcaggaattncttgaagatattcgtacaagggacgctgaaattctgaagctgaagcagctcttagatgagaaggctgaaaaaaacaattctgcagctactgggtttccttgcctagcgcctgaagctgtcctagaaaattcaactccattgtcacctaaaagaaagacaccattttcccacggcaagcagctagaatgctccagaagacatacacgcatctcagggaataggacaacagagattcggagtgctcatatgctttctttgctgcttcaatctttagttcgcatgaagatctcggtaaatgatggaacagaaatatttttcggttcagtatctcatgaagctaggggttaccagttgatgctgacctggctagaacatttgatg

SEQ ID NO: 13225 - DNA, 667 bp, Zea mays
  Clone ID: LIB3061-099-Q1-K7-G3
attgagaccaactagcaacatagaaagcacaatagtgtaccaacaatggcagccaaaatattttgcttccttatgctccttggtctttctgcaagtgttgctaccgcaaccattttcccacaatgctcacaagctcctatagcttcccttcttcccccatacctctcaccagcggtgtcttcaatgtgtgaaaccccaattgttcaaccctacaggatccaacaggcaatcgcaacaggcatcttaccattatcacccttgttcctccaacaaccgtcagccctattacagcagttacctttggtccatttggtggcacaaaacatcagggcacaacaactacaacaacttgtgctagcaaaccttgctgcatactctcagcaacatcagtttcttccattcaaccaactggctgcattgaactctgctgcttatttgcaacaacaattaccattcagccagctagttgctgcctacccccagcaatttcttccattcaaccaactagcagcattgaactctgctgcttatttacagcagcaacaactactaccattcagccagctagctgatgtgagccctgctgccttcttgaccaacaacagttgttgccgttctacctgcacgctatgcctaacgctggcaccctcttacaactgcaacaatt

SEQ ID NO: 13226 - DNA, 611 bp, Zea mays
  Clone ID: LIB3061-099-Q1-K7-G4
ctagatcgtgagcggtcgccctttccttttttttttttttttttcttttagtcatagaatcacttatgtcatagaactaattctcacgaagaatcagaataagatagaacttaccaaaccgacccttacatacactgatgctgacacatacaaacagacacacgcacatactgagagacacgggcatgtcgacacacacatacgaccataatatataggaggcatacacactaaaacgaacacatgacatacaggaaattaaactaagtttaaattgcttattttccacgagacgaaacacgagcacggaaaatggcaagacaagagagcgacaccaccaaacatgcatgcatgggtatgctagttcacatgacactgcacgagggcccgccgccctgcctgggttgggggtggtgggcggccatgctgctgctgctgcgcgcgctggcagtcggcgtcggcgtcgtcctcggtgccgatggaacagccaggctcgcactggtcgccaccagcgtcggcgtaggcggtagcatcggcttcatcatcagcgtacgcggcggcggcggcgcggtgcagcatcagcacgtacgccagctgcgtgacggccagca

SEQ ID NO: 13227 - DNA, 515 bp, Zea mays
  unsure (1)..(515): unsure at all n locations; Clone ID: LIB3061-099-Q1-K7-G5
cgggncgaccacgcgtncggaagaaccttatcgacaccatgagggcgttgctcgttgccctcgctctcctggctctcgctgcgagcgccacctccacgcatacaagcggcggctgcggctgccagccaccgccgccggttcatctaccgccgccggtgcatctgccacctccggttcacctgccacctccggtgcatgggggggcggcngtccacctgccgncgccggtccacctgccaccgccggtccatgtgccgccgccggttcatctggcggcggcaccatgccactaccctactcaaccgccccggcctcagcctcattcccagccacacccatgcccgtgccaacagccgcatncaagcccgtgccagctgcagggaacctgcggcgttggcagcaccccgatcctgggccagtgcgtcgagtttctgaggcatcagtgcagcccgacggggacgccctactgctcgcctcagtgccagtcgttgcggcagcagtgttgtcagcagctc

SEQ ID NO: 13228 - DNA, 655 bp, Zea mays
  Clone ID: LIB3061-099-Q1-K7-G6
attttgagcattcagaaacacacctagcgaagcgcactagcaacgacctaacaacaatggctaccaagatattatccctctttgcgcttcttgccctttttgtgagcgcaacaaatgcgttcattattccacaatgctcacttgctcctagtgccattattccacagttcctccctccagttacttcaatgggcttcgaacacccagctgtgcaagcctacaggctacaacaagcgcttgcggcgagcgtcttacaacaaccaattgcccaattacaacaacaatccttggcacatctaaccatacaaaccatcgcaacgcaacagcaacaacaatttctaccagcactgagccaactagctgtggtgaaccctgtcgcctacttgcaacagcagttgcttgcatccaacccacttgctctggcaaacatagttgcataccaacaacaacaacaattgcaacagtttctaccagcgctcagtcaactagccatggtgaaccctgccgcctacctacaacagcaacaactgatttcatctagccctctcgctgtggttaatgcacctacatacctgcaacaacagttgctgcaacagattgtaccagctctgactcagctagctgtggcaaaccctgctgcctacttgcacagctg

SEQ ID NO: 13229 - DNA, 645 bp, Zea mays
  Clone ID: LIB3061-099-Q1-K7-G7
gcaaaccatggacatggctttggcgtctaaagcctcccctccgccatggaatgccaccgccgccgagcagccaattccaaagcgtgacaaagccgctgcaaatgattcaacatacctcaatcctcaagctcatgatagtgttcttggaatcattctgggaggtggtgctgggactagattgtaccccttgacaaagaagcgtgccaagcctgcagtgccattgggtgccaactatagactgattgatattcctgtcagcaattgtctcaacagcaacatatccaagatctatgtgctaacgcaatttaactctgcttccctcaaccgtcacctctcaagagcctacgggagcaacattggagggtacaagaatgaagggtttgttgaagtcttagctgcacagcagagcccagataatccaaactggtttcagggtactgcagatgctgtaaggcagtacttgtggttgtttgaggagcataatgtgatggaatttctaattcttgctggcgatcacctgtaccggatggactatgaaaagttcattcaggcacacagagaaacaaatgctgatattaccgttgctgccctaccgatggatgagaaacgtgcaactgcatttggcctcatgaaaattgatgaaga

SEQ ID NO: 13230 - DNA, 635 bp, Zea mays
  unsure (1)..(635): unsure at all n locations; Clone ID: LIB3061-099-Q1-K7-G8
ctactccttgcagnctctcaaggcgatcaatggggacgtaagcacgcttgcctccgacggatccaagaacaacaacgggtacaacctaacgatacgtgccgacggggacacagtgaaaatcttgtccgcatttgccagcgccgccacggtgaccaagacgctgcttgacaaggcgccgggggggggctaccttattgacgcggtgctcctgccaaggcagcagtctaaccacgaccagggacacactgggcccggccctgcgccgggcttcttggctggacatgcacctacacctgcccttgcgccggtctcgccgtcgcctgcccctgtaccggtctcgccgtcgccgtcgcctgcacatgcacccacacccccacttggccctgctccggtgactgcacctgcgcccaggagtcgcccagcgccattgccagagcacactaccccagctcctttgccggacgcggacggccaaccgcctgcagatcagaagaacaacgcagcaagggacactgcatcttggactatcggcgcggtgctggcgatcgtgtgcctcttgtcgtgaaggggtaagcttagatagattgacgccgattgggatcccgcatcttgccgccaataccagtgtacactga

SEQ ID NO: 13231 - DNA, 548 bp, Zea mays
  Clone ID: LIB3061-099-Q1-K7-G9
gcaaagaagggcagtgagcaaaagtcactagatacttttattccaaagtccgagagtgactttgcggaatacgcggagcttattgcaaacaaactacgcccctatgagaaaagctttcactacatggctctgcttaagaatgtcatgagactttccatgacatcgttgaaaggggcggacgccaaagatatattttctttcgtgaccgcaattgcttacgagaagatcaagggtgagaaggaggctgcagcaggccaaaagaaacaaggggcgaaaaagaagccactccacattgagaaaggagacgacgacttcattcccgggcggggtggtggctaccatgaccccgatgagtaccacttcatgtgatctggctgggagggatagtagggttctgttatgtatacctttggcgggccgagaatatatcactagagtttgcggcatactattgcatggagcatgcgttatctattcgagaatgatttttgactctgcaggataagaagagcacttgtgatctggatgcatgggggtgttcttattta

SEQ ID NO: 13232 - DNA, 560 bp, Zea mays
  unsure (1)..(560): unsure at all n locations; Clone ID: LIB3061-099-Q1-K7-H1
gtctctctcgagtgatccccctgtagtccccggccccgtctttccgccgcctcctgcaaccgcttcacgtgcccctcgcaggtcccctttccgaccccaaatggagccgaagaagtcctccgcccagcgccagccccacgccatggagcccaacaagtcctctctatgcggcgccaccggtcctgccgccaccgccgaagccgagtccccgttgtgcagcttgttctacccgccggcgccgaccgcggcaaatgggaaagattcggacttgtacagcattctttacaaagggcagagcgggagcgcacaagctggcgtcacagatggtaaaccgcaatgggctccttcttccagaagtcgtgccgcgaatgcaaaggatggtaaacattcaccgccttatgattcagttgatacgtcgtgttttggatcgtctgtggattatggtggtcgagattatttctacggcagctctacacccaagaaagtgacagaatcctncactgactacaaagggaacaagaaagatccagccgcagattctcatggcgactggtggcaag

SEQ ID NO: 13233 - DNA, 349 bp, Zea mays
  unsure (1)..(349): unsure at all n locations; Clone ID: LIB3061-099-Q1-K7-H12
ctctggtgatnggnnnaacaagatggagtttacctgtgaaacaaacaattggggtgttgggcttccaccaagagaaaagaacgaagggagctggcctttgatgaagccaagattggagaacccgtcgttcaaacctgcaaaacatgacattattgctgccttagacaaatttattgaggggggggagatcagatactcattacctgtgtttagactaactacagcaagtgatattgtgcaaagggtttacttttacaacacagggccctncttggttccaggagttattgtnatgagcattgaagatgcacgaaatgataggcatgatatgggcccnatagatgaaaca

SEQ ID NO: 13234 - DNA, 668 bp, Zea mays
  Clone ID: LIB3061-099-Q1-K7-H2
atgcatcacaaaacatccttctatcagtaccatcaatcatcattcatcttagtagtataggcaccaaatcaaatctgcaacatcaattatctaactccaaaaaccatgaagctggtgcttgtggttcttgctttcattgctttagtatcaagtgtttcttgtacacagacaggcggctgcgggtgtggtcaacaacaaagccatgagcagcaacatcatccacaacaacatcatccacaaaaacaacaacatcaaccaccaccacaacatcaccagcagcagcaacaccaacaacaacaagttcacatgcaaccacaaaaacatcagcaacaacaagaagttcatgttcaacaacaacaacaacaaccgcagcaccaccaccaacaacaacaacaacagcaccaacaacaacatcaatgtgaaggccaacaacaacatcaccaacaatcacaaggccatgtgcaacaacacgaacagagccatgagcaacaccaaggacagagccatgagcaacaacatcaacaacaattccagggtcatgacaagcagcaacaccacaacagcctcagccatatcagcagggccaggaaaaatcacaacagcaacaatgtcattggcaggagcagcaacagactacaaggtgcagctattactactatagcagtagc

SEQ ID NO: 13235 - DNA, 577 bp, Zea mays
  Clone ID: LIB3061-099-Q1-K7-H6
gcaatctcagctggcatcttacctctatcacccttgttcctccaacaatcatcagccctattacaacagttacctttggtgcatttattggcacaaaacatcagggcacaacaactacaacaacttgtgctagcaaaccttgctgcctactctcagcaacagcagtttcttccattcaaccgactaggttcattgaactctgcttcttatttgcaacaacaacaactaccattcagccagctacctgctgcctacccccagcaatttcttccattcaaccaactagcagcattgaactctcctgcttatttacagcagcaacaactactaccattcagccagctagctggtgtgagccctgctaccttcttgacacaaccacagttgttgccgttctaccagcacgttgcgcctaacgctggcaccctcttacaactgcaacaattgctgccattcaaccaacttgctttgacaaacccagcagtgttctaccaacaacccatcattggtggtgccctcttttagatttcttatgagttatagttcaataataaagttttttgtctgatgtttaaaa

SEQ ID NO: 13236 - DNA, 653 bp, Zea mays
  Clone ID: LIB3061-099-Q1-K7-H7
attgagaccaactagcaacatagaaagcacaatagtgtaccaacaatggcagccaaaatattttgcctccttatgctccttggtctttctgcaagtgctgctacggcgaccattttcccacaatgctcacaagctcctatagcttcccttcttcccccgtacctctcaccagcggtgtcttgggtatgtgaaaacccaattcttcaaccctataggatccaacaggcaatcgcagctggcatcttacctttatcacccttgttcctccaacaatcatcagccctattacagcagttacctttggtgcatttattggcacaaaacatcagggcacaacaactacaacaacttgtgctagcaaaccttgctgcctactctcagcaacaacagtttcttccattcaaccaactagctgcattgaactctgcttcttatttgcaacaacaacaactaccattcagccagctatctgctgcctacccccagcaatttcttccattcaaccaactgacagctttgaactctcctgcttatttacagcagcaacaactactaccattcagccagctagctggtgtgagccctgctaccttcttgcacaaccacaattgttgccgttctaccagcacgctgcgcctaacgctggcaccctc

SEQ ID NO: 13237 - DNA, 550 bp, Zea mays
  Clone ID: LIB3061-099-Q1-K7-H8
caactagcaacatagaaagcacaatagtgtaccaacaatggcagccaaaatattttgcctccttatgctccttggtctttctgcaagtgctgctacggcgaccattttcccgcaatgctcgcaagctcctatagcttcccttcttcccccgtacctctcaccagcggtgtcttcggtatgtggaaacccaattcttcaaccctacaggatccaacaggcaatcacagctggcatcttacctttatcacccttgttcctccaacaatcatcagccctattacatcagttacctttggtgcatttattggcacaaaacatcagggcacaacaactacaacaacttgtgctagcaaaccttgctgcctactctcagcaacagcagtttctttcattcaaccaactagctgcattgaactctgcttcttatttgcaacaacaacaactaccattcagccagctacctgctgcctacccccagcaatttcttccattcaaccaactggcagcattgaactctcctgcttatttacagcaggaacaactactacca

SEQ ID NO: 13238 - DNA, 624 bp, Zea mays
  Clone ID: LIB3061-099-Q1-K7-H9
caacaagcaacatagaaagtggaatccagtagcaacaatagagcaacaatggcgaccaagatattttccctccttatgctccttgctctttctacatgtgttgctaacgcgacaattttccctcaatgctcacaagctcctatagcttcccttcttcccccataccttccatcaattatgggttcaatatgtgaaaacccagctcttcaaccatataggcttcaacaagcaatcgcagcaagcaacatacctttatcgcccttgttgtttcaacaatcgccagccctatctttggtgcagtcattggtacaaaccatcagggcacaacagctgcagcaactcgtgctacctctgatcaaccaagtagctctggcaaacctttctccctactctcagcaacaacaatttcttccattcaaccaactgtctacactgaaccctgctgcttatttgcagcaacaactattaccatttagccagctagctactgcctactctcagcaacaacaacttcttccatttaaccaattggccgcactgaaccccgctgcttatttgcagcagcaaatactactaccatttagccagctagctgcagcaaacccggcttgcttcttgacacag

SEQ ID NO: 13239 - DNA, 668 bp, Zea mays
  Clone ID: LIB3061-100-Q1-K7-B1
agacgggtgggatttctttcaataccactgttgctttgactcatattgatgagaagctgtgctatcagattctgcacgagtacaaaattcacaatgctgaggtgttattccgtgaagatgctactgtggatgatctcattgacgttatcgaagggaaccggaagtacataaagtgcgtgtgcgtatataacaagatcgatgttgttggtatcgatgacgttgataatcttgctcggcaaccaaattcactagtgatcagctgcaatttgaagctgaacttggacagactacttgcgagaatgtgggaggagatgggcctagtgagggtgtatacaaagccacagggccagcagcctgatttcacagacccagttgttctttccaccgacagaggtggctgcacggtggaggacttctgcaatcatatccatagaagtttgctcaaggacgtgaagtatgtgctcgtatggggaaccagcgcaaggcactatccacagcattgcggcctcggccatggccttaacgacgaggatgtcgtccagatagtaaagaagaaagaaaaggaggagggtgggcgaggcccgttcaagtcgcacacgaacgcacctgacccgatatctgatagggtgaagaaagcccactggagacataatataactgggtccctg

SEQ ID NO: 13240 - DNA, 644 bp, Zea mays
  Clone ID: LIB3061-100-Q1-K7-B10
tgcagaacgagttcttcagacatacaatggacaaatgatgccaaatgttgacttgacatttcggctgaattgggccagtgctggtgaaaagcgcgatgatactcctgaatatactatttttgttggggatttggctgcagatgttacagattacttgttacaagagacattcagggttgagtatccctctgtcaagggtgcaaaagttgtgactgataaattgacaatgcgcacaaagggttatggatttgtgaaatttggtgatcctacagagcaagctcgtgcaatgactgaaatgaatggaatgccttgttcttccaggcctatgcgtattggtcctgcagcaagtaggaaaaatacaggaggtgttgttcaagagagagtaccaaattctcaaggagctcagtctgagaatgatcctaacaataccactatatttgttggtgggcttgaccccaatgtcactgaagataccctaaaacaagttttttctccttacggtgaagtcgtccatgttaagatccctgttgggaagagatgtggttttgttcagttcgttaccagaccttctgctgaacaagcgctgctaatgctgcaaggggccttgattggtgcacagaatgttcgactttcatggggtagaa

SEQ ID NO: 13241 - DNA, 332 bp, Zea mays
  unsure (1)..(332): unsure at all n locations; Clone ID: LIB3061-100-Q1-K7-B11
cnccatgccccnacgcngcncaaccgcgccgggcgcagccncanccccagccacacccangcccgngccaacagccgcanccaagcccgngccagcngcagggaaccngcggcgnnggcagcaccccgancccgggccagngcgncgaggggcngaggcancagngcagcccgacggcaacgccggacngcncgccncagngccagncgnngcggcagcagngnngccagcagcncaggcagggggagccgcagcaccgggaccaggcgancnncggcnnggncccccagnccancccgcagcagcagccgcaaagcggccaggncgcgggg

SEQ ID NO: 13242 - DNA, 456 bp, Zea mays
  unsure (1)..(456): unsure at all n locations; Clone ID: LIB3061-100-Q1-K7-B2
caacnagcaacatagaaagcacaagaggggaccaacaanggcagccaaaanannnngccnccggaggcgccnggggcnnncngcaagngcngcnacggcgaccannnncccgcaaggcncgcaagcnccnatagcnncccnncnncccccgnaccccncaccagcggngncnncgggggtggagacccaanncnncaacccnacagganccaacaggcaancacagcnggcancnaaccnnnancacccnnggnccnccaacaancancagcccnannacaacagnnaccnnnggngcannnannggcacaaaacancagggcacaacaacnacaacaacnngngcnagcaaaccnngcngccnacncncagcaacagcagnnncnnccanncaaccaacnagcngcanngaacccngcnncnaaaangcaacaacaacaacnaccanncagccag

SEQ ID NO: 13243 - DNA, 369 bp, Zea mays
  Clone ID: LIB3061-100-Q1-K7-B3
cgggagctacttcctactctcacagcttctgtcttcctttagcggttggggcgcactgaacccctctgcttatttccaggggcaaatactactaccatttggccagctagctacaacaagccccgcttccttcttgacacaacaacaagtgcttccgttctaccagcagtttgtggctaaccccgcaacccggtttgttggcaacagttgctgccctttgtccaacttgctttgacaaacccagcagccttctaccaacaacacatcattggcggtgccctcttttagattgcttattagttgtaattcaataatgaagttttttggctgatgtatgtggcctcctagaaataagaagttatatttccc

SEQ ID NO: 13244 - DNA, 380 bp, Zea mays
  Clone ID: LIB3061-100-Q1-K7-B4
caggtggcatacgtgaagatgatatgggttgacaggctaggtttcgatctccacgctcattctgcggaaggcgttttggctgttcgggtcccttttcctagggaggtctccgacgagaagggggtgaaatcgtcgttcaacatgatgtctcatcatgcgtgggaggtggagaagagctgtgtggcccagagtttgagaaggtgcagttcttgaagaaggtcagatagcattgcgaattctgtttccgtggtggacgatctttcgttattgagaggagtgatagtttgaagttttgtttcctttatcatgaactgtttgtcttgtatattggtcatatttttttgtgcctaatacattggatgcaattggcatcttgaatt

SEQ ID NO: 13245 - DNA, 505 bp, Zea mays
  unsure (1)..(505): unsure at all n locations; Clone ID: LIB3061-100-Q1-K7-B5
cggcgaccannnncccacaaggcncacaagcnccnanagcnncccnncnncccccgnaccncncaccaacggggggaagaaggggngaaaacccaanncnncaacccaacagganccaacaggcaancgcagcnggcancnaaccnnnancacccnngnnccnccaacaancancagcccnannacagcagnnaccngnggngcannnannggcacaaaacancagggcacaacaacnacaacaacnngngcnagcaaaccnngcngccnacncncagcaacagcagnnncnnccanncaaccaacnagcngcanngaacccngcnncnaaaangcaacaacaacaacnaccanncagccagcnancngcngcccacccccagcaannncnnccanncaaccaaccgacagcanngaacncnccggcnnannnacagcagcaacaaccaccaccanncagccagccagccggggggagcccngccaccnncnngacacaaccaca

SEQ ID NO: 13246 - DNA, 425 bp, Zea mays
  unsure (1)..(425): unsure at all n locations; Clone ID: LIB3061-100-Q1-K7-B6
accaccagtggggacaagganaacaacanggnngaccacagggggaangagaagaacaangccanngncngcaacaaaggccacnnngacaangaaannganangcncggccccgagacccacccnggcgncaagcgcancaccancaaaccccagacgaagcngggggngnnccccgagaccaacacnggcaacaaagnccnngcngaggggcgccngangaaccnngggggngcnacnggccancccagcnnngncangnccngcncaaacacnaaccagggcanngcccaacnngaaccgnggaaggagaagagcncnggcaagnnngagaagaaggggnnngngcnccccaagcacccngangagaaaggggcngnnnnncacnngggcaagcngggngccaagcngaccaagcnaaccaa

SEQ ID NO: 13247 - DNA, 70 bp, Zea mays
  unsure (1)..(70): unsure at all n locations; Clone ID: LIB3061-100-Q1-K7-B9
cagcgaggangacanccacaagagcgnaaagnacaaggggngggcaagcacaaccaacggaaacaagaag

SEQ ID NO: 13248 - DNA, 663 bp, Zea mays
  Clone ID: LIB3061-100-Q1-K7-C1
tccgaacaactacaacaaaggtaactgttgtagtagggctgatgattggtgtgccaacaatggcagcggaaagattttggctggcttatgctccttggtctttgtgcgagtgctgctacggcgaccattttcccgcaatggtcgcaagctcctataggttcccttcttgccccgtacctctgaggggggggtcttcggtatgtgaaaacccaattcttcaaccctacagggtccaacaggcaatcgcagctggcatcttacctttatcacccttgttcctccaacaatcatcagccctattacaacagttacctttggtgcatttattgggacgcaacatcagggcacgacaactacgacaagttgtgctagcaaaccttgctgcctactctcagcagcagcagtttcttccattcaaccaactaggttcattgaactctgcttcttatttgcaacaacaacaactaccattcagccagctacctgctgcctacccccagcaatttcttccattcaaccaactagcagcattgaactctcctgcttatttacagcagcaacaactactaccattcagccagctagctggtgtgagccctgctaccttcttgacacaaccacagttgttgccgttctaccagcacgttgcgcctacgctggcac

SEQ ID NO: 13249 - DNA, 537 bp, Zea mays
  unsure (1)..(537): unsure at all n locations; Clone ID: LIB3061-100-Q1-K7-C10
ngccaattaatgcaccaaaggtaactggggggatggggcacaacaactacaacaacttgtgctagcaaaccttgctgcctactctcagcaacagcagtttcttccattcaaccaactaggttcattgaactctgcttcttatttgcaacaacaacaactaccattcagccagctaccttcgacgtacccccagcaatttcttccattcaaccaactagcagcattgaactctcctgcttatttacagcagcaacaactactaccattcagccagctagctggtgtgagccctgctaccttcttgacacaaccacagttgttgccgttctaccagcacgttgcgcctaacgctggcaccctcttacaactgcaacaattgctgccattcaaccaacttgctttgacaaacccagcagtgttctaccaacaacccatcattggtggtgccctcttttagatttcttatgagttatagttcaataataaagttttttatctgatgtttgtggcttcccagaaataagaaagtacatttct

SEQ ID NO: 13250 - DNA, 344 bp, Zea mays
  Clone ID: LIB3061-100-Q1-K7-C11
ccaagatccaggacaaggagggcattcccccagaccagcagcggctcatctttgctgggaagcagcttgaggacgggcgcacgcttgccgactacaacatccagaaggagagcaccctccacttggtgctgcgcctcaggggaggcatgcagatcttcgtgaagaccctgaccggcaagaggtcacccttgaggtggagtcttcagacaccatcgacaacgtcaaggccaagatccaggacaaggagggcatcccacccgaccagcagcgtttgatcttcgctggcaagcagcttgaggatgggcccacccttgcggattacaacattcagaaggagagcaccc

SEQ ID NO: 13251 - DNA, 349 bp, Zea mays
  unsure (1)..(349): unsure at all n locations; Clone ID: LIB3061-100-Q1-K7-C12
aaaaaaaaaaaaaaacacccttcccatcngggggagaaaaaatattttgggaagaaaaaaacaaacaaatccccccccaacaaaaaaaaaaaaaaaaaaaaattttctacccccccccccccccccacaaaaaaaaaacacaccccgggggggggaaacccccccccccaccaaaaaaaaaaaaaaggtttttttgccccccccccccccccaaaaaaaaaaataattttttaaaaaaaaaaaaaaagagttatgttttgaaaaaaaaaaaaaaaaaaaaaaaaaaaaaaaaacggggggggcgcgccccccccccacaaaaaaaaaaaaaaaaaaaacgggcccccac

SEQ ID NO: 13252 - DNA, 675 bp, Zea mays
  unsure (1)..(675): unsure at all n locations; Clone ID: LIB3061-100-Q1-K7-C2
ccgggtagcaacatagaaagcacaatagtgtaccaacaatggcagccaaaatattttgcctccttatgctccttggtctttctgcaagtgctgctacggcgaccattttcccgcaatgctcgcaagctcctatagcttcccttcttcccccgtacctctcaccagcggtgtcttcggtatgtgaaaacccaattcttcaaccggacaggatccaacaggcaatcgcagctggcatcttacctttatcacccttgttcctccaacaatcatcagccctattacaacagttacctttggtgcatttattggcacaaaacatcagggcacaacaactacaacaacttgtgctagcaaaccttgctgcctactctcagcaacagcagtttcttccattcaaccaactaggttcattgaactctgcttcttatttgcaacaacaacaactaccattcagccagctacctgctgcctacccccagcaatttcttccattcaaccaactagcagcattgaactctcctgcttatttacagcagcaacaactactaccattcaaccagctagctggtgtgagccctgctaccttcttgacacaaccacagntgttgccgttctaccagcacgttgcgcctaacgctggcaccctcttacaactgcaacaattgctgccattca

SEQ ID NO: 13253 - DNA, 604 bp, Zea mays
  Clone ID: LIB3061-100-Q1-K7-C4
ggggcggtacatggcctactcgccctcgccgtcgaccaccccccactccccccgcatcgccggggtccgcgccccgtctgccgccgtggccgaacaggagaagtaccttgccgaactgctcgcggagaggcagaagcttggcccgttcgtcccagtgatcccgcatagtgtacgctggggtgaggaagaaattttacgtgtttccacactattggagaacgcatcccttttaaatcaaagtggccttgaacatggtagtccactaacaacaggaggattatattcaaatggagcagctactgacatgaatgtgtggacatcagcatttcaaccagaaagttcaccagcttatagctggcttggaggatcccagggcagctcctctggacttattgtcaagaaaacaatgaaggtcgatatcccagtagacaaatatccaacattcaatttcgttggccgcatccttggtccaagaggaaattccttgaagcgggtggaggcaaatacggactgccgtgtgctaataagaggtcgtggcagcatcaaagatccagcacgggaggaaatgatgcgagggaagccaggatatgaacacctgaatgaa

SEQ ID NO: 13254 - DNA, 623 bp, Zea mays
  Clone ID: LIB3061-100-Q1-K7-C6
gtcgaccacgcgtccggcaaagcggttgtgcgtagagaggatcgtcgaacagaacagcatgaagatggtcatcgttctcgtcgtgtgcctggctctgtcagctgccagcgcctctgcaatgcagatgccctgcccctgcgcggggctgcagggcttgtacggcgctggcgccggcctgacgactatgatgggcggcagctggctgtacccctacgcggagtacctgaggcagccgcagtgcaacccgctggcggcggcgccctactacgccgggtgtgggcagccgagcgccatgttccagccgctccggcaacagtgctgccagcagcagatgaggatgatggacgtgcagtccgtcgcgcagcagctgcagatgatgatgcagcttgagcgtgccgctgccgccagcagcagcctgtacgagccagctctgatgcagcagcagcagcagctgctggcagcccagggtctcaaccccatggccatgatgatggcgcagaacatgccggccatggggggactctaccagtaccagctgtccagctaccgcaccaacccctgtggcgtgttcgctgccatttcgccctactactgattcatgatattggggaaatctcctctat

SEQ ID NO: 13255 - DNA, 621 bp, Zea mays
  Clone ID: LIB3061-100-Q1-K7-C7
gaccaacttgcaacatagaaagcacaatagtgtaccaacaatggcagccaaaatattttgcttccttatgctccttggtctttctgcaagtgttgctaccgcaaccattttcccacaatgctcacaagctcctatagcttcccttcttcccccatacctctcaccagcggtgtcttcaatgtgtgaaaccccaattgttcaaccctacaggatccaacaggcaatcgcaacaggcatcttaccattatcacccttgttcctccaacaaccgtcagccctattacagcagttacctttggtccatttggtggcacaaaacatcagggcacaacaactacaacaacttgtgctagcaaaccttgctgcatactctcagcaacatcagtttcttccattcaaccaactggctgcattgaactctgctgcttatttgcaacaacaattaccattcagccagctagttgctgcctacccccagcaatttcttccattcaaccaactagcagcattgaactctgctgcttatttacagcagcaacaactactaccattcagccagctagctgatgtgagccctgctgccttcttgacacaacaacagttgttgccgttctacctgca

SEQ ID NO: 13256 - DNA, 552 bp, Zea mays
  unsure (1)..(552): unsure at all n locations; Clone ID: LIB3061-100-Q1-K7-C8
ggatgtttctatgaagaagggnnccccagnggtgggngncnnnaggaccnnngccgcngngggagggggaccagcngnaangggnatnggncctgccgttgcaatccctgcagcagtgaaagctgctggccttcagatggatgatatcgatcttttcgaaatcaacgaggcttttgcatcggatatgtctactgctgcaagaagttggaacttgatcctgctaaagtcaatgttaatggcggtgcaatggctcttggacatcctttgggtgctacaggtgcacggtgcgtcagtactcttctcaatgagatgaagcgccgcggcaaggattgccggttcggagtgatttctatgtgcataggttctgggatgggtgctgctgctgtgttcgagcggggagacggcgtttatgagctcaccaatgctcggggaatctcgacccacaactggctttccaaggacgccctgtaaagctacacccaccaaaatttgccggaactggtagcattggtttcagatcgctgtggggagcgaattggggaataaaatgat

SEQ ID NO: 13257 - DNA, 586 bp, Zea mays
  unsure (1)..(586): unsure at all n locations; Clone ID: LIB3061-100-Q1-K7-D1
gcggcgcggtcggacaaggagcaggcggaggaggagttgngccaagccacaatgggtatctcgcgtgactcgatgcacaagcgccgagccaccggtggaaagcagaaggcctggaggaagaagcgaaagtatgagcttggtcgccagccagccaacaccaagttgtcaagcaataagacattgatgagggtccgtgttcgtggaggtaatgtgaaatggagggctcttcgccttgatactggtaactactcatggggaagtgaagctgttacccgcaagacccgtatcctcgacgtggtctacaatgcatcaaacaatgagcttgtgaggacacaaacccttgtgaagagtgccattgtgcaagttgatgctgccccattcaagcagtggtacctcactcactatggagttgacattggttggaagaagaaaacccctgctgcaaagaaggataatgctgagggacaagaggttgaggcagcagctgaggaaacgaaaaagagcaaccatgttacgaggaagcttgagaagcgcaaggagggacgtacccttgacccacacattgaggagcaatttggcagtggac

SEQ ID NO: 13258 - DNA, 609 bp, Zea mays
  unsure (1)..(609): unsure at all n locations; Clone ID: LIB3061-100-Q1-K7-D11
gctagggtaaatgtgagggaccctggtacaataaacgatggcctcggtgctgctcgtgaagcagatgccctattggttcaggatgagtctaccaggagccagcaagagggtcaacagaatggaatttctgagccagctgccaacaatgctctccagtatcaagagcaaaaccctcagcgaggtggaagtacccctgcaggctcaggctccctcaacccatttgggtcccttttgctgtggttgctgggaggcggtgcttctgatggcatagnttctttcttctctatgttcagagatgttcgtgatcatggtcaagattacaccgatccacctcgaaatggaaatgatcaggtgacatagaatcatggggatgaaagtgggccaatgactgaactcgagtgcttgggcggcagcagnctctttctaatatgatataatgccagcacctcccttcaaaaggataatgacgaatattggtggcaactatacagactggtgtcgctggagatgccatgttagtattatctgtttctcacttttttagttagtaggtaagggtgaagggtgtatctatattcattacatgtgcacattccctaccgtctgaat

SEQ ID NO: 13259 - DNA, 669 bp, Zea mays
  Clone ID: LIB3061-100-Q1-K7-D3
cgggtcgaccatgcgtccggaaagccaatagtgtaccaacaatggcagccaaaatattttgcctccttatgctccttggtctttctgcaagtgctgctacggcgaccattttcccgcaatgctcgcaagctcctatagcttcccttcttcccccgtacctctcaccagcggtgtcttcggtatgtgaaaacccaatgctgcgaccctacaggatccaacaggcaatcacagctggcatcttacctttatcacccttgttcctccaacaatcatcagccctattacatcagttacctttggtgcatttattggcacaaaacatcagggcacaacaactacaacaacttgtgctagcaaaccttgctgcctactctcagcaacagcagtttcttccattcaaccaactagctgcattgaactctgcttcttatttgcaacaacaacaactaccattcagccagctacctgctgcctacccccagcaatttcttccattcaaccaactggcagcattgaactctcctgcttatttacagcagcaacaactactaccattcagccagctagctggtgtgagccctgctaccttcttgatacaaccacagttgttgccgttctacagcacgctgcgcctaacgctggcaccctcttacaactgcaacaattgct

SEQ ID NO: 13260 - DNA, 664 bp, Zea mays
  Clone ID: LIB3061-100-Q1-K7-D4
gttctcacgatttgacaaatgaagtggatgagataggtgcaattgattaccagggtgaatcacctgatgagcaggctttagtaattgcagcgtctgcttatgggtatacccttgttgaaagaacaactggacacattgttatagatgttctaggcgagaggttaaggttggatgttcttggtgtccatgaattcgatagtgtgagaaaaagaatgtctgttattgtaaggtttccggacaacaatgtgaaggttcttgtgaaaggtgctgacacatcaatgttaaacattttgaaagtagaaattgatgatgaactttatgattcgttgcatgttaaaattagagaagctacagaaaatcatttgtcagcctattcatcagagggtttacggaccttagtcattggttcaaaaaatctgacagatgcagaatttagtgaatggcaggaaatgtacgaagaagctagtacctccatgcatgagagatcagcaaagctccgtcaagcagcaggtctggtagaatgcaatctaacccttcttggtgcaactggaattgaagataaattgcaggatggtgttcctgaggccattgactctctgagacaggctggaatcaaggtgtgggttctcacaggagataagcaagaaactgctatatctattgg

SEQ ID NO: 13261 - DNA, 177 bp, Zea mays
  Clone ID: LIB3061-100-Q1-K7-D5
tagcaacatagaaagcacaatatttgtaccaataatggcagccaaaatattttgccctaatatgcttcttggtctttctgcaagtgcctcttcggggagcatttttccgcaatgcttacaagcttctattactttccttttttccccataccttttaacaacgatgtcttcaatatg

SEQ ID NO: 13262 - DNA, 278 bp, Zea mays
  Clone ID: LIB3061-100-Q1-K7-D6
tgccattttacccacaggttgtgggagacattgacgccttcttgcaacagcaacagttgctaccattctacccacaggatgtggcaaacaatgtcgccttcttacaacaacaacaattgctgccatttaaccaacttgctttgacgaatcctaccaccttattgcagcagcccaccattggttttgccatcttctagatttttttatgctttatactgtaataataaagttctcatactgatatgtgcaacttctcagtaataaaagattagagatct

SEQ ID NO: 13263 - DNA, 111 bp, Zea mays
  Clone ID: LIB3061-100-Q1-K7-D7
cgaaagcgttgggaaaagcgagggaggcagcctgctattttctgtcaaaacaagggcgaaactgcggctactccagcgcacacgcagatcagcgtcgaaaaccgtcgcatc

SEQ ID NO: 13264 - DNA, 98 bp, Zea mays
  unsure (1)..(98): unsure at all n locations; Clone ID: LIB3061-100-Q1-K7-D8
gagacacaagccaggcagcnnnccgcanangggcngaccacaggaaaggcaaannnggangggnggcgccggagagaccnncaacangaacaagcggg

SEQ ID NO: 13265 - DNA, 418 bp, Zea mays
  Clone ID: LIB3061-100-Q1-K7-E10
gagtgccccagttcctaactccggtgggcgcgctcccaccgccgcgcggctcaaaacccgccctcagcctcccgcgctccagtccacacgggagcgggtggtgtcgtctgaagcggcgcgatcaaggagtcttcgggcgctccggacgtaacgtgctggcggttgcttatctccggatggggtgtaagcggaaatgttctccttgttctatggcctgtggaagtatgtgttcgccaaggacgagttccgtgttctgattcttggtgttgacagagctggcaagacgactttgctggagaagttgaaatcgatatatctcaagggggaaggacttccgcctgaccgtgtcgttccaacagttgggctcaacattggccgcatcgaagacgcaaaggcaaaacttggtttctgggatcta

SEQ ID NO: 13266 - DNA, 98 bp, Zea mays
  Clone ID: LIB3061-100-Q1-K7-E11
cgcgacggccgccctttttttttttttttttttttttttttttttttttttttttttttttttttttttttttttttttttttttttttttttttttt

SEQ ID NO: 13267 - DNA, 75 bp, Zea mays
  Clone ID: LIB3061-100-Q1-K7-E12
gcgaaaaaaaaaaaaaaaaaaaaaaaaaaaaaaaaaaaaaaaaaaaaaaggggcgggcgcgctctgagaggatcc

SEQ ID NO: 13268 - DNA, 466 bp, Zea mays
  unsure (1)..(466): unsure at all n locations; Clone ID: LIB3061-100-Q1-K7-E2
cctggatggtgatggcaggactgtgtactgatctaaaatccagcaagcaactgatctaaaatccagcaagcaccgcctccctgctagtacaagggtgatatgtttttatctgtgtgatgttctcctgtgttctatctttttttgtaggccgtcagctatctgttatggtaatcctatntgtcttccgaccttgtaattgtgtagtctgttgttttccttcaaaaaaaaaaaaaaaaaaaaaaaaaaaaaaaaaaaaaaaaaaaaaaaaaaaaaaaaaaaaaaaaaaaaaaaaaaaaaaaaaaaaaaaaaaggaaaaaaaaataaaaaaaaaaaaaaaaaaaaaaaaaaaagggggggcccttttaaggggtcaaaagttaaacccgggggattggaaaggaaaaattttttttatggggcccccaaaaaaaaaaaagggggccgggtttaaaaaagtgtggagggg

SEQ ID NO: 13269 - DNA, 457 bp, Zea mays
  unsure (1)..(457): unsure at all n locations; Clone ID: LIB3061-100-Q1-K7-E3
gtgtccttcaatgttgtagggtagaaaagagcaaaaagaaagaaaaaatgccttggatgacactgttattgctccgatgatctccaacagactgatctgcagatcacgcatgtaaccaggtgctgatcattgtcgaatgtcgagacacacagctgcatgtcgcacgttcacttcatatgatgttgggccntanggagtaaagcatccttnatcactgtnacaattccacctttnatnaantacccntctntcttccttgcagcttcttgaacattgtcagcattgagtatcttaacattgtnttcaattcgacaatgatcagcacctggttacatgcgtgatctgcggatcagtctgttggnggtcttcggagccttaaaagtgtcctccagggcattttttctttctttttgctcttttctacccttccctttggggggctccggacgcgtgggtc

SEQ ID NO: 13270 - DNA, 586 bp, Zea mays
  unsure (1)..(586): unsure at all n locations; Clone ID: LIB3061-100-Q1-K7-E4
gcagcctaataaaaccgtatcgtctcgcctgttcagtttccttctcctcttcccgcagcccggtttgccgaccaggttccaccgttccagagtagccaagcgaatcccgtgtctggttcgcgcgatggcggaggagcagtccaacccccagcaccagcaagcggaggagagggaggttgtggtggagcagcagcagccgaggagggccccgaagctgaggtacctggacttcgtccaggtggcggctgcccaggccgcggtgtgcctcgctgggctctacggcctcgccaaggaccacgccggcccgctccgccccagcgttgacgccgtcgagtctgccgtcaagggcgtcgttagccccgtctacgaccgcttcggcggcctgccgctcgacgtcctcgccttcgtcgaccgcaaggtggacgacacggtgcacgaggtggacaagcacctcccgggcgcgctgaaggcggcgtcggcgcatgtctacgcggtggttcggggcgtgccggaggtggcgcgcgagctggcggccgaggcgcancggtcgggcgtgaggggcgccacccgtgcggcgctcgcgatg

SEQ ID NO: 13271 - DNA, 619 bp, Zea mays
  Clone ID: LIB3061-100-Q1-K7-E5
aacacacctagcgaagcgcactagcgacaacctgacaacaatggctaccaagatattatccctgcttgcgcttcttgcgctttttgcgagcgcaacaaatgcgtccattattccacaatgctcacttgctcctagttccattattccacagttcctcccaccagttacttcaatggcgttgtagcacccagctgtgcaagcctataggctacaacaagcgattgcggcgagcgtcttacaacaaccaattgcccaattgcaacaacaatccttggcacatctaacaatacaaaccatcgcaacgcaacagcaacaacagttcctaccagcactgagccacctagccatggtgaaccctgtcgcctacttgcaacagcagctgcttgcatccaacccacttgctctagcaaacgtagttgcaaaccagcaacaacaacaactgcaacagtttctgccagcgcttagtcaactagccatggtgaaccctgccgcctacctacaacagcaacaactgctttcatctagcccgctcgctgtggccaatgcacctacatacctgcaacaagaattgttgcaacagattgtaccagctctaactcagctagctgtggcaaaccct

SEQ ID NO: 13272 - DNA, 637 bp, Zea mays
  Clone ID: LIB3061-100-Q1-K7-E7
ctggtcgttctgctaacacaaacagcagcagctcctcctcactagctagccttctctatttttgctactgcaagtgtccaagtctgcgacgacgtccgagatgtcgacggtgagccgtgcatcccttgaccagaagcttgccctcgccaagcgctgctcccgaggtacgaggaacagcggggtgtgtacagacactcgccgatcgacattcaggcagccaataagccgcgcggccttaattaattaaagctcgaaatgactaacgctatgtatgtatgtgtgtgtgtgtgtgtctgcagaggcgactcttgccggagctaaggcggcagcagtggcgactatcgcctccgcgattcccaccctcgcgagcgtgcggatgctgccgtgggccaaggccaacatcaaccccaccggccaggcgctcatcgtctccacggtggccgggatggcctacttcatcgccgccgacaagaagatcctgtcgctggcgaggcgccactcgttcgaggaagctccggagcacctcaagaacacctccttccagggcaccggacgcccccacccggctttcttcaggccatgatgagatcagatatatatatgacacatccgtcgacctcatcagtcatagagccca

SEQ ID NO: 13273 - DNA, 643 bp, Zea mays
  unsure (1)..(643): unsure at all n locations; Clone ID: LIB3061-100-Q1-K7-E8
atcctccctccctccttccctccctcgctcgcctctggaggaccctcgccatcctgcccaagcgcaccaccaaacccccagcagcggcgctagggttcgcgcctcggcgcgtcggcaccgtcacctgcggcgatggcggggcaggagcgtaggacaatcgatctggaggagggatgggctgtcgtgcanaagggcatcaccaagctgaagaacatcctcgagggcaagcccgagccgcagttcagttccgaggactacatgatgctctacacgacgatatacaacatgtgcacgcagaagccgccgcaggactactcacagcagctctacgacaagtatcgggagtcgttcgaggagtacatcgcctccatggtactaccttcattaagggagaaacatgacgagtttatgctgagggagctagtgcaaaggtggtcaaaccataaagtcatggttcgctggctgtcacgcttcttttattaccctgaccgatacttcatatcaaggaggtcacttacaccacttaaagaagtgggccttacttgcttccgagagttgatctatcaagagattaaaggacaaggtaagatgcagtgatagctctgattgaccaagacgtgagggtgaacagattgaccgggct

SEQ ID NO: 13274 - DNA, 387 bp, Zea mays
  unsure (1)..(387): unsure at all n locations; Clone ID: LIB3061-100-Q1-K7-E9
ngcnggtatgcagctacaacagcggcgacagggggtgccagagcacagncaacnagccanggggaacccngccgncnaccnacaacnacnnncancnagcccgcgcgcggngggcaangcaccnacgnaccnacaacaacagnngcngcaacaaaaagnaccagcncngacncagggggcgagggcaaacccngcngccnacnnacaacagaagcnnccaaacaaccaacnggcngngncaaacncngcngcgnaccnacaacagcgacaacagnnacccaanccannggcagnggcnaacccaaaggncgcnaccnnccngcagcagcaacaacaanngcnggcagacaaccagnncncnnngangaacccngccnngcagcaacc

SEQ ID NO: 13275 - DNA, 652 bp, Zea mays
  Clone ID: LIB3061-100-Q1-K7-F1
catcaatcatcattcatcttagtagtataggcaccaaatcaaatctgcaacatcaattatctaactccaaaaaccatgaagctggtgcttgtggttcttgctttcattgctttagtatcaagtgtttcttgtacacagacaggcggctgcagctgtggtcaacaacaaagccatgagcgggaacatcatccacaacaacatcatccacaaaaacaacaacatcaaccaccaccacaacatcaccagcagcagcaacaccaacaacaacaagttcacatgcaaccacaaaaacatcagcaacaacaagaagttcatgttcaacaacaacaacaacaaccgcagcaccaccaccaacaacaacaacaacagcaccaacaacaacatcaatgtgaaggccaacaacaacatcaccaacaatcacaaggccatgtgcaacaacacgaacagagccatgagcaacaccaaggacagagccatgagcaacaacatcaacaacaattccagggtcatgacaagcagcaacaaccacaacagcctcagcaatatcagcagggccaggaaaaatcacaacagcaacaatgtcattgccaggagcagcaacagactacaaggtgcagctataactactatagcagtagctcaaatctaaaaa

SEQ ID NO: 13276 - DNA, 663 bp, Zea mays
  Clone ID: LIB3061-100-Q1-K7-F11
cagaaacaacctagcgaagcgcactagcaacgacctaacaacaatggctaccaagatattatccctctttgcgcttcttgccctttttgtgagcgcaacaaatgcgttcattattccacaatgctcacttgctcctagtgccattattccacagttcctccctccagttacttcaatgggcttcgaacacccaggtgtgcaagcctacaggctacaacaagcgcttgcggcgagcgtcttacaacaaccaattgcccaattacaacaacaatccttggcacatctaaccatacaaaccatcgcaacgcaacagcaacaacaatttctaccagcactgagccaactagctgtggtgaaccctgtcgcctacttgcaacagcagttgcttgcatccaacccacttgctctggcaaacatagttgcataccaacaacaacaacaattgcaacagtttctaccagcgctcagtcaactagccatggtgaaccctgccgcctacctacaacagcaacaactgatttcatctagccctctcgctgtggttaatgcacctacatacctgcaacaacagttgctgcaacagattgtaccagctctgactcagctagctgtggcaaaccctgctgcctacttgcaacagctgcttccattcaccaactgact

SEQ ID NO: 13277 - DNA, 323 bp, Zea mays
  Clone ID: LIB3061-100-Q1-K7-F12
gcgttctatcagtaccatcaatcatcattcatcttagtagtataggcaccaaatcaaatctgcaacatcaattatctaactccaaaaaccatgaagctggtgcttgtgggtcttgctttcattgctttagaatcaagtggttcttgtacacagacaggcgggctgcaggtgtggtcaacaacaaagggcgtgaggcagaaacatcatccacaacaacatcattcccaaaaaccacaacatcaaccccccccaccacatgaccaggggtgagggcaccaaccacaacaggtgttcatggcatccccaaaacatgaggcacaaca

SEQ ID NO: 13278 - DNA, 570 bp, Zea mays
  Clone ID: LIB3061-100-Q1-K7-F2
attagctcatcgactccagattggagaactcgacaccatgaaggtgctgatcgttgcccttgctctcctggcgctcgctgcgagcgccgcctccagtacaagcggcggctgtggctgccagacaccaccgtttcatctaccgcctccgttctatatgccgcctccgttctatctggcccgcagcagcagccgcagccatggcaataccccactcaaccaccgcagctaagcccgtgccagcagttcggatcctgcggcgtcggcagcgtcggcagcccgttcctgggccagtgcgtcgagttcctgaggcaccagtgcagcccggcggcgacgccctacggctcgccacagtgccaggcgctgcagcagcagtgctgccaccagatcaggcaggtggagccgctgcaccggtaccaggcgacatacggtgtggtcctgcagtccttcctgcagcagcagccgcagggcgagctcgcggcgctgatggcggcccaggtagcgcagcagctgacggcgatgtgcgggctgcagctgcagcagccaggtccctgccctgcaacgcagctgccg

SEQ ID NO: 13279 - DNA, 616 bp, Zea mays
  Clone ID: LIB3061-100-Q1-K7-F3
agcattcattacacaccaagcgaagcgcactagcaacaacctaacaacaatggctaccaagatattatccctccttgcgcttcttgcgctttttgcgagcgcaacaaatgcgtccattattccacaatgctcacttgctcctagttccattattccacagttcctcccaccagttactgcagtagccttcgaacacccagctgtgcaagcctataggctacaacaagcgattgcggcgagcgtcttacaacaaccaattgcccaattgcaacaacaatccttggcacatctaacaatacaaaccatcgcaacgcaacagcaacaacagttcctaccagcactgagccacctagccatggtgaaccctgtcgcctacttgcaacagcagctgcttgcatccaacccacttgctctagcaaacgtagttgcaaaccagcaacaacaacaactgcaacagtttctgccagcgcttagtcaactagccatggtgaaccctgccgcctacctacaacagcaacaactgctttcatctagcccgctcgctgtggccaatgcacctacatacctgcaacaagaattgttgcaacagattgtaccagctctaactcagctagct

SEQ ID NO: 13280 - DNA, 537 bp, Zea mays
  unsure (1)..(537): unsure at all n locations; Clone ID: LIB3061-100-Q1-K7-F4
ccctattattgcagttacctttggtgcatttattggcacaaaacatcagggcacaacaactacaacaacttgtgctagcaaaccttgctgcctactctcagcaacagcagtttcttccattcaaccaactagctgcattgaactctgcttcttatttgcaacaacaacaactaccattggcgatctacctgttgcctacccccaacaatttcttccattcaaccaactggcagcattgaactctcctgcttatttacagcagcaacaactactaccattcagccagctagctggtgtgagccctgctaccttcttgacacaaccacagttgttgccgttctaccagcacgctgcgcctaacgctggcaccctcttacaactgcaacaattgctgccattcaaccaacttgctttgacaaacctagcagtgttctaccaacaacccatcattggtggtgccctcttttagatttcttatgagttatagttcaataataaagttttttgtctgaaannnaaaannnnnnnnnnnnnnnn

SEQ ID NO: 13281 - DNA, 549 bp, Zea mays
  Clone ID: LIB3061-100-Q1-K7-F6
aagtggtttcagtagcaaaatagagctcagtggcggccaagatattttccatccttatgctccttgctctttctgcatgtgttgctaacgcgaccatttttcctcaatactcacaagctcctatagctgcccttcttcccccataccttccatcaatgaccgctttagtatgtgaaagccgagcccttcaaccctacaggatccagcaagcaatcgcaacaagcaacttacctttatcacacctgttctttcaacaatcgccagccctatctttggtgcagtcattggtacaaaccatcagggcagaacagttgcagcaactcgtgctaccagtgatcagccaagtagctctggcaaacctttccttctactctcagcaacaacaatttcttccattcaaccaactgtctatactgaaccctgctgcttatttgcagcaacaacaactactaccattcagccagctagctactgcctactctcagcagcaacaatttcttccatttaaccaattgggcgcactgaacccctctgcttatttccagcagc

SEQ ID NO: 13282 - DNA, 560 bp, Zea mays
  Clone ID: LIB3061-100-Q1-K7-F8
ccatcgccttcgctccgattcgccgaatcggcgctggcgggcgagacgtggatctcgacggaggagactccgaccatcgctccatggaggccgcggactctgaatccgtcatctccaccttcacctgtccgcactgtcagcgggaggttccatcttcaaacattgcattgcacagcgcgggtgcgctcggaaccttcagaagtgcgaacattgcggagatatggttgccaggaagcttatggatgaacactacgatgaaaaccatgctccgatgaattgctcactttgcaaacacacagtagaacgcgagctatgggatcttcatacaggcatacaatgcccacaaaggatgctcgcgtgccaatactgtcagtttgaactgcctgcagttgatctttttgaacatcaggatctgtgtggaaatcggacagaatattgtcaaaggtgcaggaagtatatcagacttcgtgaattgattggacatgaactccagttccataccgatttgaatgctgcattagaacttttaagtgacaggactcgagccgcagcagagcagc

SEQ ID NO: 13283 - DNA, 693 bp, Zea mays
  Clone ID: LIB3061-100-Q1-K7-G1
ccgggctggacgtcagcctagcaattagcttttcgactccagattggagaacgggacaccatgaaggtgctgatcgttgcccttgctctcctggcgctcgctgcgagcgccgcctccagtacaagcggcggctgtggctgccagacaccaccgtttcatctaccgcctccgttctatatgccgcctccgttctatctgcggggggagcagcagccgcagccatggcaataccccactcaaccaccgcagctaagcccgtgccagcagttcggatcctgcggcgtcggcagcgtcggcagcccgttcctgggccagtgcgtcgagttcctgaggcaccagtgcagcccggcggcgacgccctacggctcgccacagtgccaggcgctgcagcagcagtgctgccaccagatcaggcaggtggagccgctgcaccggtaccaggcgacatacggtgtggtcctgcagtccttcctgcagcagcagccgcagggcgagctcgcggcgctgatggcggcccaggtagcgcagcagctgacggcgatgtgcggtctgcagctgcagcagccaggtccctgcccttgcaacgcagctgccgggggtgtctactactgaggaaactatgtactgtagtaataatgtaatggagccggtgactagctacctatagggctatagctagttcactcgtttagc

SEQ ID NO: 13284 - DNA, 131 bp, Zea mays
  Clone ID: LIB3061-100-Q1-K7-G11
caacaattgctgccattcaaccaacttgctttgacaaacccagcagcgttctaccaacaacccatcattggtggtgccctcttttagatttcttatgagttatagttcaataataaagttttttgtctgag

SEQ ID NO: 13285 - DNA, 626 bp, Zea mays
  Clone ID: LIB3061-100-Q1-K7-G2
ccaactagcttcatagaaagcacaatagtgtaccaacaatggcagccaaaatattttgcctccttatgctccttggtctttctgcaagtgctgctacggcgaccattttcccgcaatgctcgcaagctcctatagcttcccttcttcccccgtacctctcaccagcggtgtcttcggtggggtgaaacccaattcttcaaccctacaggatccaacaggcaatcgcagctggcatcttacctttatcacccttgttcctccaacaatcatcagccctattacaacagttacctttggtgcatttattggcacaaaacatcagggcacaacaactacaacaacttgtgctagcaaaccttgctgcctactctcagcaacagcagtttcttccattcaaccaactaggttcattgaactctgcttcttatttgcaacaacaacaactaccattcagccagctacctgctgcctacccccagcaatttcttccattcaaccaactagcagcattgaactctcctgcttatttacagcagcaacaactactaccattcagccagctagctggtgtgagccctgctaccttcttgacacaaccacagttgttgccgttctaccagcacgtt

SEQ ID NO: 13286 - DNA, 473 bp, Zea mays
  unsure (1)..(473): unsure at all n locations; Clone ID: LIB3061-100-Q1-K7-G3
gcgcgggctncacgcatacaagcggcggntgcggntgccagccaccggcgacggttcatctaccggcggcggtgcatctgccacctacggttcacctgccacctccgtttcttntgcggccatgtttgcacctnccnccgccgggggagagaaaaaaaaaacnnnccatgtaccaccgacggntcatntgccgncgccaccatgccactaccctactnaaccggccggggctnagcctcatgggnaggcacacccatgcccgtgccaacagccgnatccaagcccgggccggcggnagggaacctgnggggttggcagcaccccgatcctgggccagtgcggcgagtttttggggcattagtgcaggccgacggggacgccctattgcttgggtaagtgccagtcggtgcgggaggggggttggcagcagtttagggtggtgggggnggaggagcggttccaggcgatcttgg

SEQ ID NO: 13287 - DNA, 733 bp, Zea mays
  unsure (1)..(733): unsure at all n locations; Clone ID: LIB3061-100-Q1-K7-G4
gggtcgactccatgcgtccggnncagaatttcaaatanctgatctcacgtgatccgagggtggctataggcaaaggcaggncgcgccggaggggtctcggcggcccagnctggtgacctctcgggctatcanctcctctgncgctgtcgcccggccccggcccgccgcgcccagaactgcggctgcccagcccaaacgtatgctgctatcaagtgtggacatgctacgggcancgaccccgacgagtacctgcggcagacaagagtgccccagtcgggccccgtgccccgctcgggccgnngcggcggnncagcagtgnngcggcggtgggtgccgaaccgtgnngcttagcgtcgtcaccccggctcccttctttcaaccggcatttcaagagcccaggtcccgggagccgggttgccgaggggccaagaaccttctaccacccggagcgtcgtttcctgagcgcccgtcaagggcgtacccaaggctttcgcccatgggcgggttcgcatgttgcaggggcaaggcgccgagatcgnncgncttttttnggngccacgccacgcaccgagacccgggcattttctgctacattagccgagatcaacaaggagcaacggcctactgggaccccgaccaagagggcagtgggccgtgccgccgggggggcagaaagtcctacgggcggcgggcccgcttgcagacttggtgggaactccacttccgggcccgg

SEQ ID NO: 13288 - DNA, 601 bp, Zea mays
  Clone ID: LIB3061-100-Q1-K7-G6
attttccttacatgacttggatttgacaaattacattgccaataagaagacttcagagcgccagatctatgagctgtatgctgtgagcaatcattatggcaacatggcaagtggacattatactgcacacattaagcttgtggatgagaatcggtggtacaacttcgatgatagccgttgttgttccattgatgaagatgaggtgaagactgatgcagcttatgtgctattctatagaagggtcagagaacaagacatagcaaggggaactagtaatggatctcagttatatgcaaaaagaagtcacggatatagccataggtaggctgatgattactgtggttcggtgcaagggggattctggaaatgacacccgcacgcctttagtcattgccaggagtatatggcttgctggaaaaaatgctcatcacgtgcagtcaatgcaccgttgtccagttgtcacagaagatatttcgtgcagtgctggtacaagatgggaattttgtatgaggtgagttgaaggagtaattgactctttatgataactgggtagcttaacaggaacgccggggcttgggggcattttgttcgtctggtttct

SEQ ID NO: 13289 - DNA, 613 bp, Zea mays
  unsure (1)..(613): unsure at all n locations; Clone ID: LIB3061-100-Q1-K7-G7
cgacccacgcgnccgaacaaatttttncannannccacagggctcacgggggccnagagccatnattccacagttcctgccaccagttacttcaatgggcttcgaacatccagccgtgcaagcctacaggctacaactagcgcttgcggcgagcgccttacaacaaccaattgcccaattgcaacaacaatgcttgtttgatctaaccctacaaaccattgcaacgcaacaacaacaacaacaacagtttctgccatcactgagccacctagccgtggtgaaccctgtcacctacttgcaacagcagctgcttgcatccaacccacttgctctggcgaacgtagctgcataccagcaacaacaacagctgcaacagtttatgccagtgctcagtcaactagccatggtgaaccctgccgtctacctacaactactttcatctagcccgctcgcggtgggcaatgcacctacgtacctacaacaacagttgctgcaacaaattgtaccagctctgactcagctagctgtggcaaaccctgctgcctacttacaacagttgcttncattcaaccaactggcctggtcaaactctgttgcgttcctacaacagcga

SEQ ID NO: 13290 - DNA, 440 bp, Zea mays
  Clone ID: LIB3061-100-Q1-K7-G8
caaaaatctccacggaaaatccaatcaggggagggatccatttccctttcttctgaagtcgtgctcttcttcccgtcgcttcgccgtgccgcacctgcgaggagaggagacttcgccgcgaagctcaccatgatctcgccggagaggagctcgtcacagagcccgcggtcggcggggactgtttggcccttcctgtcgatcttcggcacggatcccgtaaagatgggtaccggggtgcagtcctacatcttctaccgcgtcatcaccaagaccaacctccctgaatttgaggggccagagaaaattggtattcggcgctatagtgattttgaatgggtgcatgaacgggttgctgagaggtgcaaaggcgtttttataccccctctttcggagaagaatgctgttgagaaatatccggtttgcaaggagttcattgaatt

SEQ ID NO: 13291 - DNA, 297 bp, Zea mays
  unsure (1)..(297): unsure at all n locations; Clone ID: LIB3061-100-Q1-K7-H10
ggccggnacgcccgggncgacccacgcgnccgggcgaactctgctgcgnacctacaagagcgacggcggngacaaaaaccactagcagngcctaacccagngggcactgcctnnctacagcagcaacaattgctaccatacagccagttctctttgatgaaccctgccttgtcgtggcagcaacccatcgttggaggtgccatctttggaggcggatganatgtaatcgataatggtgccctaataccggcatgtgtttcctagaaataatcaatatattgattgacatttatctgg

SEQ ID NO: 13292 - DNA, 636 bp, Zea mays
  unsure (1)..(636): unsure at all n locations; Clone ID: LIB3061-100-Q1-K7-H11
aaaacttgtagataatctttttatcttacttgtgtaaaaatttcatgaccataggtgtagtagtttaggagttatgatttttccaagtccagtctcagaatctgtccaaattctgtacaggtttcgaaaattggattgcttggctaagctaaactgagaatcagcccttagtaattataggagaattttagtacttttcttaagctttccaacaaattttggagcaccctttttggtggtctagatatcaagttacagctgtttgaactatagagtctgaatttgtccaaatttggacagcgaagtctgtttgtagtaactgactttgatatgtattgaattaacctgagatgtttataaatgaattgtagacaattctattaactttctaaaaagtctaggatcacctgatttggatttcggaaactccagttctggacttttgaagtaagtagtcgaattctgtccaaatctggacataatttatgtttagcgctgtttgacctttgtaaaggtcgaattttgttgtgatggtaatacaaaagttatagaggactntataagctttccaaaaagttctagtttactattattggatacatattttatgaattgtgagctaaacagatagttgct

SEQ ID NO: 13293 - DNA, 495 bp, Zea mays
  Clone ID: LIB3061-100-Q1-K7-H2
agtacactagcgacatatcaacaccaaagggagccagagatccaagaccttattgccctcctgtgcttttcagcaagcgctggtacctaaaatatgattccataatgctaaaaagaatacctgtttccagtgacagtcttggaatttcaataccaaaatatacaatactacatggtacaagaggagatgcaagcaagcatattacggaaattaggattaaccctagaacaaccatatactctattgcaacagccatacatagagcatttgcatatccaaagaatcggggcacaacaactacaaaaacagaacgcgtaccaaacaacaactaagccacctaagcaaaccttactgtttaccttcatcaacaaaagagtttttcatataaaaaacaatctggggggaacactgatatgtacttgaaggcacaccagatactaccatgtaaccaactaggctggagccactatgcctggttactgcaacaacagactt

SEQ ID NO: 13294 - DNA, 632 bp, Zea mays
  unsure (1)..(632): unsure at all n locations; Clone ID: LIB3061-100-Q1-K7-H4
gcaacatagaaagcacaatagtgtaccaacaatggcagccaaaatattttgcttccttatgctccttggtctttctgcaagtgttgctaccgcaaccattttcccacaatgctcacaagctcctatagcttcccttcttcccccatacctctcaccagcggtgtcttcaatgtgtgaaaggcgaggggttcaaccctacaggatccaacaggcaatcgcaacaggcatcttaccattatcacccttgttcctccaacaaccgtcagccctattacagcagttacctttggtccatttggtggcacaaaacatcagggcacaacaactacaacaacttgtgctagcaaaccttgctgcatactctcagcaacatcagtttcttccattcaaccaactggctgcattgaactctgctgcttatttgcaacaacaattaccattcagccagctagttgctgcctacccccagcaatttcttccattcaaccaactagcagcattgaactctgctgcttatttacagcagcaacaactactaccattcagccagctagctgatgtgagccctgctgncttcttgacacaacaacaggtgttgccgttctacctgcacgctatgcctaacgctggga

SEQ ID NO: 13295 - DNA, 558 bp, Zea mays
  unsure (1)..(558): unsure at all n locations; Clone ID: LIB3061-100-Q1-K7-H6
gtttcagcttgtattcccactctgtcgcacagcgtcgcccgtcgccgctgagatcctaggaagaaatggagctctctcgcaagctcttcacggccgtcctcctcgtcatgctgctgctgctgtccgcagaggtcgggccggtggcggtggcggaggcgcggacgtgccagtcgcagaggcgcaggttccggggcccctgcctccgccggtccaactgcgccaacgtctgcaggaccgaggggttccccggcggcaggtgccgcggcttccgccgccgctgcttctgcaccacgcactgccactgattcgctcgctcgcccagcggccggctggcgtcgccgtcgatcgcgtcgcgaccagtccatggctccatgcatgaataacaagggtgtgcgcggtttgtgatgccaaattgtatcctcgtcgtgtgttgaagcgttcgatcgtcggtctagtagtgtgcctgtgagcagcggcgtgctgttgtacgtacgtntgcctntgttccatgtttcgggattttccatagcaaatgcatgcgtngagatctacctctna

SEQ ID NO: 13296 - DNA, 611 bp, Zea mays
  unsure (1)..(611): unsure at all n locations; Clone ID: LIB3061-100-Q1-K7-H7
cccttgttgtttcaacaatcgccagccctatgtgtggtgcagtcattggtacaaaccatcagggcacagcagctgcagcaactcgtgctacctgtgatcaaccaagtagctctggcaaacctttctccctactctcagcaacaacaatttcttccattcaaccaactgtctacactggaggggggtgcttatttgcagcaacaactattaccattcagccagctagctactgcctactctcagcaacaacaacttcttccatttaaccaattggccgcactgaaccccgctgcttatttgcagcagcaaatactactaccatttagccagctagctgcagcaaaccgtgcttgcttcttgacacagcaacagttgctgcctttctaccagcagtttgcgggtaaccccggaaccctgttacaactacaacaattgttgccctttgtgcaacttgctttgacagaccgagcggnctgctaccaacaacacatgattggtggtgccctcttttagattgcttattagtgggaattcaataataaagttttttggatgatgtatgtggccaacccgaaataagaagtggcatttgcagatgtaatgtggatttg

SEQ ID NO: 13297 - DNA, 487 bp, Zea mays
  unsure (1)..(487): unsure at all n locations; Clone ID: LIB3061-100-Q1-K7-H8
cctccccctccggttcgggttcgggttcgtgaggttctccggggttcggtttcgtgggtgagcggatcgagatggcggcgtcngatgttgagtaccgctgcttcgtcggcggcctcgcctgggccacggacgaccactcccttcacaacgccttcagcacctacggcgaggtcctcgagggggggatcatcctcgatcgggagacgcagaggtcccgcggcttcggcttcgtcaccttctccacggaggaggcgatgcggaacgccatcgagggcatgaacggcaaggagctggacgggcgcaacatcaccgtcaacgaggcccagtcccgcggcggccgtggaggcggcggcggcggcgggtactgtggtggccgtggaggcggcggctaccgcggtggcgggcgccctgatggcggcggcggctactgcngtggcggcggctactgtggtggcggcngcggctactgtggtggtggcggcggcta

SEQ ID NO: 13298 - DNA, 438 bp, Zea mays
  unsure (1)..(438): unsure at all n locations; Clone ID: LIB3061-100-Q1-K7-H9
cagaccattagctntatctactccagagcgcgggggaacccgatcgacaccatgagggtgttgctcgttgccctcgctctcctggctctcgctgcgagcgccacctncacgcatacaagcggcggctgcggctgccagccaccggcgccggttcatctaccgccgccggtgcatggtggcgcggtgcggttcacctgccacctccggtgcatatnccaccgncggtccacctgccgccggcggtccacctgccaccgncggtccatgtgccggcgccggttcatctggcggcggcaccatgccactaccctactgaaccggcccgggctcaggctgatgcccagccacacccatgcccgtgccaacaggcgtatgcaagcccgtgccagctgcagggaacctgcggggttgggagccccccgatcctgggccagtgcg

SEQ ID NO: 13299 - DNA, 480 bp, Zea mays
  Clone ID: LIB3061-080-Q1-K6-A1
ccctactctcagcaacaacaatttcttccattcaaccaactgtctacactgaaccctgctgcttatttgcagcaacaactattaccattcagccagctagctactgcctactctcagcaacaacaacttcttccatttaaccaattggccgcactgaaccccgctgcttatttgcagcagcaaatactactaccatttagccagctagctgcagcaaaccgtgcttccttcttgacacagcaacagttgctgcctttctaccagcagtttgcggctaaccccgcaaccctcttacaactacaacaattgttgccctttgtccaacttgctttgacagaccgagcggcctcctaccaacaacacatcattggtggtgccctcttttagattgcttattagttgtaattcaataataaagttttttggatgatgtatgtggccaaccagaaataagaagttacatttccagattttaatgtg

SEQ ID NO: 13300 - DNA, 220 bp, Zea mays
  unsure (1)..(220): unsure at all n locations; Clone ID: LIB3061-080-Q1-K6-A10
ccgggncgacccagcgnnccgagacagcaaagcggcagngcgnacagaggancgncgaacagaacagcanngaagagggcancgnncncgncgngggccnggcncngncagcngccagcgccccngcaangcagangcccngccccngcgcggggcngcagggccngnacggcgcnggcgccggcccgacgaccangaggggcgccggcgggccgnnccc

SEQ ID NO: 13301 - DNA, 635 bp, Zea mays
  Clone ID: LIB3061-080-Q1-K6-A11
ccaacaagcaacatagaaagtggaatccagtagcaacaatagagcaacaatggcgaccaagatattttccctccttatgctccttgctctttctacatgtgttgctaacgcgacaattttccctcaatgctcacaagctcctatagcttcccttcttcccccataccttccatcaattatagcttcaatatgtgaaaacccagctcttcaaccatataggcttcaacaagcaatcgcagcaagcaacatacctttatcgcccttgttgtttcaacaatcgccagccctatctttggtgcagtcattggtacaaaccatcagggcacaacagctgcagcaactcgtgctacctctgatcaaccaagtagctctggcaaacctttctccctactctcagcaacaacaatttcttccattcaaccaactgtctacactgaaccctgctgcttatttgcagcaacaactattaccatttagccagctagctactgcctactctcagcaacaacaacttcttccatttaaccaattggccgcactgaaccccgctgcttatttgcagcagcaaatactactaccatttagccagctagctgcagcaaaccgtgcttccttcttgacacagcaacagttgc

SEQ ID NO: 13302 - DNA, 615 bp, Zea mays
  Clone ID: LIB3061-080-Q1-K6-A12
agaaacacacctagcgaagcgcactagcaacgacctaacaacaatggctaccaagatattatccctctttgcgcttcttgccctttttgtgagcgcaacaaatgcgttcattattccacaatgctcacttgctcctagtgccattattccacagttcctccctccagttacttcaatgggcttcgaacacccagctgtgcaagcctacaggctacaacaagcgcttgcggcgagcgtcttacaacaaccaattgcccaattacaacaacaatccttggcacatctaaccatacaaaccatcgcaacgcaacagcaacaacaatttctaccagcactgagccaactagctgtggtgaaccctgtcgcctacttgcaacagcagttgcttgcatccaacccacttgctctggcaaacatagttgcataccaacaacaacaacaattgcaacagtttctaccagcgctcagtcaactagccatggtgaaccctgccgcctacctacaacagcaacaactgatttcatctagccctctcgctgtggttaatgcacctacatacctgcaacaacagttgctgcaacagattgtaccagctctgactcagctagctgtggc

SEQ ID NO: 13303 - DNA, 625 bp, Zea mays
  Clone ID: LIB3061-080-Q1-K6-A3
cgggtcgaccaccgtcgccacgcgtcgatttccgatgctcgcaagctcctatagcttccttcttccccgtacctctcaccagcggtgtcttcggtatgtgaaaacccaattcttcaaccctcaggatccaacaggcaatcgcagctggcatcttacctttatcacccttgttcctccaacaatcatcagccctattacaacagttacctttggtgcatttattggcacaaaacatcagggcacaacaactacaacaacttgtgctagcaaaccttgctgcctactctcagcaacagcagtttcttccattcaaccaactaggttcattgaactctgcttcttatttgcaacaacaacaactaccattcagccagctacctgctgcctacccccagcaatttcttccattcaaccaactagcagcattgaactctcctgcttatttacagcagcaacaactactaccattcagccagctagctggtgtgagccctgctaccttcttgacacaaccacagttgttgccgttctaccagcacgttgcgcctaacgctggcaccctcttacaactgcaacaattgctgccattcaaccaacttgctttgacaaacccagcagtgttcta

SEQ ID NO: 13304 - DNA, 657 bp, Zea mays
  Clone ID: LIB3061-080-Q1-K6-A4
gaccaactagcaacatagaaagcacaatagtgtaccaacaatggcagccaaaatattttgcctccttatgctccttggtctttctgcaagtgctgctacggcgaccattttcccgcaatgctcgcaagctcctatagcttcccttcttcccccgtacctctcaccagcggtgtcttcggtatgtgaaaacccaattcttcaaccctacaggatccaacaggcaatcgcagctggcatcttacctttatcacccttgttcctccaacaatcatcagccctattacaacagttacctttggtgcatttattggcacaaaacatcagggcacaacaactacaacaacttgtgctagcaaaccttgctgcctactctcagcaacagcagtttcttccattcaaccaactaggttcattgaactctgcttcttatttgcaacaacaacaactaccattcagccagctacctgctgcctacccccagcaatttcttccattcaaccaactagcagcattgaactctcctgcttatttacagcagcaacaactactaccattcagccagctagctggtgtgagccctgctaccttcttgacacaaccacagttgttgccgttctaccagcacgttgcgcctaaacgctgcaccctcttacaact

SEQ ID NO: 13305 - DNA, 102 bp, Zea mays
  Clone ID: LIB3061-080-Q1-K6-A5
cgggtcgaccagcgtccgcactagcacatagaagcacatagtgtccaacaatggcagccaaatattttgcctccttatgctccttggtctttctgcagtgct

SEQ ID NO: 13306 - DNA, 663 bp, Zea mays
  Clone ID: LIB3061-080-Q1-K6-A7
tagcaacatagaaagcacaatagtgtaccaacaatggcagccaaaatattttgcttccttatgctccttggtctttctgcaagtgttgctaccgcaaccattttcccacaatgctcacaagctcctatagcttcccttcttcccccatacctctcaccagcggtgtcttcaatgtgtgaaaccccaattgttcaaccctacaggatccaacaggcaatcgcaacaggcatcttaccattatcacccttgttcctccaacaaccgtcagccctattacagcagttacctttggtccatttggtggcacaaaacatcagggcacaacaactacaacaacttgtgctagcaaaccttgctgcatactctcagcaacatcagtttcttccattcaaccaactggctgcattgaactctgctgcttatttgcaacaacaattaccattcagccagctagttgctgcctacccccagcaatttcttccattcaaccaactagcagcattgaactctgctgcttatttacagcagcaacaactactaccattcagccagctagctgatgtgagccctgctgccttcttgacacaacaacagttgttgccgttctacctgcacgctatgcctaacgctggcaccctcttacaactgcaacaattgctgcca

SEQ ID NO: 13307 - DNA, 623 bp, Zea mays
  Clone ID: LIB3061-080-Q1-K6-A8
aacatagaaagcacaatagtgtaccaacaatggcagccaaaatattttgcctccttatgctccttggtctttctgcaagtgctgctacggcgaccattttcccgcaatgctcgcaagctcctatagcttcccttcttcccccgtacctctcaccagcggtgtcttcggtatgtgaaaacccaattcttcaaccctacaggatccaacaggcaatcacagctggcatcttacctttatcacccttgttcctccaacaatcatcagccctattacatcagttacctttggtgcatttattggcacaaaacatcagggcacaacaactacaacaacttgtgctagcaaaccttgctgcctactctcagcaacagcagtttcttccattcaaccaactagctgcattgaactctgcttcttatttgcaacaacaacaactaccattcagccagctacctgctgcctacccccagcaatttcttccattcaaccaactggcagcattgaactctcctgcttatttacagcagcaacaactactaccattcagccagctagctggtgtgagccctgctaccttcttgatacaaccacagttgttgccgttctaccagcacgctgcgcct

SEQ ID NO: 13308 - DNA, 635 bp, Zea mays
  Clone ID: LIB3061-080-Q1-K6-A9
ccgagatccagcgccatcggcacgaccaggcctgtccagggatggggcggagaggggagccctactacgtcgaagcggcgccgccggtggacgtgaacaagaacacagagtggttcatgtacccgggcgtctggaccacctacatcctcctgctcttcttcgcttggctcctcgtcctctccgtctctggttgctcccccggagcagcctggaccgtcgtaaacctcgcgcacttcgccatcacttaccacttcttccattggaagaaaggaaccccttttgctgctgatgaccaaggcatctacagcagattgacatggtgggagcaaattgacaatggtcagcagcttactcggaacagaaagtttttgactgtggtacctgtggtgctgtatctgatcgcatcgcacttgactgactacaagcagccgatgtttttcctcaatacaatggcagtttttgtgctagttgtggcaaaattgccaaacatgcacaaggtccgcatatttggaatcaatggagacatctgaggaccactgcaggaagtacatggatgcaatgccatgatgtgatgaagagctaaacagaacaagcagtgtgtttctcaaacttgacacaactgtctgtaatatatg

SEQ ID NO: 13309 - DNA, 661 bp, Zea mays
  unsure (1)..(661): unsure at all n locations; Clone ID: LIB3061-080-Q1-K6-B1
attgagaccaacaagcaacatagaaagtggaatacagtagcaacaatagagcaacaatggcggccaagatattttccatccttatgctccttgctctttctgcatgtgttgctaacgcgaccatttttcctcaatactcacaagctcctatagctgcccttcttcccccataccttccatcaatgaccgcttcagtttgtgaaaacccagcccttcaaccctacaggctccaacaagcaatcgcaacaagcaacttacctttatcacccctgttctttcaacaatcgccagccctatctttggtgcagtcattggtacaaaccatcagggcacaacagctgcaacaactcgtgctaccagtgatcagccaagtagctctggcaaacctttctccctactctcagcaacaacaatttcttccattcaaccaactgtctacactgaaccctgctgcttatttacaacaacaacaactactaccattcagccagctagctactgcctactctcagcagcaacaatttcttccatttaaccaattggccgcactgaacccctctgcttatttccagcagcaaatactactaccatttggccagctagctacaacaagccccacttcctttntgaaacaacaancattgcttccgttctaccagca

SEQ ID NO: 13310 - DNA, 636 bp, Zea mays
  Clone ID: LIB3061-080-Q1-K6-B10
ggcggctgcaataaaataaatctcgtgcaggggggagggcgtacgacgacgtggacgcaccgtcaaaggcaccaggctgagcaacccctctctctctccctcttatccccaaggcgaggagcggagcggagaggagggcccttctgcttgtttctccgctttgcaagatgtcgtccccgagcaagcgccgcgagatggaccttatgaagctgatgatgagcgactacaaggtggagatggtgaacgacgggatgcaggaattcttcgtcgaattcaagggcccggccgaaagtatctaccaaggtggtgtctggaaggttcgggtagaactgcctgatgcatacccttacaaatccccgtccatcggcttcatcaacaagatttatcacccgaatgtcgatgagatgtctggctctgtctgtttggatgtcataaaccagacatggagcccaatgtttgatctagtaaatgtttttgaagtattccttccacagctgttgctgtacccaaatccttctgatccattaaatggggaggctgcagcactgatgatgcgtgatcggcctgtttatgaacagaaagtgaaagaatattgtgaaaagtatgctaaaccagaggacgctggcatcaccccgg

SEQ ID NO: 13311 - DNA, 569 bp, Zea mays
  Clone ID: LIB3061-080-Q1-K6-B11
ccaactagcaacatagaaagcacaatagtgtaccaacaatggcagccaaaatattttgcttccttatgctccttggtctttctgcaagtgttgctaccgcaaccattttcccacaatgctcacaagctcctatagcttcccttcttcccccatacctctcaccagcggtgtcttcaatgtgtgaaaacccaattgttcaaccctacaggatccaacaggcaatcgcaacaggcatcttaccattatcacccttgttcctccaacaaccgtcagccctattacagcagttacctttggtccatttggtggcacaaaacatcagggcacaacaactacaacaacttgtgctagcaaaccttgctgcatactctcagcaacatcagtttcttccattcaaccaactggctgcattgaactctgctgcttatttgcaacaacaattaccattcagccagctagttgctgcctacccccagcaatttctttcattcaaccaactagcagcattgaactctgctgcttatttacagcagcaacaactactaccattcagccagctagctgatgtg

SEQ ID NO: 13312 - DNA, 619 bp, Zea mays
  unsure (1)..(619): unsure at all n locations; Clone ID: LIB3061-080-Q1-K6-B12
ccatgatccatctcatcgacaccccctccgctctccttatcccttccattcgcccaaacccccgccgccgtgacccctgccagcccgcggccttcccctcgttctaggcttcaactgccggcctcgtgtcttctgggcaagtgaagagagagatggcgtcgccaataccgcgcgagtgggtcgggctgcagcagtttcctccggccacccagaccgagctgcacgagctcctcggcaagctcaaggaggaggatgtgagcacattgacaattctggtgatggggaaaggcggagtggggaagtcatctactgttaactccatcgtcggggagaggatcgccactgtcagcgctttccagtctgagggtctgagaccgatgatgtggtcgcgcacaagggcagggttcaccttgaacattatcgacactcctgggcttattgaaggtggatacattaatgagcaggctgttgacatcattaagagatttcttctgggcaagactattgatgttcntcctgtatgtggatcgtttgggatgcgtacagaatggatacacttgatggacaggttataagagccatcaccaattcatttggaaaagatatttggcgaagatca

SEQ ID NO: 13313 - DNA, 190 bp, Zea mays
  unsure (1)..(190): unsure at all n locations; Clone ID: LIB3061-080-Q1-K6-B3
aagtttcttcagtcgtacaagctatgtttgttgaatgtcagctattgttgcagttgtaagagggtgccagcgttaggcgcagcctgtttatttacaggagcaagagttactaccattcagccagctagctggtgtgagccctgctaccttcttgacacagccncagctgtttccgttttttggctcgctc

SEQ ID NO: 13314 - DNA, 121 bp, Zea mays
  Clone ID: LIB3061-080-Q1-K6-B4
aaaaaaaaaaaaaaccaaaaaaaaaaaaaaaaaaaaaaaaaaaaaaaaaaaaaaaagggaaaaaagatttaaaggaaccaaaattaaaaaacacgggcatgtcgaaggaataactttaatt

SEQ ID NO: 13315 - DNA, 637 bp, Zea mays
  unsure (1)..(637): unsure at all n locations; Clone ID: LIB3061-080-Q1-K6-B5
gcaaaccttgctgcatactctcagcaacatcagtttcttccattcaaccaactggctgcattgaactctgctgcttatttgcaacaacaattaccattcagccagctagttgctgcctacccccagcaatttcttccattcaaccaactagcagcattgaactctgctgcttatttacagcagcaacaactactaccattcagccagctagctgatgtgagccctgctgccttcttgacacaacaacagttgttgccgttctacctgcacgctatgcctaacgctggcaccctcttacaactgcaacaattgctgccattcaaccaacttgctttgacaaactcaacagtgttctaccaacaacccatcattggtggtgccctcttttagattgcttatgagttatagttcaataatgaagttttttggatgatgtttgtggcgtcccagaaataagaaagtacatttctagaaaaaaaaaaaaaaaaaaaaaaaaaaaaaaatttttnaaaaaaanaaaanaaaaaaaaaaaaaaaaaaaaaaaaaaaaaaaaanaaanaaaanaaaaaaaaanaaaaaaaaanaaaanaaanaaaaaaaaaaaaaaaaaaaaaaaaagggggggcgcttttaagg

SEQ ID NO: 13316 - DNA, 625 bp, Zea mays
  Clone ID: LIB3061-080-Q1-K6-B6
gagaccaactagcaacatagaaagcacaatagtgtaccaacaatggcagccaaaatattttgcctccttatgctccttggtctttctgcaagtgctgctacggcgaccattttcccgcaatgctcgcaagctcctatagcttcccttcttcccccgtacctctcaccagcggtgtcttcggtatgtgaaaacccaattcttcaaccctacaggatccaacaggcaatcacagctggcatcttacctttatcacccttgttcctccaacaatcatcagccctattacatcagttacctttggtgcatttattggcacaaaacatcagggcacaacaactacaacaacttgtgctagcaaaccttgctgcctactctcagcaacagcagtttcttccattcaaccaactagctgcattgaactctgcttcttatttgcaacaacaacaactaccattcagccagctacctgctgcctacccccagcaatttcttccattcaaccaactggcagcattgaactctcctgcttatttacagcagcaacaactactaccattcagccagctagctggtgtgagccctgctaccttcttgatcaaccacagttgttgccgttctccagcac

SEQ ID NO: 13317 - DNA, 649 bp, Zea mays
  Clone ID: LIB3061-080-Q1-K6-B7
gttccttccaccagttacttcaatgggcttcgaacacccagctgtgcaagcctataggctacaacaagcaattgcggcgagcgtcttacaacaaccaatttcccagttgcaacaacaatccttggcacatctaacaatacaaaccatcgcaacgcaacagcaacaacaattcctaccagcactgagccacctagccatggtgaaccctgccgcctacttgcaacagcagttgcttgcatcaaacccacttgctctggcaaacgtagttgcaaaccagccacaacaacagctgcaacagtttctgccagcgctcagtcaactagccatggtgaaccctgccgcctacctacaacagcaacaactgctttcatctagcccgctcgctgtggccaatgcacctacatacctgcaacaacaattgttgcaacagattgtaccagctctgactcagctagttgtggcaaaccctgctgcctacttgcaacagctgcttccattcaaccaactgactatgtcgaactctgctgcgtacctacaacagcgacaacagttacttaatccactagcagtggctaacccattggtcgctgccttcctacagcagcaacaattgctgccatacaaccagttctctttgataaaccctgta

SEQ ID NO: 13318 - DNA, 640 bp, Zea mays
  unsure (1)..(640): unsure at all n locations; Clone ID: LIB3061-080-Q1-K6-B8
aaacacaccaagcgaagcgcactagcaacaacctaacaacaatggctaccaagatattatccctccttgcgcttcttgcgctttttgcgagcgcaacaaatgcgtccattattccacaatgctcacttgctcctagttccattattccacagttcctcccaccagttacttcaatggccttcgaacacccagctgtgcaagcctataggctacaacaagcgattgcggcgagcgtcttacaacaaccaattgcccaattgcaacaacaatccttggcacatctaacaatacaaaccatcgcaacgcaacagcaacaacagttcctaccagcactgagccacctagccatggtgaaccctgtcgcctacttgcaacagcagctgcttgcatccaacccacttgctctagcaaacgtagttgcaaaccagcaacaacaacaactgcaacagtttctgccagcgcttagtcaactagccatggtgaaccctgccgcctacctacaacagcaacaactgctttcatctagcccgctcgctgtggccaatgcacctacatacctgcaacangaattgttgcaacagattgtaccagctctaactcagctagctgtggcanaccctgttgcctacttgcaacagct

SEQ ID NO: 13319 - DNA, 301 bp, Zea mays
  unsure (1)..(301): unsure at all n locations; Clone ID: LIB3061-080-Q1-K6-B9
ggcccgtccgctcgacgtgatcccaccggcagccatggatccatacaagcaccgcccgtctagtgggagcaactccagcttctggaccaccaactccggcgcccncgtctggaacaacaactctgccctcaccgtcggacagcgagggtccaatcctnctttgaggattatcatctaatcgaaagcttgctcagttcgacagagaaacgtatccctgaccgtgtggggcttgcccggggggccagggccaagggtttcttggaggcaactaatgatgtctttaacctacaatgtgctgatt

SEQ ID NO: 13320 - DNA, 648 bp, Zea mays
  unsure (1)..(648): unsure at all n locations; Clone ID: LIB3061-080-Q1-K6-C1
gaccaactagcaacatagaaagcacaatagtgtaccaacaatggcagccaaaatattttgcctccttatgctccttggtctttctgcaagtgctgctacggcgaccattttcccgcaatgctcgcaagctcctatagcttcccttcttcccccgtacctctcaccagcggtgtcttcggtatgtgaaaacccaattcttcaaccctacaggatccaacaggcaatcgcagctggcatcttacctttatcacccttgttcctccaacaatcatcagccctattacaacagttacctttggtgcatttattggcacaaaacatcagggcacaacaactacaacaacttgtgctagcaaaccttgctgcctactctcagcaacagcagtttcttccattcaaccaactaggttcattgaactctgcttcttatttgcaacaacaacaactaccattcagccagctacctgctgcctaccccccagcaatttcttccattcaaccaactagcagcattgaactctcctgcttatttacagcagcaacaactactaccattcagccagctagnctggtgtgagccctgctaccttcttgaccaaccacagttgttgccgttctccagcacgttgcgcctaacgctggcaccct

SEQ ID NO: 13321 - DNA, 632 bp, Zea mays
  Clone ID: LIB3061-080-Q1-K6-C10
gcaacatagaaagcacaatagtgtaccaacaatggcagccaaaatattttgcttccttatgctccttggtctttctgcaagtgttgctaccgcaaccattttcccacaatgctcacaagctcctatagcttcccttcttcccccatacctctcaccagcggtgtcttcaatgtgtgaaaacccaattgttcaaccctacaggatccaacaggcaatcgcaacaggcatcttaccattatcacccttgttcctccaacaaccgtcagccctattacagcagttacctttggtccatttggtggcacaaaacatcagggcacaacaactacaacaacttgtgctagcaaaccttgctgcatactctcagcaacatcagtttcttccattcaaccaactggctgcattgaactctgctgcttatttgcaacaacaattaccattcagccagctagttgctgcctacccccagcaatttcttccattcaaccaactagcagcattgaactctgctgcttatttacagcagcaacaactactaccattcagccagctagctgatgtgagccctgctgccttcttgacacaacaacagttgttgccgttctacctgcacgctatgcctaacgctggca

SEQ ID NO: 13322 - DNA, 595 bp, Zea mays
  Clone ID: LIB3061-080-Q1-K6-C11
atcatcattcatcttagtagtataggcaccaaatcaaatctgcaacatcaattatctaactccaaaaaccatgaagctggtgcttgtggttcttgctttcattgctttagtatcaagtgtttcttgtacacagacaggcggctgcagctgtggtcaacaacaaagccctgagcaggaacattatccacaacaacatcatccacaaaaacaacaacatcgaccaccaccacaacatcaccagcagcagcaacaccaacaacaacaagtttacatgcaaccacaaaaacatcagctacaacaagaagttgatgttcaacaacaacaacaacaaccgcagcacctacaacaacaacgacaacaacagcgccaacaacaacatcaatgtgaaggccaacaacaacatcaccaacaatcacaaggccatgtgcaacaacacgaacagagccgtgagctacacccaggacagagccatgagcaacaacatcaacaacaatttcagggtcttgacaagcagtaacaaccacaacagcctcagcaatatcagcagggccaggtaaaatcacaacagcaaccatgtcattgtcaggagcagcaa

SEQ ID NO: 13323 - DNA, 636 bp, Zea mays
  Clone ID: LIB3061-080-Q1-K6-C12
cacagttcctcccaccagttacttcaatgggcttcgaacacccagctgtgcaagcctataggctacaacaagcaattgcggcgagcgtcttacaacaaccaatttcccagttgcaacaacaatccttggcacatctaacaatacaaaccatcgcaacgcaacagcaacaacaattcctaccagcactgagccacctagccatggtgaaccctgccgcctacttgcaacagcagttgcttgcatcaaacccacttgctctggcaaacgtagttgcaaaccagccacaacaacagctgcaacagtttctgccagcgctcagtcaactagccatggtgaaccctgccgcctacctacaacagcaacaactgctttcatctagcccgctcgctgtggccaatgcacctacatacctgcaacaacaattgttgcaacagattgtaccagctctgactcagctagctgtggcaaaccctgctgcctacttacaacagttgcttccattcaaccaactggctgtgtcaaactctgctgcgtacctacaacagcgacaacagttacttaatccattggcagtggctaacccattggtcgctaccttcctgcagcagcaacaacaattgctgccatacaaccagt

SEQ ID NO: 13324 - DNA, 610 bp, Zea mays
  Clone ID: LIB3061-080-Q1-K6-C3
ggatcgtcgaacagaacagcatgaagatggtcatcgttctcgtcgtgtgcctggctctgtcagctgccagcgcctctgcaatgcagatgccctgcccctgcgcggggctgcagggcttgtacggcgctggcgccggcctgacgacgatgatgggcgccggcgggctgtacccctacgcggagtacctgaggcagccgcagtgcagcccgctggcggcggcgccctactacgccgggtgtgggcagccgagcgccatgttccagccgctccggcaacagtgctgccagcagcagatgaggatgatggacgtgcagtccgtcgcgcagcagctgcagatgatgatgcagcttgagcgtgccgctgccgccagcagcagcctgtacgagccagctctgatgcagcagcagcagcagctgctggcagcccagggtctcaaccccatggccatgatgatggcgcagaacatgccggccatgggtggactctaccagtaccagctgcccagctaccgcaccaacccctgtggcgtctccgctgccattccgccctactactgattcatgatatttggggaaatctcctctatccatctctctctatctatatatgt

SEQ ID NO: 13325 - DNA, 553 bp, Zea mays
  unsure (1)..(553): unsure at all n locations; Clone ID: LIB3061-080-Q1-K6-C4
gctgggacacgctacaatgtgcctctgatcaattcacttgttctttatgttggcatccaagctgtgcaacaactgcaacagaacaaggctaatgcatctgcatcagtgcagcagattaaacatacgcctacgatggacagtttccagattgaaacagctaccgagatgttcacaaatctcataacaagttttgatacagagggccgctaccttctgttgaatgcaattgcaaaccaactgcgctatccaaatagccatacacactactactccttcatcattctgcatctatttgctgaggcttcccaggagattattcaggagcaaataacaagggttcttctggagcgtcttatagtgaaccgcccccatccttggggggtacttattacttccattgaattgataaagaatccgcgttacaacttttggaaccggtcttttacacatagtgcacctgagattgagaaactgtgtgagtcagtggctaggtcctgcggcgcaaaagctgntgatgaaggaatcagtgtgcacgatggcggtcactaataaa

SEQ ID NO: 13326 - DNA, 572 bp, Zea mays
  Clone ID: LIB3061-080-Q1-K6-C6
gcgaccccggccaggcaggcacggcggcccgacagcgtggggcgaggttgcccggcgtgggcgcaggcggcccagacgtggccaactgcgcggcctcgcagccacggcgtgggcggtccggccacggcggcgtggggcgcgacccccgacgacgcgggcggcctgggtgcggggccccctgggcgggacccagcggcgcgggctcgaccccagaaggcgcacgggcagcggccccggtggcgcgcgcggtgattcggcgctgccccgcgtgtaggcggccccggcggtgcggcgggcaagccctggcgcgggcactaccggccatggtacgccggtgcgggcgcatctcggcgtttcggccaggcgcgggcgtagccatagcggcgggcgagcgcagaccgtgtggcccctgcgtgggcacagtcgcggccagacccgagaacgcgactccgtcgagggcggggcccatcgcggcggcacggtcacggaaagccccagcgtgtgcatcgtcggccacaagcatcagcccttgccttgtttgtgcatgccatcgacatccatgcatgcatatg

SEQ ID NO: 13327 - DNA, 595 bp, Zea mays
  Clone ID: LIB3061-080-Q1-K6-C7
cctcccttcgccgccgccgccgccgccgccgcatcaagcacccgccccgccgtcgcctgaggtagacaccaatccgccgccatggggcgtatgcacagccgcgggaagggtatctcatcgtcggcgctgccgtacaagaggacgcctcctacctggctcaagaccgctgcctccgacgtggaggagatgatcacaaaggcagcgaagaagggacagatgccgtcgcagatcggcgtcctgctccgtgaccagcacggtatcccccttgtcaagagcgtcaccggcagcaagatcctccgcatcctcaaggcccatgggctggcaccagaaatccccgaggacctgtacttcctcatcaagaaggcggtggcgataaggaagcaccttgagaggaacaggaaggacaaagactctaaattcaggctcattcttgtggagagcaggatccaccgccttgcccgctactacaagcgcacaaagaagcttccacccacctggaagtatgagtcaaccacagcgagcactctggtggcctaagtgtggtatcctccgacagcttgttctagatatgaatttgtgtaatgcttattatgga

SEQ ID NO: 13328 - DNA, 423 bp, Zea mays
  Clone ID: LIB3061-080-Q1-K6-C8
agcgtcggtttgtacaccaattagctggcatgtattgggtaacagtgttggcatgatctctggcaggttgtgcctcagttcattcaccaagcactctacaacatggttcattccataatccaggatgagcaacagcaacaaccatgtgagttatgtggatctcaacaagcttctcaaagtgcggtggcggtcttgacagcagcacagtcccttccatcaatgtgcggcttgtcccactcatactaccaaaataatccatgccggagccctgaccttggtggtgttcgcacttgaagaattgtgtcgtcctagccgttatgctcacatcacggtgtttcgctgtgcagtcccatgcattatgatgtgtggctacgaggaggccatgccgcctttggggaaaggctggtggccttgggggcggtt

SEQ ID NO: 13329 - DNA, 603 bp, Zea mays
  Clone ID: LIB3061-080-Q1-K6-C9
ccaggcatgcaggtcggcgaggagggcaggaagaccgaagaccgagccgtgcgggggctcgggacgggaactggacaggacccgaaagtcgcagatccttcctgcccgtccgcccgtgcccggggacgcgtagttgttgccggccgcacctcagctgcgccctctcctactccagggggatcggctacgccacatgctgcgcgatggtgctgtgggtcttcggctactgctccctcatctggaacccctgcttcgactccgacgacataatcctcggcttcatcaatggctacaagcgcaccttgaatctcgctggcattgaccacagatgcacaccggagcatgcggcgaggacctgcacgcttgaaaccgacgacgaggccatatgctggggaattgcatatcgtgtcaggggtggtccagaaaaagagctaaaagcactgcaattcttgtagagaagagagtgcgagttcgaccagaagatatgcatgggtttctacatggaaggagatcccttgaaaccagctgtgacaggcgtctaattgttctttttcacttcagatccatttggcaacagttctatctaggacctgcttctttgtt

SEQ ID NO: 13330 - DNA, 607 bp, Zea mays
  Clone ID: LIB3061-080-Q1-K6-D1
ctcaatcccttggtcagcaacctgtgacgttcttcagggaggttcttgctctttgtgatcatccatgcctcttggaaaaagaggaaaccaaatcattgttcagtgctgatgctatttctcgagcaaagcagattcttgcaactattcctggacgggcaacaggtgcatatagtcacagtcagggtatcaaaggattgcgtgatgcaattgctgctgggatcacctcacgtgacggattccctgcaaatgcagatgacattttcattacagacggagcaagtcctggggtccacatgatgatgcaattactgattaggaatgagaaagatggcattctgtgcccaattcctcagtaccccttgtactcggcctccatagctcttcatggtggagctcttgtcccctattaccttgatgaaaaaactgggtggggttttggagatctctgatcttaagaaacaactcgaagatgctcggtcaaaaggcattgatgttagggccttggtggttatcaatccaggaaatccgactgggcaggttcttgctgaagacaaccaatatgatatagtgaaattctgtaaaaatgagggccttgttcttctagctg

SEQ ID NO: 13331 - DNA, 390 bp, Zea mays
  Clone ID: LIB3061-080-Q1-K6-D10
caacaacaactaccattcagccagctacctgttgcctacccccaacaatttcttccattcaaccaactggcagcattgaactctcctgcttatttacagcagcaacaactactaccattcagccagctagctggtgtgagccctgctaccttcttgacacaaccacagttgttgccgttctaccagcacgctgcgcctaacgctggcaccctcttacaactgcaacaattgctgccattcaaccaacttgctttgacaaacctagcagtgttctaccaacaacccatcattggtggtgccctcttttagatttcttatgagttatagttcaataataaagttttttgtctgatgtttgtggcttcccagaaataagaaagtacatttctg

SEQ ID NO: 13332 - DNA, 607 bp, Zea mays
  Clone ID: LIB3061-080-Q1-K6-D11
caactagcaacatagaaagcacaatagtgtaccaacaatggcagccaaaatattttgcttccttatgctccttggtctttctgcaagtgctgctaccgcaaccattttcccacaatgctcacaagctcctatagcttcctttcttcccccatacctctcaccagcggtgtcttcagtatgtgaaaacccaattcttcaaccctacaggatccaacaggcaatcgcagcaggcatcttacctttatcacccttgttcctccaacaaccgtcagccctattacagcagttacctttggtgcatttgttggcacaaaacatcaaggcacaacaactacaacaacttgtgctaggaaaccttgctgcctactctcagcaacagcagtttcttccattcaaccaactggctgcattgaactctgctgcttatttgcaacaacaactaccattcagtcagctagctgctgcctacccccagcaatttcttccattcaaccaactggcagcattgaactctgctgcttatttacaacagcaacagctaccaccattcagccagctagctgatgtgagccctgttgccttcttgacacaacaacagttgttgccg

SEQ ID NO: 13333 - DNA, 639 bp, Zea mays
  unsure (1)..(639): unsure at all n locations; Clone ID: LIB3061-080-Q1-K6-D2
cagcaagcaacatagaaagtagaatccattagcaacaatagagcaacaatggcgaccaagatattttccctccttatgctccttgctctttctacatgtgttgctaacgcgacaattttccctcaatgctcacaagctcctatagcttcccttcttcccccataccttccatcaattatagcttcagtatgtgaaaacccagctcttcaaccatataggcttcaacaagcaatcgcagcaagcaacatacctttatcgcccttgttgtttcaacaatcaccagccctatctttggtgcagtcattggtacaaaccatcagggcacaacagctgcagcaactcgtgctacctgtgatcaaccaagtagctctggcaaacctttctccctactctcagcaacaacaatttcttccattcaaccaactgtctacactgaaccctgctgcttatttgcagcaacaactattaccatttagccagctagctactgcctactctcagcaacaacaacttcttccatttaaccaattggccgcactgaaccccgctgcttatttgcagcagcaaatactactgccatttagcgagctagctgcagnaagtcgtgcttncttcttgaacagccacagttgctgcctt

SEQ ID NO: 13334 - DNA, 651 bp, Zea mays
  unsure (1)..(651): unsure at all n locations; Clone ID: LIB3061-080-Q1-K6-D4
catgagggtgttgctcgttgccctcgctctcctggctctcgctgcgagcgccacctccacgcatacaagcggcggctgcggctgccagccaccgccgccggttcatctaccgccgccggtgcatctgccacctccggttcacctgccacctccggtgcatctcccaccgccggtccacctgccgccgccggtccacctgccaccgccggtccatgtgccgccgccggttcatctgccgccgccaccatgccactaccctactcaaccgccccggcctcagcctcatccccagccacacccatgcccgtgccaacagccgcatccaagcccgtgccagctgcagggaacctgcggcgttggcagcaccccgatcctgggccagtgcgtcgagtttctgaggcatcagtgcagcccgacggcgacgccctactgctcgcctcagtgccagtcgttgcggcagcagtgttgccagcagctcaggcaggtggagccgcagcaccggtaccaggcgatcttcggcttggtcctccagtccatcctgcagcagcagccgcaaagcggccaggtcgcggngctgttggcggcgcagatagcgcagcaactgacggcgatgtgcggcctgcagcagccgactccatgcccctacgctgc

SEQ ID NO: 13335 - DNA, 557 bp, Zea mays
  unsure (1)..(557): unsure at all n locations; Clone ID: LIB3061-080-Q1-K6-D5
caatagtgtaccaacaatggcagccaaaatattttgctttcttatgctccttggtctttctgcaagtgttgcttccggaaccattttcccacaatgcttacaagcttctattgctttccttttttccccattccttttaccagcggggttttcaatgggtgaaaccccaattggtcaacccttcaggatccaacagggaatcgcaacaagcattttaccattatcacccttgttccttcaacaaccgcgaggcctattacagcagttacctttggtccatttggtggcacaaaacattaggggacaacaactacaacaacttgtgctagcaaaccttgctgcatactctcagaaacatcagttttttccattcaaccaactggcgtgcattgaactctgctgcttatttgcaacaacaattaccattcatccagctagttgctgtctacccccagcaatttctttcattcaaccaactagcagcattgaactctgctgcttatttacagcagcaaccactactaccattcatncagctagctgatgtgagccctgct

SEQ ID NO: 13336 - DNA, 626 bp, Zea mays
  Clone ID: LIB3061-080-Q1-K6-D6
gcgactttggccaggcaggcacggcggcccgacagcgtggggcgaggttgcccggcgtgggcgcaggcggtccagacgtggccaactgcgcggcctcgcagccacggcgtgggcggtccggccacggcggcgtggggcgcgacccccgacgacgcgggcggcctgggtgcggggccgggggggcgggacccagcggcgcgggctcgaccccagaaggcgcacgggcagcggccccggtggcgcccgcggggattcggcgctgccccgcgtgtaggcggccccggccgtgcggcgggcaggccctggcgcgggcactaccggccatggtacgccggtgcgggcgcatctcggcgtttccgccaggcgcgggcgtagccatagcggcgggcgagcgcagaccgtgtggcccctgcgtgggcacagtcgcggccagacccgagaacgcgactccgtcgagggcggggcccatcgcggcggcacggtcacggaaagcccctacgtgcgcatcgtcggtcacaagcatcagcccttgccttgtttgtgcatgccatcgacatacatgcatgcatatgagagagacttgcaatggacgatcttacatgagaccgaagatggtgccctcgatg

SEQ ID NO: 13337 - DNA, 469 bp, Zea mays
  unsure (1)..(469): unsure at all n locations; Clone ID: LIB3061-080-Q1-K6-D7
ccccgatcctgggccagtgcgtcgagtttctgaggcatcagtgcagcccgacggcgacgccctactgctcgcctcagtgccagtcgttgcggcagcagtgttgccagcagctcangcaggtggagccgcagcaccggtaccaggcgatcttcggcttgggtcctcagttcattctgcagcagcaggcgcaaagcgggcaagtcccggggcttttggcggcgcaaattagcgcacaactgacggcgatttgcgggcttgtaaaaacgacttcatgcccctacactgttggcggcggtgttccccactgaagaaactatgtgctgtagtatagccgctggctagctagctagttgagtcatttagcggcgatgattgagtaataatgtgtcacgcatcaccatgggtggcagtgtcagtgtgagcaatgacctgaatgaacaattgaaatgaaaagaaaaagtattgttcc

SEQ ID NO: 13338 - DNA, 355 bp, Zea mays
  Clone ID: LIB3061-080-Q1-K6-D8
ctcagcagcaacaatttcttccatttaaccaattggccgcactgaacccctctgcttatttccagcagcaaatactactaccatttggccagctagctacaacaagccccgcttccttcttgacacaacaacaagtgcttccgttctaccagcagtttgtggctaaccccgcaaccctcttacaactgcaacagttgctgccctttgtccaacttgctttgacaaacccagcagccttctaccaacaacacatcattggcggtgccatcttttagattgcttattagttgtaattcaataatgaagttttttggctgatgtatgtggcctcctagaaataagaagttacatttcc

SEQ ID NO: 13339 - DNA, 659 bp, Zea mays
  Clone ID: LIB3061-080-Q1-K6-D9
gggccaacatcccgggtttcagcattcaaaaacacaccatgcgaagcgcactagcaacgacctaacaccaatggctaccaagatattagccctccttgcgcttcttgcccttttagtgagcgcaacaaatgcgttcattattccacagtgctcacttgctcctagtgccattattccacagttcctcccaccagttacttcaatgggcttcgaacatccagccgtgcaagcctacaggctacaactagcgcttgcggcgagcgccttacaacaaccaattgcccaattgcaacaacaatccttggcacatctaaccctacaaaccattgcaacgcaacaacaacaacaacaacagtttctgccatcactgagccacctagccgtggtgaaccctgtcacctacttgcaacagcagctgcttgcatccaacccacttgctctggcgaacgtagctgcataccagcaacaacaacagctgcaacagtttatgccagtgctcagtcaactagccatggtgaaccctgccgtctacctacaactactttcatctagcccgctcgcggtgggcaatgcacctacgtacctacaacaacagttgctgcaacaaattgtaccagctctgactcagctagctgtggcaaaccctgctgcctacttac

SEQ ID NO: 13340 - DNA, 509 bp, Zea mays
  Clone ID: LIB3061-080-Q1-K6-E1
caaaacattagggcacaacaactacaacaacttgtgctagcaaaccttgctgcatactctcagcaacatcagtttcttccattcaaccaactggctgcattgaactctgctgcttatttgcaacaacaattaccattcagccagctagttgctgcctacccccagcaatttcttccattcaaccaactagcagcattgaactctgctgcttatttacagcagcaacaactactaccattcagccagctagctgatgtgagccctgctgccttcttgacacaacaacagttgttgccgttctacctgcacgctatgcctaacgctggcaccctcttacaactgcaacaattgctgccattcaaccaacttgctttgacaaacccaacagtgttctaccaacaacccatcattggtggtgccctcttttagattgcttatgagttatagttcaataatgaagttttttggatgatgtttgtggcgtcccagaaataagaaagtacatttct

SEQ ID NO: 13341 - DNA, 624 bp, Zea mays
  unsure (1)..(624): unsure at all n locations; Clone ID: LIB3061-080-Q1-K6-E10
aagcgaagcgcactagcaacgacctaacaacaatggctaccaagatattagccctccttgcgcttcttgccctttttgtgagcgcaacaaatgcgttcattattccacaatgctcacttgctcctagtgccattattccacagttcctcccaccagttacttcaatgggcttcgaacacctagctgtgcaagccaacatgcaacaacaagcgcttgcggcgagcgtcttacaacaaccaattgcccaattgcaacaacaatccttgccacatctaacaatacaagccatcacaacgcaacagcaacaacagttcctaccagcactgagccacctagccatggtgaaccctgccgcctacttgcaagagcagctgcttgcatccaacccacttgctctggcgaacgtagttgcaaaccagcaacaacaacagctacaacagtttctgccaacgctcagtcaactagccatggtgaaccctgccgnctacgtacaacaacaacaactgctttcatctagcccgctcgctgtgggcaatgcacctacatacctgcaacaacaattgttgcaacagattgtaccagctctgactcaactagctgtggcaaaccctgttgcctacttgc

SEQ ID NO: 13342 - DNA, 631 bp, Zea mays
  Clone ID: LIB3061-080-Q1-K6-E11
caacaagcaacatagaaagtggaatccagtagcaacaacagagcaacaatggcgaccaagatattttccctccttatgctccttgctctttctgcatgtgttgctaacgcgacaattttccctcaatgctcacaagctcctatagcttcccttcttcccccataccttccatcaatgatagcttcagtatgtgaaaacccagctcttcagccctataggctccaacaagcaatcgcagcaagcaacatacctttatcacccttgttgtttcaacaatcgccagccctatctttggtgcagtcattggtacaaaccatcagggcacagcagctgcagcaactcgtgctacctgtgatcaaccaagtagctctggcaaacctttctccctactctcagcaacaacaatttcttccattcaaccaactgtctacactgaaccctgctgcttatttgcagcaacaactattaccattcagccagctagctactgcctactctcagcaacaacaacttcttccatttaaccaattggccgcactgaaccccgctgcttatttgcagcagcaaatactactaccatttagccagctagctgcagcaaaccgtgcttccttcttgacacagcaacagt

SEQ ID NO: 13343 - DNA, 659 bp, Zea mays
  Clone ID: LIB3061-080-Q1-K6-E2
accaactagcaacatagaaagcacaatagtgtaccaacaatggcagccaaaatattttgcctccttatgctccttggtctttctgcaagtgctgctacggcgaccattttcccacaatgctcacaagctcctatagcttcccttcttcccccgtacctctcaccagcggtgtcttcggtatgtgaaaacccaattcttcaaccctataggatccaacaggcaatcgcagctggcatcttacctttatcacccttgttcctccaacaatcatcagccctattacagcagttacctttggtgcatttattggcacaaaacatcagggcacaacaactacaacaacttgtgctagcaaaccttgctgcctactctcagcaacaacagtttcttccattcaaccaactagctgcattgaactctgcttcttatttgcaacaacaacaactaccattcagccagctatctgctgcctacccccagcaatttcttccattcaaccaactgacagctttgaactctcctgcttatttacagcagcaacaactactaccattcagccagctagcctggtgtgagccctgctaccttcttgacacaaccacaattgttgccgttctaccagcacgctgcgcctaacgctggcaccctcttacaactgc

SEQ ID NO: 13344 - DNA, 656 bp, Zea mays
  Clone ID: LIB3061-080-Q1-K6-E4
tagcaacatagaaagcacaatagtgtaccaacaatggcagctaaaatattttgcctccttatgctccttggtctttctgcaagtgctgctacggcgaccattttcccacaatgctcacaagctcctatagcttcccttcttcccccgtacctctcaccaacggtgtcttcggtatgtgaaaacccaattcttcaaccctacaggatccaacaggcaatcgcagctggcatcttacctttatcacccttgttcctccaacaatcatcagccctattacagcagttacctttggtgcatttattggcacaaaacatcagggcacaacaactacaacaacttgtgctagcaaaccttgctgcctactctcagcaacagcagtttcttccattcaaccaactagctgcattgaactctgcttcttatttgcaacaacaacaactaccattcagccagctatctgctgcctacccccagcaatttcttccattcaaccaactgacagcattgaactctcctgcttatttacagcagcaacaactactaccattcagccagctagctggtgtgagccctgctaccttcttgacacaaccacagttgttgccgttctaccagcacgctgcgcctaacgctggcaccctcttacaactgcaaca

SEQ ID NO: 13345 - DNA, 672 bp, Zea mays
  Clone ID: LIB3061-080-Q1-K6-E6
cccgggattttcagcattcaaaaacacaccaagcgaagcgcactagcaacgacctaacaccaatggctaccaagatattagccctccttgcgcttcttgcccttttagtgagcgcaacaaatgcgttcattattccacagtgctcacttgctcctagtgccagtattccacagttcctcccaccagttacttcaatgggcttcgaacatccagccgtgcaagcctacaggctacaactagcgcttgcggcgagcgccttacaacaaccaattgcccaattgcaacaacaatccttggcacatctaaccctacaaaccattgcaacgcaacaacaacaacaacagtttctgccatcactgagccacctagccgtggtgaaccctgtcacctacttgcaacagcagctgcttgcatccaacccacttgctctggcgaacgtagctgcataccagcaacaacaacagctgcaacagtttatgccagtgctcagtcaactagccatggtgaaccctgccgtctacctacaactactttcatctagcccgctcgcggtgggcaatgcacctacgtacctacaacaacagttgctgcaacaaattgtaccagctctgactcagctagctgtggcaaaccctgctgcctacttacaacagttgctttcattcaaccaac

SEQ ID NO: 13346 - DNA, 640 bp, Zea mays
  Clone ID: LIB3061-080-Q1-K6-E7
gcaacatagaaagcacaatagtgtaccaacaatggcagccaaaatattttgcttccttatgctccttggtctttctgcaagtgttgctaccgcaaccattttcccacaatgctcacaagctcctatagcttcccttcttcccccatacctctcaccagcggtgtcttcaatgtgtgaaaccccaattgttcaaccctacaggatccaacaggcaatcgcaacaggcatcttaccattatcacccttgttcctccaacaaccgtcagccctattacagcagttacctttggtccatttggtggcacaaaacatcagggcacaacaactacaacaacttgtgctagcaaaccttgctgcatactctcagcaacatcagtttcttccattcaaccaactggctgcattgaactctgctgcttatttgcaacaacaattaccattcagccagctagttgctgcctacccccagcaatttcttccattcaaccaactagcagcattgaactctgctgcttatttacagcagcaacaactactaccattcagccagctagctgatgtgagccctgctgccttcttgaccaacaacagttgttgccgttctacctgcacgctatgcctaacgctggcaccctcttac

SEQ ID NO: 13347 - DNA, 645 bp, Zea mays
  Clone ID: LIB3061-080-Q1-K6-E8
agcagatcaaacaagtagcgacagctcgacaaagatttgtgagagtgatccggcgctgagaagagatggctaagatcgccgcagccgccgcggcggcggcggcgctgtgcttcgcggccctggtggccgtggccgtctgccaaggcgaggtcgagcggcagaggctcagggacctgcagtgctggcaggaggtccaggagagcccgctcgacgcgtgccgccaggtcctcgaccggcagctaaccggcggcggcgtcggcggcccgttccggtggggcaccgggctccggatgcggtgctgccagcagctccaggacgtgagccgcgagtgccgctgcgccgccatccggagcatggtcaggggctacgaggaggccatgccgcctctggagaaaggctggtggccatggggggcggcagcagcagccgccgccgcagggaggaggaggaggacaggggggctactactacccctgcagccgggcaggagagggataccaaacgcagatgtatccaccgtgtcgtcccggcaccaccgggccaaggatcggccgcgtgaggcttacgaaggcccgggagtacgccgcggggttgccgatgatgtgccggctgtcggagccccaggagtgcagcatcttctccggc

SEQ ID NO: 13348 - DNA, 642 bp, Zea mays
  Clone ID: LIB3061-080-Q1-K6-E9
gatttatctcagtcataggatccttgtctccacagagaagtacttggtattgcatgatattgttgatatggcattgaagaaactggaggctgaggtcggtcctttatctggagctccaaatatgggtcgtggaattgtcagtcgacttactgttggtgccgaagttcagaaactttgtgctcaagcagtagatgctgtggaatcattgttctcggctgtatctcctgctagttcaaaaattcagcggccatgtatgatgccaccaaactttgtaaagtttgaagctataacccaaacatccgtcatggtatttttggatttggttgattgtcctatgcttgcccaagaggcaacttcttttaatatctggcaccgagtggctgttactgaattgtacccatcaaatccgactggcataatacttgcgccattgaaaaaattacttgtcacttggcttgcaccggctacaagctatatctttaaggttgtcgcgttcaagaactcaattgagttgggttcatgggaaattagaatgaagacaagctgtcaaaaggatgatccaaggggttcaatgccaggtggtaccggactaggacaaaatagtgagagcccaaagcaaacagtgatggccagtctgatcct

SEQ ID NO: 13349 - DNA, 139 bp, Zea mays
  Clone ID: LIB3061-080-Q1-K6-F1
ggcgttaaagacctctacaacaatttcactatatccgtacaggaacaggatgtcgtcttggcccaaaatatcgtgtacaacttgcatgatgatgtgttgttaactttggaagctctatatggttcagggctatcgtccc

SEQ ID NO: 13350 - DNA, 631 bp, Zea mays
  Clone ID: LIB3061-080-Q1-K6-F10
attttgttcattcagaaacacacctagcgaagcgcactagcaacgacctaacaacaatggcttccaagacattatccctccttgcgcttcttgctctttttgtgagtgcaacaaatgcgttcattattccacaatgctcacttgctccgagtgccattattccacagttcctccctccagttacttcaatgggcttcgaacacccagctgtgcaagcctataggctacaacaagcgcttgcggcgagcgtcttagaacaaccaattgcccaattacaacaacaatccttggcacatctaaccatacaaaccatcgcaacgcagcagcaacaagcactgagccacctagccgtggtgaaccctatcgcctacttgcaacaacagctgcttgcatccaacccacttgctttggcaaacgtagctgcataccaacaacaacaacagttgcaacagtttctaccagcgctcagtcaactagccatggtgaaccctatcgcctacctacaacagcaacaacttctttcatctagcccgctcgctatgggcaatgcacctacatacctgcaacaacagttgttgcaacaacagttgctgcaacaaattgtaccagctcttactcagctagctgtggc

SEQ ID NO: 13351 - DNA, 660 bp, Zea mays
  Clone ID: LIB3061-080-Q1-K6-F11
cccgggattttgagcattcagaaacacaccaagcgaagcgcactagcaacgacctaacaacaatggctaccaagatattagccctccttgcgcttcttgccctttttgtgagcgcaacaaatgcgttcattattccacaatgctcacttgctcctagtgccattattccacagttcctcccaccagttacttcaatgggcttcgaacacctagctgtgcaagccaacatgcaacaacaagcgcttgcggcgagcgtcttacaacaaccaattgcccaattgcaacaacaatccttgccacatctaacaatacaagccatcacaacgcaacagcaacaacagttcctaccagcactgagccacctagccatggtgaaccctgccgcctacttgcaagagcagctgcttgcatccaacccacttgctctggcgaacgtagttgcaaaccagcaacaacaacagctacaacagtttctgccaacgctcagtcaactagccatggtgaaccctgccgcctacgtacaacaacaacaactgctttcatctagcccgctcgctgtgggcaatgcacctacatacctgcaacaacaattgttgcaacagattgtaccagctctgactcaactagctgtggcaaaccctgttgcctacttgcaacagc

SEQ ID NO: 13352 - DNA, 581 bp, Zea mays
  Clone ID: LIB3061-080-Q1-K6-F12
acctcaaagactggtaagcatggtcatgccaaatgccactttgttgccatagatatattcaacgggaaaaagctcgaagatattgttccttcgtcacacaactgtgatattccgcatgtgaaccgtactgagtatcagctgattgatatatcagaggatggatttgtgagccttcttacttcagatggcaacactaaggatgatcttagactcccaactgatgagactcttgtggcccagatcaaggaagggtttgaaagtggcaaggatcttgttgtgactgtccagtctgctatgggggaggagcagatctgcgcgctgaaggatgttggccccaagtaacttccctgccttggaatactgtatctcaaaacctaaatcgaaaaaagaagtgtatcaaggattgctacagagacatccatctggcttgagctggcttttgctatgtcaaacacaagtgcagggatcgctgggtgttgcaccgcgtctgcattatctgtggttacattctggaccctgtattttctatgcttttatgccccctctgtttagtattaattatcaataaattttgtttggga

SEQ ID NO: 13353 - DNA, 661 bp, Zea mays
  Clone ID: LIB3061-080-Q1-K6-F3
gaccaactagcaacatagaaagcacaatagtgtaccaacaatggcagccaaaatattttgcctccttatgctccttggtctttctgcaagtgctgctacggcgaccattttcccgcaatgctcgcaagctcctatagcttcccttcttcccccgtacctctcaccagcggtgtcttcggtatgtgaaaacccaattcttcaaccctacaggatccaacaggcaatcgcagctggcatcttacctttatcacccttgttcctccaacaatcatcagccctattacaacagttacctttggtgcatttattggcacaaaacatcagggcacaacaactacaacaacttgtgctagcaaaccttgctgcctactctcagcaacagcagtttcttccattcaaccaactaggttcattgaactctgcttcttatttgcaacaacaacaactaccattcagccagctacctgctgcctacccccagcaatttcttccattcaaccaactagcagcattgaactctcctgcttatttacagcagcaacaactactaccattcagccagctagctggtgtgagccctgctaccttcttgacacaaccacagttgttgccgttctaccagcacgttgcgcctaacgctggcaccctcttacactgcaac

SEQ ID NO: 13354 - DNA, 650 bp, Zea mays
  Clone ID: LIB3061-080-Q1-K6-F4
atacgaactagcaacatacatagtgaagtacactagcaacatcttagcaccaatggcagccaagatttttgccatccttgccctccttgctctttcagcaagcgttgctaccgcgactattattccacaatgctcacaacaatacctctctccggtgacagccgcgagatttgaatacccaactatacaatcctacaggctacaagaggccatcgcagcaagcatcttacggtcgttagcattgaccgtccaacaaccatatgccctattgcaacaaccatccttaatgaatctatatctccaaagaatcgcagcacaacaactacaacaacagttgcttccaacaatcaatcaagtagttgcagcgaaccttgctgcttacctccagcaacaacaatttcttccattcaatcaactagctggggtgaaccctgctgcttacttgcaggcacaacagctactaccattcaaccaacttgtcaggagccctgctgccttcttactgcagcaacagttgcttccattccatctacaagttgtggcaaacattgctgctttcttgcaacaacaacaacaattgctgccattttacccacaggttgtgggaaacattaacgccttcttgcacagcaacagttgctaccattcta

SEQ ID NO: 13355 - DNA, 414 bp, Zea mays
  unsure (1)..(414): unsure at all n locations; Clone ID: LIB3061-080-Q1-K6-F5
acaggatcctaacaggcaatcgcaacaggcatcttaccattatcacccttggtccatttggtggcacaaaacattagggcacaacaactacaacaacttgtgcttgcaaaccttgctgcatactctcagcaacattagtttcttccattcaaccaactggctgtattgaactctgctggttatttgcaacaacaattaccattcagccagctagttgctgtctacccccagcaatttcttccattcaaccaactagcagcattgaactctgctgcttatttacagcagcaacaactactaccatttatccagctagctgatgtgagccctgctgccttcttgacacaacaacagttgttgccgntctacctgcacgctatgcctaacgctggcaccctcttacaactgcaacaa

SEQ ID NO: 13356 - DNA, 436 bp, Zea mays
  Clone ID: LIB3061-080-Q1-K6-F6
ctctcaccagcggtgtcttcaatgtgtgaaaccccaattgttcaaccctacaggatccaacaggcaatcgcaacaggcatcttaccattatcacccttgttcctccaacaaccgtcagccctattacagcagttacctttggtccatttggtggcacaaaacatcagggcacaacaactacaacaacttgtgctagcaaaccttgctgcatactctcagcaacatcagtttcttccattcaaccaactggctgcattgaactctgctgcttatttgcaacaacaattaccattcagccagctagttgctgcctacccccagcaatttcttccattcaaccaactagcagcattgaactctgctgcttatttacagcagcaacaactactaccattcagccagctagctgatgtgagccctgctggctttttgacac

SEQ ID NO: 13357 - DNA, 645 bp, Zea mays
  Clone ID: LIB3061-080-Q1-K6-F7
ggaaaaaggggggttagttttattcgactggcttcgcgtgcgccgatcttctatttagcacgcgacaggagcatctcgttgctcgattcggttttcttcgtgaattcgcccccagcgagccgagctagaattggaattggaactggacttgcggctgctgcgttcggcgggggctggaattctcgccgcatccccgtgtggtggtgagaggccgtggctcgtgttgcggtcgacgcgcgaggagggtcgacggcctcgcgccattggggtacgaagccggccgagactgagcgatatgctcgtgaacctagtatcatgaggtacattaagatagcagctatgcttcctaacagaaccatcagggatgttgcgctgcgatgctgctgggctacaggtaaagagagaaggaagaaacctgatggattctacacagggaaaaaaatgagagacgtgaagccaatccaggacaaaatggttgcatcagtcccaatagctaattttcacatgacacctacaaccaatgtaatccccttttcggtatcaacgcagcatccaaatcaacaaagtcaggttcccaaagaagctcctgttgtcgacagtgcaacccagcgtctcctggaggaaaataatcagttgcttaaccag

SEQ ID NO: 13358 - DNA, 617 bp, Zea mays
  Clone ID: LIB3061-080-Q1-K6-F8
tttcagctttcaaaaacacaccaagcgaagcgcactagcaacgacctaacaccaatggctaccaagatattagtcctccttgcgcttcttgcccttttagtgagcgcaacaaatgcgttcattattccacagtgctcacttgctcctagtgccagtattccacagttcctcccaccagttgcttcaatgggcttcgaacatccagccgtgcaagcctacaggctacaactagcgcttgcggcgagcgccttacaacaaccaattgcccaattgcaacaacaatccttggcacatctaaccctacaaaccattgcaacgcaacaacaacaacaacagtttctgccatcactgagccacctagccgtggtgaaccctgtcacctacttgcaacagcagctgcttgcatccaacccacttgctctggcgaacgtagctgcataccagcaacaacaacagctgcaacagtttatgccagtgctcagtcaactagccatggtgaaccctgccgtctacctacaactactttcatctagcccgctcgcggtgggcaatgcacctacgtacctacaacaacagttgctgcaacaaattgtaccagctctgactcagctagctgt

SEQ ID NO: 13359 - DNA, 663 bp, Zea mays
  Clone ID: LIB3061-080-Q1-K6-G1
gcgaaacaaacactagtgcgtttgcgagagaaaccgagaaagagaagctacagagtcactgaccgaccgctatggcatcgaggcagaacacgcgtgaggcgcgcgccgaggccgacgcgcggcgcgccgtggaggagctggctcgggcgcgggacgagcacctcgagaaggcggaggtgaacgcccgctcggccgcggacgagatcgcgcgctcccgcgccgaccgcggtgccgccggtggcggcggcatcctggagagcgtgcaggagggcgccaggtccttggccagcgccgtgggccgcaccttcggtggcgccaaggacgcgaccgtggacaagacctcgcagacggcgcacaccgcgggcgacaagctcggcgagtacagggactacaccgccgacaaggcccgggaggccaacgacagcgtctcgcgtaagacgggcgagacggcggaggccacccggaacaagctgggcgagtacaaggacagcgccgtggagaaggcgagggagaccaaggacgcggtggcgcagaagacgagcgagaccgcggaggcgaccaagaacaagctcggggagtacaaggacgcggcggccggcaaggcgcgggaggccgcggacaccaccgccggcaaggcgagggaggccaaggacgcgaccatgc

SEQ ID NO: 13360 - DNA, 139 bp, Zea mays
  Clone ID: LIB3061-080-Q1-K6-G10
atcgcgtgcggccgccctttttctttttttttggaaatgtactttcttatttctgggaagccacaaacatcagacaaaaaactttattattgaactataactcataaaaaaaaaaaaaagggcggccgttttggtggtt

SEQ ID NO: 13361 - DNA, 632 bp, Zea mays
  Clone ID: LIB3061-080-Q1-K6-G11
caatagtgtaccaacaatggcagccaaaatattttgcctccttatgctccttggtctttctgcaagtgctgctacggcgaccattttcccgcaatgctcgcaagctcctatagcttcccttcttcccccgtacctctcaccagcggtgtcttcggtatgtgaaaacccaattcttcaaccctacaggatccaacaggcaatcgcagctggcatcttacctttatcacccttgttcctccaacaatcatcagccctattacaacagttacctttggtgcatttattggcacaaaacatcagggcacaacaactacaacaacttgtgctagcaaaccttgctgcctactctcagcaacagcagtttcttccattcaaccaactaggttcattgaactctgcttcttatttgcaacaacaacaactaccattcagccagctacctgctgcctacccccagcaatttcttccattcaaccaactagcagcattgaactctcctgcttatttacagcagcaacaactactaccattcagccagctagctggtgtgagccctgctaccttcttgacaaaccacagttgttgccgttcaccagcacgttgcgcctaacgctggcaccctcttacaactg

SEQ ID NO: 13362 - DNA, 650 bp, Zea mays
  Clone ID: LIB3061-080-Q1-K6-G3
gcaacatataaagcacaatagtgtaccaacaatggcagccaaaatattttgcctccttatgctccttggtctttctgcaagtgctgctacggcgaccattttcccgcaatgctcgcaagctcctatagcttcccttcttcccccgtacctctcaccagcggtgtcttcggtatgtgaaaacccaattcttcaaccctacaggatccaacaggcaatcacagctggcatcttacctttatcacccttgttcctccaacaatcatcagccctattacatcagttacctttggtgcatttattggcacaaaacatcagggcacaacaactacaacaacttgtgctagcaaaccttgctgcctactctcagcaacagcagtttcttccattcaaccaactagctgcattgaactctgcttcttatttgcaacaacaacaactaccattcagccagctacctgctgcctacccccagcaatttcttccattcaaccaactggcagcattgaactctcctgcttatttacagcagcaacaactactaccattcagccagctagctggtgtgagccctgctaccttcttgatacaaccacagttgttgccgttctaccagcacgctgcgcctaacgctggcaccctcttacactgca

SEQ ID NO: 13363 - DNA, 651 bp, Zea mays
  Clone ID: LIB3061-080-Q1-K6-G4
caactattttcatagaaagcacaatagtgtaccaacaatggcagccaaaatattttgcctccttatgctccttggtctttctgcaagtgctgctacggcgaccattttcccgcaatgctcgcaagctcctatagcttcccttcttcccccgtacctctcaccagcggtgtcttcggtgtgtgaaaacccaattcttcaaccctacaggatccaacaggcaatcgcagctggcatcttacctttatcacccttgttcctccaacaatcatcagccctattacaacagttacctttggtgcatttattggcacaaaacatcagggcacaacaactacaacaacttgtgctagcaaaccttgctgcctactctcagcaacagcagtttcttccattcaaccaactaggttcattgaactctgcttcttatttgcaacaacaacaactaccattcagccagctacctgctgcctacccccagcaatttcttccattcaaccaactagcagcattgaactctcctgcttatttacagcagcaacaactactaccattcagccagctagctggtgtgagccctgctaccttcttgacacaaccacagttgttgccgttctaccagcacgttgcgccttacgctggcaccctcttaca

SEQ ID NO: 13364 - DNA, 349 bp, Zea mays
  unsure (1)..(349): unsure at all n locations; Clone ID: LIB3061-080-Q1-K6-G5
cccgctgcttatttgcagcagcaaatactactgccatttagcgagctagctgcagcaagtcgtgcttccttcttgacacagcaacagttgctgcctttctacaagcagtttgcggctaaccccgcaaccctcttacaactacaacaattgttgccctttgtccaacttgctttgacaaacccagcagccttctaccaacaacacattattggtggtgccctcttttagattgattattagttgtaattcaataataaagttttttggatgatgtatgtggccaaccagaaataagaagttacatttccagattctaatgtgatattggtctccaagggtgttcganttt

SEQ ID NO: 13365 - DNA, 641 bp, Zea mays
  Clone ID: LIB3061-080-Q1-K6-G6
agaaagcacaatagtgtaccaacaatggcagctaaaatattttgcctccttatgctccttggtctttctgcaagtgctgctacggcgaccattttcccacaatgctcacaagctcctatagcttcccttcttcccccgtacctctcaccaacggtgtcttcggtatgtgaaaacccaattcttcaaccctacaggatccaacaggcaatcgcagctggcatcttacctttatcacccttgttcctccaacaatcatcagccctattacagcagttacctttggtgcatttattggcacaaaacatcagggcacaacaactacaacaacttgtgctagcaaaccttgctgcctactctcagcaacagcagtttcttccattcaaccaactagctgcattgaactctgcttcttatttgcaacaacaacaactaccattcagccagctatctgctgcctacccccagcaatttcttccattcaaccaactgacagcattgaactctcctgcttatttacagcagcaacaactactaccattcagccagctagctggtgtgagccctgctaccttcttgacacaaccacagttgttgccgttctaccagcacgctgcgcctaacgctggcaccctcttacaact

SEQ ID NO: 13366 - DNA, 638 bp, Zea mays
  Clone ID: LIB3061-080-Q1-K6-G7
gcaacatagaaagcacaatagtgtaccaacaatggcagccaaaatattttgcctccttatgctccttggtctttctgcaagatgctgctacggcgaccattttcccgcaatgctcgcaagctcctatagcttcccttcttcccccgtacctctcaccagcggtgtcttcggtatgtgaaaacccaattcttcaaccctacaggatccaacaggcaatcacagctggcatcttacctttatcacccttgttcctccaacaatcatcagccctattacatcagttacctttggtgcatttattggcacaaaacatcagggcacaacaactacaacaacttgtgctagcaaaccttgctgcctactctcagcaacagcagtttcttccattcaaccaactagctgcattgaactctgcttcttatttgcaacaacaacaactaccattcagccagctacctgctgcctacccccagcaatttcttccattcaaccaactggcagcattgaactctcctgcttatttacagcagcaacaactactaccattcagccagctagctggtgtgagccctgctaccttcttgatacaaccacagttgttgccgttctaccagcacgctgcgcctaacgctggcacc

SEQ ID NO: 13367 - DNA, 484 bp, Zea mays
  Clone ID: LIB3061-080-Q1-K6-G9
attttcatcattcaaaaacacaccaagcgaagcgcactagcaacgacctaacaccaatggctaccaagatattagccctccttgcgcttcttgcccttttagtgagcgcaacaatgcgttcattattccacagtgctcacttgctcctagtgccattattccacagttccttccaccagttacttcaatgggcttcgaacattcagccgtgcaagcctacaggctacaactagcgcttgcggcgagcgccttacaacaaccaattgcccaattgcaacaacaattcttggcacatctaaccctacaaaccattggaacgcaacaacaacaacaacaacagtttctgtcattactgagccacctatccgtggtgaaccctgtcacctacttgcaacagcagctgcttgcatacaacccacttgctctggcgaacgtagctgtataccagcaacaacaacagctgcaacagtttatgccagtgctc

SEQ ID NO: 13368 - DNA, 628 bp, Zea mays
  Clone ID: LIB3061-080-Q1-K6-H11
cagaaacacacctagcgaagcgcactagcaacgacctaacaacaatggctaccaagatattatccctctttgcgcttcttgccctttttgtgagcgcaacaaatgcgttcattattccacaatgctcacttgctcctagtgccattattccacagttcctccctccagttacttcaatgggcttcgaacacccagctgtgcaagcctacaggctacaacaagcgcttgcggcgagcgtcttacaacaaccaattgcccaattacaacaacaatccttggcacatctaaccatacaaaccatcgcaacgcaacagcaacaacaatttctaccagcactgagccaactagctgtggtgaaccctgtcgcctacttgcaacagcagttgcttgcatccaacccacttgctctggcaaacatagttgcataccaacaacaacaacaattgcaacagtttctaccagcgctcagtcaactagccatggtgaaccctgccgcctacctacaacagcaacaactgatttcatctagccctctcgctgtggttaatgcacctacatacctgcaacaacagttgctgcaacagattgtaccagctctgactcagctagctgtggcaaaccctgctgc

SEQ ID NO: 13369 - DNA, 641 bp, Zea mays
  Clone ID: LIB3061-080-Q1-K6-H12
caactagcaacatagaaagcacaatagtgtaccaacaatggcagccaaaatattttgcctccttatgctccttggtatttctgcaagtgctgctacggcgaccattttcccgcaatgctcacaagctcctatagcttcccttcttcccccgtacctctcaccagcggtgtcttcggtatgtgaaaacccaattcttcaaccctacaggatccaacaggcaatcgcagctggcatcttacctttatcacccttgttcctccaacaatcatcagccctattacagcagttacctttggtgcatttattggcacaaaacatcagggcacaacaactacaacaacttgtgctagcaaaccttgctgcctactctcagcaacagcagtttcttccattcaaccaactagctgcattgaactctgcttcttatttgcaacaacaacaactaccattcagccagctacctgttgcctacccccaacaatttcttccattcaaccaactggcagcattgaactctcctgcttatttacagcagcaacaactactaccattcagccagctagctggtgtgagccctgctaccttcttgacacaaccacagttgttgccgttctaccagcacgctgcgcctaacgctggca

SEQ ID NO: 13370 - DNA, 333 bp, Zea mays
  Clone ID: LIB3061-080-Q1-K6-H2
ctgggtcttcagaccattagctttatctactccagagcgcagaagaacccgatcgacaccatgagggtgttgctcgttgccctcgctctcctggctctcgctgcgagcgccacctccacgcatacaagcggcggctgcggctgccagccaccgccgccggttcatctaccgccgccggtgcatctgccacctccggttcacctgccacctccggtgcatctcccaccgccggtccacctgccgccgccggtccacctgccaccgccggtccatgtgccgccgccggttcatctgccgccgccaccatgccactaccctactcaaccgccccgg

SEQ ID NO: 13371 - DNA, 421 bp, Zea mays
  Clone ID: LIB3061-080-Q1-K6-H3
caactagctgatgtgagccctgctgccttcttgacacaacaacagttgttgccgttctacctgcacgctatgcctaacgctggcaccctcttacaactgcaacaattgctgccattcaaccaacttgctttgacaaacccaacagtgttctaccaacaacccatcattggtggtgccctcttttagattgcttatgagttatagttcaataatgaagttttttggatgatgtttgtggcgttccagaaataagaaagttcatttctagattctttaagaaaaaaaaaataaaaaaaaaattaataaataattttttattgtgtaactacgtaattttttttttcttgttttttttttttttttgtttttttttattccttcttttctgtttttccccctttgttgtttttttttttttttt

SEQ ID NO: 13372 - DNA, 649 bp, Zea mays
  unsure (1)..(649): unsure at all n locations; Clone ID: LIB3061-080-Q1-K6-H4
gcgcactatcaacgacctaacaacaatggctaccaagatattagccctccttgcgcttcttgccctttttgtgagcgcaacaaatgcgttcattattccacaatgctcacttgctcctagtgccattattccacagttcctcccaccagttacttcaatgggcttcgaacacctagctgtgcaagccaacatgcaacaacaagcgcttgcggcgagcgtcttacaacaaccaattgcccaattgcaacaacaatccttgccacatctaacaatacaagccatcacaacgcaacagcaacaacagttcctaccagcactgagccacctagccatggtgaaccctgccgcctacttgcaagagcagctgcttgcatccaacccacttgctctggcgaacgtagttgcaaaccagcaacaacaacagctacaacagtttctgccaacgctcagtcaactagccatggtgaaccctgccgcctacgtacaacaacaacaactgctttcatctagcccgctcgctgtgggcaatgcacctacatacctgcaacaacaattgttgcaacagattgtaccagctctgactcaactagctgtggcaaaccctgttgcctacttgcaacagctgcttncattcaccaactgactctgt

SEQ ID NO: 13373 - DNA, 480 bp, Zea mays
  Clone ID: LIB3061-080-Q1-K6-H5
ggcacagttaaagagggctatccatccatctcttgacttcgacaatgcaaatggagtaaataggatgaagccttcactgaacaagctgcaatctttccatattggaaagaaccacagtttccgtgtaccgaccggtgaccgaagcccgtgtaaagtaagtacggattaccattctgatttgaacagccaattatcgcatagcaggcaccccgatccaggagcccaaagggcctggcattgtgaggtcaatgcagctgggagctctgattgtatgtttacagcaaggcgctactatgccggagctcagttgccaccaaatctcccgcgaacaaaatctgtacccctacatgctgtagacgtctgaaatgctcttgccctgtaaagtttatagtgtacatctgttttggttctctctgtacccattatgaaacgtagttgctgagagcaggagactgaatgtgacgaggttgcatgtggatt

SEQ ID NO: 13374 - DNA, 620 bp, Zea mays
  Clone ID: LIB3061-080-Q1-K6-H7
cccacgcgtccgattgagaccaactagcaacatagaaagcacaatagtgtaccaacaatggcagccaaaatattttgcctccttatgctccttggtctttctgcaagtgctgctacggcgaccattttcccgcaatgctcgcaagctcctatagcttcccttcttcccccgtacctctcaccagcggtgtcttcggtatgtgaaaacccaattcttcaaccctacaggatccaacaggcaatcacagctggcatcttacctttatcacccttgttcctccaacaatcatcagccctattacatcagttacctttggtgcatttattggcacaaaacatcagggcacaacaactacaacaacttgtgctagcaaaccttgctgcctactctcagcaacagcagtttcttccattcaaccaactagctgcattgaactctgcttcttatttgcaacaacaacaactaccattcagccagctacctgctgcctacccccagcaatttcttccattcaaccaactggcagcattgaactctcctgcttatttacagcatcaacaactactaccattcagccagctagctggtgtgagccctgctaccttcttgatacaaccaca

SEQ ID NO: 13375 - DNA, 635 bp, Zea mays
  Clone ID: LIB3061-080-Q1-K6-H8
tctcccagcggtgtcttcggtatgtgaaaacccaattcttcaaccctacaggatccaacaggcaatcacagctggcatcttacctttatcacccttgttcctccaacaatcatcagccctattacatcagttacctttggtgcatttattggcacaaaacatcagggcacaacaactacaacaacttgtgctagcaaaccttgctgcctactctcagcaacagcagtttcttccattcaaccaactagctgcattgaactctgcttcttatttgcaacaacaacaactaccattcagccagctacctgctgcctacccccagcaatttctttcattcaaccaactggcagcattgaactctcctgcttatttacagcagcaacaactactaccattcagccagctagctggtgtgagccctgctaccttcttgatacaaccacagttgttgccgttctaccagcacgctgcgcctaacgctggcaccctcttacaactgcaacaattgctgccattcaaccaacttgctttgacaaacccagcagcgttctaccaacaacccatcattggtggtgccctcttttagatttcttatgagttatagttcaataataaaagtttttgtctgatgtttg

SEQ ID NO: 13376 - DNA, 481 bp, Zea mays
  Clone ID: LIB3061-096-Q1-N6-A1
ctagaaatgtactttcttatttctgggaagccacaaacatcagacaaaaaactttattattgaactataactcataagaaatctaaaagagggcaccaccaatgatgggttgttggtagaacgctgctgggtttgtcaaagcaagttggttgaatggcagcaattgttgcagttgtaagagggtgccagcgttaggcgcagcgtgctggtagaacggcaacaactgtggttgtatcaagaaggtagcagggctcacaccagctagctggctgaatggtagtagttgttgctgctgtaaataagcaggagagttcaatgctgccagttggttgaatggaagaaattgctgggggtaggcagcaggtagctggctgaatggtagttgttgttgttgcaaataagaagcagagttcaatgcagctagttggttgaatggaagaaactgctgttgctgagagtaggcagcaaggtttgctagcac

SEQ ID NO: 13377 - DNA, 587 bp, Zea mays
  Clone ID: LIB3061-096-Q1-N6-A11
aagaatctagaaatgtactttcttatttctgggaagccacaaacatcagacaaaaaactttattattgaactataactcataagaaatctaaaagagggcaccaccaatgatgggttgttggtagaatgctgttgggtttgtcaaagcaagttggttgaatggcagcaattgttgcagttgtaagagggtgccagcgttaggcgcagcgtgctggtagaacggcaacaattgtggttgtgtcaagaaggtagcagggctcacaccagctagctggctgaatggtagtagttgttgctgctgtaaataagcaggagagttcaaagctgtcagttggttgaatggaagaaattgctgggggtaggcagcagatagctggctgaatggtagttgttgttgttgcaaataagaagcagagttcaatgcagctagttggttgaatggaagaaactgttgttgctgagagtaggcagcaaggtttgctagcacaagttgttgtagttgttgtgccctgatgttttgtgccaataaatgcaccaaaggtaactgctgtaatagggctgatgattgttggaggaacaagggtgat

SEQ ID NO: 13378 - DNA, 393 bp, Zea mays
  Clone ID: LIB3061-096-Q1-N6-A12
atcgaacacccttgcgggccaatagcacattaaaatttggaaatgtaactttttttttttagggggccacattcattagccaaaaaacttcatttttgaattacaactaataagcaatctaaaagatggcccccccaatgatttttttttggtaaaaggcttctgggtttgtcaaaacaagttggacaaagggcaacaactgttgcagttgtaaaagggttgcggggttagccacaaactgctggtagaacggaagcaattgttgttgtttcaaaaaggaagtggggcttgttgtaactagctggccaaatgggagtagtatttgctgctggaaataaacaaaggggttcaatgcggccaattggttaaatggaaaaaattgtttcttcttaa

SEQ ID NO: 13379 - DNA, 604 bp, Zea mays
  unsure (1)..(604): unsure at all n locations; Clone ID: LIB3061-096-Q1-N6-A2
gaaacgaagactgaaggtgtggagtggtttatgagctggacatggcaagtactttattcatattttgcacgacaatggcactgcaaatgcagttgctccttgctcggctaggtaatgcagttgatgaactcgacggctgtggcgaccgcgccggcggtgatggcgtccttgacgaccttgcctctgtcgctgttgctggcgccggagatcagggcgccggacaaggcgcccccgatcatcgcgttcttccagtcactgcggccacggaccctttccacgccgtacaccatgcccacataaactccagcaacagtgccccaatatgcgccctccttgcacatcttcctcagggcatgctcaaccttgtgcttcgaaacatcccccctgtggaggcactcgaaggtctcctcggcagccaccttgcaggcgccgacggcgccgatcttgaggaagccgtcnacggtgcggttgaggaaggggtttcccatgtcgatgacgacgtcgatcttgggcgacctgaaggacccctagaagccgctgcggggcatcctcgacctactttcctggcagtggcaggtcagctgtgtctgtgtgacagtgcctg

SEQ ID NO: 13380 - DNA, 450 bp, Zea mays
  Clone ID: LIB3061-096-Q1-N6-A3
agtcagcattctagaacatatatttctgcagaattttgtgataatagcaggaaaaaaacactcttacggcatttcaaacacataaacacaatgtgacaaagacactgacagctagcgacatgatctgagcacatatcacagttagcaacaagtgcctaaacaacggcttccctatcaaagatccagctgaacttgaccatcctgggctcgtccttcttggccctgtcctcggcgcgctccgcgggccggcgcatcctcggcgcgagccctcagacgaagtccctggccctgcggccctcgccggagagcccgctctccagtgtctccagcttccaccgcttgacaaggaactcgacgatgtccgcgtagtcccgggcggtgtacactccgaggcgctgggcgacggcggcgaagtgctcgaacaggtccatgtcgcggccgtcgtgcatg

SEQ ID NO: 13381 - DNA, 519 bp, Zea mays
  Clone ID: LIB3061-096-Q1-N6-A6
gtaatattcatataatgcaggatatagattagtttagtacaaaagacaactaaaagactacatgataaaacatataaccctaagtatgtagatcataaatgcaatcaaggcacaatgtatatagagagtcatgtagatttttttcacttagcccccatagacccctcaaaagacccctcatttaattgggttgtatattccctaaaatcacatttgttaaggatgagaggagaatggtttcaaataaagggaacactagtacaatgcacatgcattgtgatgtaattattcgagcggggcttactcctacttgtttgggtccacgacaggatatcgttgttgttttgcactatatttgatgagtgactttgacaatctatcctattcctctcatttcaatcgtagaatcggtcatatggacaatgatgaagtagctagctaagagatagatgaatgatgagaaactaaatagtctccttgtctttctcacctacaatcaatctacacaaagctaatttt

SEQ ID NO: 13382 - DNA, 594 bp, Zea mays
  Clone ID: LIB3061-096-Q1-N6-A7
ggaaatgtaacttcttatttctggttggccacatacatcatccaaaaaactttattattgaattacaactaataagcaatctaaaagagggcaccaccaatgatgtgttgttggtaggaggctgctgggtttgtcaaagcaagttggacaaagggcaacaattgttgtagttgtaagagggttgcggggttagccgcaaactgctggtagaaaggcagcaactgttgctgtgtcaagaaggaagcacggcttgctgcagctagctggctaaatggtagtaatatttgctgctgcaaataagcagcgaggttcagtgcggccaattggttaaatggaagaagttgttgttgatgagagtaggcagtagctagctggctgaatggtaatagttgttgctgcaaataagcagcagggttcagtgtagatagttggttgaatggaagaaattgttgttgctgatagtagggagaaaggtttgccagagctacttggttgatcacaggtagcacgagttgctgcagctgctgtgccttgatggtttgtaccaatgactgcaccaaagatagggctggcgattgttgaaacaagggtgat

SEQ ID NO: 13383 - DNA, 549 bp, Zea mays
  Clone ID: LIB3061-096-Q1-N6-A8
agaatctggaaatgtaacttcttatttctggttggccacatacatcatccaaaaaactttattattgaattacaactaataagcaatctaaaagagggcaccaccaatgatgtgttgttggtaggaggctgctgggtttgtcaaagcaagttggacaaagggcaacaattgttgtagttgtaagagggttgcggggttagccgcaaactgctggtagaaaggcagcaactgttgctgtgtcaagaaggaagcacggcttgctgcagctagctggctaaatggtagtaatatttgctgctgcaaataagcagcgaggttcagtgcggccaattggttaaatggaagaagttgttgttgatgagagtaggcagtagctagctggctgaatggtaatagttgttgctgcaaataagcagcagggttcagtgtagatagttggttgaatggaagaaattgttgttgctgatagtagggagaaaggtttgccagagctacttggttgatcacaggtagcacgagttgctgcagctgctgtgccttgatggtttg

SEQ ID NO: 13384 - DNA, 271 bp, Zea mays
  Clone ID: LIB3061-096-Q1-N6-B1
accacaaaaaaagggggaaaggcaacttttttttgggggggggccccctccatcaacaaaaaaactttttttttgaacaccaactaagcagcaaaccaaaaggggcgcccccaccaatgttgtgttggggggaggaggcccctccttcttaaaaaggagggtggacagggggcaacatttgttgttgttgaaagggggttggggggtccgccaacaactggtggaaaaaaggcaccaactgttgttgtaaaaagaaagaaccccggtttgc

SEQ ID NO: 13385 - DNA, 509 bp, Zea mays
  Clone ID: LIB3061-096-Q1-N6-B10
cgagataaatgtcaatcaatatattgattatttctaggaaacacatgccggtttgagggcaccattatcgattacatctcatatgtaatctaaaagatggcacctccaacgatgggttgctgccacgacaaggcagggttcatcaaagagaactggctgtatggtaccaattgttgctgctgtaggaaggcagtgaccaatgggttaggcactgctagtggattaagtaactgttgtcgctgttgtaggtacccagcaaagttcgacacagtcagttggttgaatggaagcagctgttgcaagtaggcagcagggtttgccacagctagctgagtcagagctggtacaatctgttgcagcaattgttgttgcaggtatgtaggtgcattacccacaacgagagggctagatgaaagcagttgttgctgttgtaggtaggcggcagggttcaccatggctagttgactgagcgctggcagaaactgttgcaattgttgttgttgttggta

SEQ ID NO: 13386 - DNA, 582 bp, Zea mays
  Clone ID: LIB3061-096-Q1-N6-B11
ctagaaatgtactttcttatttctgggaagccacaaacatcagataaaaaactttattattgaactataactcataagaaatctaaaagagggcaccaccaatgatgggttgttggtagaacactgctgggtttgtcaaagcaagttggttgaatggcagcaattgttgcagttgtaagagggtgccagcgttaggcgcaacgtgctggtagaacggcaacaactgtggttgtgtcaagaaggtagcagggctcacaccagctagctggctgaatggtagtagttgttgctgctgtaaataagcaggagagttcaatgctgctagttggttgaatggaagaaattgctgggggtaggcagcaggtagctggctgaatggtagttgttgttgttgcaaataagaagcagagttcaatgaacctagttggttgaatggaagaaactgctgttgctgagagtaggcagcaaggtttgctagcacaagttgttgtagttgttgtgccctgatgttttgtgccaataaatgcaccaaaaggtaactgttgtaatagggctgatgattgttggaggaacaagggtgat

SEQ ID NO: 13387 - DNA, 466 bp, Zea mays
  Clone ID: LIB3061-096-Q1-N6-B12
cattaaaaccaaaactttattatgaccatgcatatattattggtcataccacacatgataatgtgtgtcgtcttactgcattattacatatatagatagagagagatggatagaggagatttcccaaatatcatgaatcagtagtagggcggaatggcagcggaaaccccacaggggttggtgcggtagctgggcagctggtactggtagagtccacccatggccggcatgttctgcgccatcatcatggccatggggttgagaccctgggctgccagcagctgctgctgctgctgcataaaagctggctcgtacaggctgctgctggcggcagcggcaccctcaagctgcatcatcatctgcagctgctgcgcgacggactgcacgtccatcatcctcatctgctgctggcagcactgttgccggagcggctggaacatggcgctcggctgcccacacccggcgt

SEQ ID NO: 13388 - DNA, 460 bp, Zea mays
  Clone ID: LIB3061-096-Q1-N6-B2
aaccacataatgagatcttcaaagctcaggtcacagacacacaggttcacattatgttccaaaaactttcatccaggcccagagcagttttcaaataacataaaacctctatcacataatcattggtggcaaaaacaaaagagatgaggaaaaggcggtccgacaaccatcagatgaccgtgaagagtctagtcgatctcctggagagaggcgccggtggcggcgccaccagcggcggctgcagcgacgtcgtcggcagtaaacttgcccttagccttgtcggcggcgcggccccgggccttgcggtcgaggagagccttacggtccttgtcgagcttcagcttggtgaccatcactttggaggggtggatgcccacgttcacgggggagccgttcaccttctcgcgggtgatccgctcgacgtggatgacccagcggcgggggtacacctgcaccacct

SEQ ID NO: 13389 - DNA, 75 bp, Zea mays
  Clone ID: LIB3061-096-Q1-N6-B3
aaaacaaatacatgcccagtaaatgtgcaaaccagtccacaatggcctacgaagaacatcgactctagtagaaat

SEQ ID NO: 13390 - DNA, 479 bp, Zea mays
  Clone ID: LIB3061-096-Q1-N6-B8
agaaatgtactttcttatttctgggaagccacaaacatcatccaaaaaacttcattattgaagtataactcataagcaatctaaaagagggcaccaccaatgatgggttgttggtagaacgctgttgggtttgtcaaagcaagttggttgaatggcagcaattgttgcagttgtaagagggtgccagcgttaggcgcagcgtgcaggtagaacggcaacaactgttgttgtgtcaagaaggcaacagggctcacatcagctagctggctgaatggtggtagctgttgctgttgtaaataagcagcagagttcaatgctgccagttggttgaatggaagaaattgctgggggtaggcagcagctagctgactgaatggtagttgttgttgcaaataagcagcagagttcaatgcagccagttggttgaatggaagaaactgctgttgctgagagtaggcagcaaggtttcctagcacaag

SEQ ID NO: 13391 - DNA, 580 bp, Zea mays
  Clone ID: LIB3061-096-Q1-N6-B9
agcacagcacacggggctatacatgcacaatagtggcatccaaaattacacgacacaacccccctcccacttcgcccctcggttcacccagtcatttcccgaccaaccaacagcaatcaacaccgacaccaggaatgactctttatctggtgaccaccaagaattatcggcgcaggacgacttaacacgacgactaaagaagcaaaaaaaaaactccacatgtagtctcctccttctcgcaggtgccagggcagggcagggcagggcacggccatccgtaagtccccctcctcacttgctgccgcacttgaagccatggcacaccgacaggatgatgatgaggatgagcgcgatgatgatgcccagcacgatcagcttgatcttcatgttttggagccacatcttccgccgcaccttggtgccctgctgcctgaaatcttgtgcctgagaacgcagattttcagttttgtcgacaagcagttcaatcttctcgccacggtcaagaaccttctcaatgttttccatcataactcctttgacttcggagacttgggccttcaccttggcaagcttgctaacc

SEQ ID NO: 13392 - DNA, 584 bp, Zea mays
  Clone ID: LIB3061-096-Q1-N6-C11
aagaatctagaaatgtactttcttatttctgggaagccacaaacatcagacaaaaaactttattattgaactataactcataagaaatctaaaagagggcaccaccaatgatgggttgttggtagaacgctgctgggtttgtcaaagcaagttggttgaatggcagcaattgttgcagttgtaagagggtgccagcgttaggcgcagcgtgctggtagaacggcaacaactgtggttgtatcaagaaggtagcagggctcacaccagctagctggctgaatggtagtagttgttgctgctgtaaataagcaggagagttcaatgctgccagttggttgaatggaagaaattgctgggggtaggcagcaggtagctggctgaatggtagttgttgttgttgcaaataagaagcagagttcaatgcagctagttggttgaatggaagaaactgctgttgctgagagtaggcagcaaggtttgctagcacaagttgttgtagttgttgtgccctgatgttttgtcccataaatgcaccaaagtaactgatgtaatagggctgatgattgttggaggacaaaggtgat

SEQ ID NO: 13393 - DNA, 603 bp, Zea mays
  unsure (1)..(603): unsure at all n locations; Clone ID: LIB3061-096-Q1-N6-C2
ttttttttttttttttttttttttttttttttttgtttttttttttttttttttttttttttttttttttttttttttttttttttttttttttttttttttccttttattaaaaaaattattttttatttaattaaaaatttaaaagggggggggggaaatttttntttttggttttttttttattttttttttttttttaaaaaaaaaaaaaaaagggccctttttttttgggggggggcccaaaaaaaaaaaaaaaaaatttttttgggggcccccccccaaaaaaaaaaaaaaaggggggcccccccaagggggggggggggaaaaaaccccgggggtttaaaaaaaaaaggggggggaaggggccaaaatggggcaaaaaaaaaagggggccccagtgggggcccgggggggggaaaaaaaaaaaaaaagggggggttaaaaaaaagggggggggggaaaaacccccattggggggaaaagggaaaatgtggggcccctaaaaaaaaacgggggggacccccgcccccccgggggaaaaaaaaaaaaaaagggggggggggggaaaagggccccggaaaaaaggaaattttttgtttg

SEQ ID NO: 13394 - DNA, 571 bp, Zea mays
  Clone ID: LIB3061-096-Q1-N6-C3
aaaacggacaccagcatttcttgatactgtaggtaaaatagtttcacattggtcaggactcagggttaaacctgtaatccattcgattcatgccttccgctttggcttgtactcccactttatcgtctgatacaaaaaaaggatccaattccggcaacactcgattctctaggcatacctctaagcagcacgcgacaccagccccacaaatccattttataagtttttctcctgctaattttgacggaaaatataaatgcatattactaataattgaattaaaaaacgcatcgctataataatacatcactcgtcagaacagccaccggtgaatttttcttgggagaggaggggaggaaagcaatcaagagcttgaggtagtaccactttgctgagtcgaataacgcaccgcaaggacatggtagtggaacacttctgtccaataagctcttcctcatctgtcagtttttcagcacgactatctactcactcaagttgcatccacggatgtaaggggtgatcatacttgatatacttggtccaatatgggcggtacttggtcattgctagc

SEQ ID NO: 13395 - DNA, 432 bp, Zea mays
  Clone ID: LIB3061-096-Q1-N6-C4
cggggaaaaatcccacccaattttttgtttttttttgggaaccccctcccggtttgggggcccctttttcgggccccttttttttgtaaccaaaaagggggcccccccaccggggggttgttccctccccaggccgggtttcttaaaaaaaacccggttttttggcaccattttttttttttttgggaaggccccccccaaggggttcccccctcccaagggataaaaaaccttttgccctttttgggggccccccccaaatttccccatattttgttggttaaagggaacccctttttccaagtagccaacagggtttccccccctttgctgatttaaagctggcccaatttgttgcaacaatttttgttgcaggtttttagggcctttggccccagggagggggtttaataaaaaccttttttttttttt

SEQ ID NO: 13396 - DNA, 425 bp, Zea mays
  Clone ID: LIB3061-096-Q1-N6-C5
ccgggaaaaatcccaaccaattttttgtttttttttgggaaccccttttgggtttgggggcccctttgccgggcccctttcatttgtaatcaaaaagggggcccccccaccgtggggtttctccagggcggggtttttaaaaaaaaactggttttttggcaccatttttttttttttttccaggaaggtcccccccaaggggttcccccctcccaagggttaaaaaaccttttgccccttttgggggccccccccaaattttgccccccccctttggttaaatggaaccaccttttttaagtaggccccagggtttcccccactttgctgagtcaaagctggcccaatttgttgcaccaccttttgttgtaggtccctaggggctttccccccccggagggggctaaataaaaatttttttaggt

SEQ ID NO: 13397 - DNA, 598 bp, Zea mays
  unsure (1)..(598): unsure at all n locations; Clone ID: LIB3061-096-Q1-N6-C6
tgggtgaatttttttttttttttttttttttttttttttttttttttttttttctttttttttttttaaaaaataaattttttttttaagaaaaaaaaaaaaaagagttttattatggggggggcggtaaagnnaatagagagggggccacaacaaggggcgcggtgggaagagatctccgcctcttttgggggggggttaaaaaaaaaaaatttttttgggcccctccccccaaaaaaaaaaaaaggggggggccccccaaaagggggggagggaaaaaaattgttgggggttaaaaaaaaaaattgggggggggagaaaaatttttggtttggaaagggggggcccggtggggggcccccgggggggaaaaaaaaaaaaaatgggggggtagaaaaaagggggggggggaaaaacccaccccgggggggggagggggggggttttcctcttttaaaaaaaaggagagaccgccccccccctggggggggaaaagaaaaaaaagggggggggggggaaaaaaaaaaccccaaaaaaaaaggggggtgntcccaaaaaaaaaaaaacctggtgaaccaaatgtgggggggccccgggg

SEQ ID NO: 13398 - DNA, 490 bp, Zea mays
  Clone ID: LIB3061-096-Q1-N6-C7
atgggaatccatagacataatttacgagcaatacatagcattgcagtttgcacatctcatgcaaaacaaataagccacggttacatcgaatgcgccgcacacaaattaggaactctgcccctcacgaaaatttgcaaaattttacctccgcatctgcgataggttttgactatttatctataccagtactagtactacatagctcaatgtgctcctacatctgtttggaacctcgagcaacaacaaatacgagtgctggacaccaacaacgtaaagaattcctatttgcttggctttcatgacacgagctgaactttcttgccgtccacattgaatttcctgcttccttgaagctttttcttcaaaaacaacagggcttcgcgtctaccagagaagctggaaaatacaacatttgagtgttcctcaacggcgaccttaagatccttcaatttcattgactgagatggggcctgaccaaatattcttttgc

SEQ ID NO: 13399 - DNA, 526 bp, Zea mays
  Clone ID: LIB3061-096-Q1-N6-C8
atatcgagataaatctcaatcaatatattgattatttttaggaaacacatgccgctatgagggcaccattatcgagtacatctcatatgtaatctaaaagatggcaccaccaacgatgggttgctgccacgacaaggcagggttcatcaaagagaactggttgtatggcagcaattgttgctgctgtaggaaggcagcgaccaatgggttagccaccgctagtggattaagtaactgttgtcgctgttgtaggtacgcagcagagttcgacacagtcagttggttgaatggaagtagttgttgcaagtaggcagcagggtttgccacagctagctgagtaagagctggtacaatttgttgcagcaactgttgttgcaacaactgttgttgcaggtatgtaggtgcattgcccatagcgagcgggctagatgaaagaagttgttgctgttgtaggtaggcgatagggttcaccatggctagttgactgagcgctggtagaaactgttgcaactgttgttgttgttgg

SEQ ID NO: 13400 - DNA, 445 bp, Zea mays
  Clone ID: LIB3061-096-Q1-N6-D1
ggaaatgtaacttcttatttctggttggccacatacatcatccaaaaaactttattattgaattacaactaataagcaatctaaaagagggcaccaccaatgatgtgttgttggtaggaggccgctgggtctgtcaaagcaagttggacaaagggcaacaattgttgtagttgtaagagggttgcggggttagccgcaaactgctggtagaaaggcagcaactgttgctgtgtcaagaaggaagcacggtttgctgcagctagctggctaaatggtagtagtatttgctgctgcaaataagcagcggggttcagtgcggccaattggttaaatggaagaagttgttgttgctgagagtaggcagtagctagctggctaaatggtaatagttgttgctgcaaataagcagcaaggttcaatgtaaacaggtggttgaatggaaaaa

SEQ ID NO: 13401 - DNA, 603 bp, Zea mays
  Clone ID: LIB3061-096-Q1-N6-D10
ggagcgaaacaactgcactgtaaaattgcataagatctgaaagaggtgtatagttcattttgcatcagaaacctcatgtaactaggatgtacaggcgtgaccatgtgaagttgaatgcttctattactgtattatcaaaatggtggatacgacgcaactgctaagcagcaacacaagccacccggatcttacattatggaacttttcaaagttatagaatctacaaaatctggacatgatgcctatagacagcttagcaagagctaagcaagcgaaaacaaaactgagaaatataacagcaagactcctgttctccatgtcagtctgtttttgccgaaatatttcaaattccgatctgagtagagcattatccaggaccagctggtttagttgcgaggaagcaactaacttccatgagaggaatccatcaacttcattcataatgctatctttgctgctctcaagattcttcagctctgattggatcttctctaacaagacatctttgctatcaatatcggcatcgaaatccttaaatatttgcccatatctgctgttcaactccactaggtacctctccaagacagagaagctcacatcaag

SEQ ID NO: 13402 - DNA, 577 bp, Zea mays
  Clone ID: LIB3061-096-Q1-N6-D11
agaatctggaaatgtaacttcttatttctggttggccacatacatcatccaaaaaactttattattgaattacaactaataagcaatctaaaagagggcaccaccaatgatgtgttgttggtaggaggccgctgggtctgtcaaagcaagttggacaaagggcaacaattgttgtagttgtaagagggttgcggggttagccgcaaactgctggtagaaaggcagcaactgttgctgtgtcaagaaggaagcacggtttgctgcagctagctggctaaatggtagtagtatttgctgctgcaaataagcagcggggttcagtgcggccaattggttaaatggaagaagttgttgttgctgagagtaggcagtagctagctggctaaatggtaatagttgttgctgcaaataagcagcagggttcagtgtagacagttggttgaatggaagaaattgttgttgctgagagtagggagaaaggtttgccagagctacttggttgatcagaggtagcacgagttgctgcagctgttgtgccctgatggtttgtaccaatgactgcaccaaagatagggct

SEQ ID NO: 13403 - DNA, 577 bp, Zea mays
  Clone ID: LIB3061-096-Q1-N6-D2
gaatctggaaatgtaacttcttatttctggttggccacatacatcatccaaaaaactttattattgaattacaactaataagcaatctaaaagagggcaccaccaatgatgtgttgttggtaggaggccgctgggtctgtcaaagcaagttggacaaagggcaacaattgttgtagttgtaagagggttgcggggttagccgcaaactgctggtagaaaggcagcaactgttgctgtgtcaagaaggaagcacggtttgctgcagctagctggctaaatggtagtagtatttgctgctgcaaataagcagcggggttcagtgcggccaattggttaaatggaagaagttgttgttgctgagagtaggcagtagctagctggctaaatggtaatagttgttgctgcaaataagcagcagggttcagtgtagacagttggttgaatggaagaaattgttgttgctgagagtagggagaaaggtttgccagagctacttggttgatcagaggtagcacgagttgctgcagctgttgtgccctgatggtttgtaccaatgactgcaccaaagatagggctg

SEQ ID NO: 13404 - DNA, 132 bp, Zea mays
  Clone ID: LIB3061-096-Q1-N6-D3
acatcatccaaaaaactttattattgaattacaactaataagcaatctaaaagagggcaccaccaatgatgtgttgttggtaggaggccgctcggtctgtcaaagcaagttggacaaagggcaacaattgtt

SEQ ID NO: 13405 - DNA, 566 bp, Zea mays
  Clone ID: LIB3061-096-Q1-N6-D6
gactcaaaagacatgttgagcattatgagcacatctcaacaccatatgttcgtaatgcctcaaacaaagcatacctagagttcccaaccaaccaccacaactcagcgggagcagcagcaacaacaacacaacgaggaagacaacaatgacaagggccatttacaatctcactcaggccaccacgcattcccaaagactgcagcaatcgcacagcctgaatataaccctataagtctataacccttttttcagaaatatgattgtttctcattttggagctaaggtgtaacagaatcagcatcccaaaactgagggccaagagtcatggaagtaggtgcacccgcttatcggcggtgcaggcactgctcattattgttggcacctttgtcagtgggggtactatggattcagcttccatacttcacagccttgcatgtaacagttgggtttcggatctcgtcctggctttggatcaacctgatctctaagctgctggtcgatgggtcgaagccggccattttatagtcttccacagttcttttcagaagtgcctgcaaactggaaac

SEQ ID NO: 13406 - DNA, 507 bp, Zea mays
  Clone ID: LIB3061-096-Q1-N6-D7
ggggccaagccttgtccatttaaattcccaaacccctggtttttccttttcacattgaacattccctgtccaagtcacaaattaaacccgccttttttgccaccccttttttcttttagttcgaaaaacaaaacaagttggcagcccggtttttggggttgaaattacaggctttaccaggtaaacaagcaagctgttgggccatccatgcccattttttaaaacttggaaataaaatcctaaatttgctggttgaccttgtgggcctttttctttttgacaaaatggcccgccccggggattaccaccacctttttaagccccgggacgttggccttaaacccccccttggggatttaaccctggatcccccggtagtggtaggtgaggtccccctcccccacaataaacctggggggcccccccacctttgggtccccccacggggcccccagtttccaattggggtccatttttcggtaataatttatgggccccctgaaaccc

SEQ ID NO: 13407 - DNA, 605 bp, Zea mays
  Clone ID: LIB3061-096-Q1-N6-D8
gaattccaactggaacggtgtttcgaattaaagcaaattaactctggtactggtacattcgactcgaataggatccaaaaatactcacggcaatatcactggccacacaaagcagacatatagctatggataaattaggctggtgcattgcccagccaccaccatcgccagcaccccaggggaaggactgatcgaaagtcacgcctagatcttgttgaaggcaactatgtcgcaactctgtacgtactcgttaactggctcagcgcacagatagtcctcaatgagagtgtcgacagagacaaggtcgtcgacgatggtcatcatgatttgcagcttcttgataccatatccaactgggacaagcttggatgcgccccagagcaacccttccatctggacactcctaacagcttcctcgagcttggccatgtcagtctcatcgtcccatggcttcacatcaagtaaaactgatgacttcccagattctttcttcttgccagaagccttggcagctgcagcacgctcttcagcagccttcttctcatcttcggtctcctcaccaaaaaggtcaacatcatcgtcgtcgtcctcctcagcaactgggg

SEQ ID NO: 13408 - DNA, 508 bp, Zea mays
  Clone ID: LIB3061-096-Q1-N6-D9
atcagcctgggaactttttttttcccggttaaatcataaaaaatctagaagatggccccccccatggggggcgattgcaataagggggggggattcgtcaaagcatgttggctaaatggcaccaattgttgttgttgtaagaaggcaacaatgtttgccacattttgtgggtagaatggcaacaattgttgcttttgcaagaaggcattaatgtttcccacaacctgggggtaaaatggcaacaattgttgttgtcccaagaaaaaaacaatgttttccacaccttgcaaatggaatggcaaaagcttttgttgcaataaaaaggcattagggctccccacaagttggttaaatggtaatagttgttgggcctgcaagtaaacagcagggttcaccccaacttgttgattgaatggaaaaaattgttgttgctggaaataaacaacaaggttccctgcaactacttgattgattgttggtagcaactgttgttgtagttgttgggtcc

SEQ ID NO: 13409 - DNA, 197 bp, Zea mays
  Clone ID: LIB3061-096-Q1-N6-E10
aagcaagcaaaataaagtccttgtttcagagaagaaaatgatgtagctattgtgtcttcgatatggtagcaaaaaatagcaatacgattgcccattgcacttgagaagcaccaccacactctggtaccgccacggctcagggggacttgcttccagtgctggagccactggggtcagaactatcagtattcacatga

SEQ ID NO: 13410 - DNA, 160 bp, Zea mays
  Clone ID: LIB3061-096-Q1-N6-E11
acttatcatatcacatgattctgaagccacccagtacattattagtctactattccagaagatttgcaccttgcataccaacgcatgtatatcaacaaaatgcagccttgtttcgaactctatgacagttcgcggaagcgctttgcggcagcaacaacag

SEQ ID NO: 13411 - DNA, 538 bp, Zea mays
  Clone ID: LIB3061-096-Q1-N6-E2
cacattagaatctggaaatgtaacttcttatttctggttggccacatacatcatccaaaaaactttattattgaattaccaactaataatcaatctaaaagagggcaccaccaatgatgtgttgttggtaggaggctgctgggtttgtcaaagcaagttggacaaagggcaacaattgttgtagttgtaagagggttgcggggttagccccaaactgcttgtagaaaggcagcaactgttgctgtgtcaagaaggaagcacgacttgctgcagctagctcgctaaatggcagtagtatttgctgctgcaaataagcagcggggttcagtgcggccaattggttaaatggaagaagttgttgttgctgagagtaggcagtagctagctggctaaatggtaatagttgttgctgcaaataagcagcagggttcagtgtagacagttggttgaatggaagaaattgttgttgctgagagtagggagaaaggtttgccagagctacttggttgatcacaggtagcacgagttgctgcagctg

SEQ ID NO: 13412 - DNA, 442 bp, Zea mays
  Clone ID: LIB3061-096-Q1-N6-E3
ccaaagggggggggccttttggggggaccccccttttttgggttttcggggggggggccccccttttttttttgggcaccccccctttgggttttgggggggggggggttttttgggggggggggggggcccccccccccccttgggggggggttttgggcttttttaaaaattcccccccccttttggggggtttggggggacccccaaaccccccagggggggggggggggccccccccgggtttgggggggcccccttttttaaattttttggggaaatttttggggcttaatttgcccaaaaaaataaccccctttgggggggaaacccggggggttttttgggggttttaacccgggtgggggaaaggggttttcccaggggggccccttgttcttttggaatttaagcacatttttttaatttgggcccccgtttt

SEQ ID NO: 13413 - DNA, 578 bp, Zea mays
  Clone ID: LIB3061-096-Q1-N6-E5
acacttcctcttattttggccaattgtattcacaaggtatgacgctactgatgaaactgcacaaagtccaccgaattgacaggcgcccttgggtacatagcagtgagactggaaaggtaacaaatggaatacggatacgtagataaccacggaaacccagcaatgctaaggtattgtttggtcactgcataaccgacgatgatggtcacaacgcctcgtgatgcctcgtgccttaacagcacccggatgatctctgggcccggttgccacccgccacgtccacggtatctggcacatacagttcttcctctggctcattcttcagagcgttcttcacgatacactggaaggcgtcttccacgttcgttccgtccttagcagacgtctcaaagtacgggatgttccctttggaagcacaccatgcctttgcctttttctcagataccacgcggctgttgccaccatctacatcaactttgttacccaatagaacaaaagggaaattatcaggatctgatgggctagcctgaattagaaactcttctcgccagttgttcaggttgtcaaatgatttcata

SEQ ID NO: 13414 - DNA, 274 bp, Zea mays
  Clone ID: LIB3061-096-Q1-N6-E6
actaggggttaacagtttaatcggtggaagttacataaaattaaacttggggttcaaattattcatacattccgaactgggcgctgttcaacagccttgccgtagtaatacttgcagatcgatgttcaacagctagccttgcagttaaatttatttaaaggcattggtcgacatttggtgcttaatttgcactgaccaacttaaagaggcaggtagcttgcttgcttgacggaggttttgttttacggccttaaaaaagcccggtggggaccgc

SEQ ID NO: 13415 - DNA, 590 bp, Zea mays
  Clone ID: LIB3061-096-Q1-N6-E7
cacattaaaatctggaaatgtaacttcttatttctggttggccacatacatcatccaaaaaactttattattgaattacaactaataagcaatctaaaagagggcaccaccaatgatgtgttgttggtaggaggccgctcggtctgtcaaagcaagttggacaaagggcaacaattgttgtagttgtaagagggttgcggggttagccgcaaactgctggtagaaaggcagcaactgttgctgtgtcaagaaggaagcacggtttgctgcagctagctggctaaatggtagtagtatttgctgctgcaaataagcagcggggttcagtgcggccaattggttaaatggaagaagttgttgttgctgagagtaggcagtagctagctggctgaatggtaatagttgttgctgcaaataagcagcagggttcagtgtagacagttggttgaatggaagaaattgttgttgctgagagtagggagaaaggtttgccagagctacttggttgatcacaggtagcacgagttgctgcagctgctgtgccctgatggtttgtaccaatgactgcaccaaagatagggctggcgatt

SEQ ID NO: 13416 - DNA, 532 bp, Zea mays
  Clone ID: LIB3061-096-Q1-N6-E8
ctctggaaaattaaattatatttgacaatgactttagacaattctccatgttcgagtaaaaaaaggtttcttcagttcacactattgtatgtcctgtaatcgattttacttaaatgtttctacgatgagaacgtacccaagttacacacctcatgggctcatggcaaatagtaaaattaagacaaatgaaatttctgggttacattgtcatctcaaggtcaggggttacggatttcctcttggatctattctctgtctgcggattgtttgccgctacatgtttctctgatgtctcaacttcattatcaccatccgggtctttcaaacctaaattcaaatttaggtctgttccaccgccgtttttaccagaatctcgaccatcctcatctgttgcctgagattcatccataggtgtatcattgatatcagtctttccatttgatggctcagtttcattcgaagatggatctccatcattagccttgttctcatcatcagatttggtagattcttgcctttgctcttccattaa

SEQ ID NO: 13417 - DNA, 461 bp, Zea mays
  Clone ID: LIB3061-096-Q1-N6-F1
ccagatctaaaaaataagaaacctgtcttttcttttccgggaccccttaaatgttttccaaaacccggttgtgggcgccccaatggtggggggggtgttaaaaagatccttttttcatgtcgcccactttaatcaagaatggtgtcttaaatttaacaaagatgccgggtgccttgccataaataatgtaaatttttgcgcttgctgacccaataccagaaaacccatttgaaaaaacaaaatctttagaacctttggtttttgttttaaaaatgctttttatgcttttttggagcctatacatagttcctccatatgcttttatgattcctgaaggatccaagacgagcggtttttgtacgttgtttgccttagcaaaccaggggacaaacctttttcctacaggtgggaaaactaaatttgaagcagccgaactttttttttgggggcaattttttttt

SEQ ID NO: 13418 - DNA, 159 bp, Zea mays
  Clone ID: LIB3061-096-Q1-N6-F10
aatctagaaatgtactttcttatttctgggaagccacaaacatcatccaaaaaacttcattattgaagtataactcataagcaatctaaaagagggcaccaccaatgatgggttgttggtagaacgctgttgggtttgtcaaagcaagttggttgaatg

SEQ ID NO: 13419 - DNA, 385 bp, Zea mays
  Clone ID: LIB3061-096-Q1-N6-F11
ggcaacagaagccaattcaaaaccactgcatagcagggcttattatcttatttatatggagcaaaaggcacttaaatgatctcttatgacacatgccagaagggaaacaacagacttcacaattacaagggcggaagcttcataggattaccataacagatagctgacgggcttcaaaaaaagattgaacacaggggaacatcacacagataaaaacatatcacccttgtactaacagggaggcggggcttgctggattttaaatcaattgcttgctggattttaaatcaatacacagtcctgccattaccatccaagatcatattcttgaaagccccaccactagggatcataggcaacacatgctcctggtgtgggacgatta

SEQ ID NO: 13420 - DNA, 575 bp, Zea mays
  unsure (1)..(575): unsure at all n locations; Clone ID: LIB3061-096-Q1-N6-F12
aattacaattagtattcttattcaaatatcatagtacaaacatcataatgtatggtactttattgcttaacaccgttatatgagtataacggctaggtagacacaattcttcaattgcaaacaccactaatgtcattgctgctgcatggattattttggtagtatgagtggtacaagccgcacattgatggtaggtattgtgctgctgtcaagattgccaccgcactttgagtagcttgttgagatccacataactcacatggttgttgttgttgctcctcctggattatggattgaaccatgttgtagattgcttggtgaatgtattgtggctcaatctgcctaagatcatgacaacattgttgctgcaatacctggcagctacttggttgtatcaaacgtgattggagaaaaggcattaccaaagggctgcactgctgccttaggaattcatgacaattttttagatttgagctactgctatagtagttatagctgcaccttgtagtctgttgctgctcctggcaatgacattggtgctgntgtgatttttcctggccctgctgatattgctg

SEQ ID NO: 13421 - DNA, 484 bp, Zea mays
  unsure (1)..(484): unsure at all n locations; Clone ID: LIB3061-096-Q1-N6-F2
gacgggttctttttttttttggggagcttcagggggggggcgtagnagtttttgtttttttttttttgagggaccgggggggggcccttttttttggggggggcccccccccgtgggaaaaaaatttttttttggggacttacccccccgcggggggggccccccgggaattcccgccccggccctggggggcccccccttttccttttgggggggggtttaaagggggggggaaaaaggggggaagggggttccccgggggaaaattttcccccggaaaaaacccccccaaaaaaagggcggggaaaaaaaagggaaaaggggggggggcccaaggggggggcccccccccctttggggggggggcccccccgccccctttcccaggggggaacccccggccccccccgttataaaaaaaccgcccccccccgggggggggggggttttttttggggcccccgggggggttttttttttcccc

SEQ ID NO: 13422 - DNA, 463 bp, Zea mays
  Clone ID: LIB3061-096-Q1-N6-F5
attcctcatagttattatcattattgtaacgaacacgcgagaatattgcgagcccacgtcagagctacgtcattctggatttgcacgcgcacagtacacatgctgcgccttgcacgtcgcgccgactcactcttttttttttaaccctggtagctagtactggtcgccgccggagaagatgctgcactcctggggctccgacagccggcacatcatcggcaaccccgcggcgtactcccgggccttcgtaagcctcacgcggccgatccttggcccggtggtgccgggacgacacggtggatacatctgcgtttggtatccctctcctgcccggctgcaggggtagtagtagcccccctgtcctcctcctcctccctgcggcggctgcggcgatcttagccatctcttctcagcgccggatcactctcacaaatctttgtcgagctgtcgctacttgtttgat

SEQ ID NO: 13423 - DNA, 592 bp, Zea mays
  Clone ID: LIB3061-096-Q1-N6-F8
atcgagataaatctcaatcaatatattgattatttctaggaaacacatgtcggtatgagggcaccattgtcgagtacatctcatatgtaatctaaaagatggcacctccaacgatgggttgctgcaaggcagggttcatcaaagagaactggttgtatggcagcaattgttgttgctgctgcaggaaggtagcgaccaatgggttagccactgccaatggattaagtaactgttgtcgctgttgtaggtacgcagcagagtttgacacagccagttggttgaatggaagcaactgttgtaagtaggcagcagggtttgccacagctagctgagtcagagctggtacaatttgttgcagcaactgttgttgtaggtacgtaggtgcattgcccaccgcgagcgggctagatgaaagtagttgtaggtagacggcagggttcaccatggctagttgactgagcactggcataaactgttgcagctgttgttgttgctggtatgcagctacgttcgccagagcaagtgggttggatgcaagcagctgctgttgcaagtaggtgacagggttcaccacggctaggtggctcagtga

SEQ ID NO: 13424 - DNA, 602 bp, Zea mays
  Clone ID: LIB3061-096-Q1-N6-F9
gaacttaaaatatagatctctaatcttttattactgagaagttgcacatatcagtatgagaaatttattattacagtataaagcataaaaaatctagaagatggtaccaccaatggtgggctgatgcaataaggtggtaggattcgtcaaagcgagttggctaaatggcagcaattgctgttgttgtaagaaggcgacaatgtttgccacatcctgtgggtagaatggcagcaattgttgttgttgcaagaaggcgttaatgtttcccacaacctgtgggtaaaatggcagcaattgttgttgttgcaagaaagcagcaatgtttgcaacaacttgtagacggaatggcagcaactgttgctgcaataagatggcagcagggctcccgacaagttggttgaatggtagtagctgttgtgcctgcaagtaagcagcagggttcaccccagctagttgattgaatggaagaaattgttgttgctgaaggtaagcagcaaggttcgctgcaactacttgattaattgttggaagcaaccgttgttgtagttgttgtgctgtgattctttggagatacagattcactaagggatggttgtgcaata

SEQ ID NO: 13425 - DNA, 472 bp, Zea mays
  Clone ID: LIB3061-096-Q1-N6-G1
ggggggccccccctttttttaggggggggcccggcggctaaaaataaaaaaaaaacccccccaaaaaaaaaaaaggggggggggccacccctccccccaaaaaaaaaaaaaaaaggggcttttttggtttgggcctttttttttgggttaaaaaaaaaaaaaaacctgggggttaaaattaaaaaaaattttaaaaacccttcccccttgggggcctttttttatccaaaaaaatttgggggggcttttttttggggtttttgaaaattttaaaaaaaaaaacacgggcctaaaaattttttttttaaaagggccccaaggtcccccccccgcggtttttttgggttgccccccataaaaccccgggggggggtttttttttttttggaaacccccccctaaaaacaccatggggcctttttttaaggaaaaagggttttgcaaatataaaacccaaaaaaaaccccggggg

SEQ ID NO: 13426 - DNA, 597 bp, Zea mays
  Clone ID: LIB3061-096-Q1-N6-G12
gattgaaaattatcaatacattacaataacacccacaatgtcaatcaggttccgttgcctgtaagcttacaacaaagcataaataaacagtccaaactgatacacatggataacaaatggctgcattttacttgacattataaaacgaatatgtcatttgcgactacatccccatcatgcatgcttcgaaccacttgctagtatcatcaagacagaagccatatggaccatgcatgatgtcaagatccatcaattttccttattatctaataggttgtcataaaactcccacatactaatctcagctgccacgtcctcactgacatcaccttgcaaaatagaaggaatatcttcactttccatctcttggaaaataggttgttgattcatctttttcgcagcatcaacaccagccatgggtgttgcattagtcaaagtaggaacaatcacgccatcatttcttcctatcatccttgaaggaccatcaaaagtaggttgaatgaaaattggcatgccagcttgtggtaagaaagagcatccattcaggttcctactagcttcattgcccaatccattacttaaaccatatgtcattct

SEQ ID NO: 13427 - DNA, 537 bp, Zea mays
  Clone ID: LIB3061-096-Q1-N6-G4
aagggggtgatattagtatacacactgaaagttcatcaaagtaaactgatagcgtaacaaatacattcggcacaacaaaactaaaaaaattatgtgttggtcgtgttgtaagccgcgtctgcagaggacgtatccatgtcattcagaccaagttcctcgttctgctcccaactcctctgatactcttcaatggttagttggctgtcatcttctaacgaatcagtagccggggccacaaatgaagccgccaatccatcatcaattattagagtccaggcttcttgtaaactcagaagcttggatagtctctccttgaagtcatcccatttcttctttttccattccagtgtactatcgcctaattgaaatccatgtattctctccagagcctcacatattttcacaattaaaccttcaacagttgtgaccataccacccaacgttccacatgaaagttccaactcaagttcaggtacttttacgctagctgaatctgactttatgacatcacgagtaagggcttgtgcattttgaaca

SEQ ID NO: 13428 - DNA, 602 bp, Zea mays
  Clone ID: LIB3061-096-Q1-N6-G5
cagataaaaaactttattattgaactataactcataagaaatctaaaagagggcaccaccaatgatgggttgttggtagaacactgctgggtttgtcaaagcaagttggttgaatggcagcaattgttgcagttgtaagagggtgccagcgttaggcgcaacgtgctggtagaacggcaacaactgtggttgtgtcaagaaggtagcagggctcacaccagctagctggctgaatggtagtagttgttgctgctgtaaataagcaggagagttcaatgctgctagttggttgaatggaagaaattgctgggggtaggcagcaggtagctggctgaatggtagttgttgttgttgcaaataagaagcagagttcaatgaacctagttggttgaatggaagaaactgctgttgctgagagtaggcagcaaggtttgctagcacaagttgttgtagttgttgtgccctgatgttttgtgccaataaatgcaccaaaggtaactgttgtaatagggctgatgattgttggaggaacaagggtgataaaggtaagatgccagctgcgattgcctgttggatcctgtagggttgaagaattgggtttt

SEQ ID NO: 13429 - DNA, 534 bp, Zea mays
  Clone ID: LIB3061-096-Q1-N6-G6
ctggttggccacatacatcatccaaaaaactttattattgaattacaactaataagcaatctaaaagagggcaccaccaatgatgtgttgttggtaggaggccgctgggtctgtcaaagcaagttggacaaagggcaacaattgttgtagttgtaagagggttgcggggttagccgcaaactgctggtagaaaggcagcaactgttgctgtgtcaagaaggaagcacggtttgctgcagctagctggctaaatggtagtagtatttgctgctgcaaataagcagcggggttcagtgcggccaattggttaaatggaagaagttgttgttgctgagagtaggcagtagctagctggctaaatggtaatagttgttgctgcaaataagcagcagggttcagtgtagacagttggttgaatggaagaaattgttgttgctgagagtagggagaaaggtttgccagagctacttggttgatcagaggtagcacgagttgctgcagctgttgtgccctgatggtttgtaccaatgactg

SEQ ID NO: 13430 - DNA, 511 bp, Zea mays
  Clone ID: LIB3061-096-Q1-N6-G7
agaaatgtactttcttatttctgggaagccacaaacatcagataaaaaactttattattgaactataactcataagaaatctaaaagagggcaccaccaatgatgggttgttggtagaacactgctgggtttgtcaaagcaagttggttgaatggcagcaattgttgcagttgtaagagggtgccagcgttaggcgcaacgtgctggtagaacggcaacaactgtggttgtgtcaagaaggtagcagggctcacaccagctagctggctgaatggtagtagttgttgctgctgtaaataagcaggagagttcaatgctgctagttggttgaatggaagaaattgctgggggtaggcagcaggtagctggctgaatggtagttgttgttgttgcaaataagaagcagagttcaatgaacctagttggttgaatggaagaaactgctgttgctgagagtaggcagcaaggtttgctagcacaagttgttgtagttgttgtgccctgatgtttt

SEQ ID NO: 13431 - DNA, 454 bp, Zea mays
  Clone ID: LIB3061-096-Q1-N6-G8
aatctagaaatgtactttcttatttctgggaagccacaaacatcatccaaaaaacttcattattgaagtataactcataagcaatctaaaagagggcaccaccaatgatgggttgttggtagaacgctgttgggtttgtcaaagcaagttggttgaatggcagcaattgttgcagttgtaagagggtgccagcgttaggcgcagcgtgcaggtagaacggcaacaactgttgttgtgtcaagaaggcaacagggctcacatcagctagctggctgaatggtggtagctgttgctgttgtaaataagcagcagagttcaatgctgccagttggttgaatggaagaaattgctgggggtaggcagcagctagctgactgaatggtagttgttgttgcaaataagcagcagagttcaatgcagccagttggttgaatggaagaaactgctgttgctg

SEQ ID NO: 13432 - DNA, 580 bp, Zea mays
  unsure (1)..(580): unsure at all n locations; Clone ID: LIB3061-096-Q1-N6-G9
tttttttttttttttttttttttttttttttttttttttttttttttttttttttttttttttttttttttttttttttatttttttttttttttttttttttttttttttttttttttttttttttttttttttttttttttttttttgggggtgtttttgntttttttttttttttttttttttttaaaaaaaggggcctttttttttgggggggggcccccaccctcaaaaaaaaatttttttttggggccccccccccaaaaaaaaaaaaaggggggggccccccccggggggggggggggaaaaaacctgtgggtttttaaaaaaaggggggggggggggggacatatttttccttttaaaaaggggggccccctggggggccccctgggtttaaaaaacaaaaaatttggggggtttaaaaaagggggggggggcccccccccaacttggggggagagggggaaaaatgtgtcgttcaaaaaaaaggggggggtttcaaccccttttggggggtaaaagaaaaaaaatgggggggggggggaaaacaaacccggtcaaatggggcttttggttt

SEQ ID NO: 13433 - DNA, 456 bp, Zea mays
  Clone ID: LIB3061-096-Q1-N6-H1
caatcaatatattgattatttctaggaaacacatgccgctatgagggcaccattatcgagtacatctcatatgtaatctaaaagatggcacctccaacgatgggttgctgccacaacaaggcagggttcatcaaagagaactggttgtatggcagcaattgttgctgctgtaggaaggcaacgaccaatgggttagccaccgctagtggattaagtaactgttgtcgctgttgtaggtacgcagcaaagttcgacacagtcagttggttgaatggaagcagctgttgcaagtaggcagcagggtttgccacagctagctgagtcagagctggtacaatctgttgcagcaactgttgttgcaggtatgtaggtgcattaaccacagcgagagggctagatgaaatcagttgttgctgttgtaggtaggcggcagggttcaccatggctagttgactg

SEQ ID NO: 13434 - DNA, 335 bp, Zea mays
  Clone ID: LIB3061-096-Q1-N6-H10
ggaaatgtaacttcttatttctaggaggccacatacatcagccaaaaaacttcattattgaattacaactaataagcaatctaaaagatggcaccgccaatgatgtgttgttggtagaaggctgctgggtttgtcaaagcaagttggacaaagggcagcaactgttgcagttgtaagagggttgcggggttagccacaaactgctggtagaacggaagcaattgttgttgtttcaaaaaggaagtggggcttgttgtagctagctggccaaatggtagtagtatttgctgctggaaataagcagaggggttcagtgcggccaattggttaaatgg

SEQ ID NO: 13435 - DNA, 602 bp, Zea mays
  Clone ID: LIB3061-096-Q1-N6-H11
gcatcagcttcaaattttctcattatcaactctatttactccaattccttctagcagcttaaatttacatcaggcaacatgttgccagtagccaaaaaaatctcccggagctgtgcagttactcaaaattttggcttgggggtgtaccatgaaagagagggtcaccttttgtacaggccattccatggctatgttattctctcctttttttttccaaacgacacaaactgaatccacagtgatgctaaccaaactctatagtttaccgtatatatcatatctggaccaaagttagacagaataacagagagctacttatgatcacatcatcccactgtccaccctcgttctgcaatcacttcacgaacacgagtagctacttcaatggcgtcatttaggggagggtagctccagctatttgaaatatcttccaatccagtgaacgggcgaacaacccctcgctcccgtagagtcttgtgaaaagccgaaaacttccatttacagtgttcggtcccaataacataaacaggtttccctgtgctacctgcctcacttaacatacttatcgagtctgctgttatgacaaaagcatcagcccatgc

SEQ ID NO: 13436 - DNA, 475 bp, Zea mays
  Clone ID: LIB3061-096-Q1-N6-H3
agaaatgtactttcttatttctgggacgccacaaacatcatccaaaaaacttcattattgaactataactcataagcaatctaaaagagggcaccaccaatgatgggttgttggtagaacactgttgggtttgtcaaagcaagttggttgaatggcagcaattgttgcagttgtaagagggtgccagcgttaggcatagcgtgcaggtagaacggcaacaactgttgttgtgtcaagaaggcagcagggctcacatcagctagctggctgaatggtagtagttgttgctgctgtaaataagcagcagagttcaatgctgctagttggttgaatggaagaaattgctgggggtaggcagcaactagctggctgaatggtaattgttgttgcaaataagcagcagagttcaatgcagccagttggttgaatggaagaaactgatgttgctgagagtatgcagcaaggtttgctagca

SEQ ID NO: 13437 - DNA, 500 bp, Zea mays
  Clone ID: LIB3061-096-Q1-N6-H5
aacttctgtctgcttagtttattgctcattcttacagagtccatagtacagtttgaatatctgtaatataggagaaaaggatgagctagctagcgtggctcagcacctcctttcctatgttaagccaattatattctgtgaatcaggcagctcatctgatatatctatctaacttagtctggcacggcctgtgtggagtttgaatacaacagtgaataatgatggcacaaattgatcgtccgccatggatgatcttcacttcaacgaggcttacaagcttttgaccgagatgcatctttcctcattgtccagaatgctgcacggtaccgattctgcatcattgctttcatgtttgcagtgtaagtagtctcgatcattttctccacctccattgtaaatccataatggtaagcaacctttttcacatcttccaaacttaattcaatagacatatcatcatctggcccatatgaatcagcaaagtgatacagaaggggacc

SEQ ID NO: 13438 - DNA, 611 bp, Zea mays
  Clone ID: LIB3061-096-Q1-N6-H6
cgagataaatgtcaatcaatatattgattatttctaggaaacacatgccggtatgagggcaccattatcgattacatctcatatgtaatctaaaagatggcacctccaacgatgggttgctgccacgacaaggcagggttcatcaaagagaactggctgtatggtagcaattgttgctgctgtaggaaggcagtgaccaatgggttaggcactgctagtggattaagtaactgttgtcgctgttgtaggtacgcagcagagttcgacacagtcagttggttgaatggaagcagctgttgcaagtaggcagcagggtttgccacagctagctgagtcagagctggtacaatctgttgcagcaattgttgttgcaggtatgtaggtgcattacccacaacgagagggctagatgaaagcagttgttgctgttgtaggtaggcggcagggttcaccatggctagttgactgagcgctggcagaaactgttgcaattgttgttgttgttggtatgcagctacgtttgccagagcaagtgggttggatgcaagcacctgctgttgcaagtaggcgacagggttcaccacatctagttggctcagtgctggtaggaa

SEQ ID NO: 13439 - DNA, 569 bp, Zea mays
  Clone ID: LIB3061-096-Q1-N6-H7
gcacagggcacaacccatcaggattgtgtttattattataaatataagtacagaatttgccaccctgtgttctcgaggacgggtcatgcgacttccctgttatttgggtagtctagtattgaccccaatccaccaatccacatatgttgaggtagattggagtgtaaattagtttaagttacaccctaatcatctcaatacacatggattaagctcaatagtagagtacccaaactagtccttaggcaatgacgaacctaacatcagatacaacaatgaagatctgctacaaccgctacaatagagtttctgggtagcagccgatgatcacaacgcgtacccgctccgagcatgcgtacaccagtataaactcgtgaacagattctcaggctctagccattttttagctcggagagaaagctttgtgccaaggagaagcaggactccctttgtttcttgtactcaccataccgcaagaagaagtatccaagatagtcaaagtcaattggggatacctttgcctgaataagggcccataatgcccagtaaatgtgcgatgctagtctgaa

SEQ ID NO: 13440 - DNA, 418 bp, Zea mays
  Clone ID: LIB3061-096-Q1-N6-H8
gggggaagcttcccttcaaattccctttaaagggagctttttttgttggtttttttttttttttcaaccccaaaacaaattccgcttttaaagttacacttcaattagcccgccccttgcccttgcagttccccttcccgcccaacagggaagggttttttttttttttttcaaagggacagaaaccctttaaacccccccacacacggggcaaacttgacaattcgggaaaattcaaacccttaccaaaaaaaattttccggtccacaatttttcggaagattttttgaaaaaaacaaacactttttaaaaaaaaaattttaaaacacttttttttccccaattttttaattttcaaagggtttggggaaaaattcccccacttttttaacttttgttgggttccccccaaaatttt

SEQ ID NO: 13441 - DNA, 555 bp, Zea mays
  Clone ID: LIB3061-096-Q1-N6-H9
gagataaatctcaatcaatatattgattatttctaggaaacacatgcccggaatgagggcaccattatcgagtacatctcatatgtaatctaaaagatggcacctccaacgatgggttgctgcctcgacaagacagggtttatcaaagagaactggttgtatggcagcaattgttgctgctgtaggaaggcagcgaccaatgggttagccactgctagtggattaagtaactgttgtcgctgttgtaggtacccagcagagttcgacatagtcagttggttgaatggaagcagctgttgcaagtaggcagcagggtttgccacaactagctgagtcagagctggtacaatctgttgcaacaattgttgttgcaggtatgtaggtgcattggccacagcgagcgggctaaatgaaagcagttgttgctgttgtaggtaggcggcagggttcaccatggctagttgactgagcgctggcagaaactgttgcagctgttgttgtggctggtttgcaactacctttgccagagcaagtgggtttgatgcaagcaactgc

SEQ ID NO: 13442 - DNA, 644 bp, Zea mays
  Clone ID: LIB3061-093-Q1-K6-A12
tattgaaaccaacaagcaacatagaaagtgggatccagtagcaacaacagagcaacaatggcgaccaagatattttccctccttatgctccttgctctttctgcatgtgttgctaacgcgacaattttccctcaatgctcacaagctcctatagcttcccttcttcccccataccttccatcaatgatagcttcagtatgtgaaaacccagctcttcagccctataggctccaacaagcaatcgcagcaagcaacatacctttatcacccttgttgtttcaacaatcgccagccctatctttggtgcagtcattggtacaaaccatcagggcacagcagctgcagcaactcgtgctacctgtgatcaaccaagtagctctggcaaacctttctccctactctcagcaacaacaatttcttccattcaaccaactgtctacactgaaccctgctgcttatttgcagcaacaactattaccattcagccagctagctactgcctactctcagcaacaacaacttcttccatttaaccaattggccgcactgaaccccgctgcttatttgcagcagcaaatactactaccatttagccagctagctgcagcaaaccgtgcttccttcttgacacagcaacagttgct

SEQ ID NO: 13443 - DNA, 622 bp, Zea mays
  unsure (1)..(622): unsure at all n locations; Clone ID: LIB3061-093-Q1-K6-A3
tgtcacatagnaatgtggatacagtagcgagggtgggggcgcaatggcggccaagatattttccatccttatgctccttgctctttctgcatgtgttgctaacgcgaccatttttcctcaatactcacaagctcctatagctgcccttcttcccccataccttccatcaatgaccggggggggtgtgaaaacccagcccttcaaccctacaggatccagcaagcaatcgcaacaagcaacttacctttatcacacctgttctttcaacaatcgccagccctatctttggtgcagtcattggtacaaaccatcagggcagaacagttgcagcaactcgtgctaccagtgatcagccaagtagctctggcaaacctttccccctactctcagcaacaacaatttcttccattcaaccaactgtctatactgaaccctgctgcttatttgcagcaacaacaactactaccattcagccagctagctactgcctactctcagcagcaacaatttcttccatttaaccaattggccgcactgaacccctctgcttatttccagcagcaaatactactaccatttggccagctagctacaacaagccccgcttccttcttgacacaac

SEQ ID NO: 13444 - DNA, 597 bp, Zea mays
  unsure (1)..(597): unsure at all n locations; Clone ID: LIB3061-093-Q1-K6-A4
tttggagnagggatcgttggagctcggccgagctgagcacgcacagtgtgattgtgtgtgtgtgtctgacatggcgtcgctctggctagcgagagcgtcgtcccagctggcgcgccgtgccgccgccaggaggcctcctccgcgtcctgcgcgccacggctccgaccaacccaccaggtcgtggttcctgggctcagtgccgccgccggcccttgggtcagcagcggcggacacctgccgccgcggcttctgctccgtccggcgcttcgcaggggagagcagcgctgctgctgctgcggcggctgtcgtcgacgaggagccggagagcgggttcgcagccggcgatcagcaggcagttgactttcctggagggaaagtatcctttgtggcagaaatgaacttccttccagaatcgacgagggaaaggatcaactgctaccgcgtgcttgacgacgacggcagaacgatatcaggaagtagattccaagaggtcagtcgggagctggctctgaagatgtacagcgagatggtgacgctccagatcatggataccatcttctacgaggctcagtggcagggcacgatctcgttctacct

SEQ ID NO: 13445 - DNA, 621 bp, Zea mays
  unsure (1)..(621): unsure at all n locations; Clone ID: LIB3061-093-Q1-K6-A5
gngcccagcaagcaacatagnaagtagaatccattagcaacaatagagcaacaatggcgaccaagatattttccctccttatgctccttgctctttctacatgtgttgctaacgcgacaattttccctcaatgctcacaagctcctatagcttcccttcttcccccataccttccatcaattatagcttcagtatgtgaaaacccagctcttcaaccatataggcttcaacaagcaatcgcagcaagcaacatacctttatcgcccttgttgtttcaacaatcaccagccctatctttggtgcagtcattggtacaaaccatcagggcacaacagctgcagcaactcgtgctacctgtgatcaaccaagtagctctggcaaacctttctccctactctcagcaacaacaatttcttccattcaaccaactgtctacactgaaccctgctgcttatttgcagcaacaactattaccatttagccagctagctactgcctactctcagcaacaacaacttcttccatttaaccaattggccgcactgaaccccgctgcttatttgcagcagcaaatactactgccatttagcgagctagctgcagcaagtcgtgcttccttct

SEQ ID NO: 13446 - DNA, 508 bp, Zea mays
  unsure (1)..(508): unsure at all n locations; Clone ID: LIB3061-093-Q1-K6-A6
nttgggaaaaattcatgcatcaggagaagcatcattgacaagaatgctcgaattggagacaatgttaagatactcaatgctgacaatgttcaagaagctgcaatggagacagacgggtacttcatcaaaggtggaattgtcacagtgatcaaggatgctttactccctagtggaacagttatatgaagtgaacgtgcgacatgcagctgtgtgtctcgacattcgacaatgatcagcacctggttacatgcgtgatctgcagatcagtctgttggagatcatcggagcaataaaagtgtcatccaaggcattttttctttctttttgctcttttgtgtccttcaatgttgtagggtagaatgttgtagcagcaaatgttagttacatgttgaatcgacattgggggcctggatttggggatacatcatgctgtaaattgatcagtttaattaccatactgtgctgctttgagcgaagccatggagaccatgctccacttttgtgcctg

SEQ ID NO: 13447 - DNA, 333 bp, Zea mays
  Clone ID: LIB3061-093-Q1-K6-A7
caattggccgcactgaacctcgctgcttatttgcagcagcaaatattactaccatttagccagctagctgcagcaagccgtgcttccttcttgacacagcaacagttgctgcctttctaccagcagtttgcggctaaccccgcaaccctcttacaactacaacaattgttgccctttgtccaacttgctttgacaaacccagcagcctcctaccaacaacacatcattggtggtgccctcttttagattgcttattagttgtaattcaataataaagttttttggatgatgtatgtggccaaccagaaataagaagttacatttccagattct

SEQ ID NO: 13448 - DNA, 462 bp, Zea mays
  Clone ID: LIB3061-093-Q1-K6-A8
aagaccaatagtgtaccaacaatggcagccaaaatttttgcctccttatgctccttggtctttctgcaagtgctgctacggcgaccattttcccgcaatgctcgcaagctcctatagcttcccttcttcccccgtacctctcaccagcggtgtcttcggtatgtgaaaacccaattcttcaaccctacaggatccaacaggcaatcgcagctggcatcttacctttatcacccttgttcctccaacaatcatcagccctattacaacagttacctttggtgcatttattggcacaaaacatcagggcacaacaactacaacaacttgtgctagcaaaccttgctgcctactctcagcaacagcagtttcttccattcaaccaactaggttcattgaactctgcttcttatttgcaacaacaacaactaccattcagccagctaacctgctgcccttaccccc

SEQ ID NO: 13449 - DNA, 628 bp, Zea mays
  unsure (1)..(628): unsure at all n locations; Clone ID: LIB3061-093-Q1-K6-A9
gtngaaaacccactcttcaaccatataggcttcaacaagcaatcgcagcaagcaacatacctttatcgcccttgttgtttcaacaatcgccagccctatctttggtgcagtcattggtacaaaccatcagggcacaacagctgcagcaactcgtgctacctctgatcaaccaagtagctctggcaaacctttctccctactctcagcaacaacaatttcttccattcaaccaactgtctacactgaaccctgctgcttatttgcagcaacaactattaccatttagccagctagctactgcctactctcagcaacaacaacttcttccatttaaccaattggccgcactgaaccccgctgcttatttgcagcagcaaatactactaccatttagccagctagctgcagcaaaccgtgcttccttcttgacacagcaacagttgctgcctttctaccagcagtttgcggctaaccccgcaaccctcttacaactacaacaattgttgccctttgtccaacttgctttgacagacccagcggcctcctaccaacaacacatcattggtggtgccctcttttagattgcttattagttgtaattcaataataaagttttttggatgatgta

SEQ ID NO: 13450 - DNA, 653 bp, Zea mays
  unsure (1)..(653): unsure at all n locations; Clone ID: LIB3061-093-Q1-K6-B1
ngacattcagnaacacaccaagcgaagcgcactagcaacgacctaacatcaatggctaccaagatattagccctccttgcgcttcttgccctttttgtgagcgcaacaaatgcgttcattattccacaatgctcacttgctcctagtgccattattccacagttcctcccaccagttacttcaatgggcttcgaacacctagctgtgcaagccaacatgcaacaacaagcgcttgcggcgagcgtcttacaacaaccaattgcccaattgcaacaacaatccttgccacatctaacaatacaagccatcacaacgcaacagcaacaacagttcctaccagcactgagccacctagccatggtgaaccctgccgcctacttgcaagagcagctgcttgcatccaacccacttgctctggcgaacgtagttgcaaaccagcaacaacaacagctacaacagtttctgccaacgctcagtcaactagccatggtgaaccctgccgcctacgtacaacaacaacaactgctttcatctagcccgctcgctgtgggcaatgcacctacatacctgcaacaacaattgttgcaacagattgtaccagctctgactcaactagctgtggcaaaccctgttgcctacttgcaacagctgct

SEQ ID NO: 13451 - DNA, 640 bp, Zea mays
  unsure (1)..(640): unsure at all n locations; Clone ID: LIB3061-093-Q1-K6-B10
ttgcaacatagnaagcacaatagtgtaccaacaatggcagccaaaatttttgcctccttatgctccttggtctttctgcaagtgctgctacggcgaccattttcccacaatgctcacaagctcctatagcttcccttcttcccccgtacctctcaccagcggtgtcttcggtatgtgaaaacccaattcttcaaccctataggatccaacaggcaatcgcagctggcatcttacctttatcacccttgttcctccaacaatcatcagccctattacagcagttacctttggtgcatttattggcacaaaacatcagggcacaacaactacaacaacttgtgctagcaaaccttgctgcctactctcagcaacaacagtttcttccattcaaccaactagctgcattgaactctgcttcttatttgcaacaacaacaactaccattcagccagctatctgctgcctacccccagcaatttcttccattcaaccaactgacagctttgaactctcctgcttatttacagcagcaacaactactaccattcagccagctagctggtgtgagccctgctaccttcttgacacaaccacaattgttgccgttctaccagcacgctgcgcctaacgctggcaccct

SEQ ID NO: 13452 - DNA, 327 bp, Zea mays
  Clone ID: LIB3061-093-Q1-K6-B11
atgcagtaagagaaatcgactgaggctgcaccattatcatcctagcaatagcaccagcagcgttatctcttactgcatcatggtgattctgagcttgctaaacaatattctgcacgagaaccaatccatcaccatgggcttgcagtgctgcatgtctccgatcattgcgtagtttgccgggaggggagcgatcaattgtactcaaattttggcctggctattgcatcacttgatatctgcctatggtcagcccatgcacccgatactgagtgcccttctactagcccatgctcacgctctggctttatttccgagttgaagatgacc

SEQ ID NO: 13453 - DNA, 637 bp, Zea mays
  unsure (1)..(637): unsure at all n locations; Clone ID: LIB3061-093-Q1-K6-B3
gngnaccaatagcaacatagnaaagcacaatagtgtgccaacaatggcagccaaaatttttgcctccttatgctccttggtctttctgcaagtgctgctacggcgaccattttcccgcaatgctcgcaagctcctatagcttcccttcttcccccgtacctctcaccagcggtgtcttcggtatgtgaaaacccaattcttcaaccctacaggatccaacaggcaatcacagctggcatcttacctttatcacccttgttcctccaacaatcatcagccctattacatcagttacctttggtgcatttattggcacaaaacatcagggcacaacaactacaacaacttgtgctagcaaaccttgctgcctactctcagcaacagcagtttcttccattcaaccaactagctgcattgaactctgcttcttatttgcaacaacaacaactaccattcagccagctacctgctgcctacccccagcaatttcttccattcaaccaactggcagcattgaactctcctgcttatttacagcagcaacaactactaccattcagccagctagctggtgtgagccctgctaccttcttgatacaaccacagttgttgccgttctaccagcacgctgcgccta

SEQ ID NO: 13454 - DNA, 639 bp, Zea mays
  unsure (1)..(639): unsure at all n locations; Clone ID: LIB3061-093-Q1-K6-B4
ngttgagaccaactagcaacatagnaaagcacaatagtgtaccaacaatggcagccaaaatttttgcttccttatgctccttggtctttctgcaagtgttgctaccgcnaccattttcccacaatgctcacaagctcctatagcttcccttcttcccccatacctctcaccagcggtgtcttcaatgtgtgaaaccccaattgttcaaccctacaggatccaacaggcaatcgcaacaggcatcttaccattatcacccttgttcctccaacaaccgtcagccctattacagcagttacctttggtccatttggtggcacaaaacatcagggcacaacaactacaacaacttgtgctagcaaaccttgctgcatactctcagcaacatcagtttcttccattcaaccaactggctgcattgaactctgctgcttatttgcaacaacaattaccattcagccagctagttgctgcctacccccagcaatttcttccattcaaccaactagcagcattgaactctgctgcttatttacagcagcaacaactactaccattcagccagctagctgatgtgagccctgctgccttcttgacacaacaacagttgttgccgttctacctgcacgctatgcctaa

SEQ ID NO: 13455 - DNA, 643 bp, Zea mays
  unsure (1)..(643): unsure at all n locations; Clone ID: LIB3061-093-Q1-K6-B5
ccaacaagcaacatagnaaagtggatacagtagcaacaatagagcaacaatggcggccaagatattttccatccttatgctccttgctctttctgcatgtgttgctaacgcgaccatttttcctcaatactcacaagctcctatagctgcccttcttcccccataccttccatcaatgaccgcttcagtttgtgaaaacccagcccttcaaccctacaggctccaacaagcaatcgcaacaagcaacttacctttatcacccctgttctttcaacaatcgccagccctatctttggtgcagtcattggtacaaaccatcagggcacaacagctgcaacaactcgtgctaccagtgatcagccaagtagctctggcaaacctttctccctactctcagcaacaacaatttcttccattcaaccaactgtctacactgaaccctgctgcttatttacaacaacaacaactactaccattcagccagctagctactgcctactctcagcagcaacaatttcttccatttaaccaattggccgcactgaacccctctgcttatttccagcagcaaatactactaccatttggccagctagctacaacaagccccacttcctttntgaaacaacaacaattgcttccg

SEQ ID NO: 13456 - DNA, 409 bp, Zea mays
  Clone ID: LIB3061-093-Q1-K6-B7
ccgtgcggcctcctaccaacaacacatcattggtggtgccctttgtccaacttgctttgacagaccgagcggcctcctaccaacaacacatcattggtggtgccctcttttagattgcttattagttgtaattcaataataaagttttttggatgatgtatgtggccaaccagaaataagaagttacatttccagattttaaaaaaaaaaaaaaaaaaaaaaaaaaaaaaaaaaaaaaaaaaaaaaaaaaaaaaaaaaaaaaaaaaaaaaaaaaaaaaaaaaaaaaaaaaaaaaaaaaaaaaaaaaaaaaggggaaaaaaaaaaaaaaaaaatttaaaaaaaaattaaaaaaaagtggataaatggtaaacttttgggaatacaaaaaaaaaataaattggaaggtaat

SEQ ID NO: 13457 - DNA, 536 bp, Zea mays
  unsure (1)..(536): unsure at all n locations; Clone ID: LIB3061-093-Q1-K6-B9
caacaacaacagttgcaacagtttctaccagcgctcagtcaactagccatggtgaaccctatcgcctacctacaacagcaacaacttctttcatctagcccgctcgctatgggcaatgcacctacatacctgcaacaacagttgttgcaacaacagttgctgcaacaaattgtaccagctcttactcagctagctgtggcaaaccctgctgcctacttgcaacaactacttccattcaaccaactgactgtgtcgaactctgctgcgtacctacaacagcgacaacagttacttaatccactagcggtggctaacccattggtcgctgccttcctacagcagcaacaattgctgccatacaaccagttctctttgatgaaccctgccttgtcgtggcagcaacccatcgttggtggtgccatcttttagattacatatgagatgtactcgataatggtgccctcatagcggcatgtgtttcctaaaaataatcaatatattgattgagatttnnnannnanaannnnnnnnnnana

SEQ ID NO: 13458 - DNA, 350 bp, Zea mays
  Clone ID: LIB3061-093-Q1-K6-C1
tacagctgcagcaactcgtgctacctgtgatcaaccaagtagctctggcaaacctttctccctaccctcttacaactgcaacaattgctgccattcaaccaacttgctttgacaaacccagcagcgttctaccaacaacccatcattggtggtgccctcttttagatttcttatgagttatagttcaataataaagttttttgtctgaaaaaaataaaaaaaaaaaaaaaaaaaaaaaaaaaaaaaaaaaaaaaaaaaaaataaaaaaaaaaaaaaaaaaaacaaaaaaaaaaaaaaaagaagcaaaataaactcaacaaaaaaaaaaggggcgccctttttaaggatcc

SEQ ID NO: 13459 - DNA, 618 bp, Zea mays
  unsure (1)..(618): unsure at all n locations; Clone ID: LIB3061-093-Q1-K6-C11
gnaatgtgntaacttatgctgaagtcatgatcaagcattagtcggcgacaagactattgcgttttggttgatggacaaggatatgtatgatttcatggccctcgatagaccttcaactcctaccattgatcgtgggatagcattacataagatgattagacttatcacaatgggtttaggaggagagggctatcttaatttcatgggaaatgagtttggacatcctgaatggatagattttccaagaggtccgcaaagacttccaagtggtaagtttattccagggaataacaacagttatgacaaatgtcgtcgaagatttgacctgggtgatgcagactatcttaggtatcatggtatgcaagagtttgatcaggcaatgcaacatcttgagcaaaaatatgaattcatgacatctgatcaccagtatatttcccggaaacatgaggaggataaggtgattgtgttcgaaaagggagatttggtatttgtgttcaacttccactgcaacaacagctattttgactaccgtattggttgtcgaaagcctgnggtgtataaggtggtcttggactccgacgctggactatttggtggatttagcaggatccatcacgc

SEQ ID NO: 13460 - DNA, 640 bp, Zea mays
  unsure (1)..(640): unsure at all n locations; Clone ID: LIB3061-093-Q1-K6-C12
gnaaagcacatagtgtaccaacaatggcagccaaaatttttgcttccttatgctccttggtctttctgcaagtgctgctaccgcaaccattttcccacaatgctcacaagctcctatagcttcctttcttcccccatacctctcaccagcggtgtcttcagtatgtgaaaacccaattcttcaaccctacaggatccaacaggcaatcgcagcaggcatcttacctttatcacccttgttcctccaacaaccgtcagccctattacagcagttacctttggtgcatttgttggcacaaaacatcaaggcacaacaactacaacaacttgtgctaggaaaccttgctgcctactctcagcaacagcagtttcttccattcaaccaactggctgcattgaactctgctgcttatttgcaacaacaactaccattcagtcagctagctgctgcctacccccagcaatttcttccattcaaccaactggcagcattgaactctgctgcttatttacaacagcaacagctaccaccattcagccagctagctgatgtgagccctgttgccttcttgacacaacaacagttgttgccgttctacctgcacgctgcgcctaacgctggcaccctcttacactgcaac

SEQ ID NO: 13461 - DNA, 626 bp, Zea mays
  unsure (1)..(626): unsure at all n locations; Clone ID: LIB3061-093-Q1-K6-C2
gnggcaagtgcgatttcgatctcgcagccaccttttttttttgttctgttgtgtatctagtagttggaggagatatgcagtttgcacttgcattggacacgaactcaggtcctcaccagataagatcttgtgagggtgatgggattgacaggttgngaaaaattaagtattgggggcagaaagcaggagaaagctttgagaaataggtgctttggtggtagagttgctgcaactacacaatgtattcttacctcagatgcttgtcctgaaactcttcattctcaaacacagtcctctaggaaaaattatgctgatgcaaaccgtgtatctgctatcattttgggcggaggcactggatctcagctctttcctctgacaagcacaagagctacgcctgctgtacctgttggaggatgttacaggcttattgatatccctatgagtaactgcttcaacagtggtataaataagatatttgtgatgagtcagttcaattctacttcgcttaaccgccatattcatcgtacataccttgaaggcgggatcaactttgctgatggatctgtacaggtattagcggctacacaaatgcctgaagagccagctggatggttccagggtacagc

SEQ ID NO: 13462 - DNA, 635 bp, Zea mays
  unsure (1)..(635): unsure at all n locations; Clone ID: LIB3061-093-Q1-K6-C3
gtttatatgttcctctatgctcaacaacaggcaggcgtgagtgcgatatttntgcttgaagttattatatttcagtctatgccagacatctacatggttgatatatttgctgtgttcagcttacatctgttgcggccctagttagctatttgtcttttgtgtactatctgaggcaagagatggatcagctaggacttggcgaacacttgcctgtgttggctgttcatctgaagggggaaatttgcacgagacacctcggatattacaacaatggatagattcaagttgattaaggaagttggcgatgggactttcgggagtgtatggcgtgctataaataaacagaatggtgaagttgttgctgttaagaaaatgaagaaaaagtattattcttttgaggaatgtatgggtttgcgtgaagtaaagtctttgcggcgcatgaatcatcctaacattgtgaagctcaaagaggttatccgagaaaatgatatattatacttcataatggaatacatggagtgtaatctctaccaacttatgaaggataaggtcaagcctttctcggagtctgaagtccgcaactggtgctttcagatatttcaagctcttgcttacatgcatcaagagggctactt

SEQ ID NO: 13463 - DNA, 467 bp, Zea mays
  unsure (1)..(467): unsure at all n locations; Clone ID: LIB3061-093-Q1-K6-C4
gcaacatagnaaagcacaatagtgtaccaacaatggcagccaaaatttttgcttccttatgctccttggtctttctgcaagtgctgctaccgcaaccattttcccacaatgctcacaagctcctatagcttcctttcttcccccatacctctcaccagcggtgtcttcagtatgtgaaaacccaattcttcaaccctacaggatccaacaggcaatcgcagcaggcatcttacctttatcacccttgttcctccaacaaccgtcagccctattacagcagttacctttggtgcatttgttggcacaaaacatcaaggcacaacaactacaacaacttgtgctaggaaaccttgctgcctactctcagcaacagcagtttcttccattcaaccaactggctgcattgaactctgctgcttatttgcaacaacaactaccattcagtcagctagctgctgcctaccccc

SEQ ID NO: 13464 - DNA, 636 bp, Zea mays
  unsure (1)..(636): unsure at all n locations; Clone ID: LIB3061-093-Q1-K6-C5
cccggtcgacccagcgtccgccaactagcaacatagnaaagcacaatagtgtaccaacaatggcagccaaaatttttgcctccttatgctccttggtctttctgcaagtgctgctacggcgaccattttcccgcaatgctcgcaagctcctatagcttcccttcttcccccgtacctctcaccagcggtgtcttcggtatgtgaaaacccaattcttcaaccctacaggatccaacaggcaatcgcagctggcatcttacctttatcacccttgttcctccaacaatcatcagccctattacaacagttacctttggtgcatttattggcacaaaacatcagggcacaacaactacaacaacttgtgctagcaaaccttgctgcctactctcagcaacagcagtttcttccattcaaccaactaggttcattgaactctgcttcttatttgcaacaacaacaactaccattcagccagctacctgctgcctacccccagcaatttcttccattcaaccaactagcagcattgaactctcctgcttatttacagcagcaacaactactaccattcagccagctagctggtgtgagccctgctaccttcttgacacaaccacagttgttgccgttcta

SEQ ID NO: 13465 - DNA, 601 bp, Zea mays
  Clone ID: LIB3061-093-Q1-K6-C7
ggctttggcgtctaaagcctcccctccgccatggatgccaccgccgccgagcagccaattccaaagcgtgacaaagccgctgcaaatgattcaacatacctcaatcctcaagctcatgatagtgttcttggaatcattctgggaggtggtgctgggactagattgtaccccttgacaaagaagcgtgccaagcctgcagtgccattgggtgccaactatagactgattgatattcctgtcagcaattgtctcaacagcaacatatccaagatctatgtgctaacgcaatttaactctgcttccctcaaccgtcacctctcaagagcctacgggagcaacattggagggtacaagaatgaagggtttgttgaagtcttagctgcacagcagagcccagataatccaaactggtttcagggtactgcagatgctgtaaggcagtacttgtggttgtttgaggagcataatgtgatggaatttctaattcttgctggcgatcacctgtaccggatggactatgaaaagttcattcaggcacacagagaaacaaatgctgatattaccgttgctgccctaccgatggatgagaaacgtgcaactg

SEQ ID NO: 13466 - DNA, 622 bp, Zea mays
  Clone ID: LIB3061-093-Q1-K6-C8
gtaaaagggctcgttcgctgttgcctcattgcctgccacagctcgccgccgacgccgtcgccgctcaagtgaagtccggagtgggggcttgcgatctccgctgcgggcgcggaagatggctgatccagagttggaagctatcaggcagagacggatgcgagaactacaacacggtgcggcaaatcagcaaaatgcgggccaagaaaaggctcaggaagacgcgaaacaggaagctgaggaacgccggcaaatgatgcttgctcagatattatcttctgaagcaagagaaaggctttcccgcatagctttggtcaaacctgacaaagcaagaggggtggaggatgttttgctgagagctgctcaaactggtggaatatctgagaaggtgtctgaagaaagactcatctcccttctagagcaaattaacagccacacaagcaagcaaaccaaagttacgattcagaggcgtcggaatgtccttgacgacgatgattagatgcaacctgcaagtctctgcttcgagtgtactattggctggtgataaattaaaagtggtaccgaactgtttagacaatgatctcatgcgactatcagcagcaatgaaaacttggtacttggtaga

SEQ ID NO: 13467 - DNA, 646 bp, Zea mays
  unsure (1)..(646): unsure at all n locations; Clone ID: LIB3061-093-Q1-K6-C9
gggacgcttgcttngaagattcggtgtcggtatcatttcctatgtggtaccggtatacatagcagagatatctccacaaaacatgagaggggctcttggctctgtgaaccagttatctgtaacccttggtatcatgtttgcctatttgctcggcttgtttgttccttggaggcttcttgcagtaataggaaccttgccctgcatagtgttgatacctggccttttcttcattccggaatctccaagatggctggcaaagatgaatatgatggatgattgcgagacttctctacaagttctgagaggattcgatgctgacatcactgcagaattgaatgatataaagagagcagtaatgtcagcaaacaaaagggctacaattcgtttccaagagttgaaccaaaagaaataccgaacgcccctaattataggaattggtctacttgtgctgcaacagctaagtggaataaatggtatactattttatgcaagtagcatcttcaaagctgccggtctgaaggacagtgacttggacacctttgcacttggagctattcaggttcttgccacttttgttacaaccatgttcttggacagagctgggcggcgaatcctccttattatttcttctgctgggatgactcta

SEQ ID NO: 13468 - DNA, 627 bp, Zea mays
  Clone ID: LIB3061-093-Q1-K6-D1
ccgatcgacaccatgagggtgttgctcgtggccctcgctctcctggctctcgctgcgagcgccacctccacgcatacaagcggcggctgcggctgccagccaccgccgccggttcatctaccgccgccggtgcatctgccacctccggttcacctgccacctccggtgcatctcccaccgccggtccacctgccgccgccggtccacctgccaccgccggtccatgtgccgccgccggttcatctgccgccgccaccatgccactaccctactcaaccgccccggcctcagcctcatccccagccacacccatgcccgtgccaacagccgcatccaagcccgtgccagctgcagggaacctgcggcgttggcagcaccccgatcctgggccagtgcgtcgagtttctgaggcatcagtgcagcccgacggcgacgccctactgctcgactcagtgccagtcgttgcggcagcagtgttgccagcagctcaggcaggtggagccgcagcaccggtaccaggcgatcttcggcttggtcctccagtccatcctgcagcagcagccgcaaagcggccaggtcgcggggctgttggcggcgcagatagcgcagcaactgaccgcgatgtgc

SEQ ID NO: 13469 - DNA, 659 bp, Zea mays
  unsure (1)..(659): unsure at all n locations; Clone ID: LIB3061-093-Q1-K6-D10
ngagcgaacgcactagcaacgacctaacaacaatggcttccaagaattatccctccttgcgcttcttgccctttttgtgagtgcaacaaatgcgttcattattccacaatgctcacttgctccgagtgccattattccacagttcctccctccagttacttcaatgggcttcgaacacccagctgtgcaagcctataggctacaacaagcgcttgcggcgagcgtcttagaacaaccaattgcccaattacaacaacaatccttggcacatctaaccatacaaaccatcgcaacgcagcagcaacaagcactgagccacctagccgtggtgaaccctatcgcctacttgcaacaacagctgcttgcatccaacccacttgctttggcaaacgtagctgcataccaacaacaacaacagttgcaacagtttctaccagcgctcagtcaactagccatggtgaaccctatcgcctacctacaacagcaacaacttctttcatctagcccgctcgctatgggcaatgcacctacatacctgcaacaacagttgttgcaacaacagttgctgcaacaaattgtaccagctcttactcagctagctgtggcaaaccctgctgcctacttgcaacaactacttccattcaaccaactgactgtgt

SEQ ID NO: 13470 - DNA, 296 bp, Zea mays
  Clone ID: LIB3061-093-Q1-K6-D11
gcaacaactactaccattcagccagctagctggtgtgagccctgctaccttcttgacacaaccacaattgttgccgttctaccagcacgctgcgcctaacgctggcaccctcttacaactgcaacaattgctgccattcaaccaacttgctttgacaaacccaacagcattctaccaacaacccatcattggtggtgccctcttttagatttcttatgagttatagttcaataataaagttttttgtctgatgtttgtggcttcccagaaataagaaagtacatttctagattctt

SEQ ID NO: 13471 - DNA, 650 bp, Zea mays
  unsure (1)..(650): unsure at all n locations; Clone ID: LIB3061-093-Q1-K6-D12
gcaacatagnaagtggaatacagtagcaacaatagagcaacaatggcggccaagatattttccatccttatgctccttgctctttctgcatgtgttgctaacgcgaccatttttcctcaatactcacaagctcctatagctgcccttcttcccccataccttccatcaatgaccgcttcagtttgtgaaaacccagcccttcaaccctacaggctccaacaagcaatcgcaacaagcaacttacctttatcacccctgttctttcaacaatcgccagccctatctttggtgcagtcattggtacaaaccatcagggcacaacagctgcaacaactcgtgctaccagtgatcagccaagtagctctggcaaacctttctccctactctcagcaacaacaatttcttccattcaaccaactgtctacactgaaccctgctgcttatttacaacaacaacaactactaccattcagccagctagctactgcctactctcagcagcaacaatttcttccatttaaccaattggccgcactgaacccctctgcttatttccagcagcaaatactactaccatttggccagctagctacaacaagccccacttcctttttgaaacaacaacaattgcttccgttctaccagcagtt

SEQ ID NO: 13472 - DNA, 638 bp, Zea mays
  unsure (1)..(638): unsure at all n locations; Clone ID: LIB3061-093-Q1-K6-D2
tagcaacatagnaaagcacaatagtgtaccaacaatggcagccaaaatattttgcttccttatgctccttggtctttctgcaagtgttgctaccgcnaccattttcccacaatgctcacaagctcctatagcttcccttcttcccccatacctctcaccagcggtgtcttcaatgtgtgaaaacccaattgttcaaccctacaggatccaacaggcaatcgcaacaggcatcttaccattatcacccttgttcctccaacaaccgtcagccctattacagcagttacctttggtccatttggtggcacaaaacatcagggcacaacaactacaacaacttgtgctagcaaaccttgctgcatactctcagcaacatcagtttcttccattcaaccaactggctgcattgaactctgctgcttatttgcaacaacaattaccattcagccagctagttgctgcctacccccagcaatttcttccattcaaccaactagcagcattgaactctgctgcttatttacagcagcaacaactactaccattcagccagctagctgatgtgagccctgctgccttcttgacacaacaacagttgttgccgttctacctgcacgctatgcctaacgctggcaccc

SEQ ID NO: 13473 - DNA, 644 bp, Zea mays
  unsure (1)..(644): unsure at all n locations; Clone ID: LIB3061-093-Q1-K6-D3
gtcgacccagcgtccgcacgcgtccgcatagnaaagcacaatagtgtaccaacaatggcagccaaaatttttgcctccttatgctccttggtctttctgcaagtgctgctacggcgaccattttcccgcaatgctcgcaagctcctatagcttcccttcttcccccgtacctctcaccagcggtgtcttcggtatgtgaaaacccaattcttcaaccctacaggatccaacaggcaatcacagctggcatcttacctttatcacccttgttcctccaacaatcatcagccctattacatcagttacctttggtgcatttattggcacaaaacatcagggcacaacaactacaacaacttgtgctagcaaaccttgctgcctactctcagcaacagcagtttcttccattcaaccaactagctgcattgaactctgcttcttatttgcaacaacaacaactaccattcagccagctacctgctgcctacccccagcaatttcttccattcaaccaactggcagcattgaactctcctgcttatttacagcagcaacaactactaccattcagccagctagctggtgtgagccctgctaccttcttgatacaaccacagttgttgccgttctaccagcacgctgcg

SEQ ID NO: 13474 - DNA, 602 bp, Zea mays
  unsure (1)..(602): unsure at all n locations; Clone ID: LIB3061-093-Q1-K6-D4
gcccaactagcaacatagnaaagcacaatagtgtaccaacaatggcagccaaaatttttgcctccttatgctccttggtctttctgcaagtgctgctacggcgaccattttcccgcaatgctcgcaagctcctatagcttcccttcttcccccgtacctctcaccagcggtgtcttcggtatgtgaaaacccaattcttcaaccctacaggatccaacaggcaatcgcagctggcatcttacctttatcacccttgttcctccaacaatcatcagccctattacaacagttacctttggtgcatttattggcacaaaacatcagggcacaacaactacaacaacttgtgctagcaaaccttgctgcctactctcagcaacagcagtttcttccattcaaccaactaggttcattgaactctgcttcttatttgcaacaacaacaactaccattcagccagctacctgctgcctacccccagcaatttcttccattcaaccaactagcagcattgaactctcctgcttatttacagcagcaacaactactaccattcagccagctagctggtgtgagccctgctaccttcttgacacaaccac

SEQ ID NO: 13475 - DNA, 642 bp, Zea mays
  unsure (1)..(642): unsure at all n locations; Clone ID: LIB3061-093-Q1-K6-D6
ccaactagcaacatagnaaagcacaatagtgtaccaacaatggcagccaaaatttttgcctccttatgctccttggtctttctgcaagtgctgctacggcgaccattttcccgcaatgctcgcaagctcctatagcttcccttcttcccccgtacctctcaccagcggtgtcttcggtatgtgaaaacccaattcttcaaccctacaggatccaacaggcaatcacagctggcatcttacctttatcacccttgttcctccaacaatcatcagccctattacatcagttacctttggtgcatttattggcacaaaacatcagggcacaacaactacaacaacttgtgctagcaaaccttgctgcctactctcagcaacagcagtttcttccattcaaccaactagctgcattgaactctgcttcttatttgcaacaacaacaactaccattcagccagctacctgctgcctacccccagcaatttcttccattcaaccaactggcagcattgaactctcctgcttatttacagcagcaacaactactaccattcagccagctagctggtgtgagccctgctaccttcttgatacaaccacagttgttgccgttctaccagcacgctgcgcctaacgctggca

SEQ ID NO: 13476 - DNA, 266 bp, Zea mays
  Clone ID: LIB3061-093-Q1-K6-D7
ctggtgtgagccctgctaccttcttgacacaaccacagttgttgccgttctaccagcacgctgcgcctaacgctggcaccctcttacaactgcaacaattgctgccattcaaccaacttgctttgacaaacccagcagcattctaccaacaacccatcattggtggtgccctcttttagatttcttatgagttatagttcaataataaagttttttgtctgatgtttgtggcttcccagaaataagaaagtacatttctagattct

SEQ ID NO: 13477 - DNA, 638 bp, Zea mays
  Clone ID: LIB3061-093-Q1-K6-D8
cccagcgtccggcattcaaaaacacaccaagcgaagcgcactagcaacgacctaacaccaatggctaccaagatattagccctccttgcgcttcttgcccttttagtgagcgcaacaaatgcgttcattattccacagtgctcacttgctcctagtgccattattccacagttcctcccaccagttacttcaatgggcttcgaacatccagccgtgcaagcctacaggctacaactagcgcttgcggcgagcgccttacaacaaccaattgcccaattgcaacaacaatccttggcacatctaaccctacaaaccattgcaacgcaacaacaacaacaacaacagtttctgccatcactgagccacctagccgtggtgaaccctgtcacctacttgcaacagcagctgcttgcatccaacccacttgctctggcgaacgtagctgcataccagcaacaacaacagctgcaacagtttatgccagtgctcagtcaactagccatggtgaaccctgccgtctacctacaactactttcatctagcccgctcgcggtgggcaatgcacctacgtacctacaacaacagttgctgcaacaaattgtaccagctctgactcagctagctgtggcaaaccctgc

SEQ ID NO: 13478 - DNA, 653 bp, Zea mays
  unsure (1)..(653): unsure at all n locations; Clone ID: LIB3061-093-Q1-K6-D9
nttttcagcattcaaaacacaccaagcgaagcgcactagcaacgacctaacaccaatggctaccaagatattagccctccttgcgcttcttgcccttttagtgagcgcaacaaatgcgttcattattccacagtgctcacttgctcctagtgccattattccacagttcctcccaccagttacttcaatgggcttcgaacatccagccgtgcaagcctacaggctacaactagcgcttgcggcgagcgccttacaacaaccaattgcccaattgcaacaacaatccttggcacatctaaccctacaaaccattgcaacgcaacaacaacaacaacaacagtttctgccatcactgagccacctagccgtggtgaaccctgtcacctacttgcaacagcagctgcttgcatccaacccacttgctctggcgaacgtagctgcataccagcaacaacaacagctgcaacagtttatgccagtgctcagtcaactagccatggtgaaccctgccgtctacctacaactactttcatctagcccgctcgcggtgggcaatgcacctacgtacctacaacaacagttgctgcaacaaattgtaccagctctgactcagctagctgtggcaaaccctgctgcctacttacaacagttgc

SEQ ID NO: 13479 - DNA, 632 bp, Zea mays
  unsure (1)..(632): unsure at all n locations; Clone ID: LIB3061-093-Q1-K6-E1
ccaactagcaacatagnaaagcacaatagtgtaccaacaatggcagccaaaatttttgcctccttatgctccttggtctttctgcaagtgctgctacggcgaccattttcccgcaatgctcgcaagctcctatagcttcccttcttcccccgtacctctcaccagcggtgtcttcggtatgtgaaaacccaattcttcaaccctacaggatccaacaggcaatcacagctggcatcttacctttatcacccttgttcctccaacaatcatcagccctattacatcagttacctttggtgcatttattggcacaaaacatcagggcacaacaactacaacaacttgtgctagcaaaccttgctgcctactctcagcaacagcagtttcttccattcaaccaactagctgcattgaactctgcttcttatttgcaacaacaacaactaccattcagccagctacctgctgcctacccccagcaatttcttccattcaaccaactggcagcattgaactctcctgcttatttacagcagcaacaactactaccattcagccagctagctggtgtgagccctgctaccttcttgatacaaccacagttgttgccgttctaccagcacgctgcgcct

SEQ ID NO: 13480 - DNA, 592 bp, Zea mays
  Clone ID: LIB3061-093-Q1-K6-E10
caggcatcttacctttatcacccttgttcctccaacaaccgtcagccctattacagcagttacctttggtgcatttgttggcacaaaacatcaaggcacaacaactacaacaacttgtgctaggaaaccttgctgcctactctcagcaacagcagtttcttccattcaaccaactggctgcattgaactctgctgcttatttgcaacaacaactaccattcagtcagctagctgctgcctacccccagcaatttcttccattcaaccaactggcagcattgaactctgctgcttatttacaacagcaacagctaccaccattcagccagctagctgatgtgagccctgttgccttcttgacacaacaacagttgttgccgttctacctgcacgctgcgcctaacgctggcaccctcttacaactgcaacaattgctgccattcaaccaacttgctttgacaaacccaacagcgttctaccaacaacccatcattggtggtgccctcttttagattgcttatgagttatacttcaataatgaagttttttggatgatgtttgtggcttcccagaaataagaaagtacatttct

SEQ ID NO: 13481 - DNA, 621 bp, Zea mays
  unsure (1)..(621): unsure at all n locations; Clone ID: LIB3061-093-Q1-K6-E11
tagcaacatagnaaagcacaatagtgtaccaacaatggcagccaaaatttttgcttccttatgctccttggtctttctgcaagtgttgctaccganaccattttcccacaatgctcacaagctcctatagcttcccttcttcccccatacctctcaccagcggtgtcttcaatgtgtgaaaacccaattgttcaaccctacaggatccaacaggcaatcgcaacaggcatcttaccattatcacccttgttcctccaacaaccgtcagccctattacagcagttacctttggtccatttggtggcacaaaacatcagggcacaacaactacaacaacttgtgctagcaaaccttgctgcatactctcagcaacatcagtttcttccattcaaccaactggctgcattgaactctgctgcttatttgcaacaacaattaccattcagccagctagttgctgcctacccccagcaatttcttccattcaaccaactagcagcattgaactctgctgcttatttacagcagcaacaactactaccattcagccagctagctgatgtgagccctgctgccttcttgacacaacaacagttgttgccgttctacctgcacgctatg

SEQ ID NO: 13482 - DNA, 533 bp, Zea mays
  unsure (1)..(533): unsure at all n locations; Clone ID: LIB3061-093-Q1-K6-E12
ngaacacaatagtgtaccaacaatggcagccaaaatttttgcctccttatgctccttggtctttctgcaagtgctgctacggcgaccattttcccgcaatgctcgcaagctcctatagcttcccttcttcccccgtacctctcaccagcggtgtcttcggtatgtgaaaacccaattcttcaaccctacaggatccaacaggcaatcgcagctggcatcttacctttatcacccttgttcctccaacaatcatcagccctattacaacagttacctttggtgcatttattggcacaaaacatcagggcacaacaactacaacaacttgtgctagcaaaccttgctgcctactctcagcaacagcagtttcttccattcaaccaactaggttcattgaactctgcttcttatttgcaacaacaacaactaccattcagccagctacctgctgcctacccccagcaatttcttccattcaaccaactagcagcattgaactctnctgcttatntacagcagcaaccactactacc

SEQ ID NO: 13483 - DNA, 408 bp, Zea mays
  unsure (1)..(408): unsure at all n locations; Clone ID: LIB3061-093-Q1-K6-E4
gnactctgctgcttatttgcaacaacaattaccattcagccagctagttgctgcctacccccagcaatttcttccattcaaccaactagcagcattgaactctgctgcttatttacagcagcaacaactactaccattcagccagctagctgatgtgagccctgctgccttcttgacacaacaacagttgttgccgttctacctgcacgctatgcctaacgctggcaccctcttacaactgcaacaattgctgccattcaaccaacttgctttgacaaacccaacagtgttctaccaacaacccatcattggtggtgccctcttttagattgcttatgagttatacttcaataatgaagttttttggatgatgtttgtggcttcccagaaataagaaagtacatttct

SEQ ID NO: 13484 - DNA, 624 bp, Zea mays
  Clone ID: LIB3061-093-Q1-K6-E5
acaatagtgtaccaacaatggcagccaaaatttttgcctccttatgctccttggtctttctgcaagtgctgctacggcgaccattttcccgcaatgctcgcaagctcctatagcttcccttcttcccccgtacctctcaccagcggtgtcttcggtatgtgaaaacccaattcttcaaccctacaggatccaacaggcaatcacagctggcatcttacctttatcacccttgttcctccaacaatcatcagccctattacatcagttacctttggtgcatttattggcacaaaacatcagggcacaacaactacaacaacttgtgctagcaaaccttgctgcctactctcagcaacagcagtttcttccattcaaccaactagctgcattgaactctgcttcttatttgcaacaacaacaactaccattcagccagctacctgctgcctacccccagcaatttcttccattcaaccaactggcagcattgaactctcctgcttatttacagcagcaacaactactaccattcagccagctagctggtgtgagccctgctaccttcttgatacaaccacagttgttgccgttctaccagcacgctgcgcctaacgctggcaccct

SEQ ID NO: 13485 - DNA, 369 bp, Zea mays
  unsure (1)..(369): unsure at all n locations; Clone ID: LIB3061-093-Q1-K6-E6
gngcccaactagcaacatagnaagcacaatagtgtaccaacaatggcagccaaaatttttgcctccttatgctccttggtctttctgcaagtgctgctacggcgaccattttcccgcaatgctcgcaagctcctatagcttcccttcttccnncccgtnaccctnctncaaccagcggtgtcttcggtatgtgaaaacccaattcttcaaccctacaggatccaacaggcaatcgcagctggcatcttacctttatcacccttgttcctccaacaaatcatcagcccttattacaannnagttaccttttggtgccattttattgggcacaaaacatcagggcacaacaactacaacaanncttgtgct

SEQ ID NO: 13486 - DNA, 583 bp, Zea mays
  Clone ID: LIB3061-093-Q1-K6-E8
gttccatcaatcatcattcatcttagtagtataggcaccaaatcaaatctgcaacatcaattatctaactccaaaaacctgaagctggtgcttgtggttcttgctttcattgctttagtatcaagtgtttcttgtacacagacaggcggctgcagctgtggtcaacaacaaagccatgagcagcaacatcatccacaacaacatcatccacaaaaacaacaacatcaaccaccaccacaacatcaccagcagcagcaacaccaacaacaacaagttcacatgcaaccacaaaaacatcagcaacaacaagaagttcatgttcaacaacaacaacaacaaccgcagcaccaccaccaacaacaacaacaacagcaccaacaacaacatcaatgtgaaggccaacaacaacatcaccaacaatcacaaggccatgtgcaacaacacgaacagagccatgagcaacaccaaggacagagccatgagcaacaacatcaacaacaattccagggtcatgacaagcagcaacaaccacaacagcctcagcaatatcagcagggccaggaaaatcacaacagcaacaatg

SEQ ID NO: 13487 - DNA, 638 bp, Zea mays
  Clone ID: LIB3061-093-Q1-K6-E9
gcaaacggcagtgcgtagagaggatcgtcgaacagaacagcatgaagatggtcatcgttctcgtcgtgtgcctggctctgtcagctgccagcgcctctgcaatgcagatgccctgcccctgcgcggggctgcagggcttgtacggcgctggcgccggcctgacgacgatgatgggcgccggcgggctgtacccctacgcggagtacctgaggcagccgcagtgcagcccgctggcggcggcgccctactacgccgggtgtgggcagccgagcgccatgttccagccgctccggcaacagtgctgccagcagcagatgaggatgatggacgtgcagtccgtcgcgcagcagctgcagatgatgatgcagcttgagcgtgccgctgccgccagcagcagcctgtacgagccagctctgatgcagcagcagcagcagctgctggcagcccagggtctcaaccccatggccatgatgatggcgcagaacatgccggccatgggtggactctaccagtaccagctgcccagctaccgcaccaacccctgtggcgtctccgctgccattccgccctactactgattcatgatatttgggaaatctcctctatccatctctctctatctatatatgtaataatgc

SEQ ID NO: 13488 - DNA, 653 bp, Zea mays
  Clone ID: LIB3061-093-Q1-K6-F10
ggcgctacccatgatgatggaatcggtttggagagaggattcagaacagcattgagtgacttcatactgatgcagcttcagttggcctcagttttcttcacgttctcattgggaacaaaaactcattactacggaaggacattactccatggaggagctgaatacagagccactggacgtgggtttgtggtgttccatgcgaaatttgctgacaactatcgactctattcccgtagccattttgtcaagggcattgagctgatgattctactagttgtgtatgaaatatttagccagccatatagaggggctgtaacttacatcttcatcaccgtgtccatgtggttcatggtgggcacttggctctttgcaccattcctgttcaatccttctggatttgagtggcagaagattgtggacgactggaccgattggcacaagtggatcagcaatcgtggaggtatcggtgtagcaccagagaaaagctgggagtcatggtgggaaaaggagcaagagccccttcgatactccgggaagcgcggtactgttgttgaaatactgcttgcgctgcgtttctttatctaccagtacggacttgtgtatcatctgaatataacgaagaagataacctaagacaaccagagtgtgctggt

SEQ ID NO: 13489 - DNA, 632 bp, Zea mays
  Clone ID: LIB3061-093-Q1-K6-F11
tgctgatgcaaaccgtgtatctgctatcattttgggcggaggcactggatctcagctctttcctctgacaagcacaagagctacgcctgctgtacctgttggaggatgttacaggcttattgatatccctatgagtaactgcttcaacagtggtataaataagatatttgtgatgagtcagttcaattctacttcgcttaaccgccatattcatcgtacataccttgaaggcgggatcaactttgctgatggatctgtacaggtattagcggctacacaaatgcctgaagagccagctggatggttccagggtacagcagactctatcagaaaatttatctgggtactcgaggattattacagtcacaaatccattgacaacattgtaatcttgagtggcgatcagctttatcggatgaattacatggaacttgtgcagaaacatgtcgaggacgatgctgatatcactatatcatgtgctcctgttgatgagagccgagcttctaaaaatgggctagtgaagattgatcatactggacgtgtacttcaattctttgaaaaaccaaagggtgctgatttgaattctatgagagttgagaccaacttcctgagctatgctatagatgatgcac

SEQ ID NO: 13490 - DNA, 620 bp, Zea mays
  Clone ID: LIB3061-093-Q1-K6-F12
ctttcctcgaattccccattctataaattccagttaaacttaattcgtaagatcaatcataattctcgagttgcaaaccatggacatggctttggcgtctaaagcctcccctccgccatggaatgccaccgccgccgagcagccaattccaaagcgtgacaaagccgctgcaaatgattcaacatacctcaatcctcaagctcatgatagtgttcttggaatcattctgggaggtggtgctgggactagattgtaccccttgacaaagaagcgtgccaagcctgcagtgccattgggtgccaactatagactgattgatattcctgtcagcaattgtctcaacagcaacatatccaagatctatgtgctaacgcaatttaactctgcttccctcaaccgtcacctctcaagagcctacgggagcaacattggagggtacaagaatgaagggtttgttgaagtcttagctgcacagcagagcccagataatccaaactggtttcagggtactgcagatgctgtaaggcagtacttgtggttgtttgaggagcataatgtgatggaatttctaattcttgctggcgatcacctgtaccggatggactatgaaaagttcattc

SEQ ID NO: 13491 - DNA, 625 bp, Zea mays
  unsure (1)..(625): unsure at all n locations; Clone ID: LIB3061-093-Q1-K6-F2
gcaacatagnaaagcacaatagtgtaccaacaatggcagccaaaatttttgcttccttatgctccttggtctttctgcaagtgttgctaccganaccattttcccacaatgctcacaagctcctatagcttcccttcttcccccatacctctcaccagcggtgtcttcaatgtgtgaaaccccaattgttcaaccctacaggatccaacaggcaatcgcaacaggcatcttaccattatcacccttgttcctccaacaaccgtcagccctattacagcagttacctttggtccatttggtggcacaaaacatcagggcacaacaactacaacaacttgtgctagcaaaccttgctgcatactctcagcaacatcagtttcttccattcaaccaactggctgcattgaactctgctgcttatttgcaacaacaattaccattcagccagctagttgctgcctacccccagcaatttcttccattcaaccaactagcagcattgaactctgctgcttatttacagcagcaacaactactaccattcagccagctagctgatgtgagccctgctgccttcttgacacaacaacagttgttgccgttctacctgcacgctatgcctaac

SEQ ID NO: 13492 - DNA, 654 bp, Zea mays
  unsure (1)..(654): unsure at all n locations; Clone ID: LIB3061-093-Q1-K6-F4
accggtccggncctcccggggcaaacggcgtgcgtagagggatctcgacagaacagcatgaagaggtcatcgttctcgtcgtgtgcctggctctgtcagctgccagcgcctctgcaatgcagatgccctgcccctgcgcggggctgcagggcttgtacggcgctggcgccggcctgacgacgatgatgggcgccggcgggctgtacccctacgcggagtacctgaggcagccgcagtgcagcccgctggcggcggcgccctactacgccgggtgtgggcagccgagcgccatgttccagccgctccggcaacagtgctgccagcagcagatgaggatgatggacgtgcagtccgtcgcgcagcagctgcagatgatgatgcagcttgagcgtgccgctgccgccagcagcagcctgtacgagccagctctgatgcagcagcagcagcagctgctggcagcccagggtctcaaccccatggccatgatgatggcgcagaacatgccggccatgggtggactctaccagtaccagctgcccagctaccgcaccaacccctgtggcgtctccgctgccattccgccctactactgattcatgatatttggngaaatctcctctatccatctctctctatctatatatgtaataatgc

SEQ ID NO: 13493 - DNA, 546 bp, Zea mays
  unsure (1)..(546): unsure at all n locations; Clone ID: LIB3061-093-Q1-K6-F5
cccccgccagnatcctgtggcgcaccatccgcgggatgattccgcacaagaccaagaggggggaggcggctctggcgaggctcaagacgtacgagggcgtcccgccgccgtacgacaagaccaagcgtatggtcatccctgacgctcttaaggttctgaggctacagcctggacacaagtactgcctcctcggcgagctctctaaggaggtcgggtggaactaccatgacaccatcagggaacttgaggagaagaggaaggagaaggccaaggttgcctacgagaggaagaagcaattggccaagctgcgtgtcaaggccgagaaggcagccgaggagaagttggggtctcagttggagattcttgcccctatcaagtactgaggagctgtgctttgtcatcagttttggggaacatctagtctttgttttaagtgttcggtaacagtttgtgacagtataatctggtaaaccgtgttatttttctgccactcctatttgaacacattttctagctggtgaatgaactgtttggtcgatcttgttc

SEQ ID NO: 13494 - DNA, 358 bp, Zea mays
  Clone ID: LIB3061-093-Q1-K6-F6
gaaagtggaatccagtagcaacaatagagcaacaatggcgaccaagatattttccctccttatgctccttgctctttctacatgtgttgctaacgcgacaattttccctcaatgctcacaagctcctatagcttcccttcttcccccataccttccatcaattatagcttcaatatgtgaaaacccagctcttcaaccatataggcttcaacaagcaatcgcagcaagcaacatacctttatcgcccttgttgtttcaacaatcgccagccctatctttggtgcagtcattggtacaaaccatcagggcacaacagctgcagcaactcgtgctacctctgatcaaccaagtagctctg

SEQ ID NO: 13495 - DNA, 622 bp, Zea mays
  Clone ID: LIB3061-093-Q1-K6-F8
gggtcatataatctcaacaaccattggagggaagatggagagcctaaaaagacttcagctacatggcagagagagttgtgggaactggatcattcggaatcgtcttccaggcaaaagtctggagactggtgagactgttgctatcaagaaggttttgcaggacaagcgctacaagaacagggagctgcaaatcatgcgatccatggatcactgcaatgctgtttccttgaagcattgtttcttctccaccacaagcagagatgaactttttcttaacttagtgatggagtttgttcctgagtcactacatcgtgtgctgaagcactacagcaatatgaaccagaggatgccgcttatttatgttaaattatatacctaccagatatttcgaggtttagcctatattcacacagtacctggtgtttgccacagggatgtgaaaccacagaatcttttggttgatccattgactcaccaagtgaagatatgtgattttgggagtgccaaaatgttggtcaaaggtgaagcaaacatttcatatatatgctcacgttattaccgtgctccagagctcatatttggggcaaccgagtacacaacatcaattgatatttggtcagct

SEQ ID NO: 13496 - DNA, 616 bp, Zea mays
  Clone ID: LIB3061-093-Q1-K6-F9
ggttcatctgccgccgccaccatgccactaccctactcaaccgccccggcctcagcctcatccccagccacacccatgcccgtgccaacagccgcatccaagcccgtgccagctgcagggaacctgcggcgttggcagcaccccgatcctgggccagtgcgtcgagttcctgaggcatcagggcagcccgacggcgacgccctactgctcgcctcagtgccagtcgttgcggcagcagtgttgccagcagctcaggcaggtggagccgcagcaccggtaccaggcgatcttcggcttggtcctccagtccatcctgcagcagcagccgcaaagcggccaggtcgcggggctgttggcggcgcagatagcgcagcaactgacggcgatgtgcggcctgcagcagccgactccatgcccctacgctgctgccggcggtgtcccccactgaagaaactatgtgctgtagtatagccgctggctagctagctagttgagtcatttagcggcgatgattgagtaataatgtgtcacgcatcaccatgggtggcagtgtcagtgtgagcaatgacctgaatgaacaattgaaatgaaaagaaaaaaatactccatctgttcc

SEQ ID NO: 13497 - DNA, 560 bp, Zea mays
  Clone ID: LIB3061-093-Q1-K6-G1
gtaccaacaatcataatacatataattagtatcagcactaaatgaaaaaatatcatgaattcttaagactccaaaaactatgaacaagggctttgacggtgacgattttatcgcaatgctctcaagctcctatagctcacattacttgccgcgtgacctttgaccagaagagcaatatcggtgtgtgaaatcataattcttaaaccctacatgatccaacacgcaatcacagactagcatcttacctttatcacccttgttaatacaaaaatcatcaagcctataacataacacacatacatgagcatcaataggaacaaaatattaaagaacaacaactacaacaacttgagctagaaaaacttgataactactgtaacaaacagaacattattgcatacaaccaaataaatatattgaactatactaattatttggaacaacaacaaataacattcatgaagaatacctaatacatacccatagaaatcaatatcattaaaacaactagcatcattaaactctcctgcttatacacagcactcacaactactaccatt

SEQ ID NO: 13498 - DNA, 376 bp, Zea mays
  unsure (1)..(376): unsure at all n locations; Clone ID: LIB3061-093-Q1-K6-G10
gcgccgccncggcgcgccggccggaggaagaggaggccggggccgncgcgagggccaaccacggggggaaccgccccnagaacacggcccggcccccgcggcgccggncggcgcgacccnccgggcggacaggaagaccggcgcagcgccgcacgcagcgccccgcgggggggggggacagnggcccaccaaggccgcggaagagccangngcagccgggagaacggccccancaaagaaaggggccggcaggagaaggcccaggncaagcgcggcagccnncggggcagaacgcgagacncaagggngaaacncgaccnggccaaggcgcgacggccgccgagggcggggcggaccaggcgngaccaggacgacg

SEQ ID NO: 13499 - DNA, 637 bp, Zea mays
  unsure (1)..(637): unsure at all n locations; Clone ID: LIB3061-093-Q1-K6-G11
nttgnaaaccaactagcaacatagnaaagcacaatagtgtaccaacaatggcagccaaaatttttgcctccttatgctccttggtctttctgcaagtgctgctacggcgaccattttcccgcaatgctcgcaagctcctatagcttcccttcttcccccgtacctctcaccagcggtgtcttcggtatgtgaaaacccaattcttcaaccctacaggatccaacaggcaatcacagctggcatcttacctttatcacccttgttcctccaacaatcatcagccctattacatcagttacctttggtgcatttattggcacaaaacatcagggcacaacaactacaacaacttgtgctagcaaaccttgctgcctactctcagcaacagcagtttcttccattcaaccaactagctgcattgaactctgcttcttatttgcaacaacaacaactaccattcagccagctacctgctgcctacccccagcaatttcttccattcaaccaactggcagcattgaactctcctgcttatttacagcagcaacaactactaccattcagccagctagctggtgtgagccctgctaccttcttgatacaaccacagttgttgccgttctaccagcacgctgcg

SEQ ID NO: 13500 - DNA, 502 bp, Zea mays
  Clone ID: LIB3061-093-Q1-K6-G12
acaatggcgaccaagatattttccctccttatgctccttgctctttctgcatgtgttgctaacgcgacaattttccctcaatgctgcacagctcctatagcttttcttcttcccccataccttccagcggggggggggcgatatgtgaaaacccagctctttaaccatataggcttgaacaagcaatcgcagcatgcaacatacctttatcgcccttgttgtttcaacaatcgccagccctatctttggtgcaggcattggtgcaaaccatcagggctcagcagctgcagcaactcgtgctacctctgatcaaccaagttgctctggcaaacctttctccctactctcagcgtcaacaatttgttgcatttaaccaactgtctacactgaaccctgctgcttatttgcagcaacacctattacccttttagccagctagctactgtgctctctcagcaacaacaactttttccattttacccattgggtcgcactgaacccc

SEQ ID NO: 13501 - DNA, 194 bp, Zea mays
  Clone ID: LIB3061-093-Q1-K6-G3
agcgtccgaaaaaaaaaaaaaaaaaaaaaaaaaaaaaaaaaaaaaaaaaaaaaaaaaaaaaaaaaaaaaaaaaaaaaaaaaaaaaaaaaaaaaaaaaaaaaaaaaaaaaaaaaaaaaaaaaaaaaaaaaaaaaaaaaaaggggggaaattttttaaaggtaaaaatgttgtgaattggttggggttttaatatt

SEQ ID NO: 13502 - DNA, 618 bp, Zea mays
  unsure (1)..(618): unsure at all n locations; Clone ID: LIB3061-093-Q1-K6-G4
ngacagttccttcagccccaactccagnatgttgctgaagcacaggccccagttgctgaggaggacgacgacgatgatgttgacctttttggtgaggagaccgaantgagaagaagctgctgaagagcgtgctgcagctgccaaggcttctggcaagaagaaagaatctgggaagtcatcagttttacttgatgtgaagccatgggacgatgagactgacatggccaagctcgaggaagctgttaggagtgtccagatggaagggctgctctggggcgcatccaagcttgtcccagttggatatggtatcaagaagctgcaaatcatgatgaccatcgtcgacgaccttgtctctgtcgacactctcattgaggactatctgtgcgctgagccagtgaacgagtacgtgcagagctgcgacatagttgccttcaacaagatctaggcgtgacttccgatcagtccttctcctggggtgctggcgatggtggtggctgggcaatgcaccagcctaatttatccatagctatatgtctgctttgtgtggccagtgatattgccgtgagtatttttggatcctattcgagtcgaatgtaccagtaccagagttaatttgct

SEQ ID NO: 13503 - DNA, 491 bp, Zea mays
  unsure (1)..(491): unsure at all n locations; Clone ID: LIB3061-093-Q1-K6-G6
tggtctttctgcaannnanaaacgggggagggggggggnnaaataaaaaaaaaaggaaggggtgaataaggagaangtttttttagaatggtgaaaagagttgtattagtttanttttttggggtggtacttttaacaaagggggtgtttgggtttgttgaaacccaaatttttaaaccttgggggggggagcgggcattaacggttggctttttaccttaataaaaaaagtacttcaacaattaataatccttataaaagaagttcccttgggggatttcttgggtccaaaaaataagggggcgaacaactaaaaaaattggggttagaaaaccttgctgcttactgtaagtatcagaagttttttcctttcaacaaactagttgattgaaattttgctgttaatttgcaacaaaaacaacaacatttcagcaagtaaactgctgcctaccccaagcaattgttttcattaaaccaaatgacagaattga

SEQ ID NO: 13504 - DNA, 626 bp, Zea mays
  Clone ID: LIB3061-093-Q1-K6-G7
attttgagcattcagaacacaccaagcgaagcgcactagcaacaacctaacaacaatggctaccaagatattatccctccttgcgcttcttgcgctttttgcgagcgcaacaaatgcgtccattattccacaatgctcacttgctcctagttccattattccacagttcctcccaccagttacttcaatggccttcgaacacccagctgtgcaagcctataggctacaacaagcgattgcggcgagcgtcttacaacaaccaattgcccaattgcaacaacaatccttggcacatctaacaatacaaaccatcgcaacgcaacagcaacaacagttcctaccagcactgagccacctagccatggtgaaccctgtcgcctacttgcaacagcagctgcttgcatccaacccacttgctctagcaaacgtagttgcaaaccagcaacaacaacaactgcaacagtttctgccagcgcttagtcaactagccatggtgaaccctgccgcctacctacaacagcaacaactgctttcatctagcccgctcgctgtggccaatgcacctacatacctgcaacaagaattgttgcaacagattgtaccagctctaactcagctagctgtgg

SEQ ID NO: 13505 - DNA, 646 bp, Zea mays
  unsure (1)..(646): unsure at all n locations; Clone ID: LIB3061-093-Q1-K6-G8
caactagcaacatagnaaagcacaatagtgtaccaacaatggcagccaaaatttttgcctccttatgctccttggtctttctgcaagtgctgctacggcgaccattttcccgcaatgctcgcaagctcctatagcttcccttcttcccccgtacctctcaccagcggtgtcttcggtatgtgaaaacccaattcttcaaccctacaggatccaacaggcaatcgcagctggcatcttacctttatcacccttgttcctccaacaatcatcagccctattacaacagttacctttggtgcatttattggcacaaaacatcagggcacaacaactacaacaacttgtgctagcaaaccttgctgcctactctcagcaacagcagtttcttccattcaaccaactaggttcattgaactctgcttcttatttgcaacaacaacaactaccattcagccagctacctgctgcctacccccagcaatttcttccattcaaccaactagcagcattgaactctcctgcttatttacagcagcaacaactactaccattcagccagctagctggtgtgagccctgctaccttcttgacacaaccacagttgttgccgttctaccagcacgttgcgcctaacgctggcaccctc

SEQ ID NO: 13506 - DNA, 630 bp, Zea mays
  Clone ID: LIB3061-093-Q1-K6-G9
attgctgcaaagcctttggatcttgttttaaagcgtgggagcatcattcagaaagcatcaaatactgatgggttaaccataatcccagagtatgattggaaattattctctgaagagtggagtgctacacctggaaaagtatatctgctgaaattgcttttagcaagagttctcaagacaaactgcatggatcatctgaagcagtgccgattacggatggaaatctaggccagtctcttgatgacacaaacgatgatttgggagccagagagccttatatcagaactgatcccgaggtttgtgaagaatgtattggcgaaagggagagctgtgcattggtggaaaaactcaactatcaaaatgaagatatccacgtttactttgtccatggaaaagaagcaccaaagtctattaaagaagcatctaaagctgttactgtaccagatcgtcggacatcgaagcgttcccggagaacaagctctggaaactcaatcagtttgaaagtctctggctctacatctgtctatcagttgaaactgatgatatgggaatctttagggattgttaaggagaaccaaatgcttcacaaaggctctgttgagattgaagatgattttgctactcttgctg

SEQ ID NO: 13507 - DNA, 582 bp, Zea mays
  unsure (1)..(582): unsure at all n locations; Clone ID: LIB3061-093-Q1-K6-H1
attacctttggtgcatttattggcacaaaactcagggcacaacaactacaacaacttgtgctagcaaaccttgctgcctactctcagcaacagcagtttcttccattcaaccaactagctgcattgaactctgcttcttatttgcaacaacaacaactaccattcagccagctacctgctgcctacccccagcaatttcttccattcaaccaactggcagcattgaactctcctgcttatttacagcagcaacaactactaccattcagccagctagctggtgtgagccctgctaccttcttgatacaaccacagttgttgccgttctaccagcacgctgcgcctaacgctggcaccctcttacaactgcaacaattgctgccattcaaccaacttgctttgacaaacccagcagcgttctaccaacaacccatcattggtggtgccctcttttagatttcttatgagttatagttcaataataaagttttttgtctgatgtttgtggcttcccagaaataagaaagtgacatttctngnnnaaaaaaannaanngaaaaaaaaaaaaaaaaaaaggggcgg

SEQ ID NO: 13508 - DNA, 650 bp, Zea mays
  Clone ID: LIB3061-093-Q1-K6-H10
attttgagcattcagaaacacaccaagcgaagcgcactagcaacgacctaacaacaatggctaccaagatattagccctccttgcgcttcttgccctttttgtgagcgcaacaaatgcgttcattattccacaatgctcacttgctcctagtgccattattccacagttcctcccaccagttacttcaatgggcttcgaacacctagctgtgcaagccaacatgcaacaacaagcgcttgcggcgagcgtcttacaacaaccaattgcccaattgcaacaacaatccttgccacatctaacaatacaagccatcacaacgcaacagcaacaacagttcctaccagcactgagccacctagccatggtgaaccctgccgcctacttgcaagagcagctgcttgcatccaacccacttgctctggcgaacgtagttgcaaaccagcaacaacaacagctacaacagtttctgccaacgctcagtcaactagccatggtgaaccctgccgcctacgtacaacaacaacaactgctttcatctagcccgctcgctgtgggcaatgcacctacatacctgcaacaacaattgttgcaacagattgtaccagctctgactcaactagctgtggcaaaccctgttgcctacttgcaa

SEQ ID NO: 13509 - DNA, 296 bp, Zea mays; identical to SEQ ID NO: 13470
  Clone ID: LIB3061-093-Q1-K6-H11

SEQ ID NO: 13510 - DNA, 627 bp, Zea mays
  Clone ID: LIB3061-093-Q1-K6-H2
cgttgcccttgctctcctggcgctcgctgcgagcgccgcctccagtacaagcggcggctgtggctgccagacaccaccgtttcatctaccgcctccgttctatatgccgcctccgttctatctgccgccgcagcagcagccgcagccatggcaataccccactcaaccaccgcagctaagcccgtgccagcagttcggatcctgcggcgtcggcagcgtcggcagcccgttcctgggccagtgcgtcgagttcctgaggcaccagtgcagcccggcggcgacgccctacggctcgccacagtgccaggcgctgcagcagcagtgctgccaccagatcaggcaggtggagccgctgcaccggtaccaggcgacatacggtgtggtcctgcagtccttcctgcagcagcagccgcagggcgagctcgcggcgctgatggcggcccaggtagcgcagcagctgacggcgatgtgcggtctgcagctgcagcagccaggtccctgcccttgcaacgcagctgccggcggtgtctactactgaggaaactatgtactgtagtaataatgtaatggagccgctgactagctacctatagggctatagctagttcactcgtttagcggcgatga

SEQ ID NO: 13511 - DNA, 637 bp, Zea mays
  unsure (1)..(637): unsure at all n locations; Clone ID: LIB3061-093-Q1-K6-H4
gcaacatagnaaagcacaatagtgtaccaacaatggcagccaaaatattttgcttccttatgctccttggtctttctgcaagtgttgctaccgagaccattttcccacaatgctcacaagctcctatagcttcccttcttcccccatacctctcaccagcggtgtcttcaatgtgtgaaaccccaattgttcaaccctacaggatccaacaggcaatcgcaacaggcatcttaccattatcacccttgttcctccaacaaccgtcagccctattacagcagttacctttggtccatttggtggcacaaaacatcagggcacaacaactacaacaacttgtgctagcaaaccttgctgcatactctcagcaacatcagtttcttccattcaaccaactggctgcattgaactctgctgcttatttgcaacaacaattaccattcagccagctagttgctgcctacccccagcaatttcttccattcaaccaactagcagcattgaactctgctgcttatttacagcagcaacaactactaccattcagccagctagctgatgtgagccctgctgccttcttgacacaacaacagttgttgccgttctacctgcacgctatgcctaacgctggcaccct

SEQ ID NO: 13512 - DNA, 345 bp, Zea mays
  Clone ID: LIB3061-093-Q1-K6-H5
cgctgtactgccctgctcattcagggagaatagggttgctgaccgtgcagtgcctatcgggtcctggtgtctttaagagtcggaggtgaatttgttgcaaggtcactatcacgagcgcactatttacatggggggagggggcctggggtaaatcactcaaaagttttcactcctaaaaagataagaacgttaggtagctaccgctgttatgatcctgcatcatgcatcctttacgttcgatggactcctgggaagacctggggtgtctggtacttcaggctttaattttgcttgatgtatggccgtgtgcggcacaatccctacttgtagtgagatcgctaccat

SEQ ID NO: 13513 - DNA, 651 bp, Zea mays
  unsure (1)..(651): unsure at all n locations; Clone ID: LIB3061-093-Q1-K6-H6
ggcccgtcggtctctcttgcagtctcgccgctccccttcctcccccgcaggaatccgaatcagtaagtccggcgacctaggtctctcggcttgtccgcagcccgccggtcagtaatggcgcaggatgatccggttgtttctgctcagtggctgcacgagcacctagggatgcctgatgttaaggttttggatgcttcctggtacatgncgcggtagagaacaggggatccatgngaaagaatatcaggtggcacacatccccggtgcgctattcttcgacttagatggcatagttgatcggacaactgatttaccgcacatgctgccatcagaagaggcttttgcagcagcaatttctgagctggatataaaaaaccaggataaagttattgtctatgatggaaagggattcttcagtgcacctcgtgtttggtggatgtttagagtgtttgggcacaagaaagtctgggtactagacggcggtttgcctcagtggcaagcttctgggttcaacgtggaaaaggccagccctgacgatgacgcagttctgaaatcaatcgctgcaaacagggctgtcaaaagggtttataatggtgaacagacaaatacaatctcgtttcagactgaatttcagcctaatctattctgggc

SEQ ID NO: 13514 - DNA, 641 bp, Zea mays
  unsure (1)..(641): unsure at all n locations; Clone ID: LIB3061-093-Q1-K6-H7
ngactagcaacatagnaaagcacaatagtgtaccaacaatggcagccaaaatttttgcttccttatgctccttggtctttctgcaagtgttgctaccgcaaccattttcccacaatgctcacaagctcctatagcttcccttcttcccccatacctctcaccagcggtgtcttcaatgtgtgaaaccccaattgttcaaccctacaggatccaacaggcaatcgcaacaggcatcttaccattatcacccttgttcctccaacaaccgtcagccctattacagcagttacctttggtccatttggtggcacaaaacatcagggcacaacaactacaacaacttgtgctagcaaaccttgctgcatactctcagcaacatcagtttcttccattcaaccaactggctgcattgaactctgctgcttatttgcaacaacaattaccattcagccagctagttgctgcctacccccagcaatttcttccattcaaccaactagcagcattgaactctgctgcttatttacagcagcaacaactactaccattcagccagctagctgatgtgagccctgctgccttcttgacacaacaacagttgttgccgttctacctgcacgctatgcctaacgctggcaccc

SEQ ID NO: 13515 - DNA, 634 bp, Zea mays
  Clone ID: LIB3061-093-Q1-K6-H8
atttctgcaagtgctgctacggcgaccattttcccgcaatgctcacaagctcctatagcttcccttcttcccccgtacctctcaccagcggtgtcttcggtatgtgaaaacccaattcttcaaccctacaggatccaacaggcaatcgcagctggcatcttacctttatcacccttgttcctccaacaatcatcagccctattacagcagttacctttggtgcatttattggcacaaaacatcagggcacaacaactacaacaacttgtgctagcaaaccttgctgcctactctcagcaacagcagtttcttccattcaaccaactagctgcattgaactctgcttcttatttgcaacaacaacaactaccattcagccagctacctgttgcctacccccaacaatttcttccattcaaccaactggcagcattgaactctcctgcttatttacagcagcaacaactactaccattcagccagctagctggtgtgagccctgctaccttcttgacacaaccacagttgttgccgttctaccagcacgctgcgcctaacgctggcaccctcttacaactgcaacaattgctgccattcaaccaacttgctttgacaaacctagcagtgttctacc

SEQ ID NO: 13516 - DNA, 650 bp, Zea mays
  unsure (1)..(650): unsure at all n locations; Clone ID: LIB3061-093-Q1-K6-H9
tagcaacatagnaaagcacaatagtgtaccaacaatggcagccaaaatttttgcttccttatgctccttggtctttctgcaagtgttgctaccgcaaccattttcccacaatgctcacaagctcctatagcttcccttcttcccccatacctctcaccagcggtgtcttcaatgtgtgaaaccccaattgttcaaccctacaggatccaacaggcaatcgcaacaggcatcttaccattatcacccttgttcctccaacaaccgtcagccctattacagcagttacctttggtccatttggtggcacaaaacatcagggcacaacaactacaacaacttgtgctagcaaaccttgctgcatactctcagcaacatcagtttcttccattcaaccaactggctgcattgaactctgctgcttatttgcaacaacaattaccattcagccagctagttgctgcctacccccagcaatttcttccattcaaccaactagcagcattgaactctgctgcttatttacagcagcaacaactactaccattcagccagctagctgatgtgagccctgctgccttcttgacacaacaacagttgttgccgttctacctgcacgctatgcctaacgctggcaccctcttacaactgca

SEQ ID NO: 13517 - DNA, 499 bp, Zea mays
  Clone ID: LIB3061-030-Q1-K1-E8-F2A
accataaatttcgataacatatatttgctcgaacttcttattttcagtaatcagctgcaaacacagaagttccaatcagttcatgcaacaagatgctacatacacacagattttctagaaactgttctaaggacaattaacagtaacgtagtacgtacatgtatcatgcatgcaataaaaaaaaatacacaccaatcaagctttttcaaacgaacgaacagacgaaggaatttggcatcagaaaccgggaacaagcacggtggagaaccagataacaaggtcgtcggcgagtgcctgtgcttcacggctggtgtgctttgccgccaccggctgcttgttcccatcggccacataaactcggcacagcggacaggttcgcttgcaggacgagagccaccggtcgacgcagtcccggtggaacacatggcgacacggcagtcggcgggtagcctcgccgagccgaatcttggacaggcagacgcggcactcgtccgctggg

SEQ ID NO: 13518 - DNA, 504 bp, Zea mays
  Clone ID: LIB3061-030-Q1-K1-E8-R2A
tgaccacggaaccacacccccagagaaaccattctacatattctcatatacactcattagcacatagcgctaggcgccataccaaccatgagcgacctgttatcctacatttccaaggtcatgtgcatcaaggcaagatcggaggcaacacaagccggcgaggacagcggctgcccagcggacgagtgccgcgtctgcctgtccaagattcggctcggcgaggctacccgccgactgccgtgtcgccatgtgttccaccgggactgcgtcgaccggtggctctcgtcctgcaagcgaacctgtccgctgtgccgagtttatgtggccgatgggaacaagcagccggtggcggcaaagcacaccagccgtgaagcacaggcactcgccgacgaccttgttatctggttctccaccgtgcttgttcccggtttctgatgccaaattccttcgtctgttcgttcgtttgaaaaagcttgattggtgtgtatttttttttattgcatg

SEQ ID NO: 13519 - DNA, 758 bp, Zea mays
  unsure (1)..(758): unsure at all n locations; Clone ID: LIB3061-050-B5-F6A
gccttgaatgtgctgaatattgttggctttacgcacttgacatcgaaagtaggaatgacgacatttgtcagcgtctcttccactctggtaccacccagcagatcactggtcactttgtgcaggtacttcccgtcatattttggcctgatcatcaccttaactgtttgtaggatcttgaagaaccagcccaaaatcccagttctggtcttgcagcatcagaacgaataacaaggtgaagtatttttttttccatgtagttttatagatatagtaatacatacatactgagacaaaacgcgaaattctggttaccttgtacataaacaatttagagatagataaaactgagcagtctcagatgggaaatcgtacagatattcgttaaacagctagccatacaaacctgcatgggaagatgcgaggactgtgctcgaggtagaatggcacgatgtccttggcctcatagcatggttgcttggcattgctcagcgacggagctgccagcattgcagcaataagaccacctgtgcttgtgccagcgatgacatcaaagtagttagctatgcgcgcgctgctcccatcaagctcctaaaaaaatgtaaaagaacaccaacgaataaatggcactcaaacttgcatgtatatatgcatttaggctcaaggaacaataaacgtgtagagtttacctggagtttagactcnaggaatgcangganggtagcagggatgacgcccttgaccccaccaacatcgatgct

SEQ ID NO: 13520 - DNA, 227 bp, Zea mays
  Clone ID: LIB3061-050-B5-F7A
ctttaggctcaaggaacaataaacgtgtagagtttacctggagtttagactcaaggaatgcaaggaaggtagcagggatgacgcccttgaccccaccaccatcgatgctcaagactgtgatcaggtttcccttgctgggtggtgggcatgcgtagttgttttccattgcaatggcaaaagaagtatgatgtgtgaccccccgtcttctcagcttttgtgaattaatt

SEQ ID NO: 13521 - DNA, 140 bp, Zea mays
  Clone ID: LIB3061-023-Q1-K1-H1.F2
cagacaaaaactttattattgaactataactcataagaaatctaaaagagggccccaccaatgatgggttgttggtagaatgctgttgggtttgtcaaagcaagttggttgaatggcagcaattgttgcagttgtaaaag

SEQ ID NO: 13522 - DNA, 141 bp, Zea mays
  Clone ID: LIB3061-023-Q1-K1-H1.R2
ctcttacaactgcaacaattgctgccattcaaccaacttgctttgacaaacccaacagcattctaccaacaacccatcattggtggtgccctcttttagatttcttatgagttatagttcaataataaagttttttgtctg

SEQ ID NO: 13523 - DNA, 447 bp, Zea mays
  Clone ID: LIB3061-038-Q1-K1-G7.F2
cgggataaatctcaatcaatatattggttatttttaggaaacacatgccgttttgggggccccattttcgggtccatctgatggggggggcgaaaagatggccccaccaacgatgggttgctgccacgacaaggcggggttcatcaaagagaactggttgtttggcagcaattgttgctgctgttggaaggcagcgaccaatgggttagccaccgctagtggattaagtaactgttgtcgctgttgtaggtccgcaccagagttcgacacagtcagttggttgaatggaagtagttgttgcaagtaggcagcagggtttgccacagctggctgagtaagagctggtacaatttgttgcagcaactgttgttgcaacaactgttgttgcgggtatgttgggtgctttgcccatagcgagcgggctagatgaaaaaaattgttgctgtt

SEQ ID NO: 13524 - DNA, 590 bp, Zea mays
  unsure (1)..(590): unsure at all n locations; Clone ID: LIB3061-038-Q1-K1-G7.R2
tctttcgcaggaacacacctagcgtaacgcactaggcacgacctaacaacaatggcttccaanacattgtccctccttgcgcttcttgccctttttgtgagtgcaacaaatgcgttcattattccacaatgctcacttgctccgagtgccattattccacagttcctccctccagttacttggagttgctnggggacacccagctgtgcaagcctattggctacaacaagcgcttgcggcgagcgtcttataacaaccaattgccctattacaacaacaatccttggctcatctaaccatacaaaccatcgcaacgcagcagcaacaagcactgagccacctagccgtggtgaaccctatcgcctacttgcaacaacagctgcttgcatccaacccacttgcttttttaaacgtagctgcataccaacaacaacaacagttgctacagtttctaccagcgctcagtcaactagccatggtgaaccctatcgtctacctacaacagcaacaacttctttcatctagccccgctcgctatgtggcaatgcacctacatacctgcaacaacagtttgttgcaacaacagttgc

SEQ ID NO: 13525 - DNA, 59 bp, Zea mays
  Clone ID: LIB3077-001-Q1-K1-A10
ggcgcccacgcgtccgcccacgcgtccgcccacgcgtccggactagttctagatcgcga

SEQ ID NO: 13526 - DNA, 66 bp, Zea mays
  Clone ID: LIB3077-001-Q1-K1-A2
ccacgcctcccactaggtctaaaacgggaaccggccgttttgaaggatccagcctaacttcgccgg

SEQ ID NO: 13527 - DNA, 241 bp, Zea mays
  unsure (1)..(241): unsure at all n locations; Clone ID: LIB3077-001-Q1-K1-B12
gtattgggtcacctatagtgacacctatgttcaatgcactgcacggcgttgaacagcgtaacgactgcgaaaaccatgtcaatacgccaagttaatcatcttgcagtacatagctgtttcaacagctggcatgctagcgaagatgcccgtaccgatcagccttgcaaacatgttcgcaaactgaacgggcaatgtgacgcgccatgtagcgcngcattaatcgcggctactgtcatggtta

SEQ ID NO: 13528 - DNA, 54 bp, Zea mays
  Clone ID: LIB3077-001-Q1-K1-D10
gcgcccacgcgtccgcccacgcgtccgcccacgcgtgcgctagttctagatcgc

SEQ ID NO: 13529 - DNA, 88 bp, Zea mays
  Clone ID: LIB3077-001-Q1-K1-E6
atccacactccctcaacctgaacttcaatgcgacgctctctttatcaccacactaagcgcgactactacttttattacgctcattgcc

SEQ ID NO: 13530 - DNA, 56 bp, Zea mays
  Clone ID: LIB3077-001-Q1-K1-F9
gcgcccacgcgtccgcccacgcgtccgcggacgcgtgggctagttctagatcgcga

SEQ ID NO: 13531 - DNA, 97 bp, Zea mays
  Clone ID: LIB3077-001-Q1-K1-G4
tccggaaggtccgaccgacgcgtccgcggacgcttgggctacccaggcgtccgggtatgcgtccgctagttctagatcgcgagcgggcgggctatac

SEQ ID NO: 13532 - DNA, 53 bp, Zea mays
  Clone ID: LIB3077-001-Q1-K1-H11
gcgcggacgcgtgggcggacgcgtgggcggacgcgtgggtagttctagatcgc

SEQ ID NO: 13533 - DNA, 51 bp, Zea mays
  Clone ID: LIB3077-001-Q1-K1-H4
acgcccacgcgtcaggcgaccccggacgcgtgggctagttctagatcgcga

SEQ ID NO: 13534 - DNA, 76 bp, Zea mays
  Clone ID: LIB3077-002-Q1-K1-A1
gtcatatcgcgtctattgtgttaactacactgaacgcactggcacgaacgtttacaacgtcaaagactgtgacgac

SEQ ID NO: 13535 - DNA, 63 bp, Zea mays
  Clone ID: LIB3077-002-Q1-K1-A2
tccccgtccgaattccggtcgcccacgcctccgccacgccgtccgtagttctagatcgcgagc

SEQ ID NO: 13536 - DNA, 135 bp, Zea mays
  Clone ID: LIB3077-002-Q1-K1-B3
caggacacgccctgtaacggcccattaaacgccgcgtgcattgaggttacccgcaacgttaccgccacactttccaacaccctaactaccgctccttttagctccctaccctccttttttgccaccttcgtcggc

SEQ ID NO: 13537 - DNA, 56 bp, Zea mays
  Clone ID: LIB3077-002-Q1-K1-C3
gtcgacgcacgcctcctcccacgcgtcctgactagctgtagatcgtgagcatccaa

SEQ ID NO: 13538 - DNA, 157 bp, Zea mays
  unsure (1)..(157): unsure at all n locations; Clone ID: LIB3077-002-Q1-K1-C4
attacatactagcccatgctacgtgaganttcatgtaacatgttaactaaattctactcactactcaatacattacaactaccttactattaaaacaattgagttacccaacttattcaacttccagaacataatccttttgacaacaagcatctta

SEQ ID NO: 13539 - DNA, 53 bp, Zea mays
  Clone ID: LIB3077-002-Q1-K1-C6
cggacgcgtgggcggacgcgtgggcggacgcgtgggctagttctagatcgcga

SEQ ID NO: 13540 - DNA, 444 bp, Zea mays
  Clone ID: LIB3077-002-Q1-K1-D11
ccgaattcccgttcgaaccactcgatcccccactcttcacgaattccgcacgatactatgcgtttttgctacgtgggcttactaacaaaagtttgttttcctttaaaggtaaaacggcaaaatattcatatatctttttttcaactaatactgatcgagaacaatattatcatacaagtaacattctcaaatacacgaagttttttattaaacaaatccaatgatatctcagatttatgcgatgctcatgttgctttaattgttttctctaacaaaggaaaactctatgagttctcttctgatcccatcatggacaggatcctagaacgataccaacgacaaatatatgccccaactggttctgaatcacacgcaaatttgtctttggaatcttccaaactcatgtcaactattgaagtctttcaaaagaactttaagaacttt

SEQ ID NO: 13541 - DNA, 364 bp, Zea mays
  Clone ID: LIB3077-002-Q1-K1-D4
tcctactagtactaaaccgacacctcctctaactatattatccatctcttacactctatctaaacgatgcatacttacgcactcatgcaacctaatatctatttacatatatatagttacataaaatcaactcactgacaatctacatacatacatacttacatagaccatcactacattaccctaattactcttctagcaatacataatattctcacctgctataataataacaaaaattccacaaactatctttcttaacaacagctcctccatattaatcactaatcgcaccccttctgcagctcatcatcaacctcacctgttctctttactacccgcaacatcactactattcttatca

SEQ ID NO: 13542 - DNA, 73 bp, Zea mays
  Clone ID: LIB3077-002-Q1-K1-E1
cccacgcgtccgcccacgcgtccgcccacgcgtacgcccacgcgtgcgcccacgcgtgcgaggggtaaatcgc

SEQ ID NO: 13543 - DNA, 124 bp, Zea mays
  Clone ID: LIB3077-002-Q1-K1-E5
tgacacgccctgtatcggcgcatttaacgcgccgcgtgtgttgggtacacgcacagtgtcccctatactttccagcgcgctatagcccgctcttttcgctctctttcctttctttctctccaca

SEQ ID NO: 13544 - DNA, 64 bp, Zea mays
  Clone ID: LIB3077-002-Q1-K1-E8
cccacgcgtccgcccacgcgtccgcccacgcgtccgcccacgcgtccgcccacgcgtccgggga

SEQ ID NO: 13545 - DNA, 89 bp, Zea mays
  Clone ID: LIB3077-002-Q1-K1-F12
tcgggcgtgttacttcatagcggtggtatagtaacacctaaaattaattcactttccatcactttacaacttcgtaactcctaaaactt

SEQ ID NO: 13546 - DNA, 310 bp, Zea mays
  Clone ID: LIB3077-001-Q1-K1-C11
cgggctcacccacgcgtgcgctaacgctagatctagagctagagctctagaggaggctatcttacatacacgctcatgcaagcttgtgggcgatgtattgggtcgcctatagtgaattcactggccagatgactacaacgtggtgaacagcaaaacgactgcgataaccatgttaatagccttgttactcatcttgctgtagatagctggcgtgatagctgacaggctagcaacgatggccgttccgaacagtcgtgcaaactgaatggcaaacgggacgcgcactgtaacggggcatgaagcgccgcat

SEQ ID NO: 13547 - DNA, 115 bp, Zea mays
  Clone ID: LIB3077-001-Q1-K1-D2
accggaccggaaggctcggcccgagcgtcgcgtgagcgcacgcgttcgagacgccagcgtacggccgcctgcttgcgaccgcatacctcttgtatggtgtcacctaaagtcaatt

SEQ ID NO: 13548 - DNA, 230 bp, Zea mays
  Clone ID: LIB3077-001-Q1-K1-D5
gccttacgttctttaagatccaagccaacttatccaaacgtgtgactctttagtacgggtacctgaaatccaattactagtccatagttttacatctacttaattggaaaaaccttgactttcccaacttaaatcgctttcaacttattccccctttacctaattgccttataaccaataagcccttaaccatatgcctttccaaccaattgcccatcctcaatctcaat

SEQ ID NO: 13549 - DNA, 163 bp, Zea mays
  Clone ID: LIB3077-001-Q1-K1-F10
aattcccgttcgacccacgcgtgcgcactcgcattcgaactcgatctacctctctatcggatcctatctaagatacactctcacgcgctctgtcatctcttctagtaggtcacctatattcactcctctatccaactcactatatcttcttttacaacaactc

SEQ ID NO: 13550 - DNA, 170 bp, Zea mays
  Clone ID: LIB3077-001-Q1-K1-G3
ggtccggaattcccgggtccgaccaacccgtcggccacgccttcggccaagccttcggactaggtctagaacggcagccggccgttttgaagatgccaggttacctacgcctgcctgccacgttataacttttctattggggcaacttaattcaattcaattggcggcgg

SEQ ID NO: 13551 - DNA, 218 bp, Zea mays
  Clone ID: LIB3077-001-Q1-K1-H10
gtcattgtctctagtaaatgggagcttacatactcttgcatcccacgacatacatattatctaccactacaaaaattcaatctactcctcttcttaataccttgtaaccaatttttttatccatcactatacaaaaataaataaactatctatacatataatttttctcagatcactttatagcgtataagttaacaccgatccccatttccaacatt

SEQ ID NO: 13552 - DNA, 175 bp, Zea mays
  unsure (1)..(175): unsure at all n locations; Clone ID: LIB3077-001-Q1-K1-H6
attcccgggccgaccgacgcgtacgcccacgcgtacgctatatctcgagcttgctttctagagcatccaagctcacgcacgcgatgatacnacggcataggtcttctatcatgccacctaaaatcaattctctagtcgtacctatacaacatcgacactccgaaaaccaatcacg

SEQ ID NO: 13553 - DNA, 472 bp, Zea mays
  Clone ID: LIB3077-002-Q1-K1-A11
ctgaattcccgtctcgacctacgcggtcgctcacgctacatcactacatcacgagctaccagagttatacatgacgtgcgtgaacatcattgaacggatcgtttccaaagtgctaatggccaaacttcaaatgtcccttcgaagactgaccaatacatgccacaacaccctcaaaaagagagttcacaacatgtaattgctgattctcatgataacttcgaagctaagttgaaagaagttgatgttaaagtcgaaactcctgtgaatcaaaagaaatcacaggagcaaaatgctggtactccacaaacggtagtccaggaccaacttgatgaggctcaaggactgcttaaaaccaccaattctactggtcaatcaaaagaggcaagactagctcgggtttgtgctggactttcatcccgtctccaagaatacaaatccgagaatgcacagctttgagagcttctaattgctt

SEQ ID NO: 13554 - DNA, 419 bp, Zea mays
  Clone ID: LIB3077-002-Q1-K1-A6
atttgattctacacaacgttctacacattgctaggggggaattattattttattagggctactatatttaatttaatcgtccttcttttaccaactttataactggaaaacccttgcgataaccatattaatcctcttggaaatcattcttctttctacaagttgactaactaccaaaaaggccccaactaaccttctttacaaccatttccccatcttaattgccaattggacccctccttctacccattatttaacgccgcagttgttgttactaccatcatgattaccagtataattagcaatctacttaccaccgctttatttggttttcttcccttcttttttacttacttcgtctgtttttccccataaattattaatcgggtgcttcctttaatgctaccaattaatttttt

SEQ ID NO: 13555 - DNA, 62 bp, Zea mays
  Clone ID: LIB3077-002-Q1-K1-A7
cccacgcgtccgcccacgcgtccgcccacgcgtccgcccacgcgtccgcggacgcgtgggtg

SEQ ID NO: 13556 - DNA, 61 bp, Zea mays
  Clone ID: LIB3077-002-Q1-K1-A8
cggacgcgtgggcggacgcgtgggcggacgcgtgggcggacgcgtgggcggacgcgtggga

SEQ ID NO: 13557 - DNA, 98 bp, Zea mays
  Clone ID: LIB3077-002-Q1-K1-C2
ctcacgctacatactaagcctacattgtaaacgatccaagcatacgtacccatccatcctacggtataactctactatagtgtcacccaaattcaatt

SEQ ID NO: 13558 - DNA, 378 bp, Zea mays
  Clone ID: LIB3077-002-Q1-K1-C5
accacgcgtccgtccacgccttcgtccacgcatcctctagttctacatccccatccgtcgggctagatgatccatgcttacggactccttcattcgacttaatagctcttctataacgtcatcttaactcaactcactggccggctacctacaattaatttgactgcgaaaactctttctttacccagcttaattgctatgcagcacatacccatctctcctgcttacctactatcgaacatgctggctcctaactcgcactctaacatgtagcgcatcattaatggcgaatggtacgctccctacacccagacatgaagctccactagcgagctagctaccgctcgcttctctcgctttcttgccttcctttctacg

SEQ ID NO: 13559 - DNA, 123 bp, Zea mays
  Clone ID: LIB3077-002-Q1-K1-D2
attccctcgtcgacccactcctccgatacatcatcagcagccgctctacaagatcctaccttacgtactcctccatgctacggcagaactcttctataatgtcacctagtttcaatacactac

SEQ ID NO: 13560 - DNA, 201 bp, Zea mays
  Clone ID: LIB3077-002-Q1-K1-E2
tctagaggatccacgctcacgtacgcggtcattcgacgacataccctctatataatgtaacctaaattcaattcacatgccaccgatatacaactgtatgactgacaaaaccctaacttaatccaccttaatctacatgcaccacattcgcatatcgccagctgtcctaatatcaaataggcttcgcacccatcgcccttt

SEQ ID NO: 13561 - DNA, 255 bp, Zea mays
  Clone ID: LIB3077-002-Q1-K1-F2
aattccctcgtcgacccactcctcctaccactctttctctacatctctagccttttttctagacgatccaatcttacatactcgttcgtgctatttcatatctattatataatctcacctacattcacatcacatatcctacctttactatcatctaactaaaaaaactctacctttactcaacttacaatctcttcactacataaacctttctccatctcaacttaatctaatacaccatatcctattttcctt

SEQ ID NO: 13562 - DNA, 153 bp, Zea mays
  Clone ID: LIB3077-002-Q1-K1-F8
tcctgaattcccgggtcgacccactcgtcctcccactcttccgctcactcttcctcccactcttccgaccactcatccgactagttctagaggtccttcttcctctctagaggagccaatctaacttacacttgcatgctactttctacctct

SEQ ID NO: 13563 - DNA, 273 bp, Zea mays
  Clone ID: LIB3077-002-Q1-K1-G2
tctagaagatccaagcttacctacgccttcattcggcgtcattactcctctattggggcaccttaattcaattcacttgccctcgttttacaacctcctgacttggaaaacccttgcctttcccaactttattgcctttcaacacattcccctttttccaacttgccttattaccaaaaagcccccaaccaatggcctttccaacaatttccccaccctaattgccaattggaccccccccttaaccgcgcctttaaccccgccggttttgtg

SEQ ID NO: 13564 - DNA, 118 bp, Zea mays
  Clone ID: LIB3077-002-Q1-K1-G7
tctctatattatccaagcttacttacgcttacatgctgcaatttttctaatatatagtggccccaaattaaattacattccccctcttttcaaaaccttgaccctgcaaaaccactcc

SEQ ID NO: 13565 - DNA, 76 bp, Zea mays
  Clone ID: LIB3077-002-Q1-K1-G8
tcccggtcgacccactcgtccgcccacgcatacggttctagatcgcttttattttttcaaaattacccacccttac

SEQ ID NO: 13566 - DNA, 221 bp, Zea mays
  Clone ID: LIB36-013-Q1-E1-D10
cccacgcgtccgcggcgcgatcgacaacgagatgaccatcgtgctggccagcatatccacggcgtgcaagcagatcgcggcgctggtgcagcgcgcgcccatctccaacctcacgggcgttcacggcgccgtcaacgtgcatggcgaggaccagaagaagctcgatgtcgtctccaacgaggtgttctccaactgcctcaagtcgagcgggcgcaccggcg

SEQ ID NO: 13567 - DNA, 443 bp, Zea mays
  Clone ID: LIB36-007-Q1-E1-C9
gccacgtttggtagttgctacttgctacaccggaggaagaagaacaagtagtgcttttcttctcttgtcacgttcacggggcggccgatcgaccgttcacctcgcccgacggcccaagcagcccatgtcttcgtcgggcccctccccggcgacgggaatccacgcgtcgccgccgttgggccttttgccggcgacgggaacccatcacaccaggtcatggggcaaaacaacctccacaagttttactggttctaccaccaaacatgagcagagcttgcatggaaatgttaagccgttgcaattggcggcaaatgaatcctctcgtttggcttacagaagtccagcacttaaaaaccagtggaatcttcctgctagttcttcctccactaatgtggttaccacctttgatgataacgaacacgtgtcctccagtgttattgaag

SEQ ID NO: 13568 - DNA, 334 bp, Zea mays
  Clone ID: LIB36-016-Q2-E2-G10
ctcaggactgggtatccatgccaggtgttataccggtggcttctgggggtattcatgtttggcatatgccagctctgaccgaaatctttggagatgattccgtattacaatttggtggaggaactttaggacatccttggggaaatgcatctggtgcagcagctaatcgtgtggctttagaagcctgtgtacaagctcgtaacgaagggcgcgatcttgctcgtgaaggtaatgaaattatcaaagcagcttgcaaatggagtgctgaactagccgcagcttgtgaaatatggaaggagatcaaatttgatggtttcaaagcgatggataccat

SEQ ID NO: 13569 - DNA, 433 bp, Zea mays
  Clone ID: LIB36-010-Q1-E1-H9
cgtcgacctgctcccggacatccgcgtcgtcgtcggcgaccccttcaactccgacccggacgaccccgaggtcatgggccccgaggtccgccagcgggtcctgcagggggacaccggcctccccgtcaccaccgccaagatcaccatggtcgacctgcccctcggcgccaccgaggaccgcgtctgcggcaccattgacatcgagaaggcgctcaccgagggcgtcaaggcgttcgagcccggcctgctcgccaaggccaacaggggcatactgtacgtcgacgaggtcaacctgctggacgaccacctcgtcgacgtgctgctggattccgctgcgtcggggtggaacacggtggagagggagggtatctccatatcccaccctgctcgcttcatcctcatcggctctggtaacccggaggaaggggagctc

SEQ ID NO: 13570 - DNA, 422 bp, Zea mays
  Clone ID: LIB36-021-Q1-E1-D9
cgaccatcaagaagctgaggtcgtacgcggacaggatcagggcctcggagctcgagaagtgcctgcagaaagtaggtgaggacgccctcaccaagaagatgaggagagccatcgaggagctgagcaccggcatcgttaacaagctcctccatggcccgctgcagcacctgaggtgcgacggcagcgacagccgcacccttgacgagacgctcgagaacatgcacgccctcaaccggatgttcagcctcgacatggagaaggcgatcatcgagcagaagatcaaggccaaggtggagaagacacaaaactgaggccaggaagcaatttttctaccaccattatctatatatatagcgtctccaatctcattccatttttttatcctttcactcagtgagcccttcccctgctcactgtgatcg

SEQ ID NO: 13571 - DNA, 457 bp, Zea mays
  Clone ID: LIB36-016-Q2-E2-H11
agcccacgcgtccgcccacgcgtccggtgaaatcccgcacctacctccttcctctctcaccgaggaccctcgcaccaagaactgagcgggaagagaggtagagaggcaagcgcacgagagtttctgctcctagtctcgtctcgccccgcctccgtctcctttccctctctggttctctctctgcgattctcgtcgcattggttccgttccctcacgaaaggcggtagctttctgtcttccctgatctatctagataatggcgaccacgacgtcagcgaccaccgccgcagcagcagccgccaccatcgccaagccgcgggggtcgtcgtcggacctctgccagagggtggccggcggcggcaggcggtgctccggggtggtgccgtgcgacgccgccggcgtggaggcccaggcgcatgccgtggcaaatgcggccagcgtcgccgccctcgagcag

SEQ ID NO: 13572 - DNA, 399 bp, Zea mays
  Clone ID: LIB36-005-Q1-E1-G5
accacgcgtccgcatacaaggacagcaaggtgtgcaacatgctgacgatgcaggagttccaccgccggtaccacgaggagacgggcgtgaccttcgcgtcgctctacccgggctgcatcgccaccacgggcctgttccgcgagcacatcccgctgttccgcctgctcttcccgccgttccagaagtacatcaccaaggggtacgtctccgaggaggaggccgggaagcggctggcgcaggtggtgagcgaccccagcctgaccaagtccggcgtgtactggagctggaacaagaactccgcgtccttcgagaaccagctctctgaggaggccagcgacgccgacaaggccaagaagctctgggagatcagcgagaagctcgtcggcttggcgtgatgcc

SEQ ID NO: 13573 - DNA, 427 bp, Zea mays
  Clone ID: LIB36-010-Q1-E1-D5
caggcacggcgacttcttctctgccctgctcaaggctcagccgcagttcctcaatgactggaaggccaagctctggtcacggttcttctgcctctcggtgtatgtgaccatgtacctgaatgactgccaacgcactgcattctatgagggaattggtctggacaccaaagaattcgacatgcatgtgatcatcgagaccaaccgcacaacggcgaggatcttccctgctgtcctagacgtcgagaaccccgagttcaagatgaagcttgacaggatggttgagatcaaccagaagatcattgccgtcggagagtccgacgaaatccccctagtgaagaacctgaagaggattcctcttgtcgcctctctggtgtccgagatcatcgccgcatacctcatgccccccatcgagtctggctcggttaat

SEQ ID NO: 13574 - DNA, 413 bp, Zea mays
  Clone ID: LIB36-009-Q1-E1-H8
cccacgcgtccgcccacgcgtccgcggacgcgtgggcactcccgggtctccagcattcctatcctctccccgcccgcccgtgccgccgccgcggcttcccttcctctcccgagccaagatgaatgttgaaaagctcaagaagatggcaggtgctgtgcgcaccggggggaagggtagcgtgcgcaggaagaagaaggcagtccacaagactacaaccacagatgacaaacggcttcaaagcaccttgaaaagaataggagtgaacagcattcctggtattgaagaggtcaacatctttaaggatgatgttgttattcagtttgtaaatcctaaagtgcaagcgtcaattggtgctaatacatgggttgtcagtggaactcgacagacaaagaagctgcaagatctgcttccgt

SEQ ID NO: 13575 - DNA, 389 bp, Zea mays
  Clone ID: LIB36-022-Q1-E1-A4
atcaagaatatggcgggtgctgtgcgcactggaggaaagggcagcatgcgcaggaagaagaaggcagtccacaagaccgcaaccaccgatgacaagcggcttcagagcacgttgaaaagaattggagtgaacactattcctggtattgaggaggtcaacatcttcaaggatgatattgttatccaattccagaaccctaaagtgcaagcatccattcctgcaaatacatgggtagtcagtggagtaccccagacaaaaagtctacaagaccttctgccaacaattatcaaccaactgggccctgataacctggagaacctcaagaggcttgctgagcatttccagaagcaggtacctggtgccgaagccagcgccagtgcagctgccca

SEQ ID NO: 13576 - DNA, 415 bp, Zea mays
  Clone ID: LIB36-014-Q1-E1-C9
ctcgagaagctcaagcacaagaaaaagagactcgtccagtcgcccaactccttcttcatggatgttaagtgccaggggtgcttcagcataaccactgttttcagccactcccagactgttgttgtgtgccctggctgccaaactgtcctctgccaacccacaggaggaaaggcaaggctcactgagggctgctctttccgcaggaagggagactagagcggatgtggtcttcaagttttgctctatgccagatactagcgtcatgaactgcctttagctaagattttccataagttgttctcgagcagctatgtgttgcatgttggctacttccaaacttatatctggtttggtttggattgtgatgaactaatggctctttgaatttatattatgatgttgacgatatttggtg

SEQ ID NO: 13577 - DNA, 419 bp, Zea mays
  Clone ID: LIB36-015-Q1-E1-D6
ggccatttctttggatgacccgaaagcatctcttgtgaacgacgtggatgatgttgagaagcattttccggggacactgactgccatcagagactggttcagagactacaagatacctgatggaaagcctgccaacaaatttggtctcggcaacaagcccgcaagcaaggaatacgccctgaaggtcattcaagagaccaacgaatcatgggagaaattggtaaagagaaatattcccgctggagagctctcgttggcctgattttggcccatggaagccaccacattcttttgaactgctttcgtgagcatgtcgttttgtatgctgtgaccatgcttcttcgtttgcattccaaaccttttttacgaactgtttaacaaaaatgatcttgtcggataaataatgattctggtgcgag

SEQ ID NO: 13578 - DNA, 421 bp, Zea mays
  Clone ID: LIB36-019-Q1-E1-A7
ctgaatttggtgctgcagctgatggagatgctgaccgcaacatgattcttggtaaaagattctttgtgacaccgtcggactctgttgccattatcgcagccaatgctgttcaatcaattccttactttgcttctggcctgaagggagttgccaggagcatgccaacatctgctgcccttgatgttgttgcaaagaatttgaaccttaagttctttgaggtgcctactggatggaagttttttgggaatttgatggatgctggaatgtgctcaatctgtggtgaagaaagctttggcactgggtctgaccacattcgtgagaaggatggcatctgggctgtgcttgcatggctttcaattattgctttcaagaataaggacaaacttggaggagataagcttgtcactgttgaagatattgt

SEQ ID NO: 13579 - DNA, 262 bp, Zea mays
  Clone ID: LIB36-014-Q1-E1-A2
cccacgcgtccgctcccctccacgagttccttccagaagggaacatcgaggacattgtaagtgaattatgtgctgagacgggagccaaccaggaggatgccctcgcgcgaattgaaaagctttcagaagtaaacccgatgcttggcttccgtgggtgcaagcttggtatatcgtaccctgaattgacagagatgcaagcccgggccatttttgaagctgctataacaatgaccaaccacggtgttcaagtgttcccagagat

SEQ ID NO: 13580 - DNA, 288 bp, Zea mays
  Clone ID: LIB36-013-Q1-E1-B6
cccacgcgtccgggaactggggcatcaagtgactcttatccgccaagttgctgagaaagtgttcgccaatgtgggcaagactatcgggtacaaagttggaacaatgattgagatccccagggcagctctggtggctgatgagatagcggagcaggctgaattcttctccttcggaacgaacgacctgacgcagatgacctttgggtacagcagggatgatgtggggaagttcattcccgtctatcttgctcagggcatcctccaacatgaccccttcaaggtcctgaa

SEQ ID NO: 13581 - DNA, 367 bp, Zea mays
  Clone ID: LIB36-021-Q1-E1-G7
cccacgcgtccgcggacgcgtgggcgcgcgtgggcggacgcgtgggcagaggtctgacttcgaaggcattttccgtgctatggatggactcccggtgaccatccgactcctggaccctcccctccacgagttccttccagaagggaacatcgaggacattgtaagtgaattatgtgctgagacgggagccaaccaggaggatgccctcgcgcgaattgaaaagctttcagaagtaaacccgatgcttggcttccgtgggtgcaggcttggtatatcgtaccctgaattgacagagatgcaagcccgggccatttttgaagctgctatagcaattgacaaccagggtgttcaagtgttcccagagata

SEQ ID NO: 13582 - DNA, 337 bp, Zea mays
  Clone ID: LIB36-002-Q1-E1-F3
caatgattgagatccccagggcagctctggtggctgatgagatagcggagcaggctgaattcttctccttcggaacgaacgacctgacgcagatgacctttgggtacagcagggatgatgtgggaaagttcattcccgtctatcttgctcagggcattctccaacatgaccccttcgaggtcctggaccagaggggagtgggcgagctggtgaagcttgctacagagaggggccgcaaagctaggcctaacttgaaggtgggcatttgtggagaacacggtggagagccttcctctgtggccttcttcgcgaaggctgggctggattatgtttcttg

SEQ ID NO: 13583 - DNA, 353 bp, Zea mays
  Clone ID: LIB36-021-Q1-E1-F1
cggacacgtgggctgagacgggagccaaccaggaggatgccctcgcgcgaattgaaaagctttcagaagtaaacccgatgcttggcttccgtgggtgcaggcttggtatatcgtaccctgaattgacagagatgcaagcccgggccatttttgaagctgctatagcaatgaccaaccagggtgttcaagtgttcccagagataatggttcctcttgttggaacaccacaggaactggggcatcaagtgactcttatccgccaagttgctgagaaagtgttcgccaatgtgggcaagactatcgggtacaaagttggaacaatgattgagatccccagggcaacctctggtggc

SEQ ID NO: 13584 - DNA, 378 bp, Zea mays
  Clone ID: LIB36-014-Q1-E1-D12
ctatcgggtacaaagttggaacaatgattgagatccccagggcagctctggtggctgatgagatagcggagcaggctgaattcttctccttcggaacgaacgacctgacgcagatgacctttgggtacagcagggatgatgtgggaaagttcattcccgtctatcttgctcagggcattctccaacatgaccccttcgaggtcctggaccagaggggagtgggcgagctggtgaagcttgctacagagaggggccgcaaagctaggcctaacttgaaggtgggcatttgtggagaacacggtggagagccttcctctgtggccttcttcgcgaaggctgggctggattacgtttcttgctcccctttcagggttccga

SEQ ID NO: 13585 - DNA, 413 bp, Zea mays
  Clone ID: LIB36-004-Q1-E1-D1
gcaatgaccaaacagggtgttcaagtgttcccagagataatggttcctcttgttggaacaccacaggaactggggcatcaagtgactcttatccgccaagttgctgagaaagtgttcgccaatgtgggcaagactatcgggtacaaagttgggacaatgattgagatccccagggcagctctggtggctgatgagatagcggagcaggctgaagtcttctccttcggaacgaacgacctgacgcagatgacctttgggtacagcagggatgatgtggggaagttcattcgcgtcgatcttgcttagggcatcctccaagatgaccccttcgaggtcggtggccggagggcagtgggcgaacgggaagtttgcacagagaggggcgcaaagcaggcctaacttgaagtgggcat

SEQ ID NO: 13586 - DNA, 417 bp, Zea mays
  Clone ID: LIB36-015-Q1-E1-F9
cccacgcgtccgcccacgcgtccgcccacgcgtccggtaagtgaattatgtgctgagacgggagccaaccaggaggatgccctcgcgcgaattgaaaagctttcagaagtaaacccgatgcttggcttccgtgggtgcaggcttggtatatcgtaccctgaattgacagagatgcaagcccgggccatttttgaagctgctatagcaatgaccaaccagggtgttcaagtgttcccagagataatggttcctcttgttggaacaccacaggaactggggcatcaagtgactcttatccgccaagttgctgagaaagtgttcgccaatgtgggcaagactatcgggtacaaagttggaacaatgattgagatccccagggcagctctggtggctgatgagatagcggagcaggctgaa

SEQ ID NO: 13587 - DNA, 400 bp, Zea mays
  Clone ID: LIB36-004-Q1-E1-F10
accacgcgtccggaacatcgaggacattgtaagtgaattatgtgctgagacgggagccaaccaggaggatgccctcgcgcgaattgaaaagctttcagaagtaaacccgatgcttggcttccgtgggtgcaggcttggtatatcgtaccctgaattgacagagatgcaagcccgggccatttttgaagctgctatagcaatgaccaaccagggtgttcaagtgttcccagagataatggttcctcttgttggaacaccacaggaactggggcatcaagtgactcttatccgccaagttgctgagaaagtgttcgccaatgtgggcaagactatcgggtacaaagttggaacaatgattgagatccccagggcagctctggtggctgatgagatagcggag

SEQ ID NO: 13588 - DNA, 421 bp, Zea mays
  Clone ID: LIB36-005-Q1-E1-C7
gagaggattaaggctgtcaggcagatgattatggctcccacgcttgagctgaggcagcaggcgctcgaccgtctcttgccgtatcagaggtctgacttcgaaggcattttccgtgctatggatggactcccggtgaccatccgactcctggaccctcccctccacgagttccttccagaagggaacatcgaggacattgtaagtgaattatgtgctgagacgggagccaaccaggaggatgcccttgcgcgaattgaaaagctttcagaagtaaacccgatgcttggcttccgtgggtgcaggcttggtatatcgtaccctgaattgacagagatgcaagcccgggccatttttgaagctgctatagcaatgaccaaccagggtgttcaagtgttcccagagataatggttcctcttgttg

SEQ ID NO: 13589 - DNA, 441 bp, Zea mays
  Clone ID: LIB36-002-Q1-E1-B10
cccaagcgtccgcccacgcgtccgcacgtgggtgggggaaatgctgcgtctcgggatgctcaggcattcgcgtaaacgatgcggagaagctcgtgacgatcggaggccatgtgctgcgcgaaggtgagtggctgtcgctgaatgggtcgactggtgaggtgatccttgggaagcagccgctttccccaccagcccttagtggtgatctgggaactttcatggcctgggtggatgatgttagaaagctcaaggtcctggctaacgccgatacccctgatgatgcattgactgcgcgaaacaatggggcacaaggaattggattatgccggacagagcacatgttctttgcttcagacgagaggattaaggctgtcaggcagatgattatggctcccacgcttgagctgaggcagcatgcgctcgaccgtctcttgccgtatc

SEQ ID NO: 13590 - DNA, 453 bp, Zea mays
  Clone ID: LIB36-014-Q1-E1-D2
gcatcaagtgactcttatccgccaagttgctgagaaagtgttcgccaatgtgggcaagactatcgggtacaaagttggaacaatgattgagatccccagggcagctctggtggctgatgagatagcggagcaggctgaattcttctccttcggaacgaacgacctgacgcagatgacctttgggtacagcagggatgatgtgggaaagttcattcccgtctatcttgctcagggcattctccaacatgaccccttcgaggtcctggaccagaggggagtgggcgagctggtgaagcttgctacagagaggggccgcaaagctaggcctaacttgaaggtgggcatttgtggagaacacggtggagagccttcctctgtggccttcttcgcgaaggctgggctggattacgtttcttgctcccctttcagggttccgattgctaggctagctgc

SEQ ID NO: 13591 - DNA, 368 bp, Zea mays
  Clone ID: LIB36-020-Q1-E1-A10
acacactgaccacggcttacaccgattcccctgaagatgcatcgactgcacgaaacactggggcacaatgcattggattatgccggacagagcacatgttctttgcttcagacgataggattaaggctgtcacgcagatgattatagctcccacgcttgagctgaagcatcaggcgctccaccgtctcttgccgtatcacaggtctgacttccactgcattttccgtgctatggagtggactcccggtgactatccgacacctggaccctcccctccacgagttccttccagaagggaacatcgatgacattgtccatgaattatgtcctgagacgggagcctgccaggatgattccctcgcgcgaat

SEQ ID NO: 13592 - DNA, 453 bp, Zea mays
  Clone ID: LIB36-016-Q2-E2-E10
gagacgggagccaaccaggaggatgccctcgcgcgaattgaaaagctttcagaagtaaacccgatgcttggcttccgtgggtgcaggcttggtatatcgtaccctgaattgacagagatgcaagcccgggccatttttgaagctgctatagcaatgaccaaccagggtgttcaagtgttcccagagataatggttcctcttgttggaacaccacaggaactggggcatcaagtgactcttatccgccaagttgctgagaaagtgttcgccaatgtgggcaagactatcgggtacaaagttggaacaatgattgagatccccagggcagctctggtggctgatgagatagcggagcaggctgaattcttctccttcggaacgaacgacctgacgcagatgacctttgggtacagcagggatgatgtggggaagttcattcgcgtctatcttgct

SEQ ID NO: 13593 - DNA, 464 bp, Zea mays
  unsure (1)..(464): unsure at all n locations; Clone ID: LIB36-016-Q2-E2-C3
cccaagcgtccgcattgccactggtctgccagcctcacctggggctgctgtgggccaggttgtgttcactgctgaggatgctgaagcatggcattcccaagggaaagctgctattctggtaagggcggagaccagccctgaggacgttggtggcatgcacgctgctgtggggattcttacagagaggggtggcatgacttcccacgctgctgtggtcgcacgtgggtgggggaaatgctgcgtctcgggatgctcaggcattcgcgtaaacgatgcggagaagctcgtgacgatcggaggccatgtgctgcgcgaaggtgagtggctgtcgctgaatgggtcgactggtgaggtgatccttggaaagcagccgctttccccaccagcccttagtggcgatctgggaactttcatggcctgngtggatgatgttagaaagctcaaggtcctggctaacgccgata

SEQ ID NO: 13594 - DNA, 462 bp, Zea mays
  unsure (1)..(462): unsure at all n locations; Clone ID: LIB36-016-Q2-E2-C5
cccacgcgtccgcattgccactggtctgccagcctcacctggggctgctgtgggccaggttgtgttcactgctgaggatgctgaagcatggcattcccaagggaaagctgctattctggtaagggcggagaccagccctgaggacgttggtggcatgcacgctgctgtggggattcttacagagaggggtggcatgacttcccacgctgctgtggtcgcacgtgggtgggggaaatgctgcgtctcgggatgctcaggcattcgcgtaaacgatgcggagaagctcgtgacgatcggaggccatgtgctgcgcgaaggtgagtggctgtcgctgaatgggtcgactggtgaggtgatccttggaaagcagccgctttccccaccagcccttagtggcgatctgggaactttcatgggctgngtggatgatgttagaaagctcaaggtcctggctaacgccgg

SEQ ID NO: 13595 - DNA, 420 bp, Zea mays
  Clone ID: LIB36-021-Q1-E1-D12
atggtggactcaaagggtttgattgttgactctcgtaaaggctcccttcagccattcaagaaaccttgggcgcatgagcacgagcccttgaaaaccttgtatgatgctgttcagtccatcaaacctacagttctgatcgggacatctggagttggaagaacattcacaaaagaaatcattgaggccatgtcttccttcaacgagaggcctatcatcttttcattgtcaaacccaacctcgcattctgaatgcactgctgaacaagcatatacctggagtcagggccgttcgatctttgccagtggcagtccatttgcccccgtggagtacgaaggaaagatttttgtgcctgggcagtcgaacaatgcctacattttccctggactcggcctcggtcttgtgatctctggggccgtccgt

SEQ ID NO: 13596 - DNA, 429 bp, Zea mays
  Clone ID: LIB36-017-Q1-E1-D7
acatatacctggagtcagggccgttcaatctttgccagtggcagtccatttgcccccgtggagtacgaaggaaagacttttgtgcctgggcagtcgaacaatgcctacattttccctggactcggcctcggtcttgtgatctctggagccgtccgtgtccacgaggacatgcttctcgccgcctcgaaagcgctagctgatcaggccacacaggacaacttcgagaagggctccatcttcccacccttcaccagcatcagaaagatctctgcgcacatcgctgcagccgtggctgcaaaagcccacgagctcggtctggcgacccgtctgcctccccccagcgacctggtgaaatatgcagagaactgcatgtacactcacgtctaccgcaactaccggtagtgctgcggggatcaattttgcagtaat

SEQ ID NO: 13597 - DNA, 433 bp, Zea mays
  Clone ID: LIB36-018-Q1-E1-B9
tgaaaaccttgtatgatgctgttcagtccatcaaacctacagttctgatcgggacatctggagttggaagaacattcacaaaagaaatcattgaggccatgtcttccttcaacgagaggcctatcatcttttcactgtcaaacccaacctcgcattctgaatgcactgctgaacaagcatatacctggagtcagggccgttcaatctttgccagtggcagtccatttgcccccgtggagtacgaaggaaagacttttgtgcctgggcagtcgaacaatgcctacattttccctggactcggcctcggtcttgtgatctctggagccgtccgtgtccacgaggacatgcttctcgccgcctcgaaagcgctagctgatcaggccacacaggaaaacttcgagaagggctccatctttccaaccttcatcagcat

SEQ ID NO: 13598 - DNA, 427 bp, Zea mays
  Clone ID: LIB36-012-Q1-E1-H9
cacacgcgtccgcccacgcgtccgcccacgcgtccgctcttggaggagttgacccatcagtttgcttgcctatcacaattgatgttggtacaaataacgagaaactgcttaatgatgagttctacattggactccggcaaaaacgtgcgactggcgaggagtatgatgagcttattgaagagttcatgtctgctgttaagcaattctatggtgagaaagtcctcattcagtttgaggactttgccaatcataatgcctttgatttgcttgaaaaatatagcaagagccatcttgttttcaatgatgatatccagggcacagcatcagtggtccttgcaggtttgttagcagcactcaagatggttggtgggaccctggcagagcagacttatttgttccttggtgctggggaagctggaactggtat

SEQ ID NO: 13599 - DNA, 428 bp, Zea mays
  Clone ID: LIB36-017-Q1-E1-D3
ggaatccttcagtctttagctcgccgtgcaaaggcactggaagatgcattcaacacgcttgagggattttcatgtaacaaggctgaaggagcaatgtaccttttccctcagatccatctgccacataaggcaattgaggctgctaaagctgccaagaaagcacctgatgcattctatgcgctccgtctccttgaatcaactggaattgttgtggttcctggatctggatttggccaagttcctggaacatggcacgtcagatgcacgatcctgccgcaggaagataaaatccccgcggtgatcacccgcttcaaggctttccatgaggcgttcatggctgagtaccctgactgaactgttacagtggctgagtatcaacgtgttgaccgaaacaaaataaagctcccccctccctctgtgtccgtgcg

SEQ ID NO: 13600 - DNA, 409 bp, Zea mays
  Clone ID: LIB36-013-Q1-E1-C3
tgaaggagcaatgtaccttttccctcagatccatctgccacataaggcaattgaggctgctaaagctgccaagaaagcacctgatgcattctatgcgctccgtctccttgaatcaactggaattgttgtggttcctggatctggatttggccaagttcctggaacatggcacgtcagatgcacgatcctgccgcaggaagataaaatccccgcggtgatcacccgcttcaaggctttccatgaggcgttcatggctgagtaccgtgactgaactgttacagtggctgagtaccaccgtgtagaccgaaacaaaataaagctcccccctctctctgtgtctgtgcgtgtgtgtgaactgatctctgaatggacgaacaatgtactctgttggcgcctttaatggcaattg

SEQ ID NO: 13601 - DNA, 424 bp, Zea mays
  Clone ID: LIB36-012-Q1-E1-B11
ggtggagctcttgtcctcagtaccccttgtactcggcctccatagctcttcatggtggagctcttgtcccctattaccttgatgaaaaaactgggtggggtttggagatctctgatcttaagaaacaactcgaagatgctcggtcaaaaggcattgatgttagggccttggtggttatcaatccaggaaatccgactgggcaggttcttgctgaagacaaccaatatgatatagtgaaattctgtaaaaatgagggccttgttcttctagctgatgaggtatatcaagagaacatctatgttgacaacaagaaatttaactctttcaagaagattgcaagatccatgggatacggcgaggatgatctccctctagtatcatttcagtctgtctccaaaggatactatggagagtgtggtaaaag

SEQ ID NO: 13602 - DNA, 336 bp, Zea mays
  Clone ID: LIB36-018-Q1-E1-D12
cccgcctccgatccgctgcttactcgccacccggagatggccaccgccgccgccttctccgtctcctcgccggcggcctccgccgtcgccgcgcgatccaaggtgtttggaggagttaagcaggcgagaactagaactggctgccgcatctgcatcacgcggaagaactttggccgtgtcatgatggcccttgcagtggatgtttctcgttttgaaggactgccaatggctcctccagacccaattcttggggtttctgaggcctttaaagcagagtagagcgagctgacgctcaatcttggtgttggtgcctataggacagaggagctgcagcca

SEQ ID NO: 13603 - DNA, 395 bp, Zea mays
  Clone ID: LIB36-002-Q1-E1-D3
cggacgcgtgggcggacgcgtgggatttgggggaaccatttgacgactcaggttcctgatttcttgaatgccaaaattgatggaagaccagtgaaagaagtcattaaggataccaagtggttagaggaagagttcaccctcacagttcaaaagcgtggaggtgtgctcatccaaaaatggggcagatcatcagctgcatcgaccgctgtttcgatagtggatgctattagatccctcgtaactcctaccccagaaggtgactggttttctacaggggtttatacgactggaaatccttatggcatagcagaggatatcgtgttcagcatgccatgcagattcaagggtgatggtgattacgaactggctagtgatgtgttgatggacgattttct

SEQ ID NO: 13604 - DNA, 454 bp, Zea mays
  Clone ID: LIB36-016-Q2-E2-D10
tacacatagacgttctgacaaccactccctctcctctcccgtcctatccatccggcacgcccagcatccatccactcctcccctgctccggctccggctccggctctgccatgggcctttcaacagtttactccccggccggaccgcgcctcgtgccggcccctctcggccgctgccgctctgcccagccccgccgcccgcgccgggcccagctcgccaccgtccggtgctccgtcgacgccaccaagcatgcgcaggatggcgtggcgacggcggtcgcgacggaggcgccagcgtcgcggaaggagtgcttcggggtcttctgcaccacctacgacctcaaggcggaggacaagaccaagtcgtggaagaagctagtgaatgttgctgtgtcaggcgcggccgggatgatatcaaatcacctgttgttcaaactcgcttctggtgaggtttt

SEQ ID NO: 13605 - DNA, 442 bp, Zea mays
  Clone ID: LIB36-013-Q1-E1-D5
cccacgcgtccgcggacgcgtgggcggcatggagcgagctgcgctactggatatcaatggccaaatctttgctgaccaggggaaagcacttaatgcggtcgcctcgcggaacgcgaaagtcttagttgtcggaaatccctgtaacactaatgcgctgatttgtttgaaaaatgccccaaacataccggcaaaaaactttcatgcattgacgaggttggatgaaaatagagcaaagtgccagctggcactaaaagcaggtgtattttatgacaaagtatcaaacgtgactatttgggggaaccattcgacgactcaggttcctgatttcttgaatgccaaaattgatggaagaccagtgaaagaagtcattaaggataccaagtggttagaggaagagttcaacctcacagttcaaaagcgtggaggtgtgctcatccaaaaa

SEQ ID NO: 13606 - DNA, 415 bp, Zea mays
  Clone ID: LIB36-004-Q1-E1-E1
cggacgcgtggaggacgcgtgggcggacgcgtgggcgattgttaattgttgatggtaaagaagttgtgaactttgcatcagcatgaggtctggagtctagacacagcgttgcaaactgaggtttaatcatcttagcaactacggtacgtgaccctgagcgcgtgattgttgcgaaacaacgaccacctcggtctacaccttaaaggtttgcgcgacatggcttttcatagtgctcaattggatctatcccctgagcataggagaaaagtatcaatttgtacagtggatccaagtattctataaagcatgcatcctccaatttcccacaagcgagaatgggatgatatgatggatgaaatggctgttgcggtcaattgtctttcaaggatcaattgtctttcaagaaccacacttt

SEQ ID NO: 13607 - DNA, 267 bp, Zea mays
  Clone ID: LIB36-004-Q1-E1-E2
tcttcactcacatgcagagtgcaccgcaataatcagcttccggatggtggcgttttgtcagttttggatggaaatgcccaactggcagcctctgttttccctatgcatatgtaatttcctgcctctttatattcactcttgttgtcaattccaagtggaaaatcttggcatattatacatattgtgataataaacatcgttaaatctgcatgctgttttgtaataaataattaacatcccagtccattggatggacatgtttaaaaa

SEQ ID NO: 13608 - DNA, 352 bp, Zea mays
  Clone ID: LIB36-006-Q1-E1-D3
cacacgcgtccgcccacgcgtccgggcaggagtggctgctgtcggagctgcgaggcaagcgcccgctgctgcccccggaccttccccagaccgacgagatcgccgacgtcatcggcgcgttccacgtcctcgcggagctcccgcccgacagcttcggcccctacatcatctccatggcgacggccccctcggacgtgctcgccgtggagctcctgcagcgcgagtgcggcgtgcgccagccgctgcccgtggtgccgctgttcgagaggctggccgacctgcagtcggcgcccgcgtccgtggagcgcctcttctccgtggactgggacatggaccgggttaaggggaaggc

SEQ ID NO: 13609 - DNA, 353 bp, Zea mays
  Clone ID: LIB36-012-Q1-E1-F6
gcgatagactcctgaagcaggggctggtgctgcgcaacccctacatcaccaccctgaacgtgttccaggcctacacgctgaagcggataagggaccccaacttcaaggtgacgccccagccgccgctgtccaaggagttcgccgacgagaacaagcccgccggactggtcaagctgaacccggcgagcgagtacccgcccggcctggaagacacgctcatcctcaccatgaatggcatcgccgccggcatgcagaacactggctaggcggcttctcttcactcacctgcagagtgcaccgcaataatcagcttccgggatgtggcgttttgtcagttttggatggaaatgccg

SEQ ID NO: 13610 - DNA, 373 bp, Zea mays
  Clone ID: LIB36-018-Q1-E1-H1
tcctgaagcacgggctggtgctgcgcaacccctacatcaccaccctgaacgtgttccaggcctacacgctgaagcggataagggaccccagcttcaaggtgacgccccagccgccgctgtccaaagagttcgccgacgagaacaagcccgccggactggtcaagctgaacccggcgagcgagtacccgcccggcctggaagacacgctcatcctcaccatgaaaggcatcgccgccggcatgcagaaaactggctaggcggcttctcctcagtcacctgcacagtgcagggcagtagccagcttccggatggtggcgttttgtcagttttgggtgcgaatgggcaaggggcagcgtccggattccccaggcat

SEQ ID NO: 13611 - DNA, 283 bp, Zea mays
  Clone ID: LIB36-009-Q1-E1-D2
ggcccacgcaccttgccatcctgtcccagccgccggacaccatcaacgggtccatccgtgtgacggtgcagggcgaggtcatcgagttctgcttcggggaggagcacctgtgcttccagactctgcagcgcttcacggccgccacgctggagcacggcatgcacccgccggtctctcccaagcccgagtggcgcaagctcatggacgagatggcggtcgtggccacggaggagtaccgctccgtcgtcgtcaaggagccgcgcttcgtcgagtacttcagatc

SEQ ID NO: 13612 - DNA, 400 bp, Zea mays
  Clone ID: LIB36-019-Q1-E1-A5
aagaactcaagccctttgggaagcagctcagggacaaatacgtggagacacagcagcttctcctccagatcgctgggcacaaggatattcttgaaggcgatccattcctgaagcaggggctggtgctgcgcaacccctacatcaccaccctgaacgtgttccaggcctacacgctgaagcggataagggaccccaacttcaaggtgacgccccagccgccgctgtccaaggagttcgccgacgagaacaagcccgccggactggtcaagctgaacccggcgagcgagtactcgcccggcctggaagacacgctcatccctcacatgacaggcatcgccgccggcatgcaaaacactggctaggcggcttctcttcactcacctgcatagtgcaccgcaat

SEQ ID NO: 13613 - DNA, 391 bp, Zea mays
  Clone ID: LIB36-018-Q1-E1-A4
cgcctcttctcggtggactggtacatggaccggatcaagggcaagcagcaggtcatggtcggctactccgactccggcaaggacgccggccgcctgtccgcggcgtggcagctgtacagggcgcaggaggagatggcgcaggtggccaagcgctacggcgtcaagctcaccttgttccacggccgcggaggcaccgtgggcaggggtggcgggcccacgcaccttgccatcctgtcccagccgccggacaccatcaacgggtccatccgtgtgacggtgcagggcgaggtcatcgagttctgcttcggggaggagcacctgtgcttccagactctgcagcgcttcacgggcgccacgccggagcacggcatgcacccgccggtcctctcca

SEQ ID NO: 13614 - DNA, 410 bp, Zea mays
  Clone ID: LIB36-003-Q1-E1-F7
accacgcgtccgcctggacctgctggagatggttttcgccaagggagaccccggcattgccggcttgtatgacgagctgcttgtggcggaagaactcaagccctttgggaagcagctcagggacaaatacgtggagacacagcagcttctcctccagatcgctgggcacaaggatattcttgaaggcgatccattcctgaagcaggggctggtgctgcgcaacccctacatcaccaccctgaacgtgttccaggcctacacgctgaagcggataagggaccccaacttcaaggtgacgccccagccgccgctgtccaaggagttcgccgacgagaacaagcccgccggactggtcaagctgaacccggcgagcgagtaccgcccggcctggaagacacgctcatcctcac

SEQ ID NO: 13615 - DNA, 441 bp, Zea mays
  Clone ID: LIB36-018-Q1-E1-D4
cccacgcgtccggcttcggggaggagcacctgtgcttccagactctgcagcgcttcacggccgccacgctggagcacggcatgcacccgccggtctctcccaagcccgagtggcgcaagctcatggacgagatggcggtcgtggccacggaggagtaccgctccgtcgtcgtcaaggagccgcgcttcgtcgagtacttcagatcggctacaccggagaccgagtacgggaggatgaacatcggcagccggccagccaagaggaggcccggcggcggcatcacgaccctgcgcgccatcccctggatcttctcgtggactcagaccaggttccaccttcccgtgtggctgggagtcggcgccgccttttaagttcgccatcgacaaggacgtcaggaacttccaggtcctcaaagagatgtacaacgagtggccattcttc

SEQ ID NO: 13616 - DNA, 389 bp, Zea mays
  Clone ID: LIB36-002-Q1-E1-C1
cgtgaactcagaccaggttccaccttcccgtgtggctgggagtcggcgccgccttcaagttcgccatcgacaatgacgtcaggaacttccaggtcctcaaagagatgtacaacgagtggccattcttcagggtcaccctggacctgctggagatggttttcgccaatggagaccccggcattgccggcttgtatgacgagctgcttgtggcggaagaactcaagccctttgggaagcagctcacggacaaatacgtggagacacagcagcttctcctccagatcgctgggcacaatgatattcttgaatgcgatccattcctgaagcaagggctggtgctgcgcaacccctacatcagcaccctgaacgtgttcaggcctacacgctga

SEQ ID NO: 13617 - DNA, 417 bp, Zea mays
  Clone ID: LIB36-003-Q1-E1-G4
caacttcaaggtgacgccccagccgccgctgtccaaggagttcgccgacgagaacaagcccgccggactggtcaagctgaacccggcgagcgagtacccgcccggcctggaagacacgctcatcctcaccatgaagggcatcgccgccggcatgcagaatactggctaggcggcttctcttcactcacctgcagagtgcaccgcaataatcagcttccggatggtggcgttttgtcagttttggatggaaatgccgaactggcagcgtctgttttccctatgcatatgtaatttcctgcctctttatattcactcttgttgtcaagtccaagtggaaaatcttggcatattatacatattgtaataataagcatcgtacaatctgcatgctgttttgtaataattaattaatatccc

SEQ ID NO: 13618 - DNA, 442 bp, Zea mays
  Clone ID: LIB36-013-Q1-E1-A10
cacgaccctgcgcgccatcccctggatcttctcgtggactcagaccaggttccaccttcccgtgtggctgggagtcggcgccgccttcaagttcgccatcgacaaggacgtcaggaacttccaggtcctcaaagagatgtacaacgagtggccattcttcagggtcaccctggacctgctggagatggttttcgccaagggagaccccggcattgccggcttgtatgacgagctgcttgtggcggaagaactcaagccctttgggaagcagctcaaggacaaatacgtggagacacagcagcttctcctccagatcgctgggcacaaggatattcttgaaggcgatccattcctgaagcaagggctggtgctgcgcaacccctacatcaccaccctgaacgtgttccaagcctacacgctgaagcggataagggaccccaac

SEQ ID NO: 13619 - DNA, 425 bp, Zea mays
  Clone ID: LIB36-012-Q1-E1-E3
ctcgtggactcagaccaggttccaccttcccgtgtggctgggagtcggcgccgccttcaagttcgccatcgacaaggacgtcaggaacttccaggtcctcaaagagatgtacaacgagtggccattcttcagggtcaccctggacctgctggagatggttttcgccaagggagaccccggcattgccggcttgtatgacgagctgcttgtggcggaagaactcaagccctttgggaagcagctcagggacaaatacgtggagacacagcagcttctcctccagatcgctgggcacaaggatattcttgaaggcgatccattcctgaagcaagggctggtgctgcgcaacccctacatcaccaccctgaacgtgttccaggcctacacgctgaagcggataaggggacccaacttcaaggtgacgc

SEQ ID NO: 13620 - DNA, 397 bp, Zea mays
  Clone ID: LIB36-003-Q1-E1-B9
atcttctcgtgaactcagaccaggttccaccttcccgtgtggctgggagtcggcgccgccttcaagttcgccatcgacaaggacgtcaggaacttccaggtcctcaaagagatgtacaacgagtggccattcttcagggtcaccctggacctgctggagatggttttcgccaagggagaccccggcattgccggcttgtatgacgagctgcttgtggcggaagaactcaagccctttgggaagcagctcagggacaaatacgtggagacacagcagcttctcctccagatcgctgggcacaaggatattcttgaaggcgatccattcctgaagcaggggctggtgctgcgcaacccctacatcaccaccctgaacgtgttccaggcctacacgctga

SEQ ID NO: 13621 - DNA, 196 bp, Zea mays
  Clone ID: LIB36-008-Q1-E1-B4
cccacgcgtccgcccacgcgtccgggccacggaggagtaccgctccgtcgtcgtcaaggagccgcgcttcgttgagtacttcagatcggctacaccggagaccgagtacgggaggatgaacatcggcagccggccagccaagaggacgcccggcagcggcatcacgaccctgcgcgccaccccctgaatcttcccg

SEQ ID NO: 13622 - DNA, 438 bp, Zea mays
  Clone ID: LIB36-002-Q1-E1-G4
gcggaagaactcaagccctttgggaagcagctcagggacaaatacgtggagacacagcagcttctcctccagatcgctgggcacaaggatattcttgaaggcgatccattcctgaagcaggggctggtgctgcgcaacccctacatcaccaccctgaacgtgttccaggcctacacgctgaagcggataagggaccccaacttcaaggtgacgccccagccgccgctgtccaaggagttcgccgacgagaacaagcccgccggactggtcaagctgaacccggcgagcgagtacccgcccggtctggaagacacgctcatcctcaccatgaagggcatcgccgccggcatgcagaacactggctaggcggcttctcttcactcacctgcagagtgcaccgcaataatcagcttccggatggtggcgttttgtcagttt

SEQ ID NO: 13623 - DNA, 381 bp, Zea mays
  Clone ID: LIB36-013-Q1-E1-B5
agaagacaaacgccggcacgcgcacgcagacacgatggcgatctgcagcgcgcacactaccacctccctgcgctccccatgcacgaccgtctcgaacgcaggtctgaggcagaagcaagtcatcttcgtcaccagcaacaggaggagcggcggcggcaggaggcacggaggggcaaggagcttccaggtctcgtgctccgtcgacaagccggtggtgattggcctggcggcagactcagggtgcggcaagagcaccttcatgcgccggctcaccagcgtcttcggtggcgccgcggagccgcccaagggcgggaacccggactccaacacgctcatcagtgacaccacgacagtgatatgcctcgacgactaccattccct

SEQ ID NO: 13624 - DNA, 239 bp, Zea mays
  Clone ID: LIB36-008-Q1-E1-F4
cggaagcgtgggcggacccgtgggagctcacgtgctcttaccccggcatcaaattcgcctacggcccagacatttacttcggaaacgaggtatctgttttggagatggatgggcagttcgacagactagacgagctcatctacgtggagagccatctgagcaacctctcgaccaagttctacggggaggtgacacagcagatgctgaagcacgcggacttcctggaagcaacaacggac

SEQ ID NO: 13625 - DNA, 376 bp, Zea mays
  unsure (1)..(376): unsure at all n locations; Clone ID: LIB36-001-Q1-E1-G1
agatatcagtatctacttggacatcagtgatgaagttaagtttgcatggaaaatccagcgggacatggcagagcgtgggcacagccttgaaagcatcaaggccagtatcgaggccaggaaaccagattttgatgcctttattgatccgcagaagcagtatgctgatgctgtgattgaagttctgccgacccagttgattcccgacgacaacgaaggaaaggtgctgcgtgttaagctcatcatgaaagaaggggtgaagaacttcaacccggtttatctctttgacgaaggatcgaccatcagctgggtgccttgtggaagaaagctcacatgctcttaccctggcatcaaattttcctatggcncggacacttac

SEQ ID NO: 13626 - DNA, 458 bp, Zea mays
  unsure (1)..(458): unsure at all n locations; Clone ID: LIB36-014-Q1-E1-D8
gatgagctcatctacgtggagagccatctaagcaacctttcaaccaagttctacggagaggtgacacaacaaatgctaaagcatgcagacttcccaggtagcaacaacgggacaggtctcttccagaccatcattggactgaagattagagacctctatgaacagattgttgctgagagggctggtgtaccagcggaagcagcaaaagtttaacgatctatgcattcagatgtcctaaaactacagctctccgaactcaatgggagtaacaaccttcgcatctgttgggatatatggcgagctaggaggtatagaaatgtcattgcagaactcaggaaaacgtgcaatggaatttcttgaaatcnctcttgaagagagtgagaactcgatagatcaagaatcaccacacgttgtattaatcgtatggtataatatttatacatgtacaggatgagcta

SEQ ID NO: 13627 - DNA, 429 bp, Zea mays
  Clone ID: LIB36-012-Q1-E1-H11
cacacgcgtccgcaacaagccaaacaacccagtggctgctagccgagacaggggatagattgagagagaggcgcgcagatggcgacgccgtcgtcgtcgctttgctccagcttcgcctccctgcggaccgcctccatcggccacccccgtggcatcgcctcctccacgcccaggaaggcattccatgtgagggcatcagctcgggttgacaaattctcaaagagtgacatcatcgtgtccccttcgattctgtctgcaaactttgcgaagcttggtgatcaggtaaaagctgtggaggtggcaggatgcgactggattcatgtcgatgtcatggacgggcgctttgtgccaaacatcacaattggacccttggttgttgatgctctgcgtccagtgactgatcttccgttggatgtacatctgatgatg

SEQ ID NO: 13628 - DNA, 334 bp, Zea mays
  Clone ID: LIB36-007-Q1-E1-F12
ccaagtcccacgaggtgctcatcaccgtggaggaaggctccatcggcgggttcggctcgcacgtcgcccagttcatggccctggacggccttctcgacggcaaactcaagtggcgaccgctggtgcttcctgacaggtacatcgaccatggatcgccggccgatcagctggccgaggctgggctgacgccgtcacacatcgccgcgtcggtgttcaacatcctggggcagaacagggaggctcttgccatcatggcagtgccaaacgcgtagaacttgtgctgatctgggcctatagagatgattgtacattttgtcgttaactagagtgtctg

SEQ ID NO: 13629 - DNA, 457 bp, Zea mays
  Clone ID: LIB36-016-Q2-E2-H10
cccacgcgtccgcccacgcgtccggctctctgcactccgtgatcaccaccacacctctatcctgctagctaggtagctgaattcggagccagggtcgagcgagggggtgcggaggcgagatggaccacgcggcggacgcgcaccggacggacctgatgaccatcacgcggcacgtgctgaacgagcagagccggaaccccgagtcgcgcggcgacttcaccatccttctctcccacatcgtcctcggctgcaagttcgtcgcctccgccgtcaacaaggccgggctcgcccagctgatcgggctcgccggcgagaccaacgtgcagggagaggagcagaagaagctggacgtcctgtccaacgaagtgttcgtcaaggccctcgtcagcagcggtcgcacctgcgtccttgtgtccgaggaggacgatgaagcaacgttcgtggaccctaagctgcg

SEQ ID NO: 13630 - DNA, 442 bp, Zea mays
  unsure (1)..(442): unsure at all n locations; Clone ID: LIB36-010-Q1-E1-C4
ctgcactccgtgatcaccaccacacctctatcctgctagctaggtagctgaattcggagccagggtcgagcgagggggtgcggaggcgagatggaccacgcggcggacgcgcaccggacggacctgatgaccatcacgcggcacgtgctgaacgagcagagccggaaccccgagtcccgcggcgacttcaccatccttctctcccacatcgtcctcggctgcaagttcgtcgcctccgccgtcaacaaggccgggctcgcccagctgatcgggctcgccggcgagaccaacgtgcaaggagaggagcagaagaagctggacgtcctgtccaacgaggtgttcgtcaaggccctcgtcagcagcggtcgcacctgcgtccttgtgtccgangangacgangaagcaacgttcgtggaccctaagctgcgtggaaggtactgcg

SEQ ID NO: 13631 - DNA, 366 bp, Zea mays
  Clone ID: LIB36-006-Q1-E1-A7
acaccatcgacgcgtcgctcagcatggtcatgggcgacgacatggtcaaggtcgtcgcctggtacgacaacgagtgggggtacagccaacgcgtggttgatctggcgcacctggtggcggccaagtggcccggcgcggcggcggccggcagcggcgaccctctggaggacttctgcaaggacaaccccgagaccgacgagtgcaaggtgtacgaagcatgaggccacggttctttccacgacggaacgtacagcacgggcgcgagggttctttccatagagaataatatacagattattcgcccaaagagacctatgttatatatatatgagttgtatgcagtcacccaactgggacaggtttccg

SEQ ID NO: 13632 - DNA, 397 bp, Zea mays
  Clone ID: LIB36-021-Q1-E1-H8
cgcatcggccggaacttcctccggtgctggcacggccgcgaggactcgccgatcgacgtcgtcgtcgtgaacgacagcggaggcgtcaggaacgcgtcccacctcctcaagtacgactcgatgctcggcaccttcaaggccgacgtcaagatcgtggacgacactaccatcagcgtcgacggcaagcccatcacggtcgtctccagcagggacccgctcaagctcccatggggtgagctcggcattgacatcgtcatcgagggcaccggagtcttcgtcgacggccccggcgccggcaagcacatccaggccggcgcgaagaaggtgatcatcacggctccccgccaaggcgccgacatcccgacctatgtcgtcggcgtcaacgaggccgactacg

SEQ ID NO: 13633 - DNA, 423 bp, Zea mays
  Clone ID: LIB36-001-Q1-E1-A3
ggagatcggaattgtcaaaggggacaatgacgacgacgcactcgtacaccggcgaccagaggctgctggacgcgtcccaccgcgacctccggcgggcccgcgcggcggcgctgaacatcgtgccgacgagcacgggcgccgccaaggccgtggcgctggtgctgccgcagctgaaggggaagctgaacggcatcgcgctgcgggtgccgaccccgaacgtgtccgtggtggacctggtgatcaacaccgtgaagactggcatcacggccgacgacgtgaacgccgcgttccgcaaggccgccgccggcccgctgcagggcatcctggatgtctgcgacgtgccgctcgtgtccgtcgacttcaggtgctccgacgtgttctgcaacatcgacgcgtcgctcaacatggtcatgggcgacgaca

SEQ ID NO: 13634 - DNA, 409 bp, Zea mays
  Clone ID: LIB36-020-Q1-E1-A6
aggaccatgatgacgacgcactcgtacaccggcgaccagaggctgctggacgcgtcccaccgcgacctccggcgggcccgcgcggcggcgctgaagatcgtgccgacgagcacgggcgccgccaaggccgtggcgctggtgctgccgcagctgaaggggaagctgaacggcatcgcgctgcgggtgccgaccccgaacgtgtccgtggtggacctggtgatcaacaccgtgaagactggcatcacggtcgacgacgtgaacgcggcgttccgcaaggccaccgccggcccgctgcagggcatcctggatgtctgcgacgtgccgctcgtgtccgtcgacttcaggtgctccgacgtgtcctgcaccatcgacgcgtcgctcagcatggtcatgggcgactacatggtca

SEQ ID NO: 13635 - DNA, 373 bp, Zea mays
  Clone ID: LIB36-006-Q1-E1-B1
gggttcggccgcatcgggcgcaacttcctgcggtgctggcacgggcgcggcgacgcctcgcccctcgacgtcatcgccatcaacgacaccggcggtgtcaagcaggcgtcccacctgctcaagtacgactccacgctcggcatcttcgacgccgacgtcaagcccgtcggcgacaacgccatctccgtcgacggcaaggtcatcaaggtcgtgtccgaccgcaaccccagcaacctgccgtggggcgagctcgggatcgacctcgtcatcgagggcaccggcgtcttcgtcgaccgcgagggcgcggggaagcacatccaggcggaggccaagaacgtgctcatcacggcgcccggcaagggcgacatcccca

SEQ ID NO: 13636 - DNA, 376 bp, Zea mays
  Clone ID: LIB36-021-Q1-E1-H3
atggcgtcgtctatgctctccgctaccaccgtgccactccagcaggggggcggcctgtccgagttctccgggctcaggagctccgcgtcgctgcccatgcgccggaatgccacctccgacgacttcatgtccgccgtctccttcaggacccacgcggtcggcacgagcggcgggtcgcggcgggcgccgacggaggcgaagctgaaggtggccatcaacgggttcggccgcatcgggcgcaacttcctgcggtgctggcacgggcgcggcgacgcctcgcccctcgacgtcatcgccatcaacgacaccggcggtgtcaagcaggcgtcgcacctgctcaagtacgactccacgctcgggatcttcgacgccgacg

SEQ ID NO: 13637 - DNA, 406 bp, Zea mays
  Clone ID: LIB36-010-Q1-E1-C7
atggcgtcgtccatgctctccgctaccaccgtgccactccagcatgggggcggcctgtccgagttctccgggctcaggagctccgcgtcgctgcccatgcgccggaatgccacctccgacgacttcatgtccgccgtctccttcaggacccacgcggtctgcacgagcggcgggtcgcggcgggcgccgacggaggcgaagctgaaggtggccatcaacgggttcggccgcatcgggcgcaacttcctgcggtgctggcacgggcgcagcgacgcctcgcccctcgacgtcatcgccatcaacgacaccggcggtgtcaagcaggcgtcccacgtgctcaagtacgactccacgctcggcatcttcgacgccgacgtcaagcccgtcggcgacaacgccatctccg

SEQ ID NO: 13638 - DNA, 362 bp, Zea mays
  Clone ID: LIB36-006-Q1-E1-D9
accacgcatccgctctctctacaattatcactacctgctgctccctcatgcaccgtgctcaaatctgaccaaagtgggttctgctgactgttttttgtttttttggggtctctcgatcttctctggatgcaggcaagattaagatcggaatcaacggcttcggaaggatcggcaggctcgtggccagggtcgccctccagagcgaggatgtcgagctcgtcgccgtcaacgaccccttcatcaccacggactacatgacctacatgttcaagtacgacaccgtccacggccactggaagcacagcgacatcacactcaaggactccaagacccttctcttcggtgacaagccggtcaccgtc

SEQ ID NO: 13639 - DNA, 388 bp, Zea mays
  Clone ID: LIB36-006-Q1-E1-G10
accacgcatccgatcggcaggctcgtggccagggtcgccctgcagagcgaggatgtcgagctcgtcgccgtcaacgaccccttcatcaccacggattacatgacctacatgttcaagtacgacaccgtgcacggccaatggaagcacagcgacatcaccctcaaggactccaagacgcttctcttcggcgagaagccggtcaccgtctttggcatcaggaaccccgaggagatcccgtggggtgaggctggtgctgagtatgtcgtggagtccaccggtgtcttcactgacaaggacaaggctgctgcacatctgaagggtggtgccaaaaaggttgttatctctgccccaagcaaagatggcaccatgtttgttgttggtgtcaatg

SEQ ID NO: 13640 - DNA, 373 bp, Zea mays
  Clone ID: LIB36-012-Q1-E1-B4
gaggctccgcctgatatcgctcgcaccctcctatacgtatacataattattatagggaacatatctggtgcatatataaatttagtgtacatggtgcatatattaaatcagcattactcattttagatataatgtctctagttgttggtatattttgctaagaacaccctccgacgtggtgaagtatagcggtggaaaatattatttataaattgcaatgatcaactagagacgttaaatctaaaataaatagtgatgatttaatatgtgcaccatatatactaagcttcgatgtacaccagatatgtcctcgttattacatgtacacgaggtatgatatgcattccatgttttcgtggtggtttcgattgag

SEQ ID NO: 13641 - DNA, 353 bp, Zea mays
  Clone ID: LIB36-002-Q1-E1-A4
cggacgcgtgggcggacgcgtgggccggctgctacgcttgccatccacctccaccttcgtctcgctgtcctagatgtttgctgtatgaatcgcatagtagatcatgttctctattcctgccttcagtttcttttctcagttgtggtttatcgcggcggggttgatgttgagatttgagatcctcacctgaggaatggaaaaatgctcacctgaggaatggaaaaatggtaagggcttgttcggttattcctatcccatgtggattggatgggattggaaaaaattatgaaagattttaacttgtttgagattgaaatccatccaatcccacctataaatgaaagtcaaaattt

SEQ ID NO: 13642 - DNA, 265 bp, Zea mays
  Clone ID: LIB36-013-Q1-E1-F8
gtataaccatttcaaagaaggctggaatggtccctcttcagatggagcttgggggaaaagatgcatgcattgtgctagaggatgcatatctggatttggtttccgcaaatatagtaaagggtggcttctcatacagtggccagaggtgcactgctgtcaaagtactgctgatcatggaatcgattgctgatgctgtggtacagaaggttaatgccaatttggcgaaactgaaagttggcccacctgaggacgactctgatatcac

SEQ ID NO: 13643 - DNA, 430 bp, Zea mays
  Clone ID: LIB36-008-Q1-E1-H5
gaagaatgacccagagtttgcacagaagcttgcctccctagcagatctttatgttaacgatgcatttggaacagcccacagggcgcatgcatcgaccgagggagttaccaagtttttgcagccttctgttgcagggttccttctgcagaaggaactcgactaccttgtcggagctgtttcaagccctaaacgcccttttgctgccatcgtgggtggttcaaaggtgtcatccaagatcggggttattgagtccctgttggagaagtgtgatatccttctcttgggtggtggtatgatcttcacgttttacaaggcacaaggtctccctgttggtgcttcattggtcgaggaagacagacgcgagcttgcgacgtctctccttgcacaggctaaggaaaagggcctctcccttatggcgccaactgatgtt

SEQ ID NO: 13644 - DNA, 403 bp, Zea mays
  Clone ID: LIB36-017-Q1-E1-D8
acatgtaggacggttgtctgagcttcttggcattcaggtgcaaaaagccgacgatgttattggccctgaagttgagaagctggtggcggccttgcccaacggtggggttctgctgcttgagaacgtaagattctacaaggaagaggagaagaatgacccagagtttgcacagaagcttgcctccctagcagatctttatgttaacgatgcatttggaacagcccacagggcgcatgcatcgaccgagggagttaccaagtttttgcagccttctgttgcagggttccttctgcagaaggaactcgactaccttgtcggagctgtttcaagccctaaacgcccttttgctgccatccgtggtggttcaaacgtgtcatccaggatcggcgttattgaatccctg

SEQ ID NO: 13645 - DNA, 413 bp, Zea mays
  Clone ID: LIB36-009-Q1-E1-G7
caaagttcttgaagccttctgttgcagggttccttttgcagaaggagcttgactaccttgtcggagctgtttcaagccctacacgcccatttgctgccatcgtgggtggttcaaaggtgtcatccaagatcggggttattgaatccttgttggagaagtgtgatatccttctcttgggtggtggtatgatcttcacattttacaaggcacaaggtctttctgtcggtgcttcgttggttgaggaagacaaactcgatcttgcaacatctctacttgcaaaggctaaggaaaagggtgtctcccttatgttgccaaccgatgttgtcatcgctgataagtttgctcctgatgctaacagccagattgttccagcatctgcaattcctgatggttggatggggctggatattggg

SEQ ID NO: 13646 - DNA, 428 bp, Zea mays
  Clone ID: LIB36-010-Q1-E1-E7
cccacgcgtccgcccacgcgtccggcaagctcgatctactactactactagctggtacacatactagccagcctgccagccagcttgccatggcgcccaccgtgatgatggcctcgtcggcaaccgccgtcgccccgttccagggtctcaagtccgccgccagcctccccgtcgcccgccgcagcaccaggagcctcggcaacgtcagcaacggcggaaggatccggtgcatgcaggtgtggccggcctacggcaacaagaagttcgagacgctgtcgtacctgccgccgctgtcgacggacgacctgctgaagcacgtggactacctgctgcgcaacggctggataacctgcctcgagttcaacaagctcgggttcgtgtaccgcgaaaactccaacctccccgtgctactacgacggccgctaact

SEQ ID NO: 13647 - DNA, 197 bp, Zea mays
  Clone ID: LIB36-009-Q1-E1-F4
gcagcgagtacatacatactaggcagccaggcagccatggcgcccaccgtgatgatggcctcgtcggccaccgccgtcgctccgttccaggggctcaagtccaccgccagcctccccatcgcccgccgctcctccagaagcctcggaaacgtcagcaacggcggaaggatccggtgcatgcaagtgtggccggccta

SEQ ID NO: 13648 - DNA, 434 bp, Zea mays
  Clone ID: LIB36-005-Q1-E1-C10
agctgcaggaggccatcgccgcgtacccggacgccttccaccgcgtcatcggcttcgacaacgtcaggcagacgcagtgcgtcagcttcatcgcctacaagccccccggcagcgagtagagaccgtggctagatcgacccatggccatgcctctgcctgttgatcggatcaccttcttgcattggttcctctctctctctccctccttttttttccctttatctcatcatttcttttctcctgcatgcaatggttccttttgcttccaacaattctcctgctgatgtatccagcatggcatcatccatctacaattacgtacgtagtgcaacgactgtcgattcgttgggtgaggaacatatatgtgaatgcaagctccggctaccatacatgtgtaatgtgtaatagatatatatacaaaactgccgaggggc

SEQ ID NO: 13649 - DNA, 383 bp, Zea mays
  Clone ID: LIB36-010-Q1-E1-B4
ggaagctgcccatgttcggctgcaccgacgccacgcatgtgtacaaggagctgcaggaggccatcgccgcgtacccggacgccttccaccgcgtcatcggcttcgacaacgtcaggcagacgcagtgcgtcagcttcatcgcctacaagccccccggcagcgagtagagaccgtggctagatcgacccatggccatgcctctgcctgttgatcggatcaccttcttgcattggttcctctctctctctccctccttttttttccctttatctcatcatttcttttctcctgcatgcaatggttccttttgcttccaacaattctcctgctgatgtatccagcatggcatcatccatccacaaatacgtacgtagtgcaccgac

SEQ ID NO: 13650 - DNA, 347 bp, Zea mays
  Clone ID: LIB36-017-Q1-E1-D2
gaggccatcgccgcgtacccggacgccttccaccgcgtcatcggcttcgacaacgtcaggcagacgcagtgcgtcagcttcatcgcctacaagccccccggcagcgagtagagaccgtggctagatcgacccatggccatgcctctgcctgttgatcggatcaccttcttgcattggttcctctctctctctccctccttttttttccctttatctcatcatttcttttctcctgcatgcaatggttccttttgcttccaacaagtctcctgctgatgtatccagcatggcatcatccatctacaattacgtacgttgtgcaacgactgtccgattcgttgggtgag

SEQ ID NO: 13651 - DNA, 425 bp, Zea mays
  Clone ID: LIB36-021-Q1-E1-A6
gcaagctcgatctactactactactagctggtacacatactagccagcctgccagccagcttgccatggcgcccaccgtgatgatggcctcgtcggcaaccgccgtcgccccgttccagggtctcaagtccgccgccagcctccccgtcgcccgccgcagcaccaggagcctcggcaacgtcagcaatggcggaaggatccggtgcatgcaggtgtggccggcctacggcaacaagaagttcgagacgctgtcgtacctgccgccgctgtcgacggacgacctgctgaagcaggtggactacctgctgcgcaacggctggataccctgcctcgagttcagcaagctcgggttcgtgtaccgcgagaactctagctccccgtgctactacgacggccgctactggaccatgtggaagctgcccatg

SEQ ID NO: 13652 - DNA, 446 bp, Zea mays
  Clone ID: LIB36-013-Q1-E1-E6
cccaagcaagcaagctcgatctactactactactagctggtacacatactagccagcctgccagccagcttgccatggcgcccaccgtgatgatggcctcgtcggcaaccgccgtcgccccgttccagggtctcaagtccgccgccagcctccccgtcgcccgccgcagcaccaggagcctcggcaacgtcagcaacggcggaaggatccggtgcatgcaggtgtggccggcctacggcaacaagaagttcgagacgctgtcgtacctgccgccgctgtcgacggacgacctgctgaagcatgtggactacctgctgcccaacggctggataccctgcctcgagttcagcaagctcgggttcgtgtaccgcgagaactccacctcgtcgtgctactacgaccgccgctactggaccatgtggaagctgcccatgttcggctgcacg

SEQ ID NO: 13653 - DNA, 381 bp, Zea mays
  Clone ID: LIB36-006-Q1-E1-E10
agcaagctcgatctactactactactagctggtacacatactagccagcctgccagccagcttgccatggcgcccaccgtgatgatggcctcgtcggcaaccgccgtcgccccgttccagggtctcaagtccgccgccagcctccccgtcgcccgccgcagcaccaggagcctcggcaacgtcagcaacggcggaaggatccggtgcatgcaggtgtggccggcctacggcaacaagaagttcgagacgctgtcgtacctgccgccgctgtcgacggacgacctgctgaagcaggtggactacctgctgcgcaacggctggataccctgcctcgagttcagcaagctcgggttcgtgtaccgcgagaactccaactccccg

SEQ ID NO: 13654 - DNA, 442 bp, Zea mays
  Clone ID: LIB36-014-Q1-E1-H9
ccagaagcctcggcaacgtcagcaacggcggaaggatccggtgcatgcaggtgtggccggcctacggcaacaagaagttcgagacgctgtcgtacctgccgccgctgtcgacggacgacctgctgaagcaggtggactacctgctgcgcaacggctggataccctgcctcgagttcagcaaggtcggcttcgtgtaccgcgagaactccacctccccgtgctactacgacggccgctactggaccatgtggaagctgcccatgttcggctgcaacgacgccacccaggtgtacaaggagctgcaggaggccatcaaatcctacccggacgccttccaccgcgtcatcggcttcgacaacatcaagcagacgcagtgcgtcagcttcatcgcctacaagcccccgggcagcgactagaccgcgcccgccggccgcccccgccg

SEQ ID NO: 13655 - DNA, 434 bp, Zea mays
  Clone ID: LIB36-004-Q1-E1-D2
caagcaagcaagcagcgagtacatacatactaggcagccaggcagccatggcgcccaccgtgatgatggcctcgtcggccaccgccgtcgctccgttccaggggctcaagtccaccgccagcctccccatcgcccgccgctcctccagaagcctcggcaacgtcagcaacggcggaaggatccggtgcatgcaggtgtggccggcctacggcaacaagaagttcgagacgctgtcgtacctgccgccgctgtcgacggacgacctgctgaagcatgtggactacctgctgcgcaacggctggataccctgcctcgagttcagcaaggtcggcttcgtgtaccgcgagaactccacctccccgtgctactacgacggccgctactggaccatgtggaagctgcccatgttcggctgcaacgacgccacccaggtg

SEQ ID NO: 13656 - DNA, 424 bp, Zea mays
  Clone ID: LIB36-015-Q1-E1-E1
cggacacgtgggcggacgcgtgggctgttatgtagcttatccattagacctatttgaagagggttctgttactaacatgtttacttccattgtgggtaacgtatttggtttcaaagccttacgcgctctacgtttggaggatctacgaattccccctgcttattcaaaaactttccaaggtccgcctcacggtatccaagttgaaagggataagttgaacaagtacggtcgtcctttattgggatgtactattaaaccaaaattgggattatccgcaaaaaattacggtagagcgtgttatgagtgtctacgcggtggacttgattttaccaaaggatggtgagaacgtgaactcacagccatttatgccccgggagagaccgttttggtctttgtgccgaagcaatttcaaaagcacaagccg

SEQ ID NO: 13657 - DNA, 317 bp, Zea mays
  Clone ID: LIB36-001-Q1-E1-A11
gggtcgacgacgcgtccgcccaagcatccgcccacgcgtctgcggacgcgtgggcggacgcgtgggtttttttttttttttttttttttttttttttttttttttttttttgtttttttttttttttttttttttttttttttttttttttttttttttttttggggtgggtgtggtgctcttttttggttttcgttcttggttgctttttttgctgtttgtcggtttgttccttgggggtttttcggctgcgtgttggttttcctttttgggttgggcttctttgctggttcttgtgttgtctttgcgtttgttgt

SEQ ID NO: 13658 - DNA, 394 bp, Zea mays
  unsure (1)..(394): unsure at all n locations; Clone ID: LIB36-001-Q1-E1-A2
cggtcggcagccgggtcgagnacgcgtccggcgcaacaatcccgacgcgaatcgcccagaacgcgaggcggaatttcccattctcttggacccccccccccccccctctgttcttcctccttcccccgctcctcgtccacacgctccgctccgattccgcccgcgtccgcggacccagatccggcgcccgcgcccatggcgacgcgcaggcgaatgttcctcaaggtcatcatcctcggcgacagcggggtcggcaagacctcgctgatgaaccagtacgtcaacaacaggttcagcaaccagtacaaggccaccatcggcgcggatttcctcaccaaggaggtccagatcgacgaccgcctcttcacactgcagatatgggatacggcaggac

SEQ ID NO: 13659 - DNA, 454 bp, Zea mays
  Clone ID: LIB36-001-Q1-E1-A4
cgggtcgagccccgcgtccgcaatatactgcacatggcgcgcgcttacccagctcttccccttccagcagctgagcacgccgtccctccctatttcagctcgcctctgtccgccatggtccgaccagagacacccacgtcgagctccctcacacgcacgctcagttccagctcgccagtcaaattctctgcgtcgcgcccagctcggatttcgccggccaccgttctctaacccgtgtgctggtcggtgtcgtatagttttagtttgatcggctcgtcgtcgacttcgtcagttgtcatcattcgtcgtcgcaccgttcgccgtcgagtttcgctacccatcgcggagttctctgctcgccacaacgtgtcgaacttccgcgtcaaacttatctcttccgttgccggtgtcctccccggagccgaatcctgggcgtcctagtatttttagctat

SEQ ID NO: 13660 - DNA, 179 bp, Zea mays
  Clone ID: LIB36-001-Q1-E1-A5
gttactaccaggaggtggacataggcccggaggaggtgaggtcggtggccccggccggcttcggccgccacggaggcggcttcaaccagcacttcttcaaggacaagttcgaggaggtcaacacggtctcaccccccggggcaaaccaccacaaccaccacaatggtcaccaacggcgg

SEQ ID NO: 13661 - DNA, 425 bp, Zea mays
  unsure (1)..(425): unsure at all n locations; Clone ID: LIB36-001-Q1-E1-A6
cccaagcgtccgatgatgaaagggagcagactctaaatcaactactaactgagatggatggttttgagggcaacaccggaattattgttattgctgccactaaccgagctgacatcttggattccgctttacttagacctgggcgctttgacagacaggtgtctgttgatgttcctgatgtacgtggaaggacagagattctaaaagtgcatggtggcaacaagaaatttgattctgatgtttctctcgatgtcatagcaatgagaacacctgggttcagtggagcagacttggcaaaccttctgaatgaagcagccattctggctggacggcggnggaagacagcaatttcttcaaaagagatagatgattctattgacagaattgtggctggtatggaagggactgtgatgacagacgggaag

SEQ ID NO: 13662 - DNA, 395 bp, Zea mays
  Clone ID: LIB36-001-Q1-E1-A7
catcaccccggagatcttcggcaagatgggcatcatcccgccggagaccgcgctgccgtggttcaagacgggcgtcatcccgcccgcgggcacctacaactactgggccgactcctacacgctcttcgtcttcaacatggcgctcatgggcttcgccgagcaccgccgcctctaggactggtacaacccgggctccatgggcaagcagtacttcctcggcctcgagaagttcctcgccggctccggcgacgcgtcctaccccggtgggcccctcttcaactcgctcggatttcggcaagacctagaaggacatgaatgagctcaagctcaacgagatcaagaacggcatgctcgccatgctctgcatcctcggttacttcatccaaaggctcgtc

SEQ ID NO: 13663 - DNA, 279 bp, Zea mays
  Clone ID: LIB36-001-Q1-E1-A9
ccttctccacctagctcccccgcgccaagaacacgccagctagcaagcgcgctcgatcgaataccgttaccgtgtcgccatggccgccaccgcgtctctatcagccgtcggggcgccgctgtcggtgcccgggctcaggaagccgctcggcgtgtcgtcgctccggcccctgcagccgagggcggcgaggatgacgacgacggccgtgcgggcgtcggcgtcgccctcgtccacgtccatcaaggagaaggctgcggccgggctgaccgcggcggccct

SEQ ID NO: 13664 - DNA, 389 bp, Zea mays
  Clone ID: LIB36-001-Q1-E1-B1
gagctatcccctccctccccatcccttggagccagcaactccactcctgagtcctcacctcgtgctgcccgcgccatttccacctcccactgtcctttcgtccagtccccagccctgcagcccaaccgtggaggttctggaaggcggtgtatcgcttcgagaaccttctcgagatgcagagcgccgcggctttccggccatgccccactcggctgctggtgagcagcccttgtcgccccctcctctcggctcgcccgcttcgtgcctccgccgctggcgccgtcgctaccagaagcagcgccgtgggccctcgcggtctggggctcgggctgctgccagcctcgcccgatctggatggcaggtgcgccagcgacaggtgtcatgcagcg

SEQ ID NO: 13665 - DNA, 416 bp, Zea mays
  Clone ID: LIB36-001-Q1-E1-B12
cgtcaccacacgcaatagcatccgagcaaagaagccaaagagcaactgggagcgaggacgggaggcaacaagcggcggcggcatggaccggaacctgagcgggtttctgatcgggtgcctgggcgccgccgtgacgctgctggcgtaccagcagacggtggtgaccagcacgcagagcgtcgcggcgggcttcgtcgtcatcctcttcgccctcttcgtcaaggaaggattcatttccctctgaatctctggtgcgcgtcagccagccatgcatgaggaggcgtcatcgctccgctgcctgtatttctgctcgctagttcagtcccgcagctgccgctgtgctcgtcaggttcttggaaaaatactgtaatagcgtagtgacttttatgtacgacacggatggttgttgctggctg

SEQ ID NO: 13666 - DNA, 466 bp, Zea mays
  Clone ID: LIB36-001-Q1-E1-B4
ggtcggtatccgggtcgagccccgcgtccgctgggataatggtgtttggtggttttcttgcaccaatcctggaacttaaacttggtgtagggggcacgtcttatgaagacttcatccgcagcgttcatctgccgatgcagttgagccaggtagatcccattgtggcatctttctcaggcggagcagttggagttatctctgccctaatggttgttgagataaacaatgtcaagcagcaggagcttaagcggtgcaaatactgtttaggaactggatacctggcatgtgcccgctgttcaagtacgggcgctcttgtgctcacagagcctgtttcaacattcagtgatggcgatcagcctttatccgcaccaaagacagagagatgctcgaattgctcagggtcgggaaatgtgatgtgtccaacatgcctctgcactgggattgaaatggaaggcgagcatgaccc

SEQ ID NO: 13667 - DNA, 419 bp, Zea mays
  Clone ID: LIB36-001-Q1-E1-B5
caaaacaccacacctcttcctcctcttcctcctcctagcacagctagcgcctgctccccttcgtctgtgatcatgtcttgcagcagcggcaagtgcaactgcggctccagctgctcctgcggcagctcatgcaactgcatgtcccctgacgtggagaccgccgccgccagcagcatcaagaccatggtcctcgctgcgccgaccaccaaggccagcgccggcggcttcgaggcggccaccgagggcggcggctgcgactgcaacacctgcaactgcggcaccagctgcggctgctcctgctgcagctgcaactgagccggcccgcccggcccggcgatggcgcacgagagtcgagaggacgacgacgacgaggcgtataaatataatagcagcgtctaaataggatctgtcaactgcac

SEQ ID NO: 13668 - DNA, 433 bp, Zea mays
  unsure (1)..(433): unsure at all n locations; Clone ID: LIB36-001-Q1-E1-B6
cccaagcgtccggcgggcgttcacgcacgggcccgacgccaccgacgcctggctgtggaagctggccaaggcgcacgtgctgacccacgacacggggtaccaccagctggtgagccactggctgcgcacgcactgctgcgtggagccctacatcatcgccgccaaccggcagctgagccggctgcacccggtgtaccgcctgctgcacccgcacttccgctacaccatggagatcaacgcgctggccagggaggcgctcatcaacgccgacggcatcatcgaggagtccttctggccgggcaagtacgccgtcgagctcagctccgtggcgtacggcgcgacgtggcagttcgacacggaagcgctgcccaacgacctcatcaagcgcgggctgggcgtgcgccgngaagacggggagctggagctcaacatc

SEQ ID NO: 13669 - DNA, 403 bp, Zea mays
  Clone ID: LIB36-001-Q1-E1-B9
gtcaaatacctcgtcatgggtaagccttgcctcgggcagactaaggccagaataagataacacgaaatgggtgtggagcggtggcgagagtagcgtgtaccctccgtggcaagaggctggacggtggtgtatctgtgctctcggtttgcgtgaacctgatctggtcttaagaaccccggtggcgggttgacatatgcaagggttaagtgctacatatgtcgtgtgattggagatcctcagctgagtataatcgattcggatcgccgtaccttcgcggttatgaagacttggtcactgccctgcaacctaaagtcaggatgtgaacactatggataaaaatgatgttgtattgatgagatgttgaaattagactagatgcaaatagagtctattaatacttaat

SEQ ID NO: 13670 - DNA, 428 bp, Zea mays
  Clone ID: LIB36-001-Q1-E1-C11
cccaagcatccgaacactcaacaatatggacagcagggctgtacttgatccttttacttcagtttctggaaaacaaagttgctgtggaacttacaaggtcagaatttgttgaagcccaagaggctttagctcagatgaaaaactggtttactcgcttccccacaattcttcaaggttgcgaaagtatcattgaaaatttaaggggacaatatgcacattctgttggctgcttcgatgaagcagctttccactttcttgaagcaaaaaagctgacagagagtaaatcaatgcaatcgatgtgtgaaacctatgcagctgtgtcatatatttgtaagggtgatgcagagtcgtcttcacaggcactagaactggttggtcctgcctatagaacaatggactcatttgttggtgtgcgagagaaaacctgt

SEQ ID NO: 13671 - DNA, 440 bp, Zea mays
  unsure (1)..(440): unsure at all n locations; Clone ID: LIB36-001-Q1-E1-C3
gcagagccgccagacactccgtagtctgtaccccaagcaccggcgcggcggcggcggctaccatggcagtcgggaagaacaagaggatctccaagggaaagaagggtggtaagaaaaagaccgtcgatcccttctctaagaaggactggtatgacatcaaggccccatcggtcttcagtgtgcgcaacattgggaagactctcgtgtccaggacacagggtaccaggattgcctctgatggtctgaagcacagagtctttgaggtttgtctagctgatcttcagggtgacgaggatcaggcttacaggaaaatcaggctccgtgctgaagatgtgcaaggcangaatgtgctcacaaacttctggggcatgaattttacaccgataagctcagatctctagtaaagaagtggcagacattgattgaagcccatgttgatg

SEQ ID NO: 13672 - DNA, 99 bp, Zea mays
  Clone ID: LIB36-001-Q1-E1-C4
atccttcgccgtctctctctctctctctctctctctctctcttatatagtccttttaatccatctctatggctcctgtttctcctcattttccccctac

SEQ ID NO: 13673 - DNA, 443 bp, Zea mays
  Clone ID: LIB36-001-Q1-E1-C5
tacggtcgcagctccggggccaccacgcgtccgcaaacgtatcctcacgcccacaaaacacccgaagaaaagaagagactgaacgccgcgagttcacgtgacgatggagaacgccgcctccgccatcgctaagccgtcgctgtccaagaagccctcgccgtcgttccgcctccggaacggcagcctcaacgcactgcgcctgcgccgcgtgttcgacctcttcgaccgcaacggcgacggcgagatcaccctcgacgagatggcctcggcgctcgacgcgctcggcctcggcgccgaccgctccggcctggaggccgcggttggcgggtacatcccggccggcgccgcggggctccgcttcgacgacttcgaatccctccaccgcgcgctcggggacgcgctgttcggcccatgccggtggctgtgaccgaggacgacgacga

SEQ ID NO: 13674 - DNA, 431 bp, Zea mays
  Clone ID: LIB36-001-Q1-E1-C6
ccggggccaccacgcgtccgcgcaccgcgacgcgatggccgcgctccgcctcgcctccttcaccctccgccccgccgccgccgccgccgccttttccggcgcgactccatcggctccccggtccgcctctttctccagcgtggcgcgggggctcccctccctccgcctggccccgccccgccgccgccgcggggacctcgccaggccccgcgccgcggccgaggccgcggcggagagctacgcgtccgcgctgtcggaggtggccgtcgagaacggcaccctcgagcagacggtctccgacctcgagaagctggagaagatcttctccgacgaggccgtcgccgagttcttcgacaaccccaccgtcccgcgccaggagaaggccgagctcatcggcgagatcgccaagtcgtccgagcttcagccgcacg

SEQ ID NO: 13675 - DNA, 415 bp, Zea mays
  Clone ID: LIB36-001-Q1-E1-C7
ccggggccaccacgcgtccgcgcacgcatacacagcacagagtgaggtaagcatccgaaaaaagctgtgatctgatcgacatggccgccgccaccatggctctcacctcccgcgcgctcgtcggcaagccggcgaccagcaccagggacgtcttcggcgacgggcgcatcaccatgcacgagactgctggcatgcccaatccagcggtgtccggcagcccctgatacggggcgcattgccttctgtacctgggcccgctgtccggccagccccgagtctacgtgatcgggcagttcgccggtgactacggctgggacaccgcggggctgtccgccgacccggacactttcgccaagagcgcgatctggacgtgattcactgccgctggagcatgctgagcgcgctcggctgcgtg

SEQ ID NO: 13676 - DNA, 117 bp, Zea mays
  Clone ID: LIB36-001-Q1-E1-C8
catataaataatttataacagtttaaagttatttctttgaatcacctttgtaatcactccgatcatacaaagtaaaattttgtaacttgtaaaatttggtaataagatttccgctgc

SEQ ID NO: 13677 - DNA, 463 bp, Zea mays
  Clone ID: LIB36-001-Q1-E1-D2
cggtccggctattcgggtcgagccccgcgtccgcccaagagtccgagttgatctcagaacagagagttttttgacttgggaaagcctggagtcagtgcgtagaaacaaagttggcttgaaaggtcctatggctacacctattggaaagggtcatcgatctttgaatcttacattaaggaaagaacttgggctctatgccaatgtcaggccttgcaacagcctcccaggctacaagaccagatacgatgatgttaaccttgtgacaattcgtgaaaatactgaaggagaatatagtggtcttgagcatcacgttgtgagaggtgttgtagaaagtttgaaaattattacccgccaagcaagtttgagagtggcagaatatgccttttcattatgccaacgccaatggccgggaaagggtctctgcgattcacaaaggcaatattatgaggaagacagatggtcc

SEQ ID NO: 13678 - DNA, 432 bp, Zea mays
  Clone ID: LIB36-001-Q1-E1-D4
ggtcggctgatccgggtcgagccccgcgtccgcataacaacgcagagcatcagaagcagctgcgatctgatcgacatggctgccgccaccatggctatcacctcccgcgcgctcgtcggcaagccggcggctggcacgagggacgtcttcggcgagggccgcatcaccatgcgcaagaccgccgccaagcccaagccggcggcgtccggcagcccatggtacggtgccgaccgcgtcctgtacctgggcccgctgtccggctcgcccccgagctacctgaccggcgagttccccggcgactacgggtgggacaccgcggggctgtcggcggacccggagaccttcgccaagaatcgcgagctggaggtgatccactgccgctgggccatgctcggcgcgctcgggtgcgtgttcccggagctgctcgcccgc

SEQ ID NO: 13679 - DNA, 433 bp, Zea mays
  unsure (1)..(433): unsure at all n locations; Clone ID: LIB36-001-Q1-E1-D6
gacactctcacgagccacagcccacaggctagctctctagcggtctagccagtccacgcagcgcagggatggcgtcgttcgccgtggcaacggccccgtcgctagcggccccggcagccaagaggaggcccgccgccggcgtcacgtacgtggagggcatgaacgcctacagcggcctcaaggggctcaacaaggtgaccatgctcggggtgcgcaagaccgccgactactccttcgccaaggtcgtggcgtcgctcagccccgcgggcaggaagcggcgcggcggggcgttcggcgcccagatgaacgccgccgccgagatcttcaggatcgccgccaccatgagcggcctcgtgctcgtcggcgtcgccgtcggcttcgtgctgctccgggtggaggccgccgtcgangaggccgagtagggcgctcgcgc

SEQ ID NO: 13680 - DNA, 399 bp, Zea mays
  Clone ID: LIB36-001-Q1-E1-D7
cgtcgtcaaggtgggcagccaggtgaagaagttgaaggaaggcgacgaggtgtacggcatggtcagcgagaatccgctgcaggggcccaagcagtccggctcgctggcggaatacaccgccgtcgaggagaagctgctggcgctcaagcccaagggcctcgacttcgcgcaggccgccagcctgccgctagccgtcgagaccgccaacgagggcctggagagggcaggaatatccgccggcaagtccgtcctcatcctcggtggcgccggcggtgtcggctcccttgcgatccagctagcgaagcatgtctacggcgcgtccaaggtagctgcgacgggccagcacaagaagatcgagctgctcaagagcctaggtgccgatgtcgccatcgactacac

SEQ ID NO: 13681 - DNA, 416 bp, Zea mays
  Clone ID: LIB36-001-Q1-E1-E10
gtccgaacaacaacaacgcaagtacaagtttgtgatgcatctggttgacgtctacggcccattcgccttcttcaaaggatgcttcgatgacataaacctggagcggctaatgctggcaatggcgatgaagacccctgaggatcaaatgttcaatttcgaccctaagaccatcgactgggacgattacttcaccagaatccacatccctggtattctcaagtatgtgtgcaagtgaaaccttctttcttcagtctatttgcagcatgcacatgcttcttcttcgccttcttactatcgaaagttaatggctcatattctttatgaaagaaatttataccactctgtttggttgtacctggttcaatggatcgaccgggtgttaccacgtaacacaaataattcgatctccgcgaaaa

SEQ ID NO: 13682 - DNA, 440 bp, Zea mays
  Clone ID: LIB36-001-Q1-E1-E4
cccaagcgtccggagacaggagaaggcaaggatgctgctcctgagctcccccttcgtgtccgtgtcgccgccgccgccgccgctcagctcccatggcgctcgcccggcgctgcggatcgaggcggccaggcagctgacggggcgggtggtgacgaccaaggcggacaagacggtcggggtggaggtggtgcgcctggctccacaccccaagtacaagcgccgggagcgcatcaagaagaagtaccaggcgcacgaccccgacaaccagttcaaggtcggcgacgtcgtcgagctccaaccctcccgtcccatctccaagaccaagcacttcctcgccatcccgctcccgccccgcgacactcgccgcaagtctcagctccttacgccgctccagtccgacgacgaccaggagccgtcctcgccagagtgattgattgtga

SEQ ID NO: 13683 - DNA, 351 bp, Zea mays
  Clone ID: LIB36-001-Q1-E1-E5
caaaggggggagatctgaattaccaattgatcccaacaatgagcggattgaatctgacaagactggagatgaagggaacccacatcctgactatggccatctcacaccagcagagcgacgctacatggaacagaagcagaagatcgacatgcagaagatggccaaagtcgccaacaagtcgcatagagaccgcatccaagacttcaatcagtatctcgcaaacctaagcgagcactacgacatccccaaagttggccctggctaacatagccaaactggctgtgttacgcacaacaattgtgtgctgggtctatccatttatgttagcatgttacgtatcgtttaaaacga

SEQ ID NO: 13684 - DNA, 384 bp, Zea mays
  Clone ID: LIB36-001-Q1-E1-E7
ccacagcgtccgagggtgggctgtcaacaacgtacaattaattgatcagtgcaagagggagggctatgtacaaaggttaaaagatgaacaaggggaaggttgtaccatccatggatttgtaaatgtgaataaagtagctggcaactttcactttgcccccgggaaaagcttggaccagtcattcaacttcctgcaagacctattgaacctccaaccagaaacttacaatataagccacaagataaataagctgtcctttggggaagagttcccaggtgtagtcaatcctcttgatggagttgagtggatacaggataactccaatggattaacggggatgtaccagtattttgtaaatgttgttccaacagtctacacagatat

SEQ ID NO: 13685 - DNA, 436 bp, Zea mays
  Clone ID: LIB36-001-Q1-E1-E8
ccgagggcacctacaactactgggccgactcctacacgctcttcgtcttcaacatggcgctcatgggcttcgccgagcaccgccgcctccaggactggtacaacccgggctccatgggcaagcagtacttcctcggcctcgagaagttcctcgccggctccggcgacccgtcctaccccggcgggcccctcttcaacccgctcggcttcggcaagaccgagaaggagatgaatgagctcaagctcaaggagatcaagaacggcaggctcgccatgctcgccatcctcggttacttcatccaggggctcgtcaccggcgtcggcccgttccagaacctgctcgaccacctcgccgaccccgtcaacaacaacgtgctcaccagcctcaagttccactagaacgtggtgcatcaggcatactgctgctgccgccgccg

SEQ ID NO: 13686 - DNA, 390 bp, Zea mays
  Clone ID: LIB36-001-Q1-E1-F1
gacgcgtgggggaaaacgccaatctatattgttggtacggattgcacagccaagcgcaacatcgccaagctgcttgcgaattccataatataccgctacctcagcagtgaggaactgcttgaggatgttcttggtggcaaggacgccctcagagccttcaaggaatctgatgagaacggttatcttgaagtcgagacggaagggttaaagcagctcacgtccatgggtagccttgtactgtgctgtggagatggcgccgttatgaactcaaccaatctagggctgctgaggcatggtgtctccatttggattgatgttcctcttgaaatggcagcaaatgacatgttgaagagcactggaacacaagctactacagatccagactctttt

SEQ ID NO: 13687 - DNA, 317 bp, Zea mays
  Clone ID: LIB36-001-Q1-E1-F10
gggtcgaccccgcgtccgcctgaacatgcacctccagatcgagtgcttgcgctaggatgggcaggtaacgttcgccgacggctcgcgtgtcgccgccgactccatcatctactgcaccgggtactactgctcgttcccgttcctggacacgggaggcctggtgaccgtcgacgacagccgcgtcggcccgctgtacgagcacacgttcccgccggcgctggcgccgtcgctgtccttcgtggggttgccgaagatggtgctggtgccgcggttctacgaggcgcacgcgaagtgggtggcgcacgcgctgtcaggct

SEQ ID NO: 13688 - DNA, 419 bp, Zea mays
  Clone ID: LIB36-001-Q1-E1-F2
gcaccgaggacttcgtaagaagcctgtgttgacaagtggtgaggcccctacagaaacaaacacgtctggccccaggattatgaaccctaacgccccagagtttgttccaggtcaatctcggagtcctaatggccatccagcatctccaaatggtcctttagcatctccaggtggtattccatcttcaccacaggaccttctatcctctccagatagtaccttggaatcaccagtaactgcatccccacaagtttctgaatgtagccagattagtcctgaaggagatgttgagggtgggggtgtaaagcagaacatggatgacacgaaccacccagaaagtaaagatggtgaagtggagcctgagcaaaccaaagctcctgaaagtacacaacaaagtgcagtggtaaaagatgctgctg

SEQ ID NO: 13689 - DNA, 393 bp, Zea mays
  Clone ID: LIB36-001-Q1-E1-F4
cggtccggtgagtcgggtcggcgcccgcgtccggcaaggagcagtgcctggcgctcggcaccaggttgcgctccaagtacaagatcacctaccagttctaccgcgtcttccccaacggcgaggtgcagtacctccaccccaaggacggcgtctacccggagaaggtcaaccccggcagggagggcgtcggccagaacttccgcagcatcggcaagaacgtcaaccccatcgacgtcaagttcaccggcaaggccaccttcgactaatcacacttcacgtacgccgcacgccccagccgggatccaaattaaagaacttcttcttctattaattacagtatattgtaatttggctgctggtacggtggtggcatgatttgagatgtgcatgatg

SEQ ID NO: 13690 - DNA, 159 bp, Zea mays
  Clone ID: LIB36-001-Q1-E1-F6
cgcaaggtcgcaaatatgtctaccgtgctccagcgcccgaaccccggcaaggtccaatgcttcggccgcaagaagaccgctgtagccgtcgtctacaacaagccagggcgccggctgatcaatgtgaatggcgtcccgattgagctcagcacgccggag

SEQ ID NO: 13691 - DNA, 421 bp, Zea mays
  unsure (1)..(421): unsure at all n locations; Clone ID: LIB36-001-Q1-E1-F7
gcacattcctcaagggagacttgggggagttcggctacgttgctccagagtgcgcgagcaatccggtcggcacgacgaaaggcgacgcgtacgcgtttggggtggtactgttcgagctcgttagcgggcaggaggctgctgctgctgcggtgggcaccgtcgacgtgacgggcgaagggttcaagggcacattggtggactgggtttatcagctcaaggcctctggccggatcggtgatgctgtcgacaaacttttgcgcgggaagggccacgaggcagagatcgaggagttcttgaaggtagcctttgcgtgcacccagcctcgcgtgagggagaggcactccatgtaccgggtctaccacgccctgaagagcatcngagaaggccgcgacgccacggagcagttcgacgagttcccgct

SEQ ID NO: 13692 - DNA, 114 bp, Zea mays
  Clone ID: LIB36-001-Q1-E1-F8
ccgggcggacccgtgggcgaaggtaatggcggctgtggcgcctgcgccagctcgcgtgtctgtggccggcatcagctaccgctggttcgtggcgtaccacgtggcccggctgct

SEQ ID NO: 13693 - DNA, 394 bp, Zea mays
  Clone ID: LIB36-001-Q1-E1-F9
cccaagcatccggccttccgcaaccttcccggtgtggatgttgccaacgtcgagcgcctcaacctactagaccttgcccccggtggccaccttgggcgctttgtgatctggacccagagcgcgttcaataagctcgaggaggtgtatgggagctatgacgccccgtcgcagaagaagaagggcttcgtgctgccgaggcctaagatgtccaacgctgacctgggcaggatcatcaactctgacgaggtgcagtctgtggtgaagccactcaacaaggaggtgaagcgcatggagaagaggaagaacccactcaagaacatggctgctgtgctcaaactcaacccctacctgggcactgcccggaagatggccacccttgctgaggctgctcgtg

SEQ ID NO: 13694 - DNA, 439 bp, Zea mays
  unsure (1)..(439): unsure at all n locations; Clone ID: LIB36-001-Q1-E1-G10
gggtcgacnacgcgtccgcggaagagtgggttgacactgaggaatcttacccttaccaaggtgtcaatggaatctgcaagtttaagaatgagaatgttggagtcaaggttttggactcggttaacatcaccctgggtgctgaggatgaactgaaggatgctgttggtctggttcgcccagttagtgttgccttcgaggtgatcactggtttcaggctgtacaagagcggagtttacactagcgaccattgtggaactacaccgatggatgtgaaccacgctgttctggctgttggctacggtgtcgaagatggtgtaccctactggctcatcaagaactcatggggcgctgactggggtgatgagggttacttcaagatggaaatgggcaagaacatgtgcggtgttgctacgtgtgcatcctaccctattgtcgcatg

SEQ ID NO: 13695 - DNA, 391 bp, Zea mays
  unsure (1)..(391): unsure at all n locations; Clone ID: LIB36-001-Q1-E1-G12
cccaagcatccgcgaggccgtgtggttcaaggccggctcccagatcttcagcgagggtggactggactacctcgggaacccgagcctcatccacgcgcagagcatcctcgccatctgggcctgccaggtcgtgctcatgggcgccgtcgagggctaccgcatcgccggcggcccgctcggcgaggtcgtcgacccgctctatcccggcggcagcttcgacccgctcggcctcgccgacgaccccgaggccttcgctgagctcaaggtgaaggagctcaagaacggccgcctcgccatgttctccatgttcggattcttcgtccaggccatcgtcaccgggaagggcccgctcgagaacctcgcntgacacattgccgaccccgtcaacaac

SEQ ID NO: 13696 - DNA, 451 bp, Zea mays
  Clone ID: LIB36-001-Q1-E1-G7
cggtccggtctccgggtcgcccacgcgtccgcacaaggtcgaggatgtcttgcaactgcggatcaagctgcggctgcggctcaagctgcaagtgcggcaagaagtaccctgacctggaggagacgagcaccgccgcgcaggccaccgtcgtcctcggcgtggccccggagaagaaggccgcgcccgagttcgtcgaggccgcggcggagtccggcgaggccgcccacggctgcagctgcggtggcaactgcaagtgcgacccctgcaactgctgatcacatcgatcgacgaccatggatatgattattatctatctagcttgtggtggtggttgaacaataataagcgaggccgagctggctgccatacataggtattgtgtggtgtgtgtgagagagagagaaacagagttcttcagtttgctatctctctctgcatgtttggcgtcagt

SEQ ID NO: 13697 - DNA, 225 bp, Zea mays
  Clone ID: LIB36-001-Q1-E1-G8
ccgggtcgcaccacgcgtccgcacaagcgtccgctcactatacgctcctggctccacgccgaggagaacaagcgccgcaccctgcagcgcaacgacgtcgccgcggccatcgcgcgcaccgacgtcttcgatttcctcgtcgacatcgtgccccgcgaggaggccaaggaggagcccggcagcgccctcggcttcgcggcgcccgggaccggcgtcgtcggggct

SEQ ID NO: 13698 - DNA, 367 bp, Zea mays
  Clone ID: LIB36-001-Q1-E1-G9
caaaacaataggcaggcagcaaacacaatccaataggcaacacccgcggcgacgcaagagggagaagcgagcgtgcagcggtcctcctctcgatccacatggccatggcggcagcggacggcaagagccggaggttcgcgctggcctgcggggtgctgagccagtacgtcaaggccgagcagcagcagatggcggccccgcgcgccccggccaccacgaccctgagcctgatgcccggcgcggacgttggcgccgacgagcagcaggagccggccgccgcgagggccgaggagatgcccgggcccgcccccgcccccgccgcggcgccgccgctcaccatcttctacggcggcagggtggtggtgtt

SEQ ID NO: 13699 - DNA, 444 bp, Zea mays
  Clone ID: LIB36-001-Q1-E1-H12
gtccgcccaagcatccgggggaaggcctccaccggtgcgctccggcttcgctctacgttgaccttcggcgaggtctgcccggcgcggcgggcgttccgcggcctcgtcgtcagggccgctaccgtcgtcgcccccaagtatacaacacttaagcccttggctgatagagtgcttgtaaagattaacttttccgagaagaagacaactggtggaatcttgctccctacgactgctcagtccagacctcaaggtggcgaggtagttgctgttggagaaggaaggataattggggataagaaagttgatgtcagcattcaggttggagctcaagttgtgtattctaagtacgctggaaccgaggtcgcgttgaacgatcacagccatctggttctcaaagaggatgacgttataggtatcttagaaactgatgacgtgaaagacatg

SEQ ID NO: 13700 - DNA, 455 bp, Zea mays
  unsure (1)..(455): unsure at all n locations; Clone ID: LIB36-001-Q1-E1-H2
gggtcgnagcccgcgtccgcaggagactaacaaagcaatccgaccagctcgatccggacgagctagcagagcagatcgagaaggcggccgtgaatagttcaatagtctcgagaccggccgcgggagcgaggatgagccatccgaggtacggcggcggctacccatatccggggcagcaagggtactacaaccagggcccgtacccgtaccagggcccgccggtgatggcgccgccgcagtaccagtacgcgcagccgccgccgccgcctcggtcgcctggattcctcgagggctgcctggcggcgctgtgctgctgctgcctcctcgacgagtgctgctgcgacccctccatcgtcttcgtctcctgagtcctgcatgcggtcgagagaacaccctgcgccaagaggaagggtgtgcacgccattttcctcagtcgatttttccaatttcctcag

SEQ ID NO: 13701 - DNA, 449 bp, Zea mays
  Clone ID: LIB36-001-Q1-E1-H3
ggtcggggagccgggtcgagccccgcgtccgcccaagagtccgcggacgcgtgggcgaagcatggcgtccgtcaccgcccgcgccccggtcgcggcccttcgcccgtcgtcggccttccttggccactctagccgcctcggccgcaccgcgtcgcccacgaggcgcagcctcaaggcggaggccaagggcgagtggctccccggccttccctccccctcctacctcgacggcagcctggcgggtgacaatggcttcgacccgttgggcctggcggaggaccccgagaacctgcggtggttcgtgcaggcggagctggtgaacggccggtgggccatgcttggcgtggccgggatgctcatcccggaggtgctgaccaaagccgggctgatcaacgcgccgcagtggtacgaccccggcaagtcggagtacttcgcgtcgtcgtcaacgc

SEQ ID NO: 13702 - DNA, 288 bp, Zea mays
  Clone ID: LIB36-001-Q1-E1-H5
cataaacaagaccgacagggccaagtatgagtccaccgcacgctcctggacacagaagtatgccatgggctagaagcaaggctaaaagctggccaaactggtgaatgtgccggaccccaaatcgttatcacctaaataaccagtcaagtcgcaagtatgaatggacttttgaggaccattgtgccctgttgaactcatgtattaccttgtgaagtccgttgtgtctggtttctacctgaccgtttcgttatctgatgctgtttctttaatatctgatgctgcttcatt

SEQ ID NO: 13703 - DNA, 434 bp, Zea mays
  Clone ID: LIB36-001-Q1-E1-H7
gaagatagcgcttatagcttgtcagccatggccaccgccgccgcgtctagcctcctcaagtcctccttcgcgggctcccggctcccggccgccacgcggaccacaccggcgtccctcgtggtggccaccggcccgcgcggcgccggcgcggggcccatctgcgcgtccatgtccatgtcctcctccaacccgccctacgacctgacgtccttccggttcagccccatcaaggagtccatcgtgtcccgcgagatgacccgtcgctacatgacggacatgatcacctacgccgacaccgacgtcgtcatcgtgggcgccggctccgcggggctgtcctgcgcgtacgagctctccaaggaccccgccgtgagcatcgccatcgtggagcagtcggtgtcgccgggccgcggcgcgtggctgggcgggcagctgtt

SEQ ID NO: 13704 - DNA, 436 bp, Zea mays
  Clone ID: LIB36-001-Q1-E1-H8
gagaactacaatatcttttcagcagatatggaagaatacgtgaagtggagttgaagcgtgactatgcattcagtgaattcagtgacccccgtgatgctgatgatgcgcagtacaacctagatggcaaggaagtcgatgggagccgtattagtgttgaatttgctaaaagagttcctcgtggttctggtggttcacgtgagtacatgggaataggacctccaccaagaacaggtcgttgttttaactgtggaatggatggtcactgggcaagggactgcatagctggtgactggaagaacatatgctaccgctgtggtgaatcgggccatatatatagaaattgccagatcagtccagagaatctcatgcgtgataaaagctagtcacagtctccatcgccacgtggtggaccttggcgcagccggaactacatcac

SEQ ID NO: 13705 - DNA, 443 bp, Zea mays
  Clone ID: LIB36-001-Q1-E1-H9
atcattcagattgcgcgggggtctggtcgtcctgtcagggatgtcatcgacatgctggaagagtataagaggcttgctaaaatctggggcaagatgaagggtctcaagatcccaaagaaaggggagatgagtgcactgtcccgcaacatgaatgttcagcacatgagcaaggtccttcctccgcagatgcttaaacagattggtggcatgggcggtctgcagtctctgatgaaacagatgggatcgaaggagatgagcggaatgtttggaggcatgggtggcgagcggtaattttacgtcctgtttttggtggatcgtcgctgtgaacttgtgatgctaaattgagagggtttagtgctgcggtctgatcatcgtcagaggtttacatgaagatcagcctgcgccatgttatggaacaggcttactgtagctccccatgcctg

SEQ ID NO: 13706 - DNA, 408 bp, Zea mays
  Clone ID: LIB36-002-Q1-E1-A1
cccaagcgtccggatgcatgcagttctcgcacctcgctatgggacggacgtccttaggagttgctggcccgtatgaagcttgttccgtattcatctcatagctcccagtataaacagcgaacattcatgatgaagtggttgctaaagaggactctactccaatgcctgctcatcaactgggtggatccatctaactggggtttaagagagggatttagacctccgtctcagcaacaaaggtgttgacgagtactcaaagtgattcggacgctggactgcaattccagtactgggggaggattaattatgcgtgtgtataagctttggacggttcctaccttccggctagtgtcataagttatgcactttatatacatcaagacgtgttctaaatgtgactcttcctat

SEQ ID NO: 13707 - DNA, 449 bp, Zea mays
  Clone ID: LIB36-002-Q1-E1-A10
agataactgaagggtgttgtggcgcatgtgttcctgctagtattaatcttctccccagtccctagatcgatttgcttaagctggtatgtgccaccccctgtgctggtgaccacgcgtgcagttctcccacctcgccatggctcggacgtccttaggagttgctggcccgtatgaagcttgttccgtaatcatctcagagctcccaaaataaagagcgaagattcaagatgaagtggttgctaaagaggactctactccaatgcctgctcatcaagtggatggagccatctaactggggtttaatagagggatttagacctccgtctccgcaacaaaggtgttgaggagtactcaaagtgattcggaggctggacggcatttccagtactgggggaggattagttaggcttgtgtataagctttggagggttcctaccttcctgctattg

SEQ ID NO: 13708 - DNA, 425 bp, Zea mays
  Clone ID: LIB36-002-Q1-E1-A11
cccaagcgtccgggataggagacgtaactcagtcctcctctgaccgccgactcatccgccattgccggcaccggctccggcgtcgataagaggtttaagaccctgccagcggcggaggcgctgcccagaggctaagccatcggcggctacatcttcgtctgcaacaacgagaccatggaagacaacctcaagatgccgatcttcgggctgccgtccaggtacatggattctgtgagggctatcaggccccgcctgccccacttcctctacaactactccacccatcatctccacgggatctttgatgctgcaagcttcggaggattcaacatcgatccagcagcttgggaggacaagatgttccccggcgagtcccacttccctgctcatggtagggttgcaactcccaagatattttcaccgct

SEQ ID NO: 13709 - DNA, 388 bp, Zea mays
  Clone ID: LIB36-002-Q1-E1-A2
cggacgcgtgggtgaagttgtcatatctgatgtggtcatggcgattgttgcggacgtcatgcttgtctatcttcctgctccaactattggtttacagccgccactggcaagaaacgctggagctattgccaactttttctataactgccctgataatactttccaaattgctatggctggaaggtcattctcacttctgcagaggattggagcttttgtgaggaatggtataaagcttttggcagtgggaactactgcttctttgattggcactagtgtcacgaatgcagcgctcaaagcaaagagggctgttgataaggaccttgaggacgaagtcatggaaattccagtcgtctcaactagtgttgcctatggtgtatacatgtcc

SEQ ID NO: 13710 - DNA, 328 bp, Zea mays
  Clone ID: LIB36-002-Q1-E1-A6
cccaagcgtccgcaaggagagtacgtggaggagcagccatggcttcatcggtggccgccgctgcgagcacattcctgggcacccgcctggcggacccggcgccacagaacgggcgcatcgtggcccggttcgggttcgggttgggcggcaaggcgaagcctgctccgaagaacgtggcgaatacatcgacctcctctgaccggccgctgtggttccccggcgccgtggcgcccgactacctgtacggctcgctggtcagcgactacaggttcgacccgttcggtcgcgggaagcccctggagtacctgcagttcaagttggacgcgct

SEQ ID NO: 13711 - DNA, 442 bp, Zea mays
  Clone ID: LIB36-002-Q1-E1-A7
aacggaagcgtgggcggacgcgtgggcaaacaaagccaccaccatcccaacccaaacacatcggccgaccacgggcgccgccatgtctaccgctgacgcggcgagcccggccctggctccggacggggacgcgccggcgggcgaaggcctggccctggcccagttcgccgcgggctgcttctggagcgtggagctggtgtaccagcgcctcccaggcgtggcgcgcacggaggtggggtactcgcagggccaccgccacgcccccacctaccgcgacgtctgcggcaacggcacgggccacgccgaggtggtccgcgtgcactacgaccccaatgcctgcccctacgacgtcctcctcgacgtcttctgggccaggcataaccccaccacgctcaccagacatggcaaccgagtcgggacgcaagtccggtcgggtatctac

SEQ ID NO: 13712 - DNA, 366 bp, Zea mays
  Clone ID: LIB36-002-Q1-E1-A8
caagagtagtagtcggagccgtccgtagtagctagcgtacgtacgtgtgaccgattcagcgaggtcgccgtttgtgtgtcgatatatatggcgaggtcgccgtttgttccgatggatcaggggaaagagcaaggcgccggacgaggagcggccggcaataataaggagcggcagcagcaggagcaggagcaggacgaggtgctgctggtgcacagccaagtgcggcggatcaagaaggacgacgaagaggccttcagggagcgcctcctgaagctgcgcctgctggagacccggcccagcgccggcagcctggcctggcgagcgccgcgctccctgtcgccgctccgccgtgccggcaaagccatc

SEQ ID NO: 13713 - DNA, 409 bp, Zea mays
  Clone ID: LIB36-002-Q1-E1-A9
cggaatcggccgccacggaggcggcgtccagcagcacgtcgtcaaggagaagttccaggaggtcgacacggtctcatgcgccggcgccaaccaccaccaccaccaccatggtcaccacggcggccacggcttcgtggtgcgcgagaccagcgtcgaggaggacatcaacacctgcatcggcgaggtccacgagcgcagggagagcttcctcgccacggctaactgagccgccctgcggtcggcatccacgcccgttcgtgcctgcctgcttgccttatgtatgtctgtggttgactggttgtgcatggtcatcctacttggctatcgtacgtgcacgcactcagctcctgtgcgaattacgacaataagctcgtgacctgaataatacttcttcgtaatactaatacct

SEQ ID NO: 13714 - DNA, 452 bp, Zea mays
  Clone ID: LIB36-002-Q1-E1-B1
cgcagctcgagacgcgcaaccccacgccggctcctacggaggcgcttacgctcctcaacggcaagtggatcctcgcgtacacatcattttcccaactattcccactattggggtttggtaatctgcctcagctggtgaaggtggaggaaatatcacaaaccattgattctgagaacttcacagtgcaaaactgtatcaagttttcaggacctttggctacaacctcagttgccactaatgcaaaatttgaaattagaagccccaagcgtgtgcagatcaaatttgatgaagggattgttggtacaccacagttgaccgactccattgtgctaccagagaagtttgagttatttggacagaacatcgacctgagtccactgaaaggcatattttcttccatcgaaaatgcagcatcctcggtttgcaaagacatatctgagcagcctccgctc

SEQ ID NO: 13715 - DNA, 427 bp, Zea mays
  unsure (1)..(427): unsure at all n locations; Clone ID: LIB36-002-Q1-E1-B11
cccacacgtccgcatccgctcgccgccccgatggaccgcggtagcgtttgttttcgtcgctgcccgttcagcctaaccatccccgcccgtacagcgccccggcgaccggcgccgcttctcgtcgtccgcgctaagcgcgccggcagccagccccctgctgccgccgcctcgcgtcagcccgcgaatcccagcgcggtcccgaagcgggacgtggaagaagaggatgaggaggtcgaggaggagatgccctggatccaggacaaggcgctggacctcgtggagttcactggcaccgtcacacaggccatcccagggccccgtgttggctctagccctgttccatggcttctcgcggttcccctcgcctacgtcngggtctcctttgtgctcgcggtcgtccgcaccgtgcgcaagttcacctcgccgc

SEQ ID NO: 13716 - DNA, 452 bp, Zea mays
  unsure (1)..(452): unsure at all n locations; Clone ID: LIB36-002-Q1-E1-B2
gttctctttctcgggtctcctatttcactggttcactccatctggacatgactgcggactcaacctgtttttcattgtcttcacgttgattcttgtttttgcgtttgctattgttgctctgcacccaaagatcaatggaagcttgttgcctgcatcagttattggtatgtactgtacgtatctgtgctacagtggactctccagtgagccaagggattacgaatgcaatgggcttcacaatcactcaaaagctgtgtcaactggtagccttacgttgggactccttaccacggttctctctgtggtctattctgctgtccgcgctggctcctctgcaactgtgctctcgccaccagactcaccacgtgggaccgacaagccattgcttcccttcagcaaggcagacgaacaagaagataagaaggatgtgccgangccggtgacatactcct

SEQ ID NO: 13717 - DNA, 428 bp, Zea mays
  Clone ID: LIB36-002-Q1-E1-B3
cccaagcgtccgcccacgcgtccgatcgatctacacacatacatagtttcttctactacacgacgacaaacatggggaagcctgcgaagatcggagagtggggtggatacgccggcgatcgtcgggatctgagggctactccggaccggctgatcgaggtgaaggtcacggcggacaacagcagctgcatccgctccatctccttcatctacatcggagccgatggcaaaccgtacgaggaggggccatggggtttcggccatgctggcacggagtacaagattgatctgtgcaggttcgacgagagcttgacggagatctccgggaccacgggcccagcctacaacattgacaatctggtcaagtcgctcaaattcctcaccaacaaacgcgcctacggaccgtacggcacgggacacggcaccccg

SEQ ID NO: 13718 - DNA, 376 bp, Zea mays
  Clone ID: LIB36-002-Q1-E1-B4
gcagtgtgtgggccactacaacgaggtgaaaagcgtcaccatcggcgagtacctgcccccccacctggtgatttacatcgatgtgcccgttccacaggtccagagggggggtcagaagaaaggacatccagattagctggggatcacctctgcctatctacaggacattgagaatgcctataagaaaacctttctccctgagatgactgaaaaatgtgaggttttacaacattctgcaagggaagctcaagattcagaaaaggtggtagacgacattgaatacctgaagttcgataaagggccgtggctcaagcaggacaatcgcactttataccacctgcgaatactggttcacgataagtttgatgtgcggaat

SEQ ID NO: 13719 - DNA, 455 bp, Zea mays
  unsure (1)..(455): unsure at all n locations; Clone ID: LIB36-002-Q1-E1-B5
gaagaagtccaagcaggccctctcgtcccgtccgcagcctgctctcacccagaagaagcctggtcccaagggccgcggcggtgattcccgcggcggcgctgctaacaagggcggctctggtgccaaggatgactctgatggcgacggctatggcaaccaggaccaccgtactctggcaaatggtgccttcaagggccaagagaatggtgtccccaaggagaattcttctcatggccgtactgttgtcaagggaaaggagaatggggcccccaaggatgaaggggccttcgatgtaagtaaactacagaagctacgggccaacaagaagaatggtgccactgacaatggaatcaagaagctgaccaaacctgacataaagaagaaagggaagcaagatanggtgtgggacgacaaaccttccaacaagaagctggattttacagacccggcagacg

SEQ ID NO: 13720 - DNA, 119 bp, Zea mays
  Clone ID: LIB36-002-Q1-E1-B6
cgggcgacccacgcgtccaaacagactacgccaggcactcgtctcagatgtgcatagtgctctcacagacgatctggctcgtctgatagtctcctaccgtgattcccccacttgcgccg

SEQ ID NO: 13721 - DNA, 323 bp, Zea mays
  Clone ID: LIB36-002-Q1-E1-B9
cgcgtccgcccaagcgtccgcagacgcgtgggcagacgcgtgggggcttgcggtagatacctaggcacccagagacgaggaatggcgtaccaggcgacgaaatgcttctgggagtttataataagcatagatccggagattctcaaatatgtcaaccttttgaactgcctgctgaatccatgatcaagcacgacacaacctgacgaactgaaacatcttagtaaccagacgaaggaaattcagaacagtagtgctatgaagagtttgtgcacttcagttttaggacagtcagtacttcaagttctccaccatttcattaaaac

SEQ ID NO: 13722 - DNA, 397 bp, Zea mays
  Clone ID: LIB36-002-Q1-E1-C11
cccaagcgtccgcagacgcgtggggcacaggcagcagctaccatccctcactcactctcggtacctgacctgaccacgagagcaacatgggcggacgacacgacatgcacgggcagcactacggccacaactgcggcgtgaacggcttcgtgtccaagctcgtccacggtggcggcggccatggccactggaagcggctacggccatggccatggaaacggctacggccatgggaatggcggctacggcagcggccacgggtaccctcgtctcgccgccgccggcgcgtaccctcacccgcacggggcataccctcacccgcacggcggccactggtagcctcctcgcgccaccctagccgcgcactcggcgcattacgggcacacggggtcctttc

SEQ ID NO: 13723 - DNA, 450 bp, Zea mays
  Clone ID: LIB36-002-Q1-E1-C12
acccgacctccccctcccgctccgggcagcagcagcagcagtcatgcggatagccgtggtggctcccgtcgcggcggcctacccatgttcctcctccctcgctgcgccggcgagtgcgacgagccgcgcgcacgttgcggcggccgggatgtcctacagggcgtcctctttcgtcggaggcgggctcgcggcggtggttgcgtcggtagccgcgcggccgaggagggcgggctctgggagaggcgacgctctcgggtgcaagtgcctcttcgggctcggggtgccggagctcgccgtcatcgccggcgtcgccgcgctcgtgttcgggcccaagcagctccccgagatcggccgcagcctcggcaagaccgtcaagagcttccaggaggccgctaaggagttcgaaagtggactgaagaaagagcctggggaacgtggcgatcagccccc

SEQ ID NO: 13724 - DNA, 280 bp, Zea mays
  Clone ID: LIB36-002-Q1-E1-C3
catggagctgaatctttaaggcagtgccctgccacacagtcacggacacgaagatctggtgtgatttcccggatggggacttgtgcctaggtactggcatcccccacaggtggtgagagatagcattagcgagttggtaaagaactggcttaaaagtgtaaacgcctaggttttcagacgccactttttatgtggtcctggatatgtgattcttttctgccttggcattcctgtctagaacactgatctagcaatcccagaccaccctttcatttttgcg

SEQ ID NO: 13725 - DNA, 423 bp, Zea mays
  Clone ID: LIB36-002-Q1-E1-C4
cccacgcgtccgcggacgcgtgggatcgccagtcgaagcagcactcggcgacttgagctccttgacaccagctgcttcaagaaccctgctggaccagaccgtcgggttcaccatcagctacgagagggaggacgagtacgacacgcgggagctgtcggagttccccgacatacggctgtggttcgtgaggctcgacgccgcgtacccttggttcccggtcgtgctcgactggagagccggcgagcttgccagatacgccgcgatgctcgtccctcaccagatgagcatgcggatgggcgtcgtcttcaacccggaggcgctggagctgttcgtgatgaagaaggtgttcgccgtcgacgcttggctgaagcagcagagccatcccaaaccgaggctgaagacggcggacatgggcaagatgct

SEQ ID NO: 13726 - DNA, 448 bp, Zea mays
  unsure (1)..(448): unsure at all n locations; Clone ID: LIB36-002-Q1-E1-C7
cccacgcgtccgccttgttctcaagctgtagtcccagtccactacaaaggtgttggagtcctggtattcttgctggtgcgcatcctctctttcagccaccaagtttgttttactctagagctgaatgccaacctcttgcctgtggtgaccaaacccaaccgtttttcacctccccgtggataaggtttcccacaagtattcttggccgtgtactacttgttccatgctcggcaaagaactcctaccagaaggagtgaatattcaagctgaagtggtgactgaagaggaatctactccagtggctgctgatcaagtggaggagccatctaactgaggtttaatananggatagagtatctcttcactgcaataagcgcgaggttacaagtcacctgaagagcaagttggtacctggtatctcaagtcctaggtcaagaacaagtaccgc

SEQ ID NO: 13727 - DNA, 98 bp, Zea mays
  Clone ID: LIB36-002-Q1-E1-D1
tctgcactggcgatagcttcatctagcaggctgacgatcttcaacgccctgtgcgtatccaacagttggagccttcatgttggtctggacacctgggg

SEQ ID NO: 13728 - DNA, 154 bp, Zea mays
  Clone ID: LIB36-002-Q1-E1-D12
tttggggcttccaatctactcactaaacttatcgccaagggttttctttccgtcaattgtagcactagcgcggacgcctgcacgtcgaccatatgtgaaaactcccaactccttggatgcatggcttgactactctacactgtcacctaaaata

SEQ ID NO: 13729 - DNA, 459 bp, Zea mays
  Clone ID: LIB36-002-Q1-E1-D4
cccacgcgtccgcgaagataacttggagactgctgttacgttaatgaagagcacttataacttttatcgggagagcccttgtggaacatttccttcaggtatcaatctctacacggttacaccatcacaagctcctattgaagggctaccgccaaccgctgctgtagttgagacgctcgacttaagtattccaagaaaactccttctgtgggtatacactctggttcatggtcgttactcaaatatatcctccgttgtaaagtattgcgacgagatgaagttaagaagtaaaagaggaaccccagctgcgtctgcttcgtcacaagttgtgcagccagtgtcgcatagtaccgtttcttcccaagttgtatctaaagaaaagagctcccaagttgaacccgctgaagcagcacaaaatccttctgatctagctgccacttgcgttcgtgcataccaaga

SEQ ID NO: 13730 - DNA, 392 bp, Zea mays
  Clone ID: LIB36-002-Q1-E1-D5
cggacgcgtgggcggacgcgtgggtccggtcaggcgagttagtcgtcgtgccgccggtgccctgtatccatggcggcggcgttgcgtgccgtcttgagaggcatcaaggagaaggggctcaccaacttcatccgcgacgtccgcgacgaaggatacttcaaatgccttctggacgggaaccttttgcaaacgaaaattcacaatattggagcaacacttgtaggagttgacaagtttggaaacaaatactatgagaaactacatgacactcagtacggaaggcataggtgggtagaatatgcatagaaaggtcgctacaatgcatcccaagtgcctcctgaatggcatggatggctgcaccacatcacagatagcactggggataagctgct

SEQ ID NO: 13731 - DNA, 333 bp, Zea mays
  Clone ID: LIB36-002-Q1-E1-D6
gcaaatgtgccatctctcagctgtcgtgctcatcggagccagcctccaccaccgtccacagctctctggtgctcgcccatggcgcccgccctgccccaggtccgaagctggtcgtcgtgtatgctcggtctcacgggcgccatcgttccgcgcaccggcctcggcacactccaagaatctgggccgcctgtgcccagcacgttatcctcgtcaccagctcgctcgcgtgcccagcttcctgttttccctcttcctcccgcgctcggacatcgccagtgaagggacgcgcgcgccgtcgtttgaatcctggttttctgcctactctctgctctc

SEQ ID NO: 13732 - DNA, 452 bp, Zea mays
  Clone ID: LIB36-002-Q1-E1-D7
attggatgtggggatgctaatgaggtggaatgcttaatttcatactccaaagttaaagacaatacatatgcacatatgtagagtagagttagaaacaaggtaaacagagaacacgagttgggttcaaaaggcatcataattcaggttataccacaagaaatcattataacaagtgtcttggcctctgaaccaacaccagagttggatgcctgttcaattactcgaccgcttccagtagagatggccattttccagcggtttaatgaatgtgtgtttgttttgttgataagtgggcaaatgttgtctcctcaggtggttccaacattattctttttgtaaattgctaatgtaggatacttatgatgctacttgtaggttctcttgtgcatttcgaccagtgtttgtgttgaattcttatccttgaatccttctgaagtttttgtgtaacatgt

SEQ ID NO: 13733 - DNA, 245 bp, Zea mays
  Clone ID: LIB36-002-Q1-E1-D8
acggacgcgtgggcggacgcgtgggcggacgcgtgggcggacgcgtgggtgggagtcgaagagaagtttttggggggtattaacacacggtgactctgaaattggccatgctaaggaaaatgatagtgcaaagtgaagtatatgtattttctgaaagccagccagatcgtttggctctagccttgatgtatcatgtatgcagattgcagaaccagtgattattgtaatggatcctgattatcctc

SEQ ID NO: 13734 - DNA, 447 bp, Zea mays
  Clone ID: LIB36-002-Q1-E1-D9
gtttccaatgtgaggcgcttcatggggatatctctcaatctgaaagagagaggacactggcaggatttcgggatgggcggtttaatatattgattgctactgatgtcgcttctcgtggattggatatcccaaatgtagatctggtgatacatttcgaattgccaaattcgtcagagatattcgttcacagatctggccgaactggccgtgctgggaagaagggcactgcaattgtgatgtacaactatgaacaaagtagagctgtgcgggtcattgaacgtgacgtaggatgcaagtttacggagcttccaaaaattaatgttgagggatccgacttgctgggtggtggatttgactccttcgggggtggaggtggtgggtatggtggctcaaactatgggcgctcacgaaggggctttggtggacgtggcggtggtggtggttttg

SEQ ID NO: 13735 - DNA, 448 bp, Zea mays
  Clone ID: LIB36-002-Q1-E1-E10
cccaagcgtccggggtagacaaagtctgctggaacctgagattgaaattccactcagggttgaacctcccacggtatcaaatgatatccaaaatcatttaagaacaacaaatcagtttcttgctccaagccatatgatgcaggcaccttatgttgcacagcagtttggtcttggttctttacaaggattcccaggcatgtcaccatttgggcagattcaagaagcaagacctcttcagcagccccatttacaaccaccatcgtttcatagtggtcctcaaattacacaggttccacctccagacattcaatcactacagtttcttagcagcaatcctcagcttggccaccagaccacggattaaggccagtacaccattccagtctgggatttcctgtgacatacagtatcctcctgtttggttgctagcagcctccgtgcctgactc

SEQ ID NO: 13736 - DNA, 451 bp, Zea mays
  Clone ID: LIB36-002-Q1-E1-E11
cggacgcgtgggatcgtaccggtgcgtggccgcaggcatcctcaactggcaagcggacgtggagaggtgcatagagtgggaagcccacagccgccgcgccaccgggctgacgctcgccttcctcagtacggcggcgaatgagctcggctgccctctcccgtgctgacgaggccgctcccggatctgatctgacatcggcggccacttgacggccagtgctggcagcttgctgcggggccggcgagtaggacgctaatctctcgaccaacgacgactcgccggtttgttcacgtgatatgtgatcaaactgatattagatggtgtttccagagtatatatctactgggggcttgctcccatgatgcgattttattcgaatctgacgtcagatgctttacgagcatatttaactgcttgagctgtacgtagcttgtattacgtgtaactttgt

SEQ ID NO: 13737 - DNA, 135 bp, Zea mays
  Clone ID: LIB36-002-Q1-E1-E2
aacctccccttcagctaatgtacatacccatgcatgggggtttcgttttgtgcgcttacttctggcttgccagcgtatggttcaatgtggaaacacatgtattagtacgagaactaatagacttataattaatat

SEQ ID NO: 13738 - DNA, 417 bp, Zea mays
  Clone ID: LIB36-002-Q1-E1-E4
gcggaagctgatgaacctcctcctcctcggcgccatctcgttgcccaccgtcggcatggtcgtcccctacggcgccttcttcgtccctgccggctccgggaacgccggcggcgggacctacgcgaaggacaagctgggcaacgacatcacggtggaggcgtggctcaacacgcacggtcccaacgaccgcacgctcgcgcaggggctcaagggtgaccccacgtacctggtggtggagcaggacaagacgctggccacctacgggatcaacgccgtgtgcactcacctcggctgcgtcgtgccgtggaacggcgccgagaacaagttcatctgcccatgccacggatcccagtacaacaaccacggcaatgtggtccgtggaccggcgcctctgtcgcctggcctggttcacgccga

SEQ ID NO: 13739 - DNA, 285 bp, Zea mays
  Clone ID: LIB36-002-Q1-E1-E6
aaggagagtctgtcaccgagcagcgggcagccggcaggcaatgcgatgatagtagctgctgctgcccctgcgccgccagttccagcaccgccgggcaaaccgcccttttctctctcggccgccagctcctccttctccctccgccgccgctccttcagcttgtggttctcaaacggcaacgcgtatggcagagacagcgccaccgccaccacgagcaggagggcgaccaggacgtggtggtggtccgatcccggccgtagccgacaacactgcggctcgtcttct

SEQ ID NO: 13740 - DNA, 398 bp, Zea mays
  Clone ID: LIB36-002-Q1-E1-E7
tccgggccgaccacgcgtccacccaagcgtccgcggacgcgtgggcgctgaagcggataagggaccccaacttcaaggtgacgccccagccgccgctgtccaaggagttcgccgacgagaacaagcccgccggactggtcaagctgaacccggcgagctagtacacgcccggtctggaagacacgctcatcctcaccatgaaaggcatcgccgccggcatgcagaacactggctaggcggcttctcttcactcagctgcagagtgcaccgcaataatcagcttccggatggtggagttttgtcaattttggatggaaatgccgaactggcaacgtccgttttccctatgcataagtaatttcctgcctctttatattcacgcttgttgtcaagtccac

SEQ ID NO: 13741 - DNA, 244 bp, Zea mays
  Clone ID: LIB36-002-Q1-E1-E8
aaggaaacaccgccgccgccgcgccttccattccagtactcgcggaggaaaggaacaccagccagcgccatggtcacgtcgacgaccgccgccgccgtgctgtccccgccgtcagtgggggggcttcgcctggcggcgtctccccgggcgcgcgtggcgttccgcgcggcgcgggcgcggccgtccgtggcggcccgcgcggagctgcgcgcgtcgccggggatcagcctgagcacgggtagtg

SEQ ID NO: 13742 - DNA, 354 bp, Zea mays
  Clone ID: LIB36-002-Q1-E1-F1
cccacgcgtccggtgaaaaatagacataaagttcatccttgcagttactaaacatgaggacgaacaccttcaagtgatgttgcttgatgtatatttatgacacaacagtgtcgtaaattaaaaggagacgatcactgcgtttggaacaaattgtttgctctgataagtttgattattgcaaatgtagtcaagtgatcgtgcagtcatgtttcggacttcctgcgcatttcatattcgcgcattgctgttgagtatctggagaatcaaagcaactgttctcccctagacaagtgttgtattacgaatataatatccctgattccagagcaaaaaaaaaatcatccttttttcaac

SEQ ID NO: 13743 - DNA, 449 bp, Zea mays
  unsure (1)..(449): unsure at all n locations; Clone ID: LIB36-002-Q1-E1-F10
gtttatcatttatagagagggtggaacctgaagctggacctgtggcccctgtggtacctcgtcatccaaaatcatatatggagatcatggaaatgatacaaaggggtgagcggccagacgatatacaggatattaacgatgaccctccaaatcctgatcaaccaatctcagaacctcgtatggcaccgaaaccaaagccatgggaaaagcaaggtcaagggagtttggcctgtgatttgaaatcgccgccaagggaatccgacgtgctgaggtcagaagttcagcacgatggcaccaacaaggctacggagtccgccgatggcgccaaccaaacgcactcattgctgcaggtangcgtanctgctggatctgaatctcctgcggttccagatgacgccgcttcttcgcttgagtaaccaccgcgaaaataaatgaatgacgccgtaatc

SEQ ID NO: 13744 - DNA, 164 bp, Zea mays
  Clone ID: LIB36-002-Q1-E1-F2
ccaaatcaactctgatcttcatccaagtaccgaaatgattaaaagatcagatgtgaatgctgttgcgatgggtgatcgcaagtaggccataatcagtggaccgaaaatgatgacccaaatcaaggtagtgctcctctgatcgatagcccaaatctattgctaac

SEQ ID NO: 13745 - DNA, 387 bp, Zea mays
  Clone ID: LIB36-002-Q1-E1-F5
cattcttcaaattttgaatcaaatcaagcatactgtatctacgagtagagccaaatgatattaattcagtcgacttgagttcagttcctaatggtaactgcaatcttacagaatgcgtaggcaagcaacccaacagccaacacgtccattgcacaatacgcaacatgtccatattactcagtcccctcgccatgatgatgctacatcctgcattaaacagtgacccatccagtccacatattacccaaagacatactcggacctcagtgaataataggcttcagtgggtgcgcccttagcttcgacatatccaatcttgaatccagctcttcatcaaactcgcccacaacgcttatgttgtcacccctgataatgtacagaccaaga

SEQ ID NO: 13746 - DNA, 451 bp, Zea mays
  unsure (1)..(451): unsure at all n locations; Clone ID: LIB36-002-Q1-E1-F7
ccggcctgatactttcattctgttagatgttccagatgaactccttgttgaaagggtggttggaaggcggcttgatcctgtaacagggaaaatatatcatttgaagtattctccgccagagaatgaagaaatcgcttcaaggcttacacaaagatttgacgatacagaagaaaaggttaagttgaggctggagacttattaccaaaatatcgagtccttgctatcaacatatgagaacattattgtcaaagtgcaaggagatgccacagtggatgctgtctttgctaagatcgacgagctgctgggttctatcctggagaagaaaaatgaaatggtttccagcacatgagcaaggtaaaaatgattgggtgcagtgcagatccgacaagttcatgtaatgcaagtcacctctcatgataggaacttctccagnggaatatatctgaagcac

SEQ ID NO: 13747 - DNA, 414 bp, Zea mays
  Clone ID: LIB36-002-Q1-E1-G1
gatctccatctcgaccgtcgctcaccgggaagctacgctacgacgaagcatggcgtccgtcaccgcccgcgccccggtcgcagccctgcgcccgtcgtcgtcgtcggccttccttggccactctagccgcctcggccgcactgctaccgcgtcgccgacgaggcggagcctcaaggcggaggccaagggcgagtggctcccgggccttccctcccccgcctacctcgacggcagcctgccgggtgacaatggcttcgacccgttgggcctggcggaggacccggagaacctgaggtggtacgtgcaggcggagctggtgaacgggcggtgggcgatgctgggcgtggccgggatgctgatcccggaggtgctgaccaaggccgggctgatcaacgcgccgcagtggtacgacgc

SEQ ID NO: 13748 - DNA, 439 bp, Zea mays
  Clone ID: LIB36-002-Q1-E1-G10
ggcatgggcacgcgggaggtgtacgaggagaagctccgcagcggtgcgcacctccaccgcgatcccaccatcaacccaggcctcggctcgccccggtgcccgcgatgcctctccctcctcaaccccaccgcgggaaagagggactgggccatcacctccgtcctgcacgacgccactgccgtggctggttccggtgccggcgctttgctcagtgctgtgcacgggtttaatacagggatcccttttgtccagaagcatgtcaaggggccgaagtggctgcagttgctcgttggggtgccaccactgctgatattctcaggtgccagtgctgtatttggtgcatatgcacttccaaggtttgttcagctcacagtgacgtcttactacgcggcatcaactggctcgcaatatgctgtttcacaaatcacacggcagatcg

SEQ ID NO: 13749 - DNA, 411 bp, Zea mays
  Clone ID: LIB36-002-Q1-E1-G12
cccactcgtccgcccacgcgtccgcatgcatctaccaacgactcagcgagcgacagcagcagacacgcatctagctaagagcagcatcagagcagcggcgatggcggcctccatgatctcctcgtcagctctggcggtggcgcctcaaggcctgccgcccctcggccgccgcgcctcctccttcgccgtcgtctgctccaagaagaagatcaagaccgacaagccctacgggattgggggtggcctgaccgtcgacgtcgacgccaacgggagaaacggcaagggcaagggcgtgtaccagttcgtcgacaactacggcgcgaacgttgacggatacagcccaatctacaacgaggatgactggtctcccaccggcgacgtctacgtcggtggaaccactgggcttctgat

SEQ ID NO: 13750 - DNA, 199 bp, Zea mays
  Clone ID: LIB36-002-Q1-E1-G2
acatcgtcgcctactacatcctcgccacctcaagcaacggatacgaccccaacttcttctgagcggccggctgcgggcatgttcttgagcctgcctgtattctactccgtgtgtgttgagccatatatctgatgctcaaggattggttaatttgaacaagtggtgcaactgcgcgtgtacatggatttgctcttcctct

SEQ ID NO: 13751 - DNA, 436 bp, Zea mays
  Clone ID: LIB36-002-Q1-E1-G5
cccaagcgtccggcggcaggcagctcctcctgcgactgcgagcgcccgtccatggcgtccatctccccttccctccatcacccttgcaattctagaactggcttccttggaaagacacacgggactcgtcctcgtcttttctctgctggaagagttggatttgtcagaacactagtggagtgcaaggaatctagaattggaaagcagcccattgaagtcccaccgaatgttactctcacattagaagagcagtttgtcaaagctaagggcccactaggggaattatctctcagcttcccaggtgatgtgaagattgtgaaagaagaatccggtaacctgagagtttataagactgcagaggacaagcgggcgaaccagatgcacggtcttttcagaacattgacagacaacatcatcgttggtgtgtcgaaaggat

SEQ ID NO: 13752 - DNA, 450 bp, Zea mays
  Clone ID: LIB36-002-Q1-E1-G6
ctctttggggactaatcaaactcaagaactaagtttcatgtctgatctcgacgtccagcttccatctgcttttgatccgtttgcagaggcaaatgctgaggattccagtgctggtgctggatcaaaggactatgtgcacgtgcgtattcagcagcgcaacggaaggaagagtctgacaactgttcagggcttgaagaaagagtacagctacaacaagatcctcaaggatctcaaaaaagagttctgctgcaatggtactgtagtccaggatccagagctaggccaggtcattcaactgcaaggtgatcagcgtaaaaatgttgctactttcctagtccaggccggaatcgtgaaaaaagatagcatcaagattcacggattttagactgcaaattttaagtgcttgtgtgtgcctatcataagataccatatgataccaggtattgaagc

SEQ ID NO: 13753 - DNA, 386 bp, Zea mays
  Clone ID: LIB36-002-Q1-E1-G7
cggacgcgtgggtgaaatcctatgtgggaactgtaatggtgctggcttcttgggtggatttctaagcactttcgatgaaactgcgcaatagtcatcggtttagcactttcgatgaaactgcgcaatagtcatcggtttaatttatgtttaagttacattgagggacccataatatatgtatcgtgttccatggacacataatcatattatataaaataatatttttaatgaatactccttccgtccacttgatttggacgttctgggtttttaaaaaaaaaaaaaaaagaaataaaacaagaaagtaaaatcaaaagaaaaagaaaaaaataagagtcaaagagagatatcaagagccaaaaaaaaaaagggggggccgccctaaa

SEQ ID NO: 13754 - DNA, 452 bp, Zea mays
  Clone ID: LIB36-002-Q1-E1-G8
cccaagcgtccgcccacgcgtccgcccacgcgtccgcggacgcgtgggctgagggacagatatacattgataggcagctccataacagacagatttatccacctattaatgtcctgccatctctttcacgattgatgaagagtgctattggtgagggcatgacacgtcgagaccattcggatgtatctaatcagctttatgccaactatgctattggaaaggatgttcaggccatgaatgctgtcgttggtgaggaggcactctcgtctgaggatctgctttacttagagttccttgacaagtttgagaggaagtttgtgacacaaggagcatatgacacacggaacatcttccagtcactcgatcttgcatggacattgcttcggatcttccctcgcgaacttctccaccgtattccagcagagacgttggacagtactattgcagagatg

SEQ ID NO: 13755 - DNA, 410 bp, Zea mays
  Clone ID: LIB36-002-Q1-E1-H1
gcgccgagtactaccggatcaccaacggactggacctagaggacaagctgcaccccggtgggcccttcgaccccctgggcctggccagcgaccccgaccaggccgccatcctcaaggtgaaggagatcaagaacggccggctggccatgttctccatgttcgccttcttcatccaggcctacgtcaccggcgaaggccccgtggagaacctcgccaagcacctcagcgaccccttcggcaacaacctgctcaccgtcatctccggcgccgccgagaggacgcctagcctgtaaggacggacgccacgccgccgagcaatgccaagtcatgcgctgctgcatgccgtctttgattttaccgggataaaaagctgtatgtgagggtctgaagaatgtgcaatgcccacgcgt

SEQ ID NO: 13756 - DNA, 392 bp, Zea mays
  Clone ID: LIB36-002-Q1-E1-H11
gagaaaagtacaaattttcgtcagtgctgcagttgcaacctgggatgcacaattttatgtcaaagttgatgatcacattaatcatgacttagctgggttaattgatatgctctaaggccgtctatgtaaccaaggattgtacataggttgtatcaaatcagggatggtcataactgaagatggccaacattgggatgcaactgaatggtggaaatttggagattcaaaaacgtattttcgacacgcttcaggttctttgtttatcctctcaaaaactttagctccctagatcaacataagtaatgcgtcactgcagagttatgcacaccattatatagcagtacgttaatggatgatgggactgaatgcagcttacgtggatgatgaccggt

SEQ ID NO: 13757 - DNA, 377 bp, Zea mays
  Clone ID: LIB36-002-Q1-E1-H12
cggaagcgtgcgaacggcggcagcaaggaaagcaagtcccctagaatggccaccaagtccccaagagagggaaaccaagtcattgaagaagggttagaacctattcacttcactatcacactgctgtagcaagttcgagtctagatgcgaggaatttaggtgttccaaccgaacttcctctttcccttgtaggtcctgatatctgcactggcatgtttgccctgttgtgtaccatgttctgactctccaattcagcattgctgtagaatcatactcactaacaggggaacttaaatggaagcacgtaatactagatccgttgtcaggaacatctgccacctacatctgagatcgtctgtcaggttccgttccgtaat

SEQ ID NO: 13758 - DNA, 448 bp, Zea mays
  Clone ID: LIB36-002-Q1-E1-H2
cccacgcgtccgttttttttacatatatagcttaattgcatgcatgcatatcattagatatagtaacagtgatggatcgttacacgctgcagaagcatgcacttagtcgttatttgcagacgataataagtagatcgatggagtagtgatcgagcaacacacacgtgacgacgtttgctcttatttacttacacgcacgcacgtgtacggcgctaggggccgtatatatatcgagttctgcatgcatatctcgatcgatgggatgatcagtcgtttcagtcgcagtagtaggagtagccgtgcccgtgcccgtgcggcaccctgtgctcctgctgcctgctctcgtagtgggcctccttctgctcgcggtgctcgtggtacgcgtagccgccggcgcccagcgccgccgccgttgccacgccgggctcgatcttgtgcctctgcgcgt

SEQ ID NO: 13759 - DNA, 458 bp, Zea mays
  Clone ID: LIB36-002-Q1-E1-H3
gcatcataaagtttgatctgcatgctgaaccggaaagtggtgtgaaagaacttgaagtgggaggaaatgtacaaggcatatatgacctgggacctggtagatttggttcagaggcgatttttgttcccaagcatccaggtgtgtctggagaagaagatgacggctatttgatattctttgtacacgacgagaacacagggaaatctgaagtaaatgttatcgatgcaaagacaatgtctgctgatccagttgcggtggttgagcttcctaatagggttccttacggattccatgccttctttgtaactgaggaccaactggctcgacaggcggaggagcagtgaagatacggcacctgcagattctgcacacgcgggtacaggttggaaattattgcagaggacatgtatatgtatatgacaagtttattacacatgtattcgaaccacacattacac

SEQ ID NO: 13760 - DNA, 427 bp, Zea mays
  Clone ID: LIB36-002-Q1-E1-H4
cccacgcgtccgcccacgcgtccgctatagcaaccggtccaacactttcacgctcaggcgctcagctctagcaatggctgcctccaccatggcgatctcctccacggcgatggccggtacccccatcaaggtgggctccttcggcgagggccgcatcaccatgcgcaagaccgtgggcaagcccaaggtggcggcgtccggcagcccctggtacggccccgaccgcgtcaagtacctcggccccttctccggcgagcccccgagctacctcaccggcgagttccccggcgactacggctgggacaccgccgggctgtccgccgaccccgagaccttcgccaagaaccgcgagctggaggtgattcactcccgctgggccatgctcggcgcgctcggctgcgtcttccccgagctgctctcccgcaac

SEQ ID NO: 13761 - DNA, 316 bp, Zea mays
  Clone ID: LIB36-002-Q1-E1-H5
ctcgaccctgccggcgctctggcggacgaggtcaccgccgagtcgcaggagggcttcactacgtacgacgatgaagccaacaacttcagcattcaagttccgcaaggctggctggtctgcgccggcgacgccagcggcatcaagtctgtcacggcgttctaccccgagcaggccgccaccgactccaatgtcagcgtcgccatcaccgggatcgggccggacttcaccagcctcaagtccttcggcgacatcgatgcgttcgccgagggccagatgaaccgcctggacaggatctggcagaagccgccggggctca

SEQ ID NO: 13762 - DNA, 340 bp, Zea mays
  Clone ID: LIB36-002-Q1-E1-H6
agagaaaattttgatcaaatcaatagaatgaaggatcccttacctgatttgaatttcatcctcctttaaataggatatgctctaagtcttcccatactttcctataatgactgcaaggagtttctccattttgcgaattcctagtttatttgaagtatattactatcatatacattatctaaatcgatccactttagataagatataaaaaatcgatagaaacaaactaagaaagagtaaataatataacaggacattctgtttcataattctgaaatagaattcttttttttagtattactcctcattaggatgtatagagtaatcatcctattttaat

SEQ ID NO: 13763 - DNA, 447 bp, Zea mays
  Clone ID: LIB36-002-Q1-E1-H7
cgagcttgccttcattaagttcatcctggagaacgcggatgcactgcaggagatggcgattgtgtgtgtcaatggtagtttctcttcgtgggacgaggctgccgccaaagtgacgaaggatctcacctgtgttaagcgggccagtcagaactgcaatgtggaggtcttggagagttctaattctagaggaagttcgtcttggagctgccaggtggcatccgatccttgtgttattgacccttttgagtactgctactgactactgagctcagtatggccatctgagtgtctcgtgatccaagctagctttctcggcaattggttatggtgttctctagtctgttcattgcagtatctgcatgcatgccactgtcttaacactagggcatgtagatagatagggagtcctctagtagcatatatcatgacaagctgtaatggctgaaa

SEQ ID NO: 13764 - DNA, 321 bp, Zea mays
  Clone ID: LIB36-002-Q1-E1-H9
cccaagcgtccgaaggcatgcgaaatcagagaggtcttcggtgttactactatgctgttcttggacgtgtttgatttttaatctccttttatatatatatatatatataattttcctacggaggtgggaggagaggaggtggacgaagaatagtgtaatgataatggtggtggtgcagcggcggtggttgagggcccaaaacgatgaacacatggggttgggttgggtgtatgtatctatctgtcacacgcagcttttgtgcaagactattatactacatcgctggtccctccaatttgctcaaaaaaaagtttcctgtgt

SEQ ID NO: 13765 - DNA, 424 bp, Zea mays
  Clone ID: LIB36-003-Q1-E1-A1
cggacgcgtgggcggacgcgtgggcggacgcgtgggcggacgcgtgggcggacgcgtgggttggatttgaagcaggggaggccaacatatcttttcgttctcccggaattggatatcaattgtacagattattgattgtaaatttgcttattcaatcaagaagcaattcatcgagtcaaattacaattccttgcccgaccacctgatctatttcagcgtcttcctatcattgcaagggaagtgacggcatgatcacgattccatcgatttggatcgcgccgtaaagttgcttctaattactactacttttttcctcctctttttgacttgcgtgagacttggtatgacgtcagtattggttcggtgattttactgaacaaatcgtgttgacggtaagataatgatgactttgggacataatcaa

SEQ ID NO: 13766 - DNA, 383 bp, Zea mays
  Clone ID: LIB36-003-Q1-E1-A10
accacgcgtccgcccacgcgtccgctgccctcttcccttttcttgaggataaatctggggaagttgctgctattgctgtatctgaagaatgtcgaggccaaggtcaaggagacaaattacttgattacgttgagaagaaggctttgtcccttggacttgagaaactattcttgcttaccacaaggacagcggattggtttgttcgtcgcggctttaaggagtgctcgttcgattccctgcctttggtgaggagaaaacgtatcgacctctcgcgcgggtcaaaatattacatgaagtggctccaggcagcagaggttgggcatatggctgccgacggttttgccatgagatgatgagtgctgcaaacaagcatctctacgaat

SEQ ID NO: 13767 - DNA, 56 bp, Zea mays
  Clone ID: LIB36-003-Q1-E1-A12
attttgagtttccttaaatctttcgtggtaatagtattacgtacgtgtaattgttc

SEQ ID NO: 13768 - DNA, 391 bp, Zea mays
  Clone ID: LIB36-003-Q1-E1-A2
cccacgcgtccgcgcgacctcagggtgcctgtgcctgctctcgctgttccttcctcatggccaccgcctgccacctcgccgcgccgctcggcctcgccccgttgccccgcggctgcgcctctgctggcgtcgtggccgtcgtccggtgcgctcggtcgtcaggctccaagatcccgagaggcgttgctgtcagggcgacgttcggcggcgagggcgccacggaggaggtgccggagattgtgaaggctgcgcaggacgcgtgggacaaagttgaggacaagtacgccgtggccaccatcggtgtcgctgccatcgtcgcgctctggacggtagtaggtgccatcaaggccatcgacaagcttcctcttctgcctggtgtccttgagattgt

SEQ ID NO: 13769 - DNA, 390 bp, Zea mays
  Clone ID: LIB36-003-Q1-E1-A3
cgtcagggcggagacgcccgacccaatccgtgcgtgtgttggtcgagatggctacaacagcttacgctcccatggcgagccaggtgatgaagagcagcccggtgcactcgaggccgaggggcctgtcaggcgctgcgctcacgcggccccggccccggttcagcgtcgtcaaggccgccatccagcccgagaaggcaacgtaccaggtggtgcagcccatcaacggcgacccgttcatcggcagcctggagacgcccgtcacctccagcccgctcatcgcgtggtacctctccaacctgccggcctaccgcaccgccgtgagcccgctgctgcggggcgtcgaggtcggcctcgcccacggctaactcctcgtcggggccttcgcgctca

SEQ ID NO: 13770 - DNA, 363 bp, Zea mays
  Clone ID: LIB36-003-Q1-E1-A4
cacatgcgtccgtttttttcacattgttgtttacaggtgaattaacaccgctgtgtaccggcaaccggatttacttaacagaagccaaatttgtatcgctgccaattccagaaacagaatttgcagacttttaatcaccagactgggaacaaacaatggaccgactgactcaagatgaaatcagaacaagatatagaagtaggtcgtgattgtcgacgatgttgtgtccgacgaaggtctcgataatattattcacagcagtcatgcgcactttttccatttctcctcttcaatcttagccttaatgtaagagtacatagcaccacgagctatggcaatggacgtgccaattccagtttgtgt

SEQ ID NO: 13771 - DNA, 427 bp, Zea mays
  Clone ID: LIB36-003-Q1-E1-A5
cggacacagcaaccaacaagtcgtccaacgtccaggcttttctgttttgtttctctctcacgcaagtcgcaaagcaaagcgtcccccaccatggcttccacgacgacgacggcatccaacaacctggcgggcgtgtggctcggcgagctctcgtcggcgctgcatgggacgtggcaggcggtggccgtggccgccacccacgggctcggcgaggacgacgacccgcggctgccgtgccagcagcagcagaggccgtggcgaggcgacgacaggagcagcagcaacaacaaggcgttgcgaggagccgcggcggccgggacggacaggcgggagggggacgtcgcgaggtgcggcggcgccatgtccgacaccacgctctacctcctcctcgaccggttcgcgcccagctgagcgggccccttgctca

SEQ ID NO: 13772 - DNA, 388 bp, Zea mays
  Clone ID: LIB36-003-Q1-E1-A6
acctgctgcacccgcacttccgctacaccatggagatcaacgcgctggccagggaggcgctcatcaacgccgacggcatcatcgaggagtccttctggccgggcaagtacgccgtcgagcttagctccgtggcgtacggcgcgacgtggcagttcgacacggaggcgctgcccaacgacctcgtcaagcgcgggctggccgtgcgcggggaggacggggagctggagctcaccatcaaggactacccctacgcccacgacgggctcctggtctgggactccatcaagcagtgggcgtccgagtacgtcaacgtctactacaagtccgacgaggccgtggccgccgaccccgagctgagggcgttctgggacgaggtgcgcaacgtggg

SEQ ID NO: 13773 - DNA, 422 bp, Zea mays
  Clone ID: LIB36-003-Q1-E1-A7
agcaaggaaaggggtcctcctgtgcaaagacagcctttgaaacacagggactatgaagttgatcttgattctcgtcttggcaagactcaggtggtgaccccgattgcaccattgaatcagcaggctggatactactgttctgtatgtgaatgtgttgtcaaagattcagccaactatttggatcatataaatggcaagaagcatcagagagcactgggcatgtctatgcgtgttgaaagggcatcacttgaacagctatgcaggcgcttattgatcttcacgtggaggacaatgcaaccgcgacgatacacaaggtataagaagttcaatcaacattttccctccatgagtgaatgcagatcgatcaaattgagaagatgactacttcaattgaagatgatcggaagataagtgtttgtgat

SEQ ID NO: 13774 - DNA, 424 bp, Zea mays
  Clone ID: LIB36-003-Q1-E1-A8
catggggcttgccgttcttgagccggtgctggaccagaacatgtactacctcggcacgaagctgacctcggcgaccttcgcctcggcgctcgtcaacatcctcccagccatcacgttcctgatggcgctggtcctgaggatggagaggctgaggctgcggagcctccgcagccaggccaaggtcgccggcacggtctgcaccgtcgtgggcgccgtgctgatgatcctgtaccacggccccgtggtgccgttcccgtggtccgcgggccaccaccaggcctcagccgccgccgccgccgcggcagcggagagccagagcagcgcatcctggctcaacggcatcgtcatgatcatcggcagctgcctgtgctggtccggcttcttcgtcctccagtcgaacacgctgcagagctagcccgggggg

SEQ ID NO: 13775 - DNA, 412 bp, Zea mays
  Clone ID: LIB36-003-Q1-E1-A9
aagagatctcgatccgcacacctcacgcctctcttcctctcgccccaaggacaacgaaaacatcaaacaagagaaccaaaggaaacagagcaagagcatcgctctcgaagcaaaacgcgcaccacgccgtcgccggccggccacttcgcacgtacgtaggacgcgcacgcaccggtgcatatatggggctcctgaaccagctgtgggacgacacggtggccgggccgcgcccggactccggcctcggcaagctccgcaagtacgcctccttctccccctcgtcgtcgtcgtcggcggcggtggcggcggcggcggcggcgggctccgcgccgcctccgggcgccgtgacgcggagcttgaccatgctgcggcggccggcggcgctgtccgtcgtcacgtcgccccgcaacga

SEQ ID NO: 13776 - DNA, 419 bp, Zea mays
  Clone ID: LIB36-003-Q1-E1-B1
tcgacccgacccgtccgcccacgcgatccgcagttacctccatccaccagaccagaccagaccaatggccctgcgcctaccaatctcatcgtcccacgggctggcctccacgccggcgccaatctccacgacgacgtgccggccggccgtcttggcgacggccgcggcccagaagaggagcctgctgctggcgacggcctccgagacgaggggagtcgcgccggtgaggtccagcgggatcgagacgagcacggtgggtctgggatgtgaggccgtcaccgggcaggtcacggaggtcaacaaggacaccttctggcccatcgtcgaggccgccggcgacaatgtcgtcgtcctcgacatgtacaccgaatggtgcgggccttgcaaagtgatggctccgaaattccaagagatgtctg

SEQ ID NO: 13777 - DNA, 108 bp, Zea mays
  Clone ID: LIB36-003-Q1-E1-B11
gtgagtcgtattagatctcacggacgaccttcacgtgtcagcggtagacatagtggtcttcgtctacgccgtcgatatggatgtctcgggctcctagatcgctgcagg

SEQ ID NO: 13778 - DNA, 407 bp, Zea mays
  Clone ID: LIB36-003-Q1-E1-B12
accaaccaaacacgcacgacacgacaccaagtcgaggagctcgagggcaccaatcatggccggcgtgaactccagcgtcgtcgggctcaagcccgccgcggcagtgccgcaggccgccgccgcctcatcgccggcgaagcgggtgcagctggccgcgcccgagggccgccgcgccgctctgctcggcctggcggccgtcttcgccgtcacggccaccaccgggtcggccaaggccacgatcttcgatgagtacctcgagaagagcaaggccaacaaggagctgaacgacaagaagaggctggccaccagtggcgccaactttgcgcgcgcctacaccgtggagttcggcagctgccagttcccctacaacttcactgggtgccaggacctcgccaagcagaagaaag

SEQ ID NO: 13779 - DNA, 390 bp, Zea mays
  Clone ID: LIB36-003-Q1-E1-B2
gtccgaacgaagaaaaagcaaccgtcgagcttgcaacgccttacgcctccacactcaacagtcatggtcgtcatgggcaaggagcagcaacaacacgaggaggaggaggtgcaagggaaggtcgtccaagaagaagtgcaagtcgttcaagagacggtggtgccggtgccgtcggaggaggacaaggaggccgaggcggcgctggtgcacaagatctccagcctggccgccgccatcgcgaagctgccatccctgagcccgtcgccggaggtgaacgcgctcttcaccgagctcgtgacggcggtgcatcccgcgcagcagcgtggacgtggagcggctgggcccggagctgcatgagatgctccgcgggctgatccgcctccggcccga

SEQ ID NO: 13780 - DNA, 417 bp, Zea mays
  Clone ID: LIB36-003-Q1-E1-B5
atcgacttcatcgagggattaccccgttctggacatgctaattgcatcttggtggttgtggataagttctccaaatatgggcacttcttgattttatcccatccattcactgctgctcgcgttgctcgggtgtttttggatcacatctataaattgcatggattacctaccaatattatttcagatcgtgatcgtatttttacgagtacgttctggcagaacttattccggctcaccgacaccaagctttgtatgtcatcagcttatcacccgtaatcggatggccaaaccgagagactcaatcagtgtcttgaaacctttttgcgctgtttcgtgcacacttgtccttccaagtggtcacaatggatttctgttgctgaatactggtataatactagttttcattctgccctcggt

SEQ ID NO: 13781 - DNA, 398 bp, Zea mays
  Clone ID: LIB36-003-Q1-E1-B6
aggacgcgtgggcggacgcgtgggataaaatctcttcgttcacaaatagacaacatggagtcgtcgttctcgtcgtccttgggtaataacagcagcaggatactggtcattggtggtacggggatgatggggcagcacctcgtcaaggccagcctcgccgccggccaccccacggccgtgctcgtccgcccagccagcagcagcaagctagagcttctcgagaccatcaagggtgacatctacgaccacgagagcttggtggcggcgttccaccaggttgacgtggtcatctccgccgtcggccaccacggaccgcatgacctagaagacggccagctcaagattgtggcagccatcaaggaagcaggcggcagcgtcaagcggttcgtgccgtccga

SEQ ID NO: 13782 - DNA, 386 bp, Zea mays
  Clone ID: LIB36-003-Q1-E1-B7
agcggccgtctcctccacctcaaccgccgcctcctacttctccccgcagccgcagctgccgatctccaccgccgaccctgccgccagcaaaagtaggttgatgcggcagccacggcggagcagcagcttcgtgatggtggaggcgtcctctgccagcggcagcgacggcggggtggccaggacgaagagcctcacggaggacgacctggaggagctcaagggctgcctcgacctcggcttcggattcgcgtacagcgagatacccgagctctgcgggacgctgcccgcgctcgaactctgctactccatgacccggaggttcctcgacgagcagaaggcgccggggcaggatgaggagttggagcctgcgtcgccgccgctcccca

SEQ ID NO: 13783 - DNA, 397 bp, Zea mays
  Clone ID: LIB36-003-Q1-E1-B8
agccgtgaaggggttggaggtcagaaaggtgctggaggctcccgaggaggtcaagtgcgtgcccatgaagaatgtgctcgagcccggtgacatccccacgcttgctgagctcgggctcactgcgccaccagccatgtcacaggactcaaaacctgctgttggctctactctcattggtggtgagacagaagctctggagaggttgaagaagtttgctgcagaatgctctatgcagccaaacaaagtagacaaaagcaatacccaagatagcatatatggtgctaatttctcttgcaaaatttctccatggcttgctacaggttgcctctctccacggttcatgtatgaggagttgaagaagcatgctactaaagcaattccttttgggtcaacaccc

SEQ ID NO: 13784 - DNA, 432 bp, Zea mays
  Clone ID: LIB36-003-Q1-E1-C1
gtcgacgcgacccgtccgcaccctcaaggtacctccattcgcagtcggccgtgtcctcggagccgcgggagatggcggatcaggagaccgtagctgtggttgaggcaccaaccccggttcttggggaaccgatggacctgatgactgccctgcagctcgtcatgaagaagtcaggtgctcacgatggccttgtgaagggtcttcgtgaggctgccaaagccatcgagaagcatgccgctcagctctgcgtgcttgccgaggactgcgaccagcctgattatgtcaagctggtgaaggctctctgcgctgagcacaatgtccacctggttactgtgcctagcgccaaaactcttggagagtgggctgggctttgcaagatcgactctgagggcaaggcgaggaaggttgtaagctgctcctgtgttgttgtca

SEQ ID NO: 13785 - DNA, 392 bp, Zea mays
  Clone ID: LIB36-003-Q1-E1-C10
agagagagaggagtgggagacccgcgagaggctgccgtgtagggaccgtagactcagcgactgcgaaggagggataaggggatggccgggatcggaccgatcaggcaggattgggagccggtcgttgtgcggaagaaggcacccaccgccgccgccaagaaggatgagaaggccgtcaacgccgcgcgccgcgccggtgcggagatcgataccatgaagaagtacaacgctggtacgaacaaggcggcatccagcggtacatccctcaacaccaagcgcctcgacgacgacaccgaaaacctcgcccatgagcgagttccaagtgatctgaagaagaatctcatgcaagcatggctcgataagaagctgacacaacttgctcagatgataaa

SEQ ID NO: 13786 - DNA, 399 bp, Zea mays
  Clone ID: LIB36-003-Q1-E1-C11
atagcttctcccgaaatgcagatgtctgcagaaagcacatcagctcaccaaggatggaggaaggttgtggatgcactttgtgatgtcgtttcagcctcaccaaccaaggcctcagctgctatcgttctccaggccgagaaggacttgcagccttggattgctagagacgacgaacaaggccagaagatgtggagagtcaaccaacgtatagtgaagcttatagcggagctcatgaggaaccatgacagccctgaagccttggtgatactcgctagtgcctctgaccttctacttcgtgctactgatggaatgcttgttgacggtgaagcttgtactttgccacagcttgagcttctcgaagtaaccgctcgagcagtccatcttattattgaatgggga

SEQ ID NO: 13787 - DNA, 416 bp, Zea mays
  Clone ID: LIB36-003-Q1-E1-C2
gtcgacgacccgtccgccatatccgctcccctacctctccagcatctcccgtctccgtcgtctcgtctctgctcctcacctcgccgccagccatgggcaagatcaagatcggaatcaacggtttcggaaggatcggcaggctcgtggccagggtcgccctgcagagcgaggatgtcgagcttgtcgccgtcaacgaccccttcatcaccacggattacatgacctacatgttcaagtacgacaccgtgcacggccaatggaagcacagcgacatcaccctcaaggactccaagacgcttctcttcggcgagaagccggtcaccgtctttggcatcaggaaccccgaggagatcccgtggggtgaggctggtgctgaatatgtcgtggagtccaccggtgtcttcactgaccaggac

SEQ ID NO: 13788 - DNA, 412 bp, Zea mays
  Clone ID: LIB36-003-Q1-E1-C3
acccgctggggctgggcaaggacccggcgttcctcaagtggtaccgggaggcggagctgatccacgggcggtgggcgatggcggccgtgctgggcatcttcgtggggcaggcgtggagcggcatcccgtggttcgaggccggcgcggacccgagcgccatcgcgcccttctccttcgggtcgctgctgggcacgcagctgctgctgatggggtgggtggagtcgaagcggtgggtggacttcttcaacccggactcccaggccgtggagtgggccacgccgtggtcgcgcaccgctgagaacttcgccaacttcaccggcgagcagggctacccgggcggcaagttcttcgacccgctcggcctcgccggcaccgtcaaggacggcgtctacatccccgacgtcgacaagct

SEQ ID NO: 13789 - DNA, 388 bp, Zea mays
  Clone ID: LIB36-003-Q1-E1-C4
cccgtccgagaaaatacagctgcccttatagacagttcaaatggcacttgttatttagatgtcagggagaacagagttaaggatgactcacaaaaagcttacaatggcccagaacatatttaccaggaaaggctcaaccatgttgcttctagaaggcctgaagaggatgagatacaagaagttgaagccttgaatgatgctgtctcctcttcgttttcaagccgctcccttgaggcactaaaatcttgctttgatgtttgtggtgttgatgatccgagcccaactgctactgattcaagagcggaagcaagtgtcggaactttacctttccagcagttgcaaaaattggagcattgtacaagtggggactgcaatggtgaaagcttgg

SEQ ID NO: 13790 - DNA, 399 bp, Zea mays
  Clone ID: LIB36-003-Q1-E1-C5
accacgcgtccggtgagatggcacaagccatggcgtccatgaccggcctctcgcagggcgttctgcccagcaggcgcgccgccaacagggccaggacggccgccgtcgtcagggcgtccgccgaggcgcaggcgcaggcgggccgccgcgccgtgctcgggctggtggccactggcatcgtcggcggcgccttgtcgcaggcggtgcacgccgagaccgtcaagaccatcaagatcggagccccgccgccgccctccggtggactccccgggactctgaactctgaccaggcgagggacttcgacctccccttgaaggagcggttctacctgcagccgctgccgccggcggaggcggtggcgagggtgaagacgtcggcgcaggacatcatcaacctca

SEQ ID NO: 13791 - DNA, 396 bp, Zea mays
  unsure (1)..(396): unsure at all n locations; Clone ID: LIB36-003-Q1-E1-C6
aactgatgaggacgatgatcaggagcatgagctccaaaaagctaaaaaactatccttgaagaaaaaaggtgctggctcagaagcgattgctgagaggatgtccaaagcagatgctaatttgcagctactaaatccagctgaacaagagagacatttgcaaaaacagaaaaaacgtcggctccaaggccgtgaagatgagactctagcgaagttacagaagttcaagtcttctttcctcagtaagaatcttgctaccaatcatgtcgaagaaaagaatccttctactgataaggcggaaaaggaagatgaagaggaggatgactacaaagggtggcacacaaacctactgtctttcttacccagttcttccaaggacggaatggctangaaagatga

SEQ ID NO: 13792 - DNA, 414 bp, Zea mays
  Clone ID: LIB36-003-Q1-E1-C7
acgggagcccgtggtacggccccgaccgcgtgctgtacctgggcccactgtccggcgagccgccgagctacctgacgggcgagttcccgggcgactacggctgggacaccgcggggctgtcggcggacccggagacgttcgccaagaaccgggagctggaggtgatccactcccgctgggccatgctgggcgcgctcggctgcgtcttcccggagctgctcgcccgcaacggcgtcaagttcggcgaggccgtgtggttcaaggccggctcccagatcttcagcgagggtggactggactacctcgggaacccgagcctcatccacgcgcagagcatcctcgccatctgggcctgccaggtcgtgctcatgggcgccgtcgagggctaccgcatcgccggcggcccgctcggcg

SEQ ID NO: 13793 - DNA, 399 bp, Zea mays
  Clone ID: LIB36-003-Q1-E1-D10
aactcccgctgggccatgctcggcgcgctcggctgcgtcttccccgagctgctctcccgcaacggcgtcaagttcggcgaggccgtctggttcaaggccggctcccagatcttcagcgagggcgggctggactacctcggcaaccccagcctgatccacgcgcagagcatcctcgccatctgggcctgccaggtcgtgctcatgggtgccgtcgagggctaccgcattgccggcgggccgctcggcgaggtcgtcgacccgctgtaccctggcggcagcttcgaccccctcggcctggccgacgaccccgaggccttcgccgagctcaaggtgaaggagctcaagaacggccgcctcgccatgttttccatgttcggcttcttcgtccaggccatcgtc

SEQ ID NO: 13794 - DNA, 403 bp, Zea mays
  Clone ID: LIB36-003-Q1-E1-D11
aggacggcgagcacggcatcgagcgcacgttcgaggtggcgcagaaggtgtgggccgaaaccttctacgccatggcggagaacaacgtcatgttcgagggcatcctgctgaagccgtccatggtgacgcccggcgcggaggccaaggacagggccaccccggagcaggtggccgcgtacaccctcaagctcctccaccgccggatccccccctccgtgcccgggatcatgttcctctccggcgggcagtcggaggtggaggcgacgcagaacctcaacgccatgaaccaggggcccaacccgtggcacgtgtccttctcctacgcgcgggcgctgcagaacacctgcctcaagacctggggcggccagccggacaaggtcaaggcggcgcaggacgcgctgct

SEQ ID NO: 13795 - DNA, 399 bp, Zea mays
  Clone ID: LIB36-003-Q1-E1-D12
acgcaaacgtaacagaacacccgcgataaccactgagccgagcgggggtggatatggcagcggtcgccgcccaccaccacctccacccctcctccgtcgctgcccgaactccaacacttggccgacgccaccgtttctcgtcgcttcctcgcgccgcgcggccgtcctcccaaggccgtttcagcttccgagccgcgacccgcgtcctcacgcgcgccggaagcactggcgccagcagcgccgcgtcgcccgccgcgacgaccgcgtcgtcgttgtcgctggaggagctgcgcgggggctgcaccacctggacgtggcgagggatgcgcgtgaactacctcgccagacgacaggggccgcccgtactgctcgtccacgggatcggcgcctccgtcgcgc

SEQ ID NO: 13796 - DNA, 416 bp, Zea mays
  Clone ID: LIB36-003-Q1-E1-D5
accacgcgtccgcccacgcgtccgctgcgatcaaaccgcacgcaagcgaaccacagcgtgctcgccatctcactgactgtgacgacggcaacaagccagtgagcagctcgccatggcagcagtgtccaccgcgccggcgctcgaaggccgcatcgcgctcgtcaccggcggctcccggggcatcggccgcgaggtgtcgtcccacctcgccgcgctcggcgcgcgtgtcgtggtcaactacgccaccaacccggccaaggccgaggagctcgtcgcggagctcgcctcgcgcggcctccgcgccgtggccgtgcgcgcggacgtctccgatccggacgccgtgcgcgcgctcttcgaccgcgccgaggaggccttcgggtccccgccccacgtagtggtcgcctgcgccggcatca

SEQ ID NO: 13797 - DNA, 415 bp, Zea mays
  Clone ID: LIB36-003-Q1-E1-D6
cacgcatactgcatacacaacacagagcatcagaaggagctgcgatctgatcgacatggctgccgccaccatggctatcacctcccgcgcgctcatcggcaagccggcggctggcacgagggacgtcttcggcgagggccgcatcaccatgcgcaagaccgccgccaagcccaagccggcggcgtccggcagcccctggtacggtgccgaccgcgtcctgtacctgggcccgctgtccggctcgcccccgagctacctgaccggcgagttccccggcgactacgggtgggacaccgcggggctgtcggcggacccggagaccttcgccaagaaccgcgagctggaggtgatccactgccgctgggccatgctcggcgcgctcgggtgcgtgttcccggagctgctcgcccgcaac

SEQ ID NO: 13798 - DNA, 395 bp, Zea mays
  Clone ID: LIB36-003-Q1-E1-D7
aggacgcgtggggtagcaccagagagaggccgagggagagaggcagaggggcgaaggaaggctaggtaggctagacatggccgccaaagctcacgtgctggtgctgccgatgccatgccagggccatgtgacgccgctgatggagctctcccacctcctggtcgaccaaggcttcgaggtcaccttcgtcaacaccgacgtggaccgcgcggccgtggtagccgcgctggaggcctccggcggcggcggcggcgtggcggcgctgggcggcggcatccacctggcgtccatcccggacgggctggccgacgacgaggaccgcaaggacatcagcaagctcgtcgacgcctacacgcgccacatgcctggctacctggagcgcctcctcgcccaca

SEQ ID NO: 13799 - DNA, 395 bp, Zea mays
  Clone ID: LIB36-003-Q1-E1-D8
agaagacaaaactcctgggggccttatcctcactgaaacaactaaagagaagccgtccataggaacggttgtagctgttggcccgggtcctctggacgaggaaggcaagagacagccactgtcagtgtcggcgggcagcacagtgctgtactccaagtatgcagggagtgagttcaagggcgcggatggcacggcctacattgtgttgagagcgtcggatgtgatggctgtcctgtcttgagcatttcgtttccggctcgttaatgtagtttgcagccaatagttgtcatgtggtatgaaacgatcgctttgtggtggtcatcacaccatgctggtgatcatcacaacatatgctgatactgttccggacaatcggctagaatttgttgtgtggc

SEQ ID NO: 13800 - DNA, 407 bp, Zea mays
  Clone ID: LIB36-003-Q1-E1-D9
acaggacagcgtccacagaaagaagaaagagcacagagagtggagtagtggacagaccatggagctctgcgtctctacacccccatcctccgtccgcgccaccgccgcgcccatatccttcgccccgccccgacgtggcgcgtctgcctccaccgccgttccgccccaccgccgcatcccaactcgagtctggcgctgcgccagcgcggccgtgcctggcccggtgccctccgaagagccggcatccgcctcctacgccgtcgtcgtcacggacaagcccgatacgcctgccgacgacaaggccgaggaggttagcgccgcgcctagtggctccgcggaggcgcctatggcagagctggtgccgtcagaggcgtcatcatccccagatgatggcggcctggatgaga

SEQ ID NO: 13801 - DNA, 434 bp, Zea mays
  Clone ID: LIB36-003-Q1-E1-E1
ttctagggtcgaccgacccgtcgaagccaaaaggcatcaccgccgcgacgacgatggcagcctcgctccaagccgcggccaccctgatgcagccggccaagatcggcggccgggcgccctttgtctcgctgccgtcccgcccgtcgtcgcaactcgcctgcagggcgttcggcgtcgacgccggcgccgccaggatcacgtgctccctgcaggacgtcgccagcaggtgcgtcgacgccgcgaagctcgccggcttcgcgctcgccacctcggcgctcctcgtctcgggcgcgagcgcggagggcacgcccaagaggctgacctacgacgagatccagagcaaaacgtacatggaggtgaagggcacgggcacggcgaaccagtgcccgaccatcgacggcggcgtggagtcgttcccgttcaaggccggcaag

SEQ ID NO: 13802 - DNA, 376 bp, Zea mays
  Clone ID: LIB36-003-Q1-E1-E5
ctaattaatacaccccgagcaactttattatatgtattattacaaggcacatacatacagctgcaataacgtatacatgaacaccctttgtctcgctcctgtttatctatgcaactgctggcatgcatgcaaaagacgcctcgggagataagacccctgttattctgctagtacgtatgcatgcatgtgcacgatcgatgggcgcgatggtcatatcatccgttggttcagtagtaaggctggatcttccagcgctggttgtcgccctcgcaccacttccagagcacgacgttggtgccgtcacggacgccgccgtgccacttgtcgccgtggagggcatcgaagttgaggtagatgttgttgaccatgcggacgc

SEQ ID NO: 13803 - DNA, 402 bp, Zea mays
  Clone ID: LIB36-003-Q1-E1-E6
accacgcgtccgccagcattcagttatggcttcatcaatgggaaccgagaaaccgaggtctgatgtttttggtgagggtgcttcccatgatgacgaagagagcaaatctgtgtatgtcggcaacgtgccatcatctgtaagtgaggctgatcttgaaaatgagttcaagaaatttggccggcttattcctgacggtgttgctatcagaagccgaaaggagactggtggctattatgctttcgtggaattcgaggaactcagcggtgtacacaatgcgttaaaggcttcaccaattgaaataaatgggcggcagatatatgttgaggagaggaagccaaatagcggaataagaggtggaaggaggggaggacgtggccgtttcagtggtggaggccggggata

SEQ ID NO: 13804 - DNA, 420 bp, Zea mays
  Clone ID: LIB36-003-Q1-E1-E7
aaatgccgccacccatggcactgctgccgctctcctccgcatccgcgtccgccgcgctgccgcccttccgctcctgcccgcccactgcgatgctgcttcgcctcccctcccccgccccctcccatttcgcccgcccccgcgcggtctccactgggtacgcggcgtccttctacggcggctcggcgatgtccgcggccggcggcgcggacgaggaggaggaggtcggctacgagtcggggttcggcccggggctagggctgggcggcggcggcttcgggatgtcggccgcggaagccgcgctggcgctggaggagcgcgagatgccgccctgcccacccggcctccgccagtacgagaccatggtcgtgctccgccccgacatgtccgaggaggagcgcctcgccttcatccaacgctacg

SEQ ID NO: 13805 - DNA, 412 bp, Zea mays
  Clone ID: LIB36-003-Q1-E1-E8
accacgcgtccggcaacccaaccaagcccgcacgacacgacaccaagtcgaggagctcgagagggcaccaataatggccggcgtgaactccagcgtcgtcgggctcaagcccgccgcggcagtgccgcaggccgccgccgcctcatcgccggcgaagcgggtgcagctggccgcgcccgagggccgccgcgccgctctgctcggcctggcggccgtcttcgccgtcacggccaccaccgggtcggccaaggccacgatcttcgatgagtacctcgagaagagcaaggccaacaaggagctgaacgacaagaagaggctggccaccagtggagccaactttgcgcgcgcctacaccgtggagttcggcagctgccagttcccctacaacttcactgggtgccaggacctcgcc

SEQ ID NO: 13806 - DNA, 393 bp, Zea mays
  Clone ID: LIB36-003-Q1-E1-E9
accggctactacttcctatggaacgtacgcccggacctcgtcaagagtggcgactccgccgggctgccgccagagttctcagctgcgacagagggacgaagcatgctgtctacgtggtgcccgcaggcagctgtgctggagcatgatgccgtgggggtgttcctgacgcactccgggtggaactccacgctggagagtatttgcggcggcgttcccatgctgtgctggcccttcttcgccgagcagcagaccaactgccgatacaagtgcaccgagtggggcatcggaaaagagatcggtgacgatgtacagcggggcgaggtagagtcgctcatacgggaggccatggagggggagaaagggcaagagatgctccggcgcgtgactgaactc

SEQ ID NO: 13807 - DNA, 401 bp, Zea mays
  unsure (1)..(401): unsure at all n locations; Clone ID: LIB36-003-Q1-E1-F11
accacgcgtccgcaaccggtccagcactttcacgctcagctccagcaatggctgcctccaccatggcgatctcctccacggcgatggccggcacccccatcaaggtgggctccttcggcgagggccgcatcaccatgcgcaagaccgtgggcaagcccaaggtggcggcgtccggcagcccctggtacggccccgaccgcgtcaagtacctcggccccttctccggcgagcccccgagctacctcaccggcgagttccccggcgactacggctgggacaccgccgggctgtccgccgaccccgagaccttcgccaagaaccgcgagctggaggtgatccactcncgctgggccatgctcggcgcgttcggctgcgtcttccccgagctgctctcccgcaac

SEQ ID NO: 13808 - DNA, 394 bp, Zea mays
  Clone ID: LIB36-003-Q1-E1-F12
cagaaaggatgatatttcgcagtactatcggttcatctggaatctcttctatgctgaatatatcttcttcccgttaatatagagagatcttgtagttcatcttgatcttgggctacagcctaattcatggtgaaaagagggagaagttggcaaagtgaggtctgtcgtgcatattttcaacggaaacaatggagtagcaatattgctatgctagggttctgaagttgtaggagcttttctaagcttttacgatgttgaaggcgttgttggagctgtggaagctgttttccttttttttccttttgtatcaacagtgtcgcgttctgtacggtcttacttggaagtgctttgacctttgagcacatgggttgaagcttgagatctggtcccgaac

SEQ ID NO: 13809 - DNA, 168 bp, Zea mays
  Clone ID: LIB36-003-Q1-E1-F2
ttctagggtcgacggacgcgtccgatctcagatcagcagtttagatcgactatactcattggacatggacctatctatatatcttctttgtaaacaggacagagtcggactcctgctgcagtattatcaactcatctattttaaactctttaagttggatttattttc

SEQ ID NO: 13810 - DNA, 396 bp, Zea mays
  Clone ID: LIB36-003-Q1-E1-F5
agccgccgctacagcccgcacctcgtttcctctcccgtctccgagatgacgaagcgaaccaagaaggccggaattgttggcaaatatggaaccaggtatggtgctagcttgcgtaagcaaatcaagaagatggaggtatctcagcactccaagtatttctgtgagttctgtgggaagtttgctgtgaagaggaaagcggttgggatttggggatgcaaggactgtgggaaggtcaaggccggtggtgcttacaccatgaacactgctagtgcggtcactgtcaggagcacgatccgtcgcttgagggagcagactgaagcatgatcggtcgcttgtcaggcatactggggtccactatattggctgtgtaaccgagacagtactccagcatttttt

SEQ ID NO: 13811 - DNA, 414 bp, Zea mays
  Clone ID: LIB36-003-Q1-E1-F6
aaggagatccagacggaggacatcgacctgcccctcacccgcacccgccccgtcaagaaggtggccctcgtggtcctgaccggcgagcgcggcctctgcgggagcttcaacaacaacgtgctcaagaaggcggaaacccgcatcgatgagctcaagcagctgggcctccagtacaccgtcgtcagcgtggggaagaagggcaacgcctacttccagcgccgcccctacatcccgttggagcgcgatctagaggtgagcagcgtgcccaccgtcaaggactcgcaggccatctgcgacctcgtctactcgctcttcgtctccgaggaggtggacaaggtggagctgctctactccaagttcgtgtcgctggtgcgctccgaccccatcatccagacgctgctccccatgtcgccc

SEQ ID NO: 13812 - DNA, 409 bp, Zea mays
  Clone ID: LIB36-003-Q1-E1-F8
aggacggtccgccgccgagcggcacggcgatgtcggtggggaccaagctcaagaagctcagctacaactcggtggtggagatcgtgctgcagaacccggcggccgtcccgacggagaaccacccgatccacctccacggcttcaacttcttcgtgctggcgcaggggatgggtaccttcgccccgggaagcgtggcctacaacctggtggacccggtggcccgcaacaccatcgccgtgcctggcggtggctgggctgtcatacgcttcgtcgccaacaatccaggcatgtggttctttcactgccacctggacccgcacgtgcctatgggcctgggcatggtgttccaggtggacagcgggacgacgcccggctccacgctccctacgccgccgggggattgggtggg

SEQ ID NO: 13813 - DNA, 389 bp, Zea mays
  Clone ID: LIB36-003-Q1-E1-F9
gatgccggagtacctcaccggagaggtccctggagactatggctacgacccttttggcctgggcaagaagccagaggacttcgccaagtaccaggcctacgagctgatccatgccagatgggccatgctcggtgccgctggcgctgtcatcccagaggcctgcaacaagttcggcgctaactgtggccctgaggctgtctggttcaagaccggcgcgctgctcctggacggcaacaccctcaactacttcggcaacagcatccccatcaacctggtggtggccgtgatcgcggaggtcatcctcgtcggcggcgccgagtactaccggatcaccaacggactggacctagaggacaagctgcaccccggtgggcccttcgaccccctgg

SEQ ID NO: 13814 - DNA, 405 bp, Zea mays
  Clone ID: LIB36-003-Q1-E1-G10
cgtcgccttccatgtcgagatcaccagcctccctttgccgcctcgacatggcgaagaacgccgaggtggtcgagagctagaccagctccttttaccactgctcctcccattggggtgaagccgtgggtcggggcgtggtcccgaggtcaggcagcgatggcgaggatgaagagatccgatggtgcgagcagcggttcgagagggaggatgtcgtgccctacgaccgcgacgttgacagggatcccgtgcttgtcggtggcgcagccaaggactggagtaaatgctacgtaggttgtgaatttgttttttttctgccagtaagacacttgatgctacttttgaaattgcaccagattcttctgtagagggtatcctcggatcaatggaatcatctcaatattattc

SEQ ID NO: 13815 - DNA, 323 bp, Zea mays
  Clone ID: LIB36-003-Q1-E1-G11
cagacgcgtggacgtacgcgtgtgctctgatagcttgctccaggacgtacgtacgtacgtagatcgatgcagcgatcgcgagctacctgatgaccatggcgtccctctcctctgctgccattaccgctccttccttcacggccgcgcccgctcgcgcagtggtcaacaggaggttcttcaccgtgcatgactcgctccacaaggccactgtcaccgccgccgtggccgttgctgccagggttctgcttgctggcggcggcgccatggccgacgaggtgctgctcggcgcaggttacggcgggctcgtcttccagccaatccaa

SEQ ID NO: 13816 - DNA, 290 bp, Zea mays
  Clone ID: LIB36-003-Q1-E1-G12
atgccctgggagcgcgcccacctcgcccacctcgaggagatggagaggaccggtgggaagcactagatccgctgccccgtccctcgccggcagcgcgggaggacgggtgactttcatggggtccattcaggctgatggcttctgttttcttctgctgttgagctactggagtcatgttactttggtcgttggttttgtacccagacagcaagaaactgtccagcttattgtcttgttcctcgcgtcttgtcataagtaacttcaaacaaaggagtgcatgcattgtgatt

SEQ ID NO: 13817 - DNA, 409 bp, Zea mays
  Clone ID: LIB36-003-Q1-E1-G3
cccacgcgtccgactgggcccactgtccggcgagccgccgagctacctgacgggcgagttcccgggcgactacggctgggacaccgcggggctgtcggcggacccggagacgttcgccaagaaccgggagctggaggtgatccactcccgctgggccatgctgggcgcgctcggctgcgtcttcccggagctgctcgcccgcaacggcgtcaagttcggcgaggccgtgtggttcaaggccggctcccagatcttcagcgagggtggactggactacctcgggaacccgagcctcatccacgcgcagagcatcctcgccatctgggcctgccaggtcgtgctcatgggcgccgtcgagggctaccgcatcgccggcggcccgctcggcgaggtcgtcgacccgctctat

SEQ ID NO: 13818 - DNA, 388 bp, Zea mays
  Clone ID: LIB36-003-Q1-E1-G5
agagaagcgctttagccgtagccgtagcgataagagtgagctagctggtgcacaccggcatggcggccacggcgtactccgtggcgctcctcggcggcgcgcgccttcccgccgctccgcgctccgccctcctccctcggcgcagcgtctgccagcttcgcttccaagatgcaccgaggctctccctgctccgtgcgaaggccgcttccgaggacacatcggcctccggcgacgagttgatcgaggacctcaaagcgaagtgggacgccgttgaggacaagcccaccgtcctcttgtacggcggcggcgccgtcgtcgccctttggctgacgtccgtggtcgtgggcgccatcaacgccgtgccgctgctccccaagatcctggagct

SEQ ID NO: 13819 - DNA, 309 bp, Zea mays
  Clone ID: LIB36-003-Q1-E1-G8
gggctctgtctatttcaacgtccgtacatggcgtgcacccgtcaaatccagggtgtctctgcctgggctggacgctgaggcctgtggaggcctatgcccatgcaggagcgcgggcgaattccgtcggtagagatttcatcggccagctgcgtcggcaccgctgttgctttggcacatgatctacggctgtacgagtttctctggcgtggctactgcagctgatctcattgagcgtatacaaaggtccgagttccaatcaataatcaaagacaccctttacgtgtccataaaggctaagccagatctcgt

SEQ ID NO: 13820 - DNA, 162 bp, Zea mays
  Clone ID: LIB36-003-Q1-E1-H1
attgtttctggaaaattgaatatccctgccgagaaaatacttggcctggcaaaattcttccttggtattgggctcccaggtagcgcaaaggattgctttaatcagattgagtctttgtcattcttggagaacaatagggtcttcgttccgttgatactatca

SEQ ID NO: 13821 - DNA, 384 bp, Zea mays
  Clone ID: LIB36-003-Q1-E1-H12
accacgcgtccacggacgcgtgggcggacgcgtgggcgtcaacgtctactacaggtccgacgaggccgtggccgccgaccccgagctgagggcgttctgggacgaggtgcgcaacgtggggcacggcgacaagaaggacgagccgtggtggcccgtgctggacacccgcgacagcctggtggagacgctgaccaccatcatgtgggtcacctccggccaccactcggccgtcaacttcgggcagtaccacttcgccggctacttccccaaccggccgaccaccatccggaagaacatgccggtggaggagggcgggccgggcgaggagatggagaagttcctcaagcagccggagacgacgctgctggacatgcctgccacgca

SEQ ID NO: 13822 - DNA, 353 bp, Zea mays
  Clone ID: LIB36-003-Q1-E1-H2
cgcgtggggctcttctatttcaactccgacacggaggcacccgcaaatccgggtgttctgccgggctgacgctgaggccttggaggcctatgcccatgaagagcggctgcaattccgtcggagagatttcatcggcacctgcgtcggcaccgctgttgctttggcaatgatcgacggctgtacgagtttctctggagtggctactgcagctgatctcattgagcgtagacaaaggtcggagttccaatcaaaaatcaaagacaccctttacgtagccataaaggctaagccagagctcgttccatcgttgttgactatggtactgaatgatgccatgacataagacaggacca

SEQ ID NO: 13823 - DNA, 417 bp, Zea mays
  Clone ID: LIB36-003-Q1-E1-H3
aatcagcagccctcgtcctcaacctttggccgccggactgcaggccatgttcggctcccaagcttactccctccatctctcctgccgtgctctgccccagcatcggtcgtccatctccctgagctccagcgcgcgcgttccttcctgttgcgcctctctccgtcgaagctccctgctgctcgccatggcatcttccagtctctcgctcgtcccctgctcctgtctttgcttggcgtccggcctcagtagctcgccctccccgttcagcagcaagcagctcctttcccctcgccatgcacgccgtcgatcccctgctgcagttcctccacatggtctggtcgtcgaccgcgcgcgtcacctgctcgtggttatgggaaaccagcgagcctctcctcacggggtagtttcctcgcgtca

SEQ ID NO: 13824 - DNA, 413 bp, Zea mays
  Clone ID: LIB36-003-Q1-E1-H4
atctgtcgcgctgtatctgaggctggctggaaagagaacgacgaccgacggcgtggagctcgtcaagcgggtgatgggcgggtgccagttccgcgaggagcaggccggcgtggagctgctggcgcggtgccgcgaggacgacgacgcgacgggcctggtggtggtgaagccggtgcacctgcggctgcggctggtgtgcggcgaccacccggccggcgccaccaacaaggagaccatcagcaccgagtccagcctcaagatcaatgtcaccttggactagctagtggttctgaattctgattttggattttgatccgtgtctatttttattctttggaacctgtctatttttattctttggattttgatccgggctggcgatgggaacgtgtcagtacgtgtatgcgactatg

SEQ ID NO: 13825 - DNA, 423 bp, Zea mays
  Clone ID: LIB36-003-Q1-E1-H6
aggacgcgtggggctcttctagttcaactccgacacggaggcacccgcaaatccgggtgttctgccgggctgacgctgaggccttggaggcctatgcccatgaagagcgcctgcgattccgtcggagagatttcatcggcacctgcgtcggcaccgctgttgctttggcaatgatcgacggctgtacgagtttctctggagtggctactgcagctgatctcattgagcgtagacaaaggtcggagttccaatcaaaaatcaaagacaccctttacgtagccataaaggctaagccagagctcgttccatcgttgttgaccatggcactgaatgatgccatgacatacgacaagaccacaaaaactggaggcgcaaatggatctatcacgctagaaacaagcagacctgagaacagtgggctct

SEQ ID NO: 13826 - DNA, 350 bp, Zea mays
  Clone ID: LIB36-003-Q1-E1-H8
atagagcagcgagccatcgacacgatcgcgagcgcaagcacgtacgttgtcggaagctcaagttagaagaagcaccagtgcctgatcgatggcggcccaggctcgcctctccggccggcagctgctgggccgccccgtgcagtcggccgtctctaggtcgtcggcgaggaaggcgcccttcgtcgtcagggccagctccagccctccagccaagcaaggtgccgacaggcagctgtggttcgcgtccaagcagtccctctcctacctcgatggcacgctgcccggcgactatggcttcgacccgctgggcctctcggacccggagggcaccgggggcttcatcgagccca

SEQ ID NO: 13827 - DNA, 377 bp, Zea mays
  Clone ID: LIB36-003-Q1-E1-H9
aagtatccaagctgattggttcacctccaggatatgtaggatacactgagggtggccagctgacagaggcagttcgacggcggccatacacagttgtgctctttgatgagattgagaaggcacaccctgatgtcttcaacatgatgcttcagattttggaagatgggagattgactgacagcaagggaaggacggtggacttcaagaacacactcctgatcatgacctcaaatgtagggagcagtgtcatcgagaagggtggaaggaagatcggatttgaccttgactctgatgagaaggacagtagctacagcaggatcaagagcctggtcatcgaggagatgaagcagtatttccgacctgagttcctcaaccgt

SEQ ID NO: 13828 - DNA, 429 bp, Zea mays
  Clone ID: LIB36-004-Q1-E1-A1
cggacgcgtgggcggacgcgtgggcggacgcgtggggtgtacttctgatggcggctattcgtaatgtccacattgcacgaccaaccatatatcaagttgtcaaggaaatgattgataaaatgggctatgaggtaaaacttgttcgggtaaacaaaagaattcaagaagcgtactgtgctgaactttgtctaacaaagaaacatccggcactgcagattgatgattctacagacagcatcaccttcgatcttcggccttcagatgccataaacattgctgttcgttgcaaggttcctgtacaagtccatagaagtcttgcatacagtgacggcatcagaccagtcgagccagcaagaatggcagtagcagctggcctatcagatgggttggtatttacagagcttgacagacccgatggacaggcatctg

SEQ ID NO: 13829 - DNA, 404 bp, Zea mays
  Clone ID: LIB36-004-Q1-E1-A11
aagaggtctcgcggcttcggcttcgttaccttctcctccgagaactccatgctcgacgctatcgagaacatgaacggcaaggagctcgacggccgtaacatcaccgttaaccaggcccagtcccgtggcggtggcggtggcggcggtggctacggcggcggtcgcggcggcggcggctatggtggcgggcgccgtgacggcggttatggcggcggtggcggctacggcggtcggcgcgagggtggtggcggcggctacggaggcggtggcggctacggcggtcggcgcgagggtggtggtggcggctacggcggcggcggcggcggctggagggactgatgtgtgggcccatcctggcttcggccgagttatcttatctatctatagtatcgtgttaccgttcg

SEQ ID NO: 13830 - DNA, 373 bp, Zea mays
  Clone ID: LIB36-004-Q1-E1-A12
acggccggaccggagtcaggcagccgaagcaagaaaagcaagcggctttggaagttggaatccatggcgtccacctcgtgcttcctccaccagtccaccgcccgcgtggccgcgccgtcgccgcgcctcgccgccccgccgcgcagcgcgcaactgttcgtctgcaaggcccagaagcagcaggccgccgcggcggagagcgacgtgtcgcgccgcgccgcgctcgcgctcctcgccggcgtcgcggccgtcggcgccaaggcgagccgcgccgccgccgcctacggggaagcatccaacgtgttcggcaggacgaagaagaagacggacttcatctcctacgtcggcgacggcttcaagctgctgattccgt

SEQ ID NO: 13831 - DNA, 428 bp, Zea mays
  Clone ID: LIB36-004-Q1-E1-A3
gcgcttcccgcacttccccgccatcgacgacctcttcagcgacggtatcccgctgtcggcgcagaccgggttcgacgccatccgcaccgtcgtctcgcgcatggtcaagctggtggaggacaccaccgacgacgtcctccgcttcgaggtgccggagatgatagagatggaccggttctcgtggttcaaggacgaagagttcgcgaggcagacgatggcggggctcaacccgctgtgcatccagctgctgactgagttccccatcaagagcaagctggacccggatgtgtacggggcatcggagtccgccatcaccaatgagatcctggagaagcacatgaacggtgcgctgaccgtggaacatgcgctggcggcgaatcagctgttcatcctggactacacgacgtgttcctgccctacgtgcacaa

SEQ ID NO: 13832 - DNA, 424 bp, Zea mays
  Clone ID: LIB36-004-Q1-E1-A5
cggacgcgtgggcagctaacgacctgcagccaaccatctaccagcgactcagcgagcgagagcagcacacactgcacgcagctagctaggagcagcagcagcggcggcgatggcggcctccatgatctcctcgtcagctctggcggtggcgcctcagggcctgccgcccctcggccgccgcgcctcctccttcgccgtcgtctgctccaagaagaagatcaagaccgacaagccctacgggattgggggtggcctgaccgtcgacgtcgacgccaacgggagaaagggcaagggcaagggcgtgtaccagttcgtcgacaagtacggcgcgaacgtcgacggatacagcccaatctacaacgaggatgactggtctcccaccggcgacgtctacgtcggtggaaccactgggcttctgatctgg

SEQ ID NO: 13833 - DNA, 422 bp, Zea mays
  Clone ID: LIB36-004-Q1-E1-A6
agcttgtgcgcgcgcaatggcactcgtgtccgcctcctcgtcctccaccaccgccgtcgcggcgctccccaggaatgggcagcagcgggcgtcgtcgtcgttgttctcctcctcctcctcttcctccttcctcgtcggcaagacgctgctgaggcaggccgaggcagcccggccgtcgttcgccgtgcgcgccgcggcggattccgacaggccgatctggttccccggcagcacccctccgccgtggctcgacggcagccttcccggcgacttcggctttgatccctggggcctcggatctgacccggagagcctgcggtggaacgtgcaggcggagctggtgcactgccggtgggcgatgctcggcgcggcgggtatcttcatcccggagttcctgaccaagatcggcgtcctcaacacgc

SEQ ID NO: 13834 - DNA, 421 bp, Zea mays
  Clone ID: LIB36-004-Q1-E1-A7
agcgccgcggccatccaccggcagccggcccgtgctggagccgtcctcgtcgtcacctgcaggcggagctcctccgcgaccgtccgcgccgcagccgctgccacggcggcggcgccggctgccgtagagctgcagaacaagggggtgtcgctgccgacgtgggcggagttcgagctcgggcgggcgccggtctactggaagaccagcagcggcctcccgccctcgccgggcgaggggctgaccctgttctacaacccggcggcgacgaagatggccccgaacgaggtgttcggcgtggcgttcaacggcggcttcaaccagcccatcatgtgcggcggagagccgaggcagatgacgctgcaggagcggggcaaagccgacccgcccatctacaccatcaggatacgcgtgccgcagcacg

SEQ ID NO: 13835 - DNA, 412 bp, Zea mays
  unsure (1)..(412): unsure at all n locations; Clone ID: LIB36-004-Q1-E1-A8
accacgcgtccggttccggctcgacaatttggggccccagaaggggtcccgccggcggcccaagcgtaagggacgcggtattgctgcaggccagggcgcgagctgcgggttcggtatgcgcgggcagaaatcgcgctcggggcccggcgtccggcgcgggttcgagggagggcagatgccgctctaccgccgtctccccaagctacggggcattgccggcgggatgcacattggcctgccgaagtatgtgccattcaatttaaaagacatagtgcgcggcggattcaaagatggtgacgaaatatcactggaaagcctgaaatcacggggtctgatcaatccatcaggcagggaaaggaagctgccgctgaagatcttangagatggggatgtatcagttaagttgaatatc

SEQ ID NO: 13836 - DNA, 425 bp, Zea mays
  unsure (1)..(425): unsure at all n locations; Clone ID: LIB36-004-Q1-E1-B1
cgctcctcctcaccgccacactgctcccgtcgtcgtcgcagggcgccaggaggcacacgccacggcggcccgccgcagccgcaggggaggccaagtctgtgggtttcctggagaagtacccggccctggtcactggcttcttcttcttcatgtggtacttcctcaacgtcatattcaacatcctcaacaagaagatctacaactacttcccctatccatactttgtgtccttgatccatctagtagtgggtgtcgtatactgcctcatcagctggagtgtcggtctccccaagcgagcgcctatcaatggcacgctcctgaagcttctctttccagtcgccctgtgccatggtattggtcacatcactagcaatgtgtccttcgctgctgttgcagtctcatttgcncacactatcaaagctctg

SEQ ID NO: 13837 - DNA, 405 bp, Zea mays
  Clone ID: LIB36-004-Q1-E1-B10
accacgcgtccgcccggagtggcaggaccagttcctgcgctacaaggagctgaagcggtgcgtcaaggcccgctccggcggctgcccgccgttgcccgcggaggaggccgagttcgtggccgagatcgacgcggagaccgagaagatcaacgccttcttcctcgaccaggaggaggagttcatcatccgccaccgggagctgcagaaccacatcgagcgcgcgctgggccgcggcaggcccaggccggcgccggcgctgcacgaggccgaggtcgccgccatccgcagggagatcgtcaacttccacggcgtcatggtgctgctcctcaactacagcagcatcaactacataggcctggccaagatcctcaagaagtacgacaagcgcaccggcgcgatgctgcg

SEQ ID NO: 13838 - DNA, 419 bp, Zea mays
  Clone ID: LIB36-004-Q1-E1-B12
agtgtttgttgatgagttcagctgcataggatgcaagaactgtgcgaacgtgtgttctaaggtcttcgaaatcgaggaagatttcgggcgggcaagagtttatgaccaatcaggcagcacagaactgattcaagaagctattgatagttgcccagttgactgcattcactggacttcagctgcgcaactgtcgctccttgaggatgaaatgcgcagagtggagagagtaaatgttggattaatgcttgctgggatgggaggctcaattgatgtgtttcggatggcaagttcacgctgggagaaaagacaagccaaagtcctggagaaggtcagaaggcggatgagccaagatgattccagaaagggtggctcatggagtgacatctggggggcaccaacaagatacgagaagaacgaag

SEQ ID NO: 13839 - DNA, 414 bp, Zea mays
  Clone ID: LIB36-004-Q1-E1-B3
agaataatcaggaaaagggagagggcttttatagatagtgaaggaactaatgatgacttgctaggcttattggttgagtcaaacatgagggaatcaaatgggaatgcaaaactcggaatgactaccgaagatataatcgaggaatgcaagttattttactttgcaggtatggagacaacatcagtcctgcttacatggacgttaattctgctaagcatgcaccctgaatggcaagagcaggcaagagaagaagttttaaaccactttgggatgggtacaccagactttgataacttgaaccgcctgaagattgtaaccatgattttatatgaggtccttaggttgtacccaccagtagttttcctatccagaagaacctacaaggaaatggagctcggtggcatcaaatatcct

SEQ ID NO: 13840 - DNA, 415 bp, Zea mays
  Clone ID: LIB36-004-Q1-E1-B7
gaggagggctagagcgatggccggcttggccgacaggcaggtgccggaggttgtggctatatcgtgggtgaagtataacagcagcagcaaatgggcgcgaaactgagacgaagatacactccttgtctggcatgtatggtgtagccttctgcaatttttttttgcgctgttggactccttgtccggcatgtatggtgtagccttctgcaattttttttgcgctgttggattatgattatgaatgcaatccgacgctgccatgcaaacgtgaggcctatgtctgaaacaaaaatgtaggcagagtcgattcttaccagatagatttagtgtttatttttttggagagatataacgagaatatagtactgttgtaaatccctgtatattatgcaatcaacttggacgtgtgtatcag

SEQ ID NO: 13841 - DNA, 412 bp, Zea mays
  Clone ID: LIB36-004-Q1-E1-B8
gccgctcctgccagtgccatcacacgtcccgagagcagcgcctgagcggagcccaggacccatggccgtcaccgccgtcgcggcgtctctgtccgtggcgcagggtctcgggaagcctctctgcgccggcaggaacgcgacgtcgcgccgggccgtcgcgctcgcgccccgtcgttcggcgacccggatggccgtcgtccgggcgtcgtccgcgcatcagaagcagcacccggccaaggagtgggcggccgcggcggccgtggcggcggcgctggtgctgccggaggtcgcggaggccgcgcccgggatctcgccgtcgctcaagaacttcctcctcagcatcgtctccggaggcgtcgtgctcgtcgccatcgtcggcgccgtcgtcgctgtctctaacttcgatcccgtc

SEQ ID NO: 13842 - DNA, 310 bp, Zea mays
  Clone ID: LIB36-004-Q1-E1-C1
gtgggcggactacctgaggcccgggtgcgtggacatcgagccgcgcttcccgaaccgcaagaacccggtgcccgacgtggggtaccccggcgggctgtggttcgactgggccaactggggccgcgggtccccggagcccgtgatggtgctgcgcaccaaggagatcaagaacgggcggctcgccatgctcgccttcgtcggcttctggttccaggccgtgtacactggccagggccccatcgacaacctgctcgcgcacctcgccgaccccggccactgcaacatcgtctcggcgttcacgtcccactga

SEQ ID NO: 13843 - DNA, 391 bp, Zea mays
  Clone ID: LIB36-004-Q1-E1-C10
accacgcgtccgcccacgcgtccgaaaaaaaagaaaaaaaaaaaaaaaaaaaaaaaaaaaaaaaaaaaaaaaaaaaaaaaaaaaaaaaaaaaaaaaaaaaaaaaaaaaaaaaaaaaaaaaaaaaaaaaaaaaaaaaaaaaaaaaaaaaaaaaaaaaaaaaagggggggccgcccaaggggttcaaactttacttacccttgaatgcaattttatacctcttcaagagggtcaccaaatttaatttcaagggcgttttttttaaaacttcgtaatgggaaaaacctggggtttaccaaatttaacccctttggaaaaaatccccttttcccaattggggttaataccgaaggggcccgaactttttccctttccaaaaatttttgcacccta

SEQ ID NO: 13844 - DNA, 384 bp, Zea mays
  Clone ID: LIB36-004-Q1-E1-C12
acggccgacgcatctgccccgcgtacgatctcgccatgaagctggtcgccgccggcgtggcgaacctggtgcacgggttcgcgtggcggctgccggacggggtggcggcggaggacgtgagcatggaggagcatgtcgggctatccacgcgccggaaggtgccgctcttcgccgtggctgagcccaggctgccggtgcacctctacagcgcgaccgaatgaaaaccagggtctctatatacaaaactactggtattgtatatttgaaagtctacgttttgtatctcataatgttggagtactagtcaatccgtacattgccacagtttctatatattagatgagtaaactctattttaataagacataatagtatgtgtgtact

SEQ ID NO: 13845 - DNA, 421 bp, Zea mays
  Clone ID: LIB36-004-Q1-E1-C2
cgttgctcgcctcgggtcaaaccctaagcagggagttgatttatccgctgcagccatgagtaagttgcagtctgagtctgtcaaggatgccatctcccagattgttggggatgccaaggagaagaataggaagttcactgagactgtggaacttcagattggtctgaagaattatgatccacagaaggacaagcgtttcagtggctctgttaagttgccccatatccctcgtcccaagatgaaggtgtgcatgcttggtgatgcccagcatgttgaggaggccgagaagatgggacttgactacatggatgttgaggctctcaagaaaatgaacaagaacaagaagcttgttaagaggcttgccaagaagtaccatgctttcttggcatcagaggccatcatcaagcagattccccgtctc

SEQ ID NO: 13846 - DNA, 415 bp, Zea mays
  Clone ID: LIB36-004-Q1-E1-C3
accacgcgtccgcccacgcgtccggggaccgtgatgacagacgggaagagcaaaagtcttgttgcttaccatgaagttgggcatgcaatttgcggaactttgacgcctggccatgatcctgtccaaaaggttaccttagttccaaggggtcaagctcgtggtcttacatggtttatcccgatggatgacccaacactcatctccaggcagcaactttttgccagaattgttggcggccttggtggtagagctgctgaggaggtcatatttggagagcctgaggtgaccactggagctgctggtgacttgcagcaaattactggcttagccaagcagatggttgtgacattcggtatgtctgaaattggtccatggtctctgatggagggtggagcgcagagtggggacctcatca

SEQ ID NO: 13847 - DNA, 432 bp, Zea mays
  unsure (1)..(432): unsure at all n locations; Clone ID: LIB36-004-Q1-E1-C4
gcaccgcaaattattatgttagaactgcaaattcttttgggatgtanggtgacaaggagttccgactttttctaccttttctaggcccgcatgagctaccccaagtgattctataaaacagccagccacccatatttgtgcaggattacattacatatgtacacaattttctgtgtatatacacacacggattcgacaagtatcttcatttccaaatgtcctcttcccttcttccgagtacctgaatcacaccggcaatggctgcgccgatgatgaaccaagtcaccccggccagaacgatcttcatttcaaagctgttgacgactccaagagcgatggcgccgccaacatgctcctgaatgccgctgccacctccggccacctgctccccgttgtaactcacgaaccccgccgcgacgatccccaatagca

SEQ ID NO: 13848 - DNA, 417 bp, Zea mays
  Clone ID: LIB36-004-Q1-E1-C5
gtagctgctgcccgtagcatgtaatgcaatggaataagttatcaaggcaactaacactaaacatagttcttgggctccttggcagcgtcgaggcatggtatctgcccacgccattgtcagggcctcatgcgggtacccatgctcgacctacttcatcgaagatgtggtatggacaaatatacatgcgactttccagatgaagtgaagagaccaaatgtggatgtcaatcaatctctagatgaaggaatgaaaggaaggagctaagttattgcactggatgtacggggtctagaaaaggtgtcactttgatgccatttattagtgctgttgtacaaaagaaaaggttgaattgatgaattcatgggctaccttataaaataaaactatattgaattcatgtgatcttgtgattttatg

SEQ ID NO: 13849 - DNA, 428 bp, Zea mays
  Clone ID: LIB36-004-Q1-E1-C6
cagcaaccaacaagtcgtccaacgtccaggcttttctgttttctttctctcacgcaagtcgcaaagcgtcccccaccatggcttccacgacaacggcggcgtccaacaacctggcgggcgtgtggctcggcgagctctcgtcggcgctgcatgggacgtggcaggcggtggccgtggccgccacccacgggctcggcgaggacgacgacccgcggctgccgtgccagcagcagcagaggccgtggcgaggcgacgacaggagcagcagcaacaccaaggcgttgcgaggagccgcggcggccgggacagtcaggcgggagggggacgtcgcgaggtgcggcggcgccatgtccgacaccacgctctacctcctcctcgaccggttcgcgcccagctgagcgggccccttgctagctcgcccgccgccg

SEQ ID NO: 13850 - DNA, 417 bp, Zea mays
  Clone ID: LIB36-004-Q1-E1-C7
aaacccatttccctcgctcccatcccgtcccgccccttgtctcttccgcttccccccgaccccgcgcgccgcggaccagcagccatgtcgtgctcccacctctccaccgcctggtcctcctcggcgctcgccagcagcgcctccaccacccgacggcgctcccccccgcgctcgggtctcctggtgcggtgttccctccgtgagctccgcacccgcatcgactccgtcaggaacacgcagaagatcacggaggccatgaagctggtggccgccgccaaggtccggcgcgcgcaggaggccgtcgtctcctctcgccctttctcggaggcgctggtggaggtgctctacaacatgaaccaggagatccagacggaggacatcgacctgcccctcacccgcacccggcccgtcaagaag

SEQ ID NO: 13851 - DNA, 443 bp, Zea mays
  Clone ID: LIB36-004-Q1-E1-C8
gggccgagaatcccggggccaaccaagcctccggaacaagaaaggactggcccaaattaacggcaagcacccatgggacctgatgaccaactccggcgacgaaggccaattcctcaacatgctcatcaagctcatcggggccaagaagaccatggagattggcgtccacaccggctactcgctcctcggcaacgcgctcgcaatcccggaggaccggacgattttgggcatgggcatcaaccgcgagaactacgaactaaggcttccctgcatcaacaagggccgcgtgggccacaagatctacttccgcgaaggccccgcgctccccgtcctggacgacctcgtggcgggcaaggagcaacacgggtcgttcgacttcgccttcgtggaggccgacaaggagaactacctcagctagcaagaacgggtcccgaaactggtga

SEQ ID NO: 13852 - DNA, 401 bp, Zea mays
  Clone ID: LIB36-004-Q1-E1-C9
aacaaagaaaggtcgttttggtattctcccccgctatgcaaaggatgacaaactcatcagatggtttcaactccctaattgtttcatattccataatgctaatgcttgggaagagggtgatgaagttgttctcattacctgccgccttgagaatccagatttggacaaggtgaatggatatcaaagtgacaagctcgaaaacttcgggaatgagctgtacgagatgagattcaacatgaaaacgggtgctgcttcacaaaagcaattgtctgtttctgctgtggattttcctcgtgttaatgagagctatactggcagaaagcagcggtatgtctactgcactatacttgacagcattgcgaaggtgactggcatcataaagtttgatctgcatgctgaaa

SEQ ID NO: 13853 - DNA, 411 bp, Zea mays
  Clone ID: LIB36-004-Q1-E1-D12
aatccgtcgtagcagcgatgatggctgtgacgtctctgcagttgcgcccaacccctcgtctccttccggcgagaaatagctccacgggcactgggccgcggatggccgccttgagctgcagacacaaccagtccaccaatgtccaaggacgaacagggctcagaagccacgtaacgacgcgcagagacgccctgtcattcgtgtcatccgcgctgctggcagcgttgttcgtggtggccggtgcagcagaagctagaacttcgaggttggagaacaaaaagaaagccctggagaagctccgggagaaggcgttgggccgaaaggaggagaacggagccaccggtggcaagaagatgccgcctccgacgaacttgctaatccgataatccctcgtccggccgtcgtggctaa

SEQ ID NO: 13854 - DNA, 406 bp, Zea mays
  Clone ID: LIB36-004-Q1-E1-D3
aacacgcgtcaagggagaataagctggatactttctggcaggaaagactgaatggtcaagacccactggtcatacttactgctaaggacaatattgatgcagcagctgatgaagttttagaacctctcgtcaggaaaatcagggatgaaaaatatggatggaaatatggctgtggagccaatggctgtacaaaactttttcatgctcctgaatttgtccacaagcatttgatgctcaaacatcgagaccttgtattgagttctacgtcaaaagttcgataggatctttatctccaaagctacatgagagaccctaatgcaccatgtggaagcccactgatgcaactgtcagcaccagacagatgaagacggagacctagcatggacagtcgtatgaaatttgacca

SEQ ID NO: 13855 - DNA, 430 bp, Zea mays
  Clone ID: LIB36-004-Q1-E1-D4
accacgcgtccgtttttttttttttttacagaaaattggtgatgcttatacaataaaaaatggtaacacccatagcttgcatacagttacattgcataattacattcggcatgcttgcagagaacccatgacagagtgcttgctgtcaactgtcgcctacaaaggttactgccccaggattcgagatcctgagcttttgatgttctctagaaattctttcctttttggcttgaagaggagattgttgtagatgaaaagccatgcaaccaatatcccgactagttcaaagagaagaggaaggaccgggagcttgtcgatgatctcaatgaggttgaccgaagcccataatgcagctactgcggcaaagcctataccagctagggcaaaaatgtcttccgcggtactgatagagctcgcgacgtatttcact

SEQ ID NO: 13856 - DNA, 418 bp, Zea mays
  Clone ID: LIB36-004-Q1-E1-D5
cccacgcgtccgcccggaacgcgccaggttcaacgacgacggcatgtaccgttccatcgacatctacttgaaggcgcatccgtatctgagcgaggccgagcggaagacggtgtgccgggtgatggactgccagaagctgtcgcgcgaggcgtgcgcgcacgcggcgcagaacaatcggctgccagtgcagacagtggtgcaggttctccaccacgagcagcggcgcctgcgcgaggcccctacgtcgtcgttctacggcggcgagtccccgaccccggcgccgagcctccagggccggcacggccggagcgtgccggacgagatgtcacagctgcagcgggagaacgaggagctcaagatggagctgctgcggctgaagatgaacctgagggacccgtcggggcccccgcaggccagc

SEQ ID NO: 13857 - DNA, 423 bp, Zea mays
  Clone ID: LIB36-004-Q1-E1-D6
cggacgcgtgggcgatctacacacatacatagtttcttctactacacgacgacaaacatggggaagcctgcgaagatcggagagtggggtggatacgccggcgatcgtcgggatctgagggctactccggaccggctgatcgaggtgaaggtcacggcggacaacagcagctgcatccgctccatctccttcatctacatcggagccgatggcaaaccgtacgaggaggggccatggggtttcggccatgctggcacggagtacaagattgatctgtgcaggttcgacgagagcttgacggagatctccgggaccacgggcccagcctacaacattgacaatctggtcaagtctctcaaattcgtcaccaacaaacgcgcttacggaccgtacggcagggacgaaggcaccccgttccgtgtc

SEQ ID NO: 13858 - DNA, 86 bp, Zea mays
  Clone ID: LIB36-004-Q1-E1-D7
aacacatcatgcaacaggcggaccaggcagacacaatccgtaccagtagtgtgcatcagtactgcagaacgtttgacacccacggc

SEQ ID NO: 13859 - DNA, 417 bp, Zea mays
  Clone ID: LIB36-004-Q1-E1-D8
agaagctgtacatccatttcacggtggagttccctgactcgttggcaccagagcagtgcaaggctctcgagacagtacttccaccaaggccttcatccaagctgacagacatggagatagatgaatgcgaggagacgactatgcatgatgtgaacaacatcgaggaagagatgcgcaggaagcaagctcacgctgcccaggaggcgtacgaggaggacgacgagatgccgggcggagcccagagagtgcagtgcgcgcaacagtaagcagactatcatcaaggcaattgggaggggtggtgcccttaaagcatgggagtgatctctggttttgctgtcgccgagctgggaaataggaagctgaatcgacctcgcaaccgggaatgtatccttttttgctgcaacataaaaaatgcta

SEQ ID NO: 13860 - DNA, 406 bp, Zea mays
  Clone ID: LIB36-004-Q1-E1-E10
accatgctggcatctgcaaggcacctcaagcttcgtgttctctcactgtctggttgctctaaggttactcagaagagtgtgccgttcttgggcaaccttggccagtctctagagggcctcaatcttcagttctgcaacatgattggcaaccacaacatcgcatccctggagaaaaagctctggtggtgcgacatccttgcataggcagcagacaagatgagccattgctggaaggggctcatgtctactgggagccacttccagatgcagatatacgaccttagcagtagcacaaccagacggtcttcaggtttttggctcgcatgccggtcattatggtgggcttccacattgttcaaggaccagttgttttagggggcgctttctagcggagtgctcgtttttc

SEQ ID NO: 13861 - DNA, 405 bp, Zea mays
  Clone ID: LIB36-004-Q1-E1-E12
cacacacacacacacacagacaagtggtttccaaagccaagtgtgtgtactagcaaccagctagctcgggcggcagcaggcagccatcatgtcggaggagaagcaccaccacttcttcaaccaccacaagaaggacgaggagcagcccgccggcgagtacgggtactccgagaccgaggtggtcaccgccaccggcgagggcgagtacgagaggtacaagaaggaggagaaggagcacaagcacaagcagcacctcggcgaggccggcgccatcgccgccggcgccttcgcactctacgagaagcacgaggcgaagaaggaccccgagcacgcgcacaggcacaagatcacggaggaggtcgctgccgcggcggccgtcggcgccggcggctacgtattccacga

SEQ ID NO: 13862 - DNA, 334 bp, Zea mays
  unsure (1)..(334): unsure at all n locations; Clone ID: LIB36-004-Q1-E1-E3
gacgaaagctgaacatgtatgtgaaaatcgcatttacacggcaaaagattcacagattaaacgctgtttacattgggaagtagtacataggtacaggcggcgtacagcatgcaatgcaacatacaacgctgcatgcatgtgtgcacgtgtagttgattgagctcagcgccgcttgacgggatcgaagttagagacagcgacgacggcgccgacgatggcgacgagcacgacgcctccggagacgatgctgaggangaagttcttgagcgacggcgagatcccgggcgcggcctccgcgacctccggcagcaccagcgccgccgccacgggcgcc

SEQ ID NO: 13863 - DNA, 399 bp, Zea mays
  unsure (1)..(399): unsure at all n locations; Clone ID: LIB36-004-Q1-E1-E4
cggacgcgtgaaggcgacttgatctccttgtctgaacaagagcttgtcgactgtgacacttcgtacaatcaggggtgcaatggaggtctgatggactatgcatttgagttcatcatcaacaatggcggaatcgacaccgagaaggattacccttacaagggcacggacggacggtgtgatgtcaacaggaaaaacgcgaaggttgtcactattgacagctacgaagatgtaccagcgaacgatgagaagagtctgcagaaggcagttgcaaaccagcctgtcagtgtcgcaattgaggctgctggcacagcatttcagctctacagctcgggtatcttcactggaagctgtggaacagcgctggaccatggtgtcacngccgtcggctacgggacagag

SEQ ID NO: 13864 - DNA, 419 bp, Zea mays
  Clone ID: LIB36-004-Q1-E1-E5
gctcgccgtcgccaggccgtcggcccgctccatccgcaggccccgcgcagccgccgtggtggccaagtacggcgacaagagcgtctactttgacctcgacgacatcggcaacaccaccggacagtgggacctctacggctctgacgcgccctcgccctacaacccgctacagagcaagttcttcgagacgttcgcggctccgttcaccaagagaggtctgctgctcaagttcctgctgctgggcggcggctcacttctggcctacgtcagcgcgtcggcgtcaccggacctcctgccgatcaagaagggacctcaggagccgccgcagccgggcccgcgcggcaagatctaagctcagcttctccatttgcatggtctagtagcttgctttgtactgctagcgccggtcgattcgtcgc

SEQ ID NO: 13865 - DNA, 419 bp, Zea mays
  Clone ID: LIB36-004-Q1-E1-E6
gcgtcccgcgctagctgcggcaccgcatggctgccgtgaccagcaccgcctccatctgcccggccgcagccggcgccctctcttcgctgccgtccttcatcacgcgcaagcccaccagcggcagcaggaggttgcagcaggcagcagcgacgacagtctgccactgccgctctgctcgagtagaggaggggctgctgggccggagggacgccttattgctcggcatcgtcttctccgccgcgacgccgccgctgctcgcccctgccggcgctctggcggacgaggccaccgccgagtcgcaggagggcttcactacgtacgaggatgaggccaacaagttcagcattcaagttccgcaaggctggctggtcggcgccggcgaggccagcggcatcaagtctgtcacggcgttctacccc

SEQ ID NO: 13866 - DNA, 417 bp, Zea mays
  unsure (1)..(417): unsure at all n locations; Clone ID: LIB36-004-Q1-E1-E7
accacgcgtccggcatctatagcaaccggtccagcactttcacgctcagctccagcaatggctgcctccaccatggcgatctcctccacggcgatggccggcacccccatcaaggtgggctccttcggcgagggccgcatcaccatgcgcaagaccgtgggcaagcccaaggtggcggcgtccggcagcccctggtacggccccgaccgcgtcaagtacctcggccccttctccggcgagcccccgagctacctcaccggcgagttccccggcgactacggctgggacaccgccgggctgtccgccgaccccgagaccttcgccaagaaccgcgagctggaggtgatccactcccgctgggccatgctcggcgcgctcggctgcgtcttccccgagctgctctcncgcaacggcgtc

SEQ ID NO: 13867 - DNA, 423 bp, Zea mays
  Clone ID: LIB36-004-Q1-E1-E8
atcctcctccaccaacccgatccagctacatccgttgaggcccgtgcgtttcttccctgttctcccatcaatcgacctagccttacgccgaccaggggcttcctctaatcgatctggtgtctgttctgtggtcttggtctgggtgcactccagggccaggagcagctagccgtcttcgatcgatccgttcgcatccccaacgcagttcggtttgtaaggtaggaaggagcgtgatggccaagacaagctcgttcaagctggagcaccccctcgagaagaggcaatctgaggctaaccgtatcagagagaagtaccctgacagaattccagtgattgttgagaaggctgagaggagtgatattcctgacatcgacaagaaaaagtacctcgtcgctgcagatcttacagtcgggcagttcgtgt

SEQ ID NO: 13868 - DNA, 412 bp, Zea mays
  Clone ID: LIB36-004-Q1-E1-E9
accacgcgtccgggttgctctagatccgttcatcctggtggttttgtgaggtcgaaagcggcgagcgaattagaagatgctggacaagctgtgggacgacgtggtggccgggcctcgcccggagacgggcctcgagaagctccgcaaggccaccaccgcccgtccgctcgtcatcaacaaagacgcggacggcggcagctacaagcgggcgcagtcgatgccgtcgaccccgacgacgccggtgacgccgtcgtcgtcgtcgtcgtcgacgacgccgcgcggcgccggcaacgtgtggcgcagcgtcttccacccggggagcaacctggccaccaagggcatgggcgccaacctcttcgaccggccgcagcccaactcccccaccgtctacgactggctctacagcgacgag

SEQ ID NO: 13869 - DNA, 403 bp, Zea mays
  unsure (1)..(403): unsure at all n locations; Clone ID: LIB36-004-Q1-E1-F1
cccacggcctcgcccacgcgtcaacngacgcgtgggttttttttttttgaacgaacatgtttccatgttattgagagaatctagtgaacggcagccagtaaaggattacagactccaccagattgaggatcccatctaaaggaatgaactgagaaatcaactgaagagaacagcactacgtgcgacaatatgcatctacatataaagttattaagacccataggaaagagaagtctaagtggaaaacgtagagctttacaacttgcacatgggaaatcatgcgtgaccacctaaagagactccaattcaagataagctgagcctttctcagcagctgatgtagccttctggcttgatgaagctacagaacgaaggatctcaactggcttggggagatcaggtg

SEQ ID NO: 13870 - DNA, 405 bp, Zea mays
  Clone ID: LIB36-004-Q1-E1-F11
ggtagagatggctacagcagcttacgctcccatggcgagccaggtgatgaagagcagcccggtgcactcgaggccgaggggcctgtcaggcgctgcgctcacgcggccccggccccggttcagcgtcgtcaaggccgccatccagcccgagaaggcaacgtaccaggtggtgcagcccatcaacggcgacccgttcatcggcagcctggagacgcccgtcacctccagcccgctcatcgcgtggtacctctccaacctgccggcctaccgcaccgccgtgagcccgctgctgcggggcgtcgaggtcggcctcgcccacggctacctcctcgtcgggcccttcgcgctcaccggcccgctccgcaacacgcccgtgcacggccaggcgggcgcgctcggcgccgc

SEQ ID NO: 13871 - DNA, 411 bp, Zea mays
  Clone ID: LIB36-004-Q1-E1-F12
cccacgcgtccgggcatgctactatcacgtgcaagaataaggctttctatctgactgatctcgggagtgaacatggtacctggattaccgacaatgaaggtagacgttaccgcgtgccaccaaacttcccggttcgtttccatccttccgatgtcattgagtttggttccgataagaaggctatgttccgggtgaaggtgctgaacacgctcccatacgaatcagcaagaagtgggaagcagcaggggctgcagcaagagcaagtcctccaggcagcatgaatggagacaccagtcaccatcccatcatcagcgacactgtactgtatagcaatcgggagatacacgatactccaacgcgtaaaaaagcgtaaaagatacgtcaaaacagatgtgatttttgcatccatgc

SEQ ID NO: 13872 - DNA, 412 bp, Zea mays
  unsure (1)..(412): unsure at all n locations; Clone ID: LIB36-004-Q1-E1-F2
cccacgcgtccgtgctcatgggcgccgtcgagggctaccgcatcgccggcggcccgctcggcgaggtcgtcgacccgctctatcccggcggcagcttcgacccgctcggcctcgccgacgaccccgaggccttcgctgagctcaaggtgaaggagctcaagaacggccgcctcgccatgttctccatgttcggattcttcgtccaggccatcgtcaccgggaagggcccgctcgagaacctcgctgaccacattgccgaccccgtcaacaacaacgcttgggcctacgccaccaacttcgtcnccggcaagtgagggaggcgccgccggtgacctttaggtgtccggatgcatgtgagcgcacgctggtttccggtttgtaccatgatgtaaactattgttcaatcaacaag

SEQ ID NO: 13873 - DNA, 432 bp, Zea mays
  Clone ID: LIB36-004-Q1-E1-F3
accacgcgtacgcccacgcgtccgcggacgcgtgggtccccatccgcacctctctccatctccctgctcctccgccttcttcttgatccagccaagccagggatcgccatgtcggactcggaggagcaccacttcgaatcgaaggccgacgccggagcgtccaagacctacccgcagcaggctggcaccgtccgtaagaacggcttcatcgtcatcaagaaccgcccctgcaaggttgtggaggtttctacctcaaagactggtaagcatggtcatgccaaatgccactttgttgccatagatatattcaacgggaaaaagctcgaagatattgttccttcgtcacacaactgtgatattccgcatgtgaaccgtactgagtatcagctgattgatatatcagaagatggatttgtgagccttcttacttca

SEQ ID NO: 13874 - DNA, 318 bp, Zea mays
  Clone ID: LIB36-004-Q1-E1-F5
cccacgcgtccgcccacgcgtccgcccacgcgtccgcggacgcgtggggatcgatcaaaattttctgtttgtctgggagaatatgctgttgccttaactcatccacctaccaggcgatttcgttttagggtttggaacattgagattgaggtaatgcgtcttgtccagcgttgttttggtctggactgtgaatcagaatagaaacgttgcatgatcgaattgcgccattagatctcataatcaaaaaacgtggatgattcgacaaaaggtatatttatctggatgtttcatgttaattcatgtcacatggattccttc

SEQ ID NO: 13875 - DNA, 413 bp, Zea mays
  Clone ID: LIB36-004-Q1-E1-F8
agccaagcatcatgcttctggctgcgcttcggaacatccgaattccaaggccaaccatctacaatgtggtgctggagatgactacaaggatgggatatgaggtgcgtttggtgcggatcatagaaatggtccatgacgcatactattctcgactatatctcgcaaaggttgggaatgaccaagacactatcagtttcgacctcaagccatcggatgctatcaacattgctttccgctgcaaggtccctatacaagtgaacaggcgtatcgcgtataacaacggattgaaagtcctacagccaaaggcggccgggagttatttaggctccgacgacattcaaatccaaagggctgacaggcctgacgaccaacattgcagccagggccaagaattcgatctggtccggaacatg

SEQ ID NO: 13876 - DNA, 403 bp, Zea mays
  Clone ID: LIB36-004-Q1-E1-G10
ggcgcaggcgggccgccgcgccgtgctcgggctggtgggcactggcatcgtcggcggcgccttgtcgcaggcggtgcacgccgagaccgtcaagaccatcaagatcggagccccgccgccgccctccggtggactccccgggactctgaactctgaccaggcgagggacttcgacctccccttgaaggagcggttctacctgcagccgctgccgccggcggaggcggtggcgagggtgaagacgtcggcgcaggacatcatcaacctcaagccgctcatcgacaagaaggcgtggccgtacgtccagaacgacctccgcctccgggcctcctacctgcgctacgacctcaagaccgtcatcgcttccaagcccaaggaggagaagcagagcctcaaggagctc

SEQ ID NO: 13877 - DNA, 390 bp, Zea mays
  Clone ID: LIB36-004-Q1-E1-G11
acgccgattcgcgtcgccctttgttggaaggaacgatggagcagaccttcatcatgatcaagcccgacggcgtccagcggggcctgatcggggacatcatcagtcgcttcgagaagaaagggttctacctcaaggggatgaagttcatgaacgtggagaggtccttcgcgcagcagcactacgctgacctttccgacaagcctttcttccccgggttggtggagtacatcatttccggccccgtggtggcgatggtgtgggaggggaaggacgtcgtgttgactggccgcaggatcattggggccaccaggccttgggaggcagcccccggtaccattcgtggggactacgccgtggaagtcggcaggaatgtcatccatggaagcgact

SEQ ID NO: 13878 - DNA, 423 bp, Zea mays
  Clone ID: LIB36-004-Q1-E1-G3
ataagcagcagatcatcacctgagggagagcagcccggaggagggggagcaagcagcagccgtccgtggaagaagatgtcgtacctgctgccgcatctgcactcggggtgggcggtggaccaggccatcctcgccgaggaggagcgcctcgtcatcatccgcttcgggcatgactgggacgagacctgcatgcagatggatgaagtgctggcagcagtagctgagaccatagagaactttgcggtcatctaccttgttgacatcacagaggtccctgatttcaacaccatgtatgagctgtacgacccttcgacagtgatgttcttcttccggaacacgcacatcatgattgatctcgggactgggaacagcaacaagatcaactgggccctgaaggacaagcaggagttcatcgacattgtg

SEQ ID NO: 13879 - DNA, 359 bp, Zea mays
  Clone ID: LIB36-004-Q1-E1-G4
aggacgcgtggacggcgccgtccaccagcagcggcagcgtctcgctgcgcgtccggacggggcaggccgccaagaaggctgcgctgtccgtgtccgcgtcgtccacgctggcgggcgccttcctcgcggcgctggcgtcgtcgcccgacgctgcgctggcggacgtggcggcggcggacgccggcggcgacagccgcggccacctgctgctcgtcgtggtggcgcccgccaccgggtgggtgctgtacacaatcctgcacccggggctgaaccagctgaaccgcatgcgcagcagccaggccgttggccgccggcctgggcctcggtgccgcggccgcggccgggaatggcggccccgc

SEQ ID NO: 13880 - DNA, 421 bp, Zea mays
  Clone ID: LIB36-004-Q1-E1-G7
cccacgcgtccgcaccactccgcgctagctgaggacggtacagcggcacagaggtgcgacgtacgacgacgacgacgcaggcgccacacatggcatcccagctctccgccgccgtgccccggttccacggcctccggggctacgccgcgcccaggtccgcggtggcagcgctgccgtccgtgagggtgggcaggaagaggtcgtcgtcgcagggcatccgctgcgactacatcggctccgccaccaacctgatcatggtgacgacgacgacgctgatgctgttcgcggggcggttcgggctggcgccgtcggcgaaccgcaaggcgacggcggggctgaagctggaggcgcgcgactccggcctgcagacgggtgaccccgccgggttcaccctcgccgacacgctggcctgcggcgccgt

SEQ ID NO: 13881 - DNA, 426 bp, Zea mays
  unsure (1)..(426): unsure at all n locations; Clone ID: LIB36-004-Q1-E1-G8
cacgcacgcatacacagcacagagtgaggtaagcatccgaaaaaagctgtgatctgatcgacatggccgccgccaccatggctctcacctcccgcgcgctcgtcggcaagccggcgaccagcaccagggacgtcttcggcgaggggcgcatcaccatgcgcaagactgctggcaagcccaagccagcggcgtccggcagcccctggtacggggccgaccgcgtcctgtacctgggcccgctgtccggccagcccccaagctacctgaccggcgagttccccggcgactacggctgggacaccgcggggctgtccgccgacccggagactttcgccaagaaccgcgagctggaggtgatccactgccgctgggccatgctgggcgcgctcgggtgcgtgttcncggagctgctcgcccgcaacggcg

SEQ ID NO: 13882 - DNA, 415 bp, Zea mays
  Clone ID: LIB36-004-Q1-E1-G9
accacgcgtccgcagtgctcgcatggccgcctgccaagtccctccaatactccctgtggccgcgtcgagctcgcccaatcctcccagcttctccctgtgctcgcgtcctgactttgcccagcacctcgtcaagctcctccatgccggcgtccctgcttctcttctctgcgcccatggccgagcggctcctcccacggcgcgccgagctccagctcggattcgagccgtcttcaccgtccacgcgacccctgtttctccttggctgaaactctttcccatggccgtggttctccaagtttccctgccggtgcccattttcttggtcgcgagcaagctctcgcgcacgcctggcttgttcgtgcgctcgctccagcggattcctctacgtcagggccctgctcgaccgtgcgccctc

SEQ ID NO: 13883 - DNA, 418 bp, Zea mays
  Clone ID: LIB36-004-Q1-E1-H1
ccatacattattattctagttattctgacctccatacctcgatcgagatagtggacataggatgccactctttaaaatgaaaaaaaggagtaatcagctgtgacacggaaagaaaacgaatccttttgtagctcgtcatttattggcaaaaatcgaaaaggtcaatatgaaggaggagaaagaaataatagtaacgtggtcccgggcatctagcattctacccgcaatggttggccatacaatcgcgattcataatggaaaagaacatatacctatttacataacagatcctatggtacgtcgcaaattgggggaattcgtgcctactcggcatttcacgagttatgaaagtacaagaaaggatagcaaatctcgtcgttaattgaattcaggatagaaagattcagaatagacaaga

SEQ ID NO: 13884 - DNA, 370 bp, Zea mays
  Clone ID: LIB36-004-Q1-E1-H11
acgcagagcatcctggccatctgggcgtgccaggtggtgctcatgggcgccgtcgaggggtaccgcgtcgccggcggcccgctcggggaggtggtcgacccgctgtaccctggcggcagcttcgacccgctcgggctcgccgacgacccggaggcgttcgccgagctcaaggtgaaggagatcaagaacggccgcctcgccatgttctccatgttcggcttcttcgtgcaggctatcgtcaccggcaagggccccctcgagaacctcgtcgaccacatcgccgaccccgtcaacaacaacgcctgggcttacgccaccaacttcgtccccggcaagtgagcgagggcatgatgcttgcatgcgtgtaccg

SEQ ID NO: 13885 - DNA, 214 bp, Zea mays
  Clone ID: LIB36-004-Q1-E1-H12
aggaagcagagacaaggcgcttaaagctgcgccaggttccggggctggcagttgaagcatagctaggaaacagctttccctctcttaattcgttgtgttcgtggtgacataatctgtgtgcggaccgaatttagaataaagtacaggcgtccgtctgatcaaataagcaccggtgttggtgctctatagatgaatatatccggtgattttcggc

SEQ ID NO: 13886 - DNA, 125 bp, Zea mays
  Clone ID: LIB36-004-Q1-E1-H3
ccgggacgaccacgcgtccggatatttcggatcacacttccgtctggccaccgcaaagcacaccctcttccgccgtcgccatggcgagcgataaccgcgcgttgctccttcccttcgccgccgcc

SEQ ID NO: 13887 - DNA, 480 bp, Zea mays
  Clone ID: LIB36-004-Q1-E1-H4
cgcctgcagttacgcctgctagtatcggtctagcaattcacgggtccaggcaatcgtatagacagccgtcctcttcttggctctcaacctcctgttcttcacggtggccaacgcctgcggcaactgcccgaccccaacgcccccggtcgagccaccgccgccgcctcctgctgctaccccacccccttcgtccagcggcaagtgcccgctgaacgcgctcaagttcggcgtgtgcgccgatgtgctcggcctcgtcaaaggcgaggttggcaaggtgcctgccgagccatgctgtaccctcatcaaaggccttgcggacttcgaggccgccgtctgcctctgcacggccatcaaggccaacgtgctcggcgtcgtcgtcgatgtccccatcaagctcagcgcgctcgtcaactactgtggcaagtgcgtgcccaagggctacatgtgcgcgtaagcagctccgggcggttacacgctcgt

SEQ ID NO: 13888 - DNA, 345 bp, Zea mays
  Clone ID: LIB36-004-Q1-E1-H5
acccgctacgcacgcaggagggagaaccagcgatgaactgtgcgataaaatcataaaaaagaccacagcaacaagtcccaggtggtttcagctctggaattcaaggatcaccgagtatcacctgtattaaattggcaatctcactttatgtgcagtctagagtatcgtttctatgtgctcagcttggacgtattgtattctttaattacagctacttggagatttggaaggacctggcttgcaacgtagtataatctctcgtcttttttctttgtggcaatatataattgctatgaataccagattgagatggttgcaaacagaacaaaaggaaacgaggatgtg

SEQ ID NO: 13889 - DNA, 399 bp, Zea mays
  Clone ID: LIB36-004-Q1-E1-H6
gcgaagcactacactacactacaccacacccacccgacgacgatcacacacgcagaagatcgagttcgttcgatcgtgaccgtgacgcaggaagctataagctagccaagacaggaataataatggcggcgtcgacggtggcgagcctctctgtcccggtgacgacgacgaccttcgcggcggcgggcggcggcgacgtgctgatcgtcgtcccgaggagggcgggcgccaagcgcgtcgtctggttccccgcggcggcgcgccgcggcggcgggcggttggtcgccgtgcggtccagcgggccggccacgccgccggagatctccgacaaggtgtcggagagcatcaagcaggcggaggagacgtgcgcggacgaccagaagggcgacgccgagtgcg

SEQ ID NO: 13890 - DNA, 416 bp, Zea mays
  Clone ID: LIB36-004-Q1-E1-H7
atccgatgaagctgtacggggcggtgatgtcgtggaacgtgacgaggtgcgcaacggcgctggaggaggctggctccgactacgagatcgtgcccatcaacttcgccaccgccgagcacaagagccccgagcacctcgtccgcaacccgtttggtcaggttccagctctgcaggatggtgacttgtacctcttcgaatcacgagcaatctgcaagtacgctgctcgcaaaaacaagccagagctgttgagggaaggaaacctcgaggaggcagcaatggtggatgtttggatcgaggtggaggctaaccagtacaccgctgcactgaatcccatcctcttccaggtcctcatcagtcctatgcttgggggaaccaccgaccagaaagttgtggatgagaaccttgagaagctgaag

SEQ ID NO: 13891 - DNA, 210 bp, Zea mays
  Clone ID: LIB36-005-Q1-E1-A11
aaagcacaaagcaggaggaagccggcggtgtaggcgacccatggctccacagacgaggagagagaggttggcgggggaggcgcggccgagctcgtcggggctaacaccggcgaagccgggggcggtcgaggtgcagcgccgacgggcgggcagcggttggacgagccgtcggatctccatctacgcctcccgagtctacttcctcctcat

SEQ ID NO: 13892 - DNA, 412 bp, Zea mays
  Clone ID: LIB36-005-Q1-E1-A2
cgcgggacttgatcagctctttgctcaaatctcaagtgtttggtgccattatcgcggtggtgagctgtgcctggggagttacaacccatggaggagccaagggtgttggcgagtctacaacatctgccgtagttgtttccttggttggaatcttcattgcagactttgctctctcgtgcctgttcttccagggtgctggtgattcgctcaagtatgcaatgggttgaggtgggtcagtgcagaggaagttttttcctttctaggaggatagcatagtcttgtacattaaaaagagtggtgcactggattctagtaggtgaacattgcaacttctgccacagtccaggtgacatgcatagttgtttccccttgatacctacgacaatcattacctttgttgtactgaactgct

SEQ ID NO: 13893 - DNA, 433 bp, Zea mays
  Clone ID: LIB36-005-Q1-E1-A3
cgctcctgggacgccgaccgacaggaccgattcgtgaggcgattcgccgactcgctcggacacccaaaggtcagccaggagctcaggtccatctggatagacctcctcgccaaggtacgtggatggcatggcatggcagtggcacacgtgttttcgttccatctagctactcatgcatgatatatatacgattgctttgcatatgcagtgcgacgcgtcgctggggatgaagattgccacccggctcaacatgaagccaaacatgtgatgcatcatgcttgtgctgaataataatgaagacgcatgcatgtcgtcgccaggaacaaagatcgagaaataatacaagaccagcacgcatgcatgggcatactctatatatatatatgtatagcccgtgcccgtgcccgcctttgtaccaatacaagccaaacca

SEQ ID NO: 13894 - DNA, 410 bp, Zea mays
  unsure (1)..(410): unsure at all n locations; Clone ID: LIB36-005-Q1-E1-A4
gtcatccagaggcacaagctgaggaatggggcaaaaggactccaagccttcacatggatatggctactcttcttatgattacgggagtgcttcatcgggatacacctcgagaaacactgggaattcgtcctccagttatagcgtcaggtacgcgccttcttcggagaacagtgtacagccggagacacatgccaggttgcagaggaagtattctaagatcggtgatgactaccgttctttgagccaggtgactgaagctttggcacaggcaggccttgaatcttcaaatcttattgtaggcattgattttacaaagagcaatgaatggacaggtaaaatttccttcaatcgccgctgcctgcatgatattggaaacactccanacccatatgagcaagctatatctatta

SEQ ID NO: 13895 - DNA, 425 bp, Zea mays
  Clone ID: LIB36-005-Q1-E1-A5
gttcctctccggcgggcagtcggaggtggaggcgacgcagaacctcaacgccatgaaccaggggcccaacccgtggcacgtgtccttctcctacgcgcgggcgctgcagaacacctgcctcaagacctggggcggccagccggacaaggtcaaggcggcgcaggacgcgctgctgctgcgcgccaaggccaactccctggcgcagctcggcaagtacacctccgacggcgaggccgccgaggccaaggagggaatgttcgtcaagaactacagctactaattaatcgcccggccatcacccgggataccgccgcccctccgagagatacgtgtgtactgatcatggttaagcacgtactccgatccattcccatcccatgaagccatgataatgatgatatgatccatggaccatgcatggtgct

SEQ ID NO: 13896 - DNA, 422 bp, Zea mays
  Clone ID: LIB36-005-Q1-E1-A6
cccgcgccgtcgaggtggacgcgccttccgccggcgcaccggagccggaggaggcggaggagccgtccgtcgacttcgcgttcgtcagctcgcggctgctgccggacgggacaccggacgtgcactaccggacggcgcgcggcggggagaagctcagggacatcatgctcgacggctacatcgacctatacgggccctacgataaggtggcggcttgggtcgacgatggcggctctgggactgcacggggaatgacggttgagcgtgggtagacaaaaccagaaggagaaatgggaattaggggcgagtcccgactcccgagcggctggcaccgaggcgaagctcaatgtgacaaggtcgacgacaggagatcaacagcgatggcgacggtggcggccctactgcgtgctgggtggggaaac

SEQ ID NO: 13897 - DNA, 412 bp, Zea mays
  Clone ID: LIB36-005-Q1-E1-B1
caagcacttcgacgtcgcacgggcgctgcacacagacacaccaagcgtcggcaccaatggcttactaccaggaggtggactactgctcggaggaggtgaggtcggtggccccggccggcttcggccgccacggaggcggcgtccagcagcacgtcgtcaaggagaagttcgaggaggtcgacacggtctcacgcgccggcgccaaccaccaccaccaccaccatggtcaccacggcggccacggcttcgtggtgcgcgagaccagggtcgaggaggacatcaacacctgcaccggcgaggtccacgagcgcagggagagcttcctcgccagggctaactgagccgcccggcggccggcatccacgcccgttcgtgcctgcctgcgtgccttatgtatgtctgtggttgactg

SEQ ID NO: 13898 - DNA, 428 bp, Zea mays
  Clone ID: LIB36-005-Q1-E1-B10
aaggttttgctgctctccgaccccgagctccgaaggccgcagcatcaggcgcgccccccctcgcgtgtgaccgagatggcgctgccgaatcaggggaccgttgattaccccagcttcaagctcgtcatcgtcggcgatggtggaactggtaaaactacatttgtgaagaggcatctcactggagagtttgagaagaaatatgaaccaaccattggtgtggaagttcatccgttggatttcaccactaactgtggtaagatcaggttctactgctgggataccgcagggcaagagaagtttggtggcctcagggatggatactatatccatggccagtgtgcgatcatcatgtttgatgtaacctcaaggcttacttacaagaatgttcctacgtggcatatggaactgtgcaaggtctgtgaaaacat

SEQ ID NO: 13899 - DNA, 432 bp, Zea mays
  Clone ID: LIB36-005-Q1-E1-B12
aggacgcgtgggccccggcgaagttgttaaacctgaccaattcaaggcgataaacgacgaggggatgcctatttaccagaggcccttcatgaaggggaagctctacattcatttcacagtggagttccccgactcgctggcgccagagcagtgcaaggctctcgagtcggtacttccgccaaagccttcgtccaagctgacagacatggagatcgatgaatgcgaggagacgaccatgcatgatgtgaacaacatcgaggaagagatgcgcaggaagcaggctcatgctgctcaggaggcctacgaggaggatgacgagatgcctggcggagcccaaagagtgcagtgcgctcaacagtaagcagactaccataatgggattcaaggcactttgggtgctcttcaattatgcgagtgcgcctgtggactgtg

SEQ ID NO: 13900 - DNA, 429 bp, Zea mays
  unsure (1)..(429): unsure at all n locations; Clone ID: LIB36-005-Q1-E1-B2
gttggctgtgaagttgacaatgaaaagatggaactccttctgtcccaactgagcggtaaggacattaccgagctcattgctgctggcagggagaagtttgcttcagtcccatgtggcggtggcggtgtggctgttgcggcagctgcccctgctgctggcggcgctcctgcagctgaggcgaagaaagaagagaaggtggaggagaaggaagaaagtgatgacgacatgggcttcagcctcttcgactaagcctgtgcaatagtcaagagtattgtttttgagtcgcggaagcagagggaagaaaaatcgtagtcatgtttggactttaactttgttttatgttggaaagtacttgaaagacttttcctgtggtaattctaggcgtaggttgctgtgctggttggggtttactggtgaaccanagttttt

SEQ ID NO: 13901 - DNA, 428 bp, Zea mays
  Clone ID: LIB36-005-Q1-E1-B5
atcccctccagctctcctcaaagcatcagctcctttgcttatctcctttcgccccgtctcctgccactgcaagaacctgtgcatcaagaccaaggccacagaaaatgatcagtctgctaaaaagcatcagaaggtgaagagcattctttgccaggactgcgaaggaaatggggcaatcgtatgcaccaaatgtgaaggaaatggggtaaattctgttgactattttgaaggccgatttaaagctggatctttatgctggttgtgcagaggcaagcgtgaaatcctatgtgggaactgtaatggtgctggcttcttgggtggatttctaagcactttcgatgaaactgcgcaatagtcatcggtttagcactttcgatgaaactgcgcaatagtcatcggtttaatttatgtttaagttacattgaggg

SEQ ID NO: 13902 - DNA, 358 bp, Zea mays
  Clone ID: LIB36-005-Q1-E1-B7
aatggacaggggagcagaaggttcagtacagtgacataccagatgacatcgagccagaagagattaggccgatgggaaactatgcagtttctataacttggcctgatggatttagtcagatagcaccttatgaccaattggaaatgctggagcggttggtggaggctccgagtccagcagcagcgtctgcagtggcctcgtcatgatacagcagaaagaatgttcagttagcaaggggcaagaaggccgacttttagctcccagaaaatttatagctctgctacaaattttgaaagaattttacagtactgtagaaccatgctcattgaattttaaaaaaaggcagcagctttcgttc

SEQ ID NO: 13903 - DNA, 428 bp, Zea mays
  unsure (1)..(428): unsure at all n locations; Clone ID: LIB36-005-Q1-E1-B8
cggaggtgccggagtacctcaccggagaggtccctggagactatggctacgacccttttggcctgggcaagaagccagaggacttcgccaagtaccaggcctacgagctgatccatgccagatgggccatgctcggtgccgctggcgctgtcatcccagaggtctgcaacaagttcggcgctaactgtggccctgaggctgtctggttcaagaccggcgcgctgctcctggacggcaacaccctcaactacttcggcaacagcatccccatcaacctggtggtggccgtgatcgcggaggtcatcctcgtcggcggcgccgagtactaccggatcaccaacggactggacctagaggacaagctgcaccccggtgggcccttcgancccctgggcctggccagcgaccccgaccaggccgccatcctc

SEQ ID NO: 13904 - DNA, 433 bp, Zea mays
  Clone ID: LIB36-005-Q1-E1-C3
ggacgctctcctgtcagatgattccttggcaaatgttccatttctcatccttggcaacaagattgatatcccgtatgctgcctctgaagaggagctgcggtatcacctaggccttagcaacttcacaaccgggaagggcaaggtcaaccttggcgactccaatgtccggccacttgaggttttcatgtgcagtgttgttcgcaagatgggctacggcgatggtttcaagtgggtctcccaatacatcaagtagggcccttgccggggcgcttgctcagcccagcgatttttttgccttgttatttgttctggttggtatttcgtcacgtgaacgatgatcatcatatcatgacagtatcatggaggggtatgaagagaaaaaaacagtgcttaacattggggaacatgttgaatctttagcgtgaaaacattt

SEQ ID NO: 13905 - DNA, 369 bp, Zea mays
  Clone ID: LIB36-005-Q1-E1-C4
gccagccagtgtgtgcgttcgattcgcttctgctgcagctagggtttagaggttttctgggcgcggagcgggaggcggcggcggctatggctgcggcggaggaggagatcgcggtgaaggagccgctggatctgatacgcctcagcctcgacgagcgcatctacgtcaagctccgatccgaccgcgagctgcgcggcaagctccatgcgtatgatcaacatttaaacatgatacttggagatgttgaagaggtcgtgacaactgttgagatagatgatgaaacatatgaagaaattgtgcgcaccacgaaacgcactatgccctttctttttgtccgaggtgatggtgtcatattggtttctccacccc

SEQ ID NO: 13906 - DNA, 426 bp, Zea mays
  unsure (1)..(426): unsure at all n locations; Clone ID: LIB36-005-Q1-E1-C5
ccatagtgagcggaatgggaactcctaatccagtagcaaatgcagttacaactggtgttgcttttgcagtatttcaaggtggctttttcatgatcgggcagaaattctcaaagccaccaagtgaagatacatactactctcggacaagaagcatgctgcacaaactgggtcttgaaaagtatgagaagaatttcaagaggggtctcctcaatgatcaaacgttaccactccttacggacagtgctctgagagatgtgaagattcctcctggacccagacttctcatactcgaccaaattaaaagggaccccgagctggttcaagcaaagtagcagtcacaattgtcgacagctggttctttctgggttgcatanggtttgaaagcgatgccgtctctagtttcttaataaactttctaggcaagca

SEQ ID NO: 13907 - DNA, 414 bp, Zea mays
  unsure (1)..(414): unsure at all n locations; Clone ID: LIB36-005-Q1-E1-C6
gtcgccggggcggggcatcctggcgatggacgagtcgaacgcgacgtgcgggaagcggctggcgtccatcgggctggagaacacggaggccaaccggcaggcgtaccgcacgctgctggtcacggcgccgggcctgggccagtacatctccggcgccatcctcttcgaggagacgctgtaccagtccgccgtcgacggccgcaagatcgtggacatcctggcggagcagggcatcgtgccggggatcaaggtggacaagggccttgtcccgctcgccggctccaacaacgagtcgtggtgccagggcctggacggcctggcgtcncgcgaggccgcctactaccagcaaggcgcgcggttcgccaagtggcgcaccgtcgtcagcatcnctaacggcccctccgagctcgccgt

SEQ ID NO: 13908 - DNA, 437 bp, Zea mays
  unsure (1)..(437): unsure at all n locations; Clone ID: LIB36-005-Q1-E1-C8
ccgagaagcgctttagccgtagccgtagcgataagagtgagctagctggtgcacaccggcatggcggccacggcgtactccgtggcgctcctcggcggcgcgcgccttcccgccgctccgcgctccgccctcctccctcggcgcagcgtctgccagcttcgcttccaagatgcaccgaggctctccctgctccgtgcgaaggccgcttccgaggacacatcggcctccggcgacgagttgatcgaggacctcaaagcgaagtgggacgccgttgaggacaagcccaccgtcctcttgtacggcggcggcgccgtcgtcgccctttggctgacgtccgtggtcgtgggcgccatcaacgccgtgccgctgctccccaagatcctggagctcgttgggctcggctacnacggctggttcgtgtaccgctaccttctctg

SEQ ID NO: 13909 - DNA, 384 bp, Zea mays
  Clone ID: LIB36-005-Q1-E1-C9
acatccccaaggggctgtcggaggccaccgtccgccgcatctcggagctcaaggcggagccggcgtggatgctggacttccgcctcgccgcctaccgccgcttcctcaccatggtcgagcccacctggagcgacaacgagtacgcgcccgtggacctgcagtctatctgctactactccgcgcccaaaactaagcccaagctcaatagcctcgacgaggtcgacccggagctgctcaataccttcgaccgcctcggcatcccgctcagcgagcagaagcgcctcgccaacgtcgctgtcgacgccgtcatcgactccacttccatcgccaccacccaccgcgaggcgctcatggccaagggcgtcatcttctgctccatctccg

SEQ ID NO: 13910 - DNA, 412 bp, Zea mays
  Clone ID: LIB36-005-Q1-E1-D12
accacgcgtccgggcagcacactcagctatccagcaaaagagatcgagaggcaggagtcatggccaccgtcagcgccgccgtggtgaccaccatcgttgcccgcgccgcgatcgccaggcccaatgctctagggctgcctgcgctgagggcgaggagcgagagggtgcggtgcagctacgccaaggacgcggccccagtcagcaccaagggcgcaggcgcgtcgctgctcgccgcagcgggcgcggtgaccgcgtcggcggggcccgcgctggcgctcgtggacgagcgcatgtccacggagggcaccgggctgagcctcgggctcagcaacaacctgctggggtggatcctcctgggggtcttcggcctcatctggtccctctacaccatctagacctctgacctcgacca

SEQ ID NO: 13911 - DNA, 373 bp, Zea mays
  Clone ID: LIB36-005-Q1-E1-D2
aaaaaacttttacacccagattacttggtgtcatgcctgattctgatgaaaaggtttttttgaaacaaggcccatatggccactatgttcagattggagaggacaaaaagggactgtttccgaaaagggcttccctttccaaggtcaaagatatagactctgttactctagaagatgcaatcgagcttttgcaatatcccaaaattttgggaaaacatcctgaagatgattatcctgtacttataacacattctaaagttggatacaacatcaagcataggagatctctagctctagtgccaaagagtgttgacccaaagaagatgacacttgagcgtgcgctcaagctactaagcggtaaaagtgtcagacg

SEQ ID NO: 13912 - DNA, 413 bp, Zea mays
  unsure (1)..(413): unsure at all n locations; Clone ID: LIB36-005-Q1-E1-D4
gactgaaccaccgacagacaacatggccgcctccgcctccaccgtctccggcctcgccggcgcctccctggccagccgcccggcgttctccaccagcttcacgcggggcagccgggtgtcggcgaggaaccccctgatgagcaggaacctggagaggaatggcaggatcacctgcatgacgtttccccgggactggctgcggagggacctgagcgtcatcggcttcgggctcatcggctggatggggccgtccagcgtcccggccatcaacggcaacagcctcacggggctcttcttctccagcatcggccaggagctggcccacttccccacgcccccgcccgtcacctcccagttctggctgtggctantgacgtggcacctgggcctgttcatcgtgctcaccttcgggc

SEQ ID NO: 13913 - DNA, 425 bp, Zea mays
  Clone ID: LIB36-005-Q1-E1-D5
aactgagtcgtagggaaccgatcactcatggtctcgaatttcctaggagcagacgcgatggctgggaagggatgaaaatgattgctcgccacgaacaccacggcggccaagtcggcggagaatgacaaggggaagaaggcccccatctcacggtcctctcgcgcgggcctccattttcctgttggacgaatccaccgtcacctgaagcaaaggactcatgcaaatggccgcgttggtgccactgcagccgtctactctgctgccatcctgcagtacttgactgccgaagttctggagctggatgggaacgctatcaaggatctgaacgtgaatcgtatcacccctcgccagctacagttggacattcgccgcgacgacgacctggacaacctcatcaacggcaccatcgcaggtggaggtgtcat

SEQ ID NO: 13914 - DNA, 437 bp, Zea mays
  unsure (1)..(437): unsure at all n locations; Clone ID: LIB36-005-Q1-E1-D6
atcgtaccgccccgatccttgtgtacggttgtagtcacgatgcaggcgcagacggtggtgcctccggatttgcagtgcaaggacaagttcatggtgcagagcgtggtcatcagtgatagcttgtcagccaaggacataacctctcaaatgttcgcgaaagaggggggtaatgtgctccaggaggtaaaattgaaggttgcttatgtgatgccacctgaaccaccatcagagattgcagaggagcacgatggtttagatcgagttttagtgcctatgcagaggatcgtggataatgggaaaagtacttcagagctatcgagtggctccgtgtcattgaggtcagctgaggagtttggatcacctgttggtcgaattgtgaagagtgaggagtttctgaaggctgcanngactgctatggaaacaaanacatatgcagg

SEQ ID NO: 13915 - DNA, 428 bp, Zea mays
  Clone ID: LIB36-005-Q1-E1-D7
aggacgcgtgggttggcagttgtgcttggaggttcagtgacaatagggacaacgtactggctcttcacatacagtggctattctggagacttgtcacctgaatcagcgtttgacttattgaaaaacgatgacaaagccgtactcattgatgttcggcctgaggatttgagggaaaaagatggtgttcctgatctacgcctcggggctaggtctaaatatgcaagtgtagcttcgcctgagatcaaagatccagtaaagagtatgctcaaagatgaaagagagtttgatgatgctttactggcagttgtcatccgaaacttgaaattggtgaagggcgattcaaaagtcatagttatggattctaatggagctcgatcaaaagccattgctaggttactgaagaagctcggtgtgcagcgaccttacct

SEQ ID NO: 13916 - DNA, 435 bp, Zea mays
  Clone ID: LIB36-005-Q1-E1-D8
agaggttatggaagtaaatattctcgcatttattgctacagcattgttcattctagttcctactgcctttttacttattatttatgtaaaaacagccagttaaaatgattaattggaattccaattaatcattgaagaaatgaaaaagggattaaagaaaataaaaaatccaagtcttaaatgaaagggtctggttggaatcataaagtgtggtagaaagaactacatatagttttttctaccacactttagattctttctattatattatcttgaatctacatagaatcgattagtagattgaaatagtagtctaattcaacttcttttttcactgcatccacttaatttcaatcaagtcaaaatcaaaaaaatcgaagataattcttcattgaaagaatccaaagagggggagaaaaataatacgagaataga

SEQ ID NO: 13917 - DNA, 387 bp, Zea mays
  Clone ID: LIB36-005-Q1-E1-E10
aagctattctgtcacatactccagatctgggacaaggtggctccactgctgtaaccgccattcttgtgaacggcaggaagttatgggtagctaatgttggcgattcaagagctgttcttttgaaaggtggtgagcccatacagatgtcgatagaccatgatccgaatgttgagcgcagtgtaatcgaaaataggggtggttttgtttcaaatatgccaggagatgttccccgagtatgtggtcagttggctgtctccagagcttttggagacaggaatctaaaatcactattgagatcagagcctgatataaaagtcgaagacatagatcacactgccgagctacttgttcttgcgagtgacggtctttggaaggtgatgaacaatc

SEQ ID NO: 13918 - DNA, 385 bp, Zea mays
  Clone ID: LIB36-005-Q1-E1-E11
aggacacgtgggcgcgcgcagcggtcagctcagcccgtctgattcccgtgctgccagccctccgccgatcgtgaaacagaaccgtcggtggtttgcttgcgtgatcgctgatcctcgcggacgctcacggtcatggcgcctcagcctttgcgcgctccgaggctgagcgcccccgctggccacgcggcgtgcacgtgctcggccgctccgctattcgggaagcgggcgccccccgtcgtcgcgttccaccgcgcccgtaacggcggcgccgtcgcctcgtgctcggccgtgcatgagtcggcaacctccagcactggtacgggtcttgctactctaattgcggggtgggtgggatctcgtctgaataagttctctcgagacgtag

SEQ ID NO: 13919 - DNA, 396 bp, Zea mays
  Clone ID: LIB36-005-Q1-E1-E12
atggattgacagtgaacaaaggattggaccaggaaacaggatcagctacaagctaaatcatggtgaactggttgagaaaaataactggttacccgaggggcctattaccattggtgttacttcaggtgcctcaactccagataaggttgttgaggatgctcttcagaaggtatttgagatcaagcgtcaggaaattttgcaggttgcataaattttaagcagagatttggtgaagagctgaatagttttggcttggcaaaggttactagaaacgttgcacaggcaaatgtttgtacagtagctaaggatgtaacgagttgggcacgaatactaccacgagtcactatccttgtgctggaatttacagtacggtggaaactaaaatggtgtaagttt

SEQ ID NO: 13920 - DNA, 133 bp, Zea mays
  Clone ID: LIB36-005-Q1-E1-E2
aggacgcatgggcggacgcgtggggtaaaatcagggtgtctgtctataatctagcctccatggatgctcaaccttcgtcatgtaacaataatcagtgctactcttcattacataattttgatgctatatatat

SEQ ID NO: 13921 - DNA, 430 bp, Zea mays
  Clone ID: LIB36-005-Q1-E1-E3
atcaaacgctacctctggtggttcccatgagcaaatcaagtacttggtgtctgagggctgcatcgtgccgctgtgcgaccttcttgtttgccctgatccgagaattgtaacagtttgtctggagggtcttgagaatattcttaaagtaggggagcacgacaagaccatgggcgcaacaggtgacattaatgttttcgctcagatgattgacgacgcggaaggcctggaaaaaatcgagaacctacagagccatgataataatgaaatctatgaaaaggctgtgaagcttcttgagacttactggatggaggaggaagatgatgcaatggctactgctggggaagctgctcctgctgtttttgactttagccaaggtggcaaccctcctggtggtggtttgaacctcaactgaatacagtatttgaccaaa

SEQ ID NO: 13922 - DNA, 371 bp, Zea mays
  Clone ID: LIB36-005-Q1-E1-E4
ggcacacctgccctccccgtcgccgcggacccactcccatggcaaagctcccgcgtctaccctgctcgtttgccgttctcgcgctcatgtgcatcatcccgctcacagcgccgcggcctgcactgtcctcgcgcgcggccccaagggacggtgtctccttcgccggcgcaggcaacacgatacatcaacttcttaaagatcacggccttcccggaggactgctcccgcgcggcgtggagtcgtacaccctggacgagtcgaccggcctgctggaggcgcggctgtcggcgccgtgctacgccacgtacgacaacggcgaactggcctacttcgacaacgtggtgcgcggcaacctcagcaagggcgcgctc

SEQ ID NO: 13923 - DNA, 427 bp, Zea mays
  Clone ID: LIB36-005-Q1-E1-E5
accgcggtcgtcttcctcggcccgctccttatcaagaagattgttgtacctattcttcactgggaatcaacaacgttcagcagaccatctattgctctaatatgtttcggcacaatcgcattattcccaagtgttttgttaccttcttcgcccttcatgtggcttgcggggatgacttttggatatctttatggttttttaataatcacagtgggtatgagcataggcatgtcattgccgtattttataggttctgcattccactgtaggatacatagatggttggagaagtggccaaagaaagcagcttttgtaaggcttgctggcgagggagattggcatcatcaatttaaggctgtagctttactcaggatttctccatttccgtatatagtttttaactatgcttctgtggctacgaatgtca

SEQ ID NO: 13924 - DNA, 398 bp, Zea mays
  Clone ID: LIB36-005-Q1-E1-E7
acaaacatccagggcaactgaaagatcaggttacttctccagcaggtactaccattgccgggattcaggagctcgagaagggcgcattccgtggaacgctgattagtgctgttgttgctgctgcaaaccgctgccgcgaactgtcatagagtccgaaacaaggctgcattttgttgatatacatgcgttggtatgcaaggtgcaaatcttctggaatagtagactaataatgtactggtggcttcagaatcatgtgatatgataagtacatgctcccttccaaagcttggtgtcaccattatatggtcgaacggcaagccttaacaataaatccaaaaattggggcacaaaaaaagaaacaaaacacaaggaaagacacggctgaggggggacaatgt

SEQ ID NO: 13925 - DNA, 376 bp, Zea mays
  Clone ID: LIB36-005-Q1-E1-E8
acgagcgcttgacgagcgggttccagcagttcaaggtcaatgtctatgacaagaagccggagcttttcgggcctctcaagtccggccaggcccccaagtacatggtgttcgcttgctccgactcccgtgtgtgcccatcggtgaccctgggcctgcagcccggcgaggccttcaccgttcgcaacatagccgccatggtcccaggctacgacaagaccaagtacaccggcatcgggtccgccatcgagtacgctgtgtgcgctctcaaggtggaggtcctcgtggtcattggccatagctgctgcggtggcatcagggcgctcctctccctccaggacggcgcacctgacaccttccacttcgtcgaggactgggt

SEQ ID NO: 13926 - DNA, 409 bp, Zea mays
  Clone ID: LIB36-005-Q1-E1-F10
atgaacacttgattgattcagtaggtagctagctagctgaatcacaatggatcctaccaagttccgtccgtccagtagccacgacacgacggtgacgacgacgaacgctggcgctcctgtgtggaacgacaacgaggcgctgactgtggggcctcgcggtcccatcctgctggaggactaccacctgatcgagaaggtggcgcacttcgcgcgggagcgcatcccggagcgcgtggtgcacgcgcgcggggcctccgccaagggcttcttcgagtgcacccacgacgtgacgtcgctgacgtgcgccgacttcctgcgcgcgcccggcgtgcggacgcccgtgatcgtgcgcttctcgacggtgatccacgagcgggggtccccggagacgattcgcgacccgcgcggg

SEQ ID NO: 13927 - DNA, 397 bp, Zea mays
  Clone ID: LIB36-005-Q1-E1-F11
aaccgctttcccgttccccaccccgaccgactgctccccctcccccgcaccagcctcaagccctcaaggcctcaaggcatcgccggcgccgcaacttcgctgaggaagcccgcacccctgcccggatccgatggccaacagcaacctcccgcggcggatcatcaaggagactcagcggctgctcagcgagccagcaccggggatcagcgcgtcgccctcggaggagaacatgcgctacttcaacgttatgatccttgggccggcgcagtcgccctatgaaggtggagtttttaagcttgaactctttttacctgaggaatatccaatggctgccccaaaggttaggtttctgacaaagatttatcatcccaacatcgacaagcttggtacgatatgc

SEQ ID NO: 13928 - DNA, 397 bp, Zea mays
  Clone ID: LIB36-005-Q1-E1-F2
accacgcgatccggacatcacggtggaggagtggctcaacacgcacggtcccaacgaccgcacgctcgcgcaggggctcaagggtgaccccacgtacctggtggtggagcaggacaagacgctggccacctacgggatcaacgccgtgtgcacccacctcggctgcgtcgtgccgtggaacggcgccgagaacaagttcatctgcccctgccatggatcccagtacaacaaccagggcaaggtggtccgcggaccggcgcctctgtcgctggctctggttcacgccgacgtcgacgacggcaaggtcctcttcgtcccgtggatggagaccgacttcaggaccggccaggacccgtggtggagtgcatgaggaggatcatccgacacaagcggtgct

SEQ ID NO: 13929 - DNA, 435 bp, Zea mays
  Clone ID: LIB36-005-Q1-E1-F3
acagcacaagcaagaaccacacctcctcccttcgcctgtgatcatgtcgtcttgctgcggcggcaagtgcgggtgcggctccagctgctcctgcggcagcggatgcaacggctgcggtatgtaccctgacgtggagaccgccgccaccagcagcgtcaagaccacggtcctcgccgcgccgaccaccaaggccagcgccggcggcttcgaggcggccaccgagggcggcggctgcgactgcaacacctgcaagtgcggcaccagctgcggctgctcctgctgcagctgcaactgagctggcccggcccggcgatggcgcacgagagtcgagaggaggaggacgacgacgaggcgtataaatataatagcggcgtccagtaaataagatcctgtcaactgcacccgccattatccatggtcgctcgctcctcgcct

SEQ ID NO: 13930 - DNA, 379 bp, Zea mays
  Clone ID: LIB36-005-Q1-E1-F4
cggacgcatgggcggacgcgtgggcggacgcgtgggaaaacctcttcttttgaagaaacaacatcagcaaaggcatcaaggtcaccagtacgctatgcttcagggcattgatgaatcagtgggagcagaattgggggaacatcatgaggacgcacatgaccacgaggagtttgagttcggtgaagtttttgttcaccaactgattcacacgatagaatttgttctgggtgcagtctcaaacaccgcttcataccttcgtctttgggctctgagtcttgcacactctgagttgtccactgtattctacgagaaagtactaatgacggcatatgggtttaacaatgttttcatccttattattggtgtcgtcatcttcatc

SEQ ID NO: 13931 - DNA, 372 bp, Zea mays
  Clone ID: LIB36-005-Q1-E1-F8
cccacgcgtccgttttgttgagagatacaaaaatttgagttccttcaacgaaactgagctcgcgaatctgcataaggaattgagggctcatattctacggggggttaaaaaagaagtttaaaaatccttaactcccaaaaatcaaaaggattcaacttgttaaaatgtcacccctcaaaaaccattacaacaattggattttaaaccggaattttcaaaatctgaataaaggtgttcgtggaaatcaggtatcacttcttaacattgttgttgaattgaagaaatgctgcaaccatcaattcttgtttgaaagtgccgatcatggttatggtggaaatagcatcggtgatcggaataaagttgaacgtattg

SEQ ID NO: 13932 - DNA, 420 bp, Zea mays
  Clone ID: LIB36-005-Q1-E1-F9
aggacgcgtgggttttttttttaggatatgcattgctcagcataactttgttaagtagtagacatatgtttacactcttgtttcatacaacaacacaataatgatctttcgctcatacacaaacatgataacgatgaggggctccaggctgaattgtgaacgacggaagcgtcacttcatgtacctctgaagaaatttacggtggaaatcactcctgatggtgtcgttgatgaaccgtttcggtgtcttggtctctcctcgtgcttgattcttgaataccacgtcgtcgtcccaccttctcttaacactgaaggagccagcattgttgatattaatcaacgggtttccccgcatcagttcagcctccttcatcttggcctcctcttctgcttgttgccgctcccttctaagcttctcccc

SEQ ID NO: 13933 - DNA, 407 bp, Zea mays
  Clone ID: LIB36-005-Q1-E1-G10
ataataaactgcggattctttctttctcttccattcttacgtttccatattaaagtgtagtttttttacttaaatttaataatattaatctaatatgcccattggtgttccaaaagtaccttaccggattcccggagatgaagaagcgacttgggttgacttatacaatgttatgtatcgagaaaggacactttttttaggtcaagagattcgttgcgagatcacaaatcatattacaggtctgatggtatatctcagtatagaagatggaaatagcgatatttttttgtttataaactcccctggcgggtggctaatctcaggaatggcgatttttgatacgatgcaaacggtgacacctgatatatatacaatatgcctcggaatagccgcgtccatgggctcct

SEQ ID NO: 13934 - DNA, 397 bp, Zea mays
  Clone ID: LIB36-005-Q1-E1-G11
atccaaaccaaagccatcggaggagcagctggacgaccatggcctcgccgctgctcaagtcacactctcagctagccgccgccaccgccctgcactccgtgaggagagccgaccgctgcccggcgacaatacacctgggcaagttccatgaccacgggctcaggtccggccgttctaagagatccggttcagcgaaggtgggcgccttcccgtcgctggacgtggtgccgctgatggtgacgatggtggagcacgtggacatgtcgcgggactacgtcgtgaccaagtccatctggcatctcagcgacgcagccctcaagagcgtctataccttctacgccatgttcaccgtctggggagtctgcttcttcgcgtccatgaaagatcccttctacga

SEQ ID NO: 13935 - DNA, 417 bp, Zea mays
  Clone ID: LIB36-005-Q1-E1-G12
aaaagcagttatgcatttcttggttaatcatacaaaaagggcgctgcataattaccttataacaaaactttatagagatgatcttttggaagacttgctcaaagaacctgatgagataaccataaagaggaagcagatacgtgaaaatctcaaggtccttcaacaagcttacaaaactttggacgagataccacttgacgcagaggcagtagagaggggtggatactccctggattctgatgcgattggtctgccaagggcccatgggctttcttcatccctccacggattcaacgatggaagctcaccatattcaaccccgaagcagtcaaggtcaaggaggtcaaaccattctggcgagcagcttcctttcaaccccaatatgagtggcaatggtttttgatgccaccctcctac

SEQ ID NO: 13936 - DNA, 415 bp, Zea mays
  Clone ID: LIB36-005-Q1-E1-G6
accaactcgccgtctgccttctgcgcctccatttcggcctctgtccctcgcaagttcaatctcacctccaaccatgggtaaagagaagtcccacatcaacattgtggttattggtcatgtcgactctggcaagtcgaccaccacaggacaccttatctacaagcttggaggcattgacaagcgtgtgatcgagaggttcgagaaggaggctgctgaaatgaacaagcggtccttcaagtacgcgtgggtgctcgacaagctcaaggctgagcgtgagagaggtatcaccattgatatcgctctgtggaagtttgagaccaccaagtactactgcacggtcattgatgcccctggacaccgtgacttcatcaagaacatgatcactggtacctcccaggctgactgtggcgtccct

SEQ ID NO: 13937 - DNA, 416 bp, Zea mays
  Clone ID: LIB36-005-Q1-E1-G7
cacgacaccaagtcgaggagctcgagagggcaccaataatggccggcgtgaactccagcgtcgtcgggctcaagcccgccgcggcagtgccgcaggccgccgccgcctcatcgccggcgaagcgggtgcagctggccgcgcccgagggccgccgcgccgctctgctcggcctggcggccgtcttcgccgtcacggccaccaccgggtcggccaaggccacgatcttcgatgagtacctcgagaagagcaaggccaacaaggagctgaacgacaagaagaggctggccaccagtggagccaactttgcgcgcgcctacaccgtggagttcggcagctgccagttcccctacaacttcactgggtgccaggacctcgccaagcagaagaaagtccccttcatcagcgacgacctcgag

SEQ ID NO: 13938 - DNA, 249 bp, Zea mays
  Clone ID: LIB36-005-Q1-E1-G8
acacacgcgtccgccgacgcgtgcgcggaggcatgggcggacgcgtgggttaagtctagctggcgtcaggcatcaaaccatgtgcagaatgtaccacatggcgcgactacaatcgcaggaagcaacagctaatacatctatcgataccgatggacacctagcttaactacttgacggtgatcttgtcgaccactccagcgccatgatgcggtccgcaatagacaccatatgttcccagtaccgtgaggg

SEQ ID NO: 13939 - DNA, 411 bp, Zea mays
  Clone ID: LIB36-005-Q1-E1-G9
agcgccgccgccggccagcgcaacaccagccgcgccagcggcagcaaatgcgcaacccaagctgactgccgtgaagctgaggatgatcatcaagggcgtgctcgggcggtaccagcgctggaaccccgtgcacccgacggccggcaccttctggggtgtggggctcggcgtcggctgtggcgtcggctggggccccggcttcgggcctgaggtgattgggtacgtaggcgccgggtgcggcgtggggttcagcgttgggttcacgctcgccggcgtcggcatcggcctgccgcagcacagcctcatcaggaaccacgaccacggtggttttgcgagcagcgtccctgttgattcagcgagattctacgccctaaccatcatcagaggtctggtatgggacgccatcagcta

SEQ ID NO: 13940 - DNA, 277 bp, Zea mays
  Clone ID: LIB36-005-Q1-E1-H2
gtccgaccacgcatccgcccacgcgtccgcaaccaagcccgcacgacacgacaccaagtcgaggagctcgagagggcaccaataatggccggcgtgaactccagcgtcgtcgggctcaagcgcgccgcggcagtgccgcaagccgccgccgtcgcatcgccggcgaagcgggtgcagctggccgcgcccgatggccgccgcgccgctctgctcggcctggcggccgtcttcgccgtcacggccactaccgggtcggccaaggccacgatcttcgatg

SEQ ID NO: 13941 - DNA, 359 bp, Zea mays
  Clone ID: LIB36-005-Q1-E1-H3
accacgcatccgcggacgcgtgggcgaggtcaatgccaaactgtcagagacgcccggcctgatcaacacgagcccgtacgaggacgggtggatgatcaaggtgaagccgagcagcccgggggaggcggacgccctgctggacgccgccaagtacaccaagcattgcgaggaggaagacgctcactagacccaggcccgcccagccagcaagcgtggatgcttaccacgacagtgcgcgtttggtggtgttgatccgctcagtcgttctttagtgttgcaaaaactccaccaagcagtccgccaatgccggcgtacctgatgccttccgttttctttgtgctggtaccttattttttttt

SEQ ID NO: 13942 - DNA, 204 bp, Zea mays
  Clone ID: LIB36-005-Q1-E1-H4
cccggcgttcgcgctggtgaacaaggcgaccggggaggccatcaagcactcgctggggcagtcccacccggtgcgcctggtgccctacaagccggacttcctggacgagtcggtgctgtggacggagagccgcgacgtcggcaacagcttccgctgcgtccgcatggtcaacaacatctaactcaacttccaatccctccacgg

SEQ ID NO: 13943 - DNA, 405 bp, Zea mays
  unsure (1)..(405): unsure at all n locations; Clone ID: LIB36-005-Q1-E1-H6
atcgaccttcaagtctcgctacgtagcagtgcaataaaaaaagcagccgcaatggcgagcagcaccatggccctctcctccacggccttcgccggcaaggccgtgaacgtgccgtcgtcgtccgccttcggcgaggcccgcgtgacgatgcgcaagacggcggggaaggccaagccggcggcggcgtccgggagcccgtggtacggccccgaccgcgtgctgtacctgggcccactgtccggcgagccgccgagctacctgacgggcgagttcccgggcgactacggctgggacaccgcggggctgtcggcggacccggagacgttcgccaagaaccgggagctggaggtgatccactnccgctgggccatgctgggcgcgcctcggctgcgtcttcccggagct

SEQ ID NO: 13944 - DNA, 409 bp, Zea mays
  Clone ID: LIB36-005-Q1-E1-H7
acaagaagcctgcccagaagcccaagccctctgcggtgtcgtcctcttctccggacatcagcgacgagctcgccaagtggtacggtcctgacaggaggatctacctgccggatgggctcttggaccgctcggaggtaccggagtacctcaccggagaggtccctggagactatggctacgacccttttggcctgggcaagaagccagaggacttcgccaagtaccaggcctacgagctgatccatgccagatgggccatgctcggtgccgctggcgctgtcatcccagaggcgtgcaacaagttcggcgctaactgcggccccgaggccgtctggttcaagaccggcgccctgctcctggacggcaacaccctcagctatttcggcaacagcatccccatcaacctggt

SEQ ID NO: 13945 - DNA, 89 bp, Zea mays
  Clone ID: LIB36-005-Q1-E1-H8
aatttcaaacttatacttttgcaatcactccgataaaataatgtaaaatttttgtaacttgtaaaatttggtaacaagatttccgctgc

SEQ ID NO: 13946 - DNA, 339 bp, Zea mays
  Clone ID: LIB36-005-Q1-E1-H9
atgtgctgcaagatggagaattcacctggttcactgataaggcagcggtgtccttgctgcagaacaagtagagtcccatggtaaccttggctcgaagccattttagctcataaaataaaagatccaggggcctgcgtgcatagctgcattcgtcctccaggatttcgtgtaacggagactcgatccttttatgtagtgtgtgttgttcggagtaatgttcaaaaactctattggcttccggcttttctgaaacattgctcgttaagtgtttggtttagtacatggttcgctgttccgtgctagacgcatggataggaaaaaaaaagaaaagacaacaca

SEQ ID NO: 13947 - DNA, 364 bp, Zea mays
  Clone ID: LIB36-006-Q1-E1-A1
attcgctcgctcgatcctagcttcccttccaagaagcgcagcgcccatggccatgtccacgcaagcctccgccgccacgcgccacctgctggccgctgcctgggcgccggcggcgaagccgcggcagctgagctcgcagctcgcgctgccgtcgtcgtcctcccgcgggccggccccgctccgcgcgtccaccgaggaggcggtggaggcgcccaaggggttcgtggccccgcagctggaccccagcacgccgtccccgatcttcggcggcagcacgggcgggctgctccgcaaggcgcatgtggaggagttctacgtcatcacgtggacgtcccccaaggagcaagtgttcgagatgcccacc

SEQ ID NO: 13948 - DNA, 387 bp, Zea mays
  Clone ID: LIB36-006-Q1-E1-A10
attcaacatgtctagcaccgccgccgctgattacccaggcgcggcgcagaagaacgacggggccaattggttctactgaagaataaaacttgtagggctcctcgttataagcttcggattcctccatggctctcccaagttgtcaagtcttataggtcttcgttatataggttttgcagtagctgcaagacggctggaacctggaactggtttatacttgtatgtccggccagccataaacctctcttatttgcaaacttaatgttattcctagctttaagttgttagtctcagtgctgtccatgtatatggctgttaaaatgcttgggcttgtttctgtactacctgctgtttggtgtctgaatgaagtgttttcctcagtgggtc

SEQ ID NO: 13949 - DNA, 319 bp, Zea mays
  Clone ID: LIB36-006-Q1-E1-A12
accacgcgtccgcccacgcgtccgtgtcaatgaagccaactggaattggcgattgatgaagacgatactgacgagatgccatgtgtacgacaaggagagatactatgttccgttcgatgagctcgcgcctcaggagtcccaaccaatcaaattccttaggaagttcatgccagattacgcatgatgccatcatcacagctgttgactagttgagattattcagtattgtcggcacaggtggacagtcacattttcagtgattacgcatgtcccaaaattttgactggaatactccatgttacactattattcgtgcagt

SEQ ID NO: 13950 - DNA, 411 bp, Zea mays
  Clone ID: LIB36-006-Q1-E1-A3
cccacgcgtccggtgtttttgtcatcggtttctcaatcattgtttttggcaacaaaattagcacacaaactggaattggcacgtccattgccatagctggtgttgctatgtactcttacattaaggctaagattgaagaggagaaaaggaaaaagagcgcatgactgctgtgaataatattatcgagaccttcctcggacacaacatcgtcgacaatcacgacctacttctatatcttgttttgttttcatcttgagtcagtcggtccattgtttgttcccagtctggtgattaaaagtctgcaaattctgtttgtggaattggcagcgatacaaatttggcttctttaagtaaatccggttgccggtacacaacggtattaattcacctgtaactgaatggaataccgtg

SEQ ID NO: 13951 - DNA, 327 bp, Zea mays
  unsure (1)..(327): unsure at all n locations; Clone ID: LIB36-006-Q1-E1-A9
accgcgtgcgttatcctttgagcagtttgggcgctgagcaagtccagtgagagagggagagcggcgagaggatggctgggatggcgtcgctgcanggcgccatggcgtcgctcctcaatctccgccctaggtgcggcaacggcaaccaccaccaccttctggggcaaccggttcgcaacctattccgcgccgcagcctggggtaaggtttatggtcaagatatgcccaattgaaatgagacttaagaaatgggaccgaaagaagtgtaaaccaaacattcttcctgtgctgcacaagatgcatgttaggatcggggacacggtacag

SEQ ID NO: 13952 - DNA, 381 bp, Zea mays
  Clone ID: LIB36-006-Q1-E1-B10
accacgcatccggggcatgctggcgccccgagcggcggcgcagacgccgaactgcgcggcgaagctggtcccgtgctcgtcgtacatgaacacgacggggacgccgccggacacctgctgcggcccgctcaaggacgccgtcaagaacgacctcaagtgcctctgcgatctctacgccacgccggagatcttcaaggccttcaacatcagcctcgacgaggccctcggcctctccaagcgttgcggcctcagcgacaccaccgccgcctgcaagggcctttcacctacccaatctcctccaggttcaccatcaggtggtggcagtggcagcaactccggtcatcacactctgtcggtcggtttcccaagattcatgagctt

SEQ ID NO: 13953 - DNA, 393 bp, Zea mays
  unsure (1)..(393): unsure at all n locations; Clone ID: LIB36-006-Q1-E1-B11
aggtaacctgccgttcagcgtcgacagtgcgcagctggccgggctcttcgagcaggcgggctccgtcgagatggtcgaggttgtatacgatagaatgactgggcggagccgtggatttggattcgtgacaatgtcttcagctgaagaagccggggctgctgtcgagcaattcaacggttatacatttcaaggaagacctctgagggtgaactgcgggccaccgccacctagagatggatccgcaccaagagcaccaaggggtggtggtggtggcggcggcggcagcagctttgtcgattcanggaacaaggtatacgtggggaaccttgcatggggcgttgacaactcgactctggagaacctattcagtgagcaaggacaggtgctggatgc

SEQ ID NO: 13954 - DNA, 318 bp, Zea mays
  Clone ID: LIB36-006-Q1-E1-B2
cccacgcgtccgcacgcatactgcatacacaacacagagcatcagaaggagctgcgatctgatcgacatggctgccgccaccatggctatcacctcccgcgcgctcatcggcaagccggcggctggcacgagggacgtcttcggcgagggccgcatcaccatgcgcaagaccgccgccaggcccaagccggcggcgtccggcagcccctggtacgggtgccgacggcgtctggtacctgggcccgcggtccggctcgcccccgagctacctgaccggcgagttccccggcgactacgggtgggacaccgcggggctgt

SEQ ID NO: 13955 - DNA, 162 bp, Zea mays
  Clone ID: LIB36-006-Q1-E1-B4
agcgaggttccatgagatcttcagcagatgtcagggtctgggcaacgtttgtttcttgcatggcatctctacacagaatgggacgatttgtatagctatgacgttctatgaaggatccatcgggaacaagatggctcggcttacaggtggaaagctcccttt

SEQ ID NO: 13956 - DNA, 230 bp, Zea mays
  Clone ID: LIB36-006-Q1-E1-B8
ccacgcgtccgaggaaaaaggagaggccgagaagcgctttagcgataagactggtgcacccgtagcggcacggcatggcggccacggcgtactccgtggcgctcctcggcggcgcacgcctgccggtcgccctcctccctcggggcagcagcgtgtgccaccaccagcttcgcctcgaagacgcgccgaggctctccctgcacggtggcaggggcgcttccgaggacacg

SEQ ID NO: 13957 - DNA, 342 bp, Zea mays
  Clone ID: LIB36-006-Q1-E1-B9
acccaaccaagcccgcacgacacgacaccaagtcgaggagctcgagagggcaccaataatggccggcgtgaactccagcgtcgtcgggctcaagcccgccgcggcagtgccgcaggccgccgccgcctcatcgccggcgaagcgggtgcagctggccgcgcccgagggccgccgcgccgctctgctcggcctggcggccgtcttcgccgtcacggccaccaccgggtcggccaaggccacgatcttcgatgagtacctcgagaagagcaaggccaacaaggagctgaacgacaagaagaggctggccaccagtggagccaactttgcgcgcgcctacaccgt

SEQ ID NO: 13958 - DNA, 393 bp, Zea mays
  Clone ID: LIB36-006-Q1-E1-C10
aaccggtccaacactttcacgctcaggcgctcagctctagcaatggctgcctccaccatggcgatctcctccacggcgatggccggtacccccatcaaggtgggctccttcggcgagggccgcatcaccatgcgcaagaccgtgggcaagcccaaggtggcggcgtccggcagcccctggtacggccccgaccgcgtcaagtacctcggccccttctccggcgagcccccgagctacctcaccggcgagttcctcggcgactacggctgggacaccgccgggctgtccgccgaccccgagaccttcgccaagaaccgcgagctggaggtgatccactcccgctgggccatgctcggcgcgctcggctgcgtcttccccgagctgctctcccgc

SEQ ID NO: 13959 - DNA, 375 bp, Zea mays
  Clone ID: LIB36-006-Q1-E1-C11
accacgcgtccggcgcccgacaacttccacttcgtggaggactgggtcaggatcggcagccctgccaagaacaaggtgaagaaagagcacgcatcggtgccgttcgatgaccagtgctccatcctggagaaggaggccgtgaacgtgtcgctccagaacctcaagagctaccccttcgtcaaggaagggctggccggcgggacgctcaagctggttggcgcccactacgacttcgtcaaagggcagttcgtcacatgggagcctccccaggacgccatcgagcgcttgacgagcgggttccagcagttcaaggtcaatgtctatgacaagaagccggagcttttcgggcctctcaagtccggccaggcccccaag

SEQ ID NO: 13960 - DNA, 354 bp, Zea mays
  Clone ID: LIB36-006-Q1-E1-C2
cccacgcgtccgcggacgcgtgggggccgacaagctgcagacctccgacggctgggccaagttcaccgggggattcttcttcggcggcatctccggcgtgctctgggcctactttctcctctacgtgctcgacctcccctacttcttcaagtagaaatcatcacagatgcgtatatatatagctccggccgatcctcctctctagctgcatggtatgtacgtggtgtggtccttgtttcatttcactccagcggtgatcagcgccgtgtataaatgtaattcctctgctttgcacatggatggattgggatgtaacctgttcaacttttttttaccttaatggatgcatcattc

SEQ ID NO: 13961 - DNA, 357 bp, Zea mays
  Clone ID: LIB36-006-Q1-E1-C3
cacaccactccgcgctagctgaggacggtacagcggcacagaggtgcgacgtacgacgacgacgacgcaggcgccacacatggcatcccagctctccgccgccgtgccccggttccacggcctccggggctacgccgccccaggtccgcggtggcagcgctgccgtccgtgagggtgggcaggaagaggtcgtcgtcgcagggcatccgctgcgactacatcggctccgccaccaacctgatcatggtgacgacgacgacgctgatgctgttcgcggggcggttcgggctggcgccgtccgcgaaccgcaaggcgacggcggggctgaagctggaggcgcgcgactccggcctgcag

SEQ ID NO: 13962 - DNA, 274 bp, Zea mays
  Clone ID: LIB36-006-Q1-E1-C5
attgatcctgctaattgggaccctaattatagtgatgagtcactactgcaagaagacaattcactgtcagctgatctaagcatcaacctccactttggagatgcaactgggcaagaccacatctttgccacatctaaccctgtaccgacaaaccagaagaggagatcaattatgtcatgtgtcctcgcaaggagtgagtgcccattccagtgttctcatcaactacggtggctacagccctcaggattatccgcaggcagaatgcccgtcctcg

SEQ ID NO: 13963 - DNA, 345 bp, Zea mays
  Clone ID: LIB36-006-Q1-E1-C6
agccggacaaggtcaaggcggcgcaggacgcgctgctgctgcgcgccaaggccaactccctggcgcagctcggcaagtacacctccgacggcgaggccgccgaggccaaggagggaatgttcgtcaagaactacagctactaattaatcgcccggccatcacccgggataccgccgcccctccgagagatacgtgtgtactgatcatggttaagcacgtactccgatccattcccatcccatgaagccatgataatgatgatatgatccatggaccatgcatggtgctctggtcgatgccgtacgtgtgtccctgatacaatactagtttagtactgatgctagt

SEQ ID NO: 13964 - DNA, 368 bp, Zea mays
  Clone ID: LIB36-006-Q1-E1-C9
accacgcgtccgcgtttcgccgcctccgccgacaccgactgcctacctcagctgccgtcgccatgggcagaaggcctgctagatgctatcgccagatcaagaacaagccgtaccctaagtccaggtactgccgtggtgtccctgaccccaagatcaggatctacgatgtcgggatgaagaggaagggtgttgatgagttcccctactgtgtgcaccttgtctcttgggagaaggagaatgtctccagtgaggcgctcgaggctgcccgcattgcctgcaacaagtacatgaccaagtctgcaggaaaggatgccttccaccttagggtccgggttcacccgttccatgtcctccgtatcaacaagatg

SEQ ID NO: 13965 - DNA, 396 bp, Zea mays
  Clone ID: LIB36-006-Q1-E1-D12
accacgcgtccgggaggtgatccactgccgctgggccatgctcggcgcgctcgggtgcgtgttcccggagctgctcgcccgcaacggcgtcaagttcggcgaggcggtgtggttcaaggcgggctcccagatcttcagcgagggcgggctggactacctcggcaacccgagcctggtccacgcgcagagcatcctggccatctgggcgtgccaggtggtgctcatgggcgccgtcgaggggtaccgcgtcgccggcggcccgctcggagaggtggtcgacccgctgtaccctggcggcagcttcgacccgctcgggctcgccgacgacccggaggcgttcgccgagctcaaggtgaaggagattaagaacgggcgcctcgctatgttctccatgtt

SEQ ID NO: 13966 - DNA, 382 bp, Zea mays
  Clone ID: LIB36-006-Q1-E1-D2
gcgagggcgggcttgactacctcggcaacccgagcctgatccacgcgcagagcatcctggccatctgggcgtgccaggtggtgctcatgggcgccgtcgaggggtaccgcatcgccggtggcccgctcggggaggtggtcgacccgctgtaccccggcggcagcttcgacccgctcgggctcgccgacgacccggaggcgttcgcggagctcaaggtcaaggagatcaagaacggccgcctcgccatgttctccatgttcggcttcttcgtgcaggccatcgtcaccggcaagggtcccgttgagaacctcgccgaccacctcgctgaccctgtcaacaacaacgcctgggcctacgctaccaacttcgtccccggcaaatg

SEQ ID NO: 13967 - DNA, 367 bp, Zea mays
  Clone ID: LIB36-006-Q1-E1-D6
cagacgcgtgggcagcgccagcccgcgccgtggtcagaaggaggtccttcaccgtgcgcgcctctctccgcaaggccaccggcaccgccgccgtggcaatggctgccagcgccctgcttgccggcggtgccatggcccaggaggtgctgctgggcgcaggcgacggcgggctcgtcttcgagcccagccagttcaccgtcaaggccggcgacaccatcacattcaagaacaacgccggcttcccgcacaacgtcgtcttcgacgaagacgacgtgccgagcggcgtcgacgccaccaagatctcgcaggaggagtacctcaacgcgccaggcgagacctactccgtcaccctcaccgtgccgggaac

SEQ ID NO: 13968 - DNA, 382 bp, Zea mays
  Clone ID: LIB36-006-Q1-E1-D7
agactcccagctagcccctcacgcgctcgtcggcgccctgtcgagtcgagcccgcatctcgcccgatcgagagcgagcgcatccgcgcgccggggagagctttgctttcggtggtctgtaacgactcaacgacgacggcaggcggtagataaaggcgcgcgatgtgcgacgcggcgccgaggtacaggggcgtgcggaagcggccgtggggccggttcgcggcggagatccgggacccggcgaagcgcgcgcgcgtctggctcggcaccttcgactcggccgaggccgcggcgcgcgcctacgacgtggccgcgcgggccctgcgcggcccgctcgccaggaccaacttccccgcgctcgccaccacctcccgccgccccgc

SEQ ID NO: 13969 - DNA, 371 bp, Zea mays
  Clone ID: LIB36-006-Q1-E1-D8
ccacgcgtccgcagaaccctaaccaagaatccgacccggcgctagacgattcggacggaaggaagacgagaaggccccgaggcgagcgggggatcaaagaagaagatgaaggtccgtgcggcggtgaagcgcctgtgccggttctgcaaggtggtgaagcgccggggaatcgtcttcgtccaatgcacggccaatgccaagcacaagcagcgccagggcttctccaccatcgccgaagcagccgccgtctcgtgcgttcacctgcctccgccgccgcccgctagcggttccgcctccgccgcagcgttcgcagagacttcgaaagtggcgaggcaagacatgtccatgaacttcaactggcggctgggttt

SEQ ID NO: 13970 - DNA, 385 bp, Zea mays
  Clone ID: LIB36-006-Q1-E1-E1
tcgacgcgcccgtccgcacacgcgaccgatcacacagagctagccacgcatgctccttgaccaaaagctagataggcaaccatgtcggaggagaagcaccaccacctattccaccaccacaagaaggacgaggagcagcccaccggccggcgagtactcagagaccgtggccaccgaggcggtgaccaccggcgacggtgagaacgactacgaggggtacaagaaggagcacaggcacaaccagcacctcggcgaggccggcgctatcggcgctggcgccttccggctgtacgacaagcacgaggggaagaaggaccccgagcacgcgcacaggcacaagatcgaggaggagctccccgccacagcggccgtgggcgccggcggg

SEQ ID NO: 13971 - DNA, 371 bp, Zea mays
  Clone ID: LIB36-006-Q1-E1-E11
aggacgcgtgggtttcaaaataatatctccctgtgcttttcctagccctttgtcatccaaggaaacaataaacaaccggcgcttttacacccccgccaagaacaggagcaataacaacaaggctcctcgcaacaatccattctcatccatggcgaagctcatgaacaagctggtcgattcgttcgagcacgacgagataccggacgtcggctgcgtgcgcgccgtgctggccgagctcgtcctcaccttcctcttcgtcttcaccggcgtctccgccgccatggccgccggatccgacgggaagcccggcgacgctatgccgatggcgacgctggcggcggtggcaatcgcgcacgcgctggccgctggcg

SEQ ID NO: 13972 - DNA, 350 bp, Zea mays
  Clone ID: LIB36-006-Q1-E1-E6
ggttctagtagctcttctggaagtgatacagatgccaaagctgctcaacaaaacagcgtgtcaaaggaaaaaattctacctgtggatggcctgggtcatgaaaaggattcactggacacattaaatttaccagagcaaagtacagaccctgtctctgtttctgcttatggtgagggggggtatgtatctgagaaggtctcccctgagaagcaaatccgagctgcccttctgagaagccgctttgctgatacgattctgaaggctcgcgaaaaggctcttgatcagactaccaaaaaggatcctgagaagcttcgacgcgagagggaggaacttgagaggttacaaagaca

SEQ ID NO: 13973 - DNA, 365 bp, Zea mays
  Clone ID: LIB36-006-Q1-E1-E9
gtcattaagaacaagaacttatcagttaagcaacatgatgatgagatagaggttgaaattgatagcatggatgctgagacactttgggagcttgacaggtttgtgtcgaactacaagaagaacctgagcaagcaaaagagaaaggccgagcgagcgatgccttgccgaacaagatgcaaatttgcgtgcacagaacccaatacaacaaccacaaccaaccccattcccccaagaaccttttggtgaaaaatctccaaaacaagttgtgaaagattcgctggaaggcgagcaactgccagcatctgcaccagaacaaaatggtgagaatagacagaatgcgagtagttcaagcaattcaagcagct

SEQ ID NO: 13974 - DNA, 354 bp, Zea mays
  Clone ID: LIB36-006-Q1-E1-F11
accacgcatccgcatcgagcgacagcagcacatacgcagctagctacgcgcagcaccactgcagcggcgatggcggcctccatgatctcctcgtcagctctggcagtggagcgtcagggcctgccgcctctcggtcgccgcgcctcctccttctccgtcgtctgctccaagaacaacattacgacggacaacccctacgggattgtgggtggcctgaccgtccacgtcgacgccaacgggagaacgggcatcggcaacgtcgtgtatcagttcggcgagcaagtaagcgcgatcgtcgacggatagacgtcaatctacagcgaggatgactggtctcccacctgcgacgtctac

SEQ ID NO: 13975 - DNA, 397 bp, Zea mays
  Clone ID: LIB36-006-Q1-E1-F12
gtccgagcgacaccgcccgcccggaggcgtcgcacctgcacgccgcggcagcagccaagcctctctcgtctcgtgcggcaagcgccacacagacacccgatggcgctcctgctgctgcgcggctgcgccgcgccgccagccgtccacgcggccccggcggggtcccggctgctccctccggcgctgccgcggcggcggctcgtggccgtcgcctcttcggcctcctccgctccgtccggcgaggtggcgtcgtcgtcccaggacggccgcggctaccggaccgtgggcgggcccaacgggcacgccatcgctcccgccacagacaccaagtccaccgccgtcgagaccaccgtccagaaggtgatcttccagttccggttcctggcactcctcgccg

SEQ ID NO: 13976 - DNA, 341 bp, Zea mays
  Clone ID: LIB36-006-Q1-E1-F2
ccaggtccaccacgcgtccggacccccctccctcccacacgaccatggcgtcctggttggtgcccttccggtcctgctgcgtgtggaggctcgccaccgcgctagcgcctttgccgcacaacctctcgaggacccacgcgagctcatcctccgtcatctcccccgctcctccgggcagcttcttcccacctccgccggccgcgccctcctggctcccgtggtgcctctttcgccacgccgctgggccatcgccggtggcgggggcctcggacgagaggcaggagcccatgatggccaatgagagggacccacacggtggggcacatggtggaggtggcggt

SEQ ID NO: 13977 - DNA, 253 bp, Zea mays
  Clone ID: LIB36-006-Q1-E1-F5
tccgggtccaccacacgtccgagcacgcatacacagcacagagtgaggtaagcatccgaaaaaagctgtgatctgatcgacatggccgccgccaccatggctctcacctcccgcgcgctcgtcggcaagccggcgaccagcaccagggacgtcttcggcgacgggcgcatcatgatgcgcaagactgctggcaagcccaagccagcggcgtccggcagcccctgctcccgggccgagggcgtcccgtacctgg

SEQ ID NO: 13978 - DNA, 89 bp, Zea mays
  Clone ID: LIB36-006-Q1-E1-F7
ttccgggtccacccacacgtccgaggacgcgtggggaacgatgtatcctttgaactccgcattataatttttgaagccgttttagccag

SEQ ID NO: 13979 - DNA, 398 bp, Zea mays
  Clone ID: LIB36-006-Q1-E1-F8
cactcctcgccatcacataaaaccagtgcaagcagaagcagcgcaatggcgagcagcaccatggccctctcctccacagccttcgccggcaaggcagtgaacgtgccgtcgtctctcttcggcgaggcccgcgtgacgatgcgcaagacggcggcgaaggcaaagccggcggcgagctccggcagcccgtggtacggccccgaccgcgtgctctacctgggcccgctgtccggcgcgcccccgagctacctgacgggcgagttcccgggcgactacggctgggataccgcggggctgtcggcggacccggagacgttcgccaagaaccgggagctggaggtcatccactcgcgctgggccatgctgggcgcgttgggctgcgtgttcccggagctggt

SEQ ID NO: 13980 - DNA, 391 bp, Zea mays
  Clone ID: LIB36-006-Q1-E1-G12
cgcaagaacatccgcctcaacttcatcactgtccgcaagctcacgagcaaggctgacgcgttcgagtacgcggaccaagtcctggagaagtggtaccccacgatcgaggagggcaacaacaagggcatcgtggtgctcgtcacaagccagaaggagggcgccgtcaccggggggcccgccttcatccaggccgtcggcgaccagattctcgacgccaccgtgtctgagaacctcccagtcctcgcgaccgacgagaagtacaacgaggcgatcttgagcacggcgaagcggctggcggcggcgatcgatgggctgccggacaccggtggcccgtcgttcaaggagaacaagcgggagtccaacttcaagaccaacgaggagaccgaggaga

SEQ ID NO: 13981 - DNA, 298 bp, Zea mays
  Clone ID: LIB36-006-Q1-E1-G3
cacgcctccggaagcacggacgcgaatgaggaggagcagcagcagcaggcggcgccgaggagcggcatcccactcagtgcttgcaaccatgggtaggggattgaagaagcacttgaagaggctcaatgcgcccaagcattggatgctccacaagcttggcggagcttttgctcccaagccatcttctggaccccacaagtccacggagtgccttcctctgatcctcatcatcaagaacagggtcaactttgcgctgaagtaccgtgaagtcctttctatcctgatgccacgccatgta

SEQ ID NO: 13982 - DNA, 407 bp, Zea mays
  Clone ID: LIB36-006-Q1-E1-G6
ggagaaggagctcgccaacgggaggctggccatgctggcgttcctggccttcctgatccagcacaacgtcaccggcaaggggcccttcgacaacctgctgcagcacctgtccgacccatggcacaacaccatcatccagaccctgtcgggttgagtcgacggtccatcaggtcatgtggtccgagctgaaaggccgagactcgaagacagttcgtgtgatgcgttcttaatcgactgagggctaaggaatgtgacgtactggtatatgtacattagttgaagcggaggctataaagggtgtagagattgtttcatcagtatatatcatctgtcccgatgggttttgttttgtgcttttcacggttcatcattgtgggagcacatgtattattagtacaagaactgcg

SEQ ID NO: 13983 - DNA, 416 bp, Zea mays
  Clone ID: LIB36-006-Q1-E1-G8
accacgcgtccggcgtgtgtgagggtggtaaatcttctgtccacaccagtgttcacctctccccttcccaagtttgcccagtccctaggtggtgaccatcgtcagcagttagtccacctcgccgtgaccagaactcccagcacaaggactgaagcttcaagctgaagtggtgactgaagaggaatctactccagtggctgctgatcaagtggaggagccatctaactgggtagcttgtagagggatctagacctcttcactgcaacaaagcgttcgacgacatgaacacgcccatcgcagctagtgagactgacaagcaggcccatgcgtaagtgcaagggtggcatggcacttgcgcggtgtgtggctgcgcacgtggtcccacttgtcgtcgtgcaacgcagtgtaagcgcatg

SEQ ID NO: 13984 - DNA, 396 bp, Zea mays
  Clone ID: LIB36-006-Q1-E1-H10
atatgacaagaagccggagctgttcgagcctctcaagtccggccagagccccaggtacatggtgttcgcctgctccgactcccgcgtgtgcccgtcggtgacactgggcctgcagcccggcgaggcattcaccgtccgcaacatcgcctccatggtcccaccctacgacaagatcaagtacgccggcaccgggtccgccatcgagtacgccgtgtgcgcgctcaaggtgcaggtcatcgtggtcattggccacagctgctgcggtggcatcagggcgctcctctccctcaaggacggcgcgcccgacaacttccacttcgtggaggactgggtcaggatcggcagccctgccaagaacaaggtgaagaaagagcacgcatcggtgccgttcgatga

SEQ ID NO: 13985 - DNA, 290 bp, Zea mays
  Clone ID: LIB36-006-Q1-E1-H11
gacttaacagtggatgctcgccaagcgagtgtcatctagaaaacactatctagtgttgaattccaggtactacttggatgatttgattgctggtgtgacttggccttcatccctgccaccgggatacatggttgagaggggtactgcttccgcaggagaggaccaggaggagtagcgtggctaggcttcgccatgttactcaattttctccgttagttatttccgctgcattaaaaactatggttactgcttttgaaactccgataatgtaatcacttttgatacttctt

SEQ ID NO: 13986 - DNA, 420 bp, Zea mays
  unsure (1)..(420): unsure at all n locations; Clone ID: LIB36-006-Q1-E1-H12
aataagacgacttgtttcattgattcttgaagagatcgagcttcttttgcaccacaaggtcgaggatgtcttgcaactgcggatcaagctgcggctgcggctcaagctgcaagtgcggcaagaagtaccctgacctggaggagacgagcacccccgtgcaggccaccgtcgtcctcggcgtggccccggagaagaaggccgcgcccgagttcgtcgaggccgcggcggagtccggcgaggccgcccacggctgcagctgcggtggcaactgcaagtgcgacccctgcaactgctgatcacatcgatcgacgaccatggatatgattattatctatctagcttgtggtggtggttgaacaataataagcgaggccgagctggctgccatacatangtattgtgtggtgtgtgtgagagaga

SEQ ID NO: 13987 - DNA, 208 bp, Zea mays
  Clone ID: LIB36-006-Q1-E1-H3
ccgggtccaccacgcgtccgcgaccttcacgtctcgctacgtagcagtgcaataaccaaagcagccgcaatggcgagcagcactatgggcctcgcctccacggccttcgccggcaaggccgtgaacgtgccgtcgtcgtccgccttcggcgaggcgcgcgtgacgatgcgcaggacggcggggaagggccatcccgcggcggcgtccg

SEQ ID NO: 13988 - DNA, 355 bp, Zea mays
  Clone ID: LIB36-006-Q1-E1-H7
accgtccgcacacgcgtccgcggacgcgtgggggagcgggcagcagcacacagccccatcgcaatcctagtcgatcttcttcccctcctcaaggaagaaaagaagctgaaccatggggaagagaaagtcagctgctaagccacctcctaagaagcggatggacaagcttgacactgtcttttcctgcccattctgcaaccacgggagtagtgttgagtgccgaattgacatgaagaatcctgattggcgaagcatcctgtagaatctgtcaggaaaacttcagcacaactgttaatgcactcactgagcctattgatatatatagtgaatggattgatgactgtgagcgtgtcaa

SEQ ID NO: 13989 - DNA, 416 bp, Zea mays
  Clone ID: LIB36-007-Q1-E1-A1
ctttccgagacaggcacgcacgacacgcgctcgcacgcagagcaactgcttcgatctctccgtgtccgtcctctactctctagctaaccgcggtcggcccggggaggtggcgatgggcagcgaggacatgctcgtcgagatccacccccgcgagctccgctttctcgttgaggtgaagaagcagagttcatgttgtatccatcttgttaataagtcagatcaatatatcgcattcaaggttaaaacaacttctccaaaaaaatattgtgttcgaccaaatataggagttattcttccattggcatcacgtgattttacagttactatgcaagcgctaaagaatgttccacctgatttgcaaacaaaagacaagtttcttgtgcagaccacagttgttccatttggtacagctgacg

SEQ ID NO: 13990 - DNA, 384 bp, Zea mays
  Clone ID: LIB36-007-Q1-E1-A10
atggacgcctccgcctccaccgtctccggcctcgccggcgcctccctggccagccgcccggcgttctccaccagcttcacgcggggcagccgggtgtcggcgaggaaccccctgatgagcaggaacctggagaggaatggcaggatcacctgcatgacgtttccccgggactggctgcggagggacctgagcgtcatcggcttcgggctcatcggctggatggggccgtccagcgtcccggccatcaacggcaacagcctcacggggctcttcttctccagcatcggccaagagctggcccactttcccacgcccccgcccgtcatctcccagttctggctgtggctagtgacgtggcacctgggcctgttcatcgtgctcacc

SEQ ID NO: 13991 - DNA, 334 bp, Zea mays
  Clone ID: LIB36-007-Q1-E1-A11
gtcgaccacgcgtccgccagactctgcagcgcttcacggccgccacgctggagcacggcatgcacccgccggtctctcccaagcccgagtggcgcaagctcatggacgagatggcggtcgtggccacggaggagtaccgctccgtcgtcgtcaaggagccgcgcttcgtcgagtacttcagatcggctacaccggagaccgagtacgggaggatgaacatcggcagccggccagccaagaggaggcccggcggcggcatcacgaccctgcgcgccatcccctggatcttctcgtggactcagaccaggttccaccttcccgtgtggctgggagt

SEQ ID NO: 13992 - DNA, 418 bp, Zea mays
  Clone ID: LIB36-007-Q1-E1-A12
cggacgcgtgggcggacgcgtggggctctggagcccttcttcagcgcagcggctactcagtttatccttggacagcaagttcccttctctctgtggctttctcttgcccctgtggtcattggtgtttcaatggcatcccttactgagctttcattcaactggactggcttcatcaatgccatgatatcaaacatctcattcacttacaggagcatttattccaagaaagctatgactgacatggatagcaccaacgtgtatgcttacatctcaataatcgctctaattgtttgcattccacctgcattgatctttgaagggcccaagctaatgcagcatggatttagtgatgccattgcaaaagtaggtttgacaaagtttgtcagtgacctattcttggttggactgttcttacatc

SEQ ID NO: 13993 - DNA, 372 bp, Zea mays
  Clone ID: LIB36-007-Q1-E1-A2
gaacacaccaccctggaccattctcctcccatcctggtgaccagaagaaccccagccaaggtttccaagggctgtttgatggcagcaggcccatgtacacgacgaatcaggctcggatgcacgctccacctcctccacacttccacggagccttccctaggaacgcacctcctcctgagttcccagcggggttccggggagcctggccgtccgtgcaggcacctccgatgccggcaccgtcacatccatcgtctttcccgccgtttcagttgaggccaccgccaccatcgcagcatgatatgtctggcgcatgcggcaccaggtggcccggtggcaatcaaatctacaacccttttgcaccaacggctgcgg

SEQ ID NO: 13994 - DNA, 417 bp, Zea mays
  Clone ID: LIB36-007-Q1-E1-A3
cggacgcgtaggcggacgcgtgggcggacgcgtgggcggacgcgtgggtgatgtgtgcgatatggagtaaaatccttggagaattaggtggagaagaaggttaagttcaacactccttaggtgttcgatgatatgctcgaactggtggccgtctaagttcttgctgaaatcgagtcggagcatgatgtggttcgttacacgtgatgcgaaggacaagagccgagttgatcccaaaatgatgctagtgaacgaacctaaggatggatgatctgatagagtgccagaatgggagatgctcaccaagtggtcgtcaattaacagcactaacttagtgttatcccaagttaaaattttgttctgttatggatgctgctaagtgcccgtgggctcaatcttcttatataagtatatcccatc

SEQ ID NO: 13995 - DNA, 450 bp, Zea mays
  unsure (1)..(450): unsure at all n locations; Clone ID: LIB36-007-Q1-E1-A4
cccacgcgtccgccgaacgagcagagcagacccttccccctcaccagctccgggttccagcggcggcggcggcgaagatgatcataccggtgcgctgcttcacctgcggcaaggtgattgggaacaagtgggacctctacctcgacctcctccaggccgactactcggaaggggatgctctggatgctttggaattgttccgctactgctgcaggcgaatgctcatgacccatgttgacctcattgagaagttgctcaactacaacacactggagaagactgagacaagttaagtgagcaagcatatcatgctctgaaagcattactgtttcgcagtatcatatatattgtaggcggtatgttgtttcttctctatcangagaggattgttgtgagtgtgaacttgcttttgctctcgagcattcaaagactgacaagggcatgttgcat

SEQ ID NO: 13996 - DNA, 432 bp, Zea mays
  Clone ID: LIB36-007-Q1-E1-A5
aacgaagtcgtcgagcgctctttccctctctctatacctctctgtctgcgacgcggttggataggctaccgccaggtgccgactgccgaggcccgcaccggcggcgaagagcgcccgccagtcccagcaatggcagcaaggtgtagcctttcctcgtcatccctgtcggtccatggacccctccgccacaataaacccagcaagagactcgctccatgcctgccatcggcgccaagaccacgagccgctgctctgagagcgcgtgctgcgaaacttcctccaggggttgaagcgcgcaaagtgcacccgaagctgagcgagcccttcgtggggttcacccagaccgccggagattctgaactccagggcctgcaggatcggcctcatccgcaccttcactgtggagcgggtgctgaacaacgggattcgtca

SEQ ID NO: 13997 - DNA, 403 bp, Zea mays
  unsure (1)..(403): unsure at all n locations; Clone ID: LIB36-007-Q1-E1-A7
gtaacctggcggcagcttcgacccgctcgggctcgccgacgacccggaggcgttcgccgagctcaaggtgaaggagatcaagaacggccgcctcgccatgttctccatgttcggcttcttcgtgcaggctatcgtcaccggcaagggccccctcgagaacctcgccgaccacatcgccgaccccgtcaacaacaacgcctgggcttacgccaccaacttcgtccccggcaagtgagcgagggcatgatgcttgcatgcgtgtaccgtagacgtaccgtattcctacgtactgcaggttgcaccagtatttgtgaagggagctgtgcgtgggagccagagattgtaccgctagtgtatttttgtatgcacgctgtggagctgatcaatgaaatatgctgtanat

SEQ ID NO: 13998 - DNA, 380 bp, Zea mays
  unsure (1)..(380): unsure at all n locations; Clone ID: LIB36-007-Q1-E1-A9
cccaagcgtccggccatggcctcctcgcgcacaccggctcctcttcctcgcggtgccgcgccgtcgccgccgaggtcgagggcctcaacatcgccaaccacgtcagccagctcatcggcaagacaccaatggtatatctcaacaatgtcgtcaagggctctgtcgccaatgttgctgctaagcttgagattatggagccctgttgtaacgtcaaggacaggatanggtacagtatgataaatgatgctgaacagaagggcttgattactcctggaaagagtgttttagtggaagctacaagtggaaatacacgcattggtcctgcctttaatgctgccttccaaggatataagttgatattaacaatgccttcatcaatg

SEQ ID NO: 13999 - DNA, 270 bp, Zea mays
  Clone ID: LIB36-007-Q1-E1-B1
cggacgcgtgggcggacgcgtgggcggacgcgtggggaaggcagcaaagatgtgtgaagcggcaatgggatgcttgctgtaaggtaatatgtttggcttgctaggcatgctacacgctatttggatgtagcaacgttatcaccagctgtatacgctttttaatcgacaacatttgaataatatgtacataacattatgttgtgctcttcagaaaaaaaagtgtatccccggcaagtgagcgatgggaggattcgtgcgtgcatgtacggt

SEQ ID NO: 14000 - DNA, 401 bp, Zea mays
  unsure (1)..(401): unsure at all n locations; Clone ID: LIB36-007-Q1-E1-B12
cccaagcgtccgtgggatcagaatagacctcatgctggtagcagaggttgggagctgactggtgatgtatccaagggaccaaatgatgtgccggatgctgaacttctggtagctaagaaggatcctgactctgcaataactgctgtttctgattctggtggacaacacaatcttcaacctgaggctgaccaaaaggaaattggacgcttgactgctgaaaactttgaagcgaagaatcatactaaaagttcaaaaagtttggaagctcctcaaggagcacaacttgtgacttctatgctgtcaaagaatagcgtggtcttttgtaaaaactatctatccagaatcagtgtttcacatgatcntgttgagcctgagttgtacanaaggtgtatatccttgct

SEQ ID NO: 14001 - DNA, 355 bp, Zea mays
  Clone ID: LIB36-007-Q1-E1-B3
acggtccttgcgtagcgtcggtatccaggtcgaccacgcgtccggtggggtgatccgcgtgagaagctctgtcaagttatccatgataccccgctgagctgcttggttataggaagcaggggccttggcaagctcaagagggtgcttttgggaagtgtcagcgactatgttgtgaacaatgcaacctgccctgtcaccgtcgtcaagtcaacaagcaccgaaggttgatcttatcgccgagatgcctggatgtgatgttgtaataaagatggttggcctgaataagaacatgcactagtttctagctaattgaaacatgttgaaccaggcaattccaatgtaatactaatagacc

SEQ ID NO: 14002 - DNA, 457 bp, Zea mays
  Clone ID: LIB36-007-Q1-E1-B4
gtcgaccaggcgtccgcccaagcgtacgctgcgtttcagcatcctggggttgtttcatttctcgcattggattgtttccttttctttggagttgcagttcttacagtttctcaagcatcacagatagcaaggaacattacaacaaatgagatggcaaattccatgagatatgcatatctcagaggcccaggtggcagattcaggaacccgtatgatcatgggagtcgcaagaagtgctctgacttcttgttaaatggatacaatgaggacactgaacggctagaccagacattgcacactgatgaggagatgggaatgatacagatgacaagagcggtttcgcagaatggtgacaatcacttagatcatggtaatggcacggagaataattgcgctgattcacatgcaagcccaaaatctcatatccaagtgggttcgcctcagtgttgtgatcaca

SEQ ID NO: 14003 - DNA, 442 bp, Zea mays
  Clone ID: LIB36-007-Q1-E1-B6
ggcctggctcctcgcggtcccggcctcgtgcgccagcctcgccgaggtccgccacgcggtcgcggacgccgtggacgacttcctgcgccatcagctggtcccggaggacgacgccctcgcggccacgccgtcgtcgccttccagcgaagacggcaacacctctgatggcggggagtcatcctctgattcctctccgcccaccggggcctcgccgttcgaatttgatgtgttcaacgacatgagctgggacctgcactacgcgagcttggcgcagggattgcttgtggagccaccgtccgcggtcacggcgttcatggacgaaggcttcgccgatgtgccgctctggagctactagagactgaaaatttccgtttctttccttggcctctggcgcctaattttggcagtgtaaaacggttacttattttggtaatgagatcga

SEQ ID NO: 14004 - DNA, 417 bp, Zea mays
  Clone ID: LIB36-007-Q1-E1-B7
cccaagcgtccgcggacgcgtggcaagaaacacaactgcaaaagcgaggatcggagcactccgatccttaattccttcttggattctcttctactctagagctctgctagaccgatctccagttaagtttcagacacatggagagcaacgcctcgtccaactgcgccaccgtgccgcagccgccgccgtcgacagggaagctgatcacgattctgagcatcgatggtggcggcatccgcggcctcatcccagccaccatcatcgcgcacctcgaggccaagctgcaggagctggacggcccagatgctcggattgccgactacttcgacgtgatcgccgggacgagcaccggcgcccttctcacgtcgatgctggcggccccggaccagaacaacggccgctgttcttcgcaaagga

SEQ ID NO: 14005 - DNA, 451 bp, Zea mays
  unsure (1)..(451): unsure at all n locations; Clone ID: LIB36-007-Q1-E1-B8
cccacgcgtccgcccacgcgtccgattgaaagatggcatctctgtcaaatggaggtactcgattgtagcaaggtaccatggccaagctcttcgatcaggaaagcttacaatgtaaatggttgtgggtggccacagcaagaagctgcttacgaatgtaaaatcaatctcttgacagggaaaactcaccagataagggcacagcttgctgctataggcgctcctattataggggattctgcatacatgactgcagcaatggcagcgatggccaacccaagcataaacccattcggtagagagaggctgagttacaacagtgaagaggagaaagaagccgccgtcgaagcatggattgcctcncacgggaaggaaccaaaatccgtaattgggctgcaagcgtcagagatctcttgggatcacganggcaagcaccattcttacaaggctggag

SEQ ID NO: 14006 - DNA, 417 bp, Zea mays
  Clone ID: LIB36-007-Q1-E1-B9
accacaacccaggaacagagcgaggcgacgccgcggcacctcttctccggtgaagggaaatggcaaccgttccaggggatctgatctggcaggttgtgaggaagaacaactccttccttgtgaagcagttcggcaacggcaatgccaaggtgcagttcaccaaggagccgaacaacctctacaacatccactccttcaaacactcgggtttggcgaacaagaagactgtgacgatccagccagctgcaaaggactcggctgtggtcctctctactaccaagaccaagaagcagaacgcacctgcgaagctcagccacaagtctgtgatgcgcaaggagttccgcaagatggccaaggctgtgaaaaaccaggttagtgacaactactacaagcctgatctgaccaagccagctcttg

SEQ ID NO: 14007 - DNA, 318 bp, Zea mays
  Clone ID: LIB36-007-Q1-E1-C10
cccaagcgtccgcggacgcgtgggggctttaattgagatagcagagcagatgcctacagatgttggacatttgaaaagaattgtgaaatcaaaatatccatatgttgagagcaatcttgagctaattgcttacactgtctggaatgcacttgagtattcttatgccttcgaaggaatagctgagcaactaaagaaggaacggatggaacaggtggcactgaaaagtggtcagaccagtgatgaagtgactcctttggatgctgacattgatacgagtaattttgattcatctgattagtctgcacatgtcaatgttgc

SEQ ID NO: 14008 - DNA, 374 bp, Zea mays
  Clone ID: LIB36-007-Q1-E1-C11
gggccacgttggtgtcggcgtgggaaaggccaaggaggtcacggaggccatcaccaaggccgccatgaacggccggcgcaaccttgtcacagtgccgctaactaagtactccacattcccgcacagagctgatgcggactatggagcagccaaggtgatgctgaggcctgcttgccctggatctggtgtcattgctggtggagccgtgagggttgtgctggagatggctggtgttgaaaatgctctgggcaagcagctgcgcagcaagaaccccctgaacaacgctcgagccactatcaacgcgacgcagatgatgaagcagttcaaggatgtcgctgaggagcgttgtattccaatggaggagctgtggaaat

SEQ ID NO: 14009 - DNA, 448 bp, Zea mays
  Clone ID: LIB36-007-Q1-E1-C3
aacagcgccactgtccagtgcgcgcgtcaagcttgcttagctagccgccatggcctccctcgccgccgtctccgtgaagcccgtggccatcaagggtctcgccggcagctccatctccggaaggaagctcgccgtcgccaggccgtcggcccgctccatccgcaggccccgcgcagccgccgtggtggccaagtacggcgacaagagcgtctactttgacctcgacgacatcggcaacaccaccggacagtgggacctctacggctctgacgcgccctcgtcctacaacccgctacagagcaagttcttcgagacgtgcgcggctccgttcaccaagagaggtctgctgctcaagttcctgctgctgggcggcggctcacttctggcctacgtcagcgcgtcggcgttcacggacctcctgccgatcaagaaaggacctcaggagccg

SEQ ID NO: 14010 - DNA, 454 bp, Zea mays
  unsure (1)..(454): unsure at all n locations; Clone ID: LIB36-007-Q1-E1-C4
gtcgatccaattgtcacttgctctccctccaacaagctaattaaggccggtcgtcatccctcttctagctcgttttattatccatggcggaggagaagcaccaccaccaccacctgttccaccataagaaggacgaggagcaggaggagcagctcgccggcggcgggtacggcgagtccgccgagtacacggatgccacggtgacggaggtggtgtccacgggcgagaacgagtacgacgagtacaaggaggagaagcagcataagcacaagcagcacctcggcgaggccggcgccatcgccgccggcgccttcgcactctacgagaagcacgaggcatagaaggacccggagcacgcgcaccgccacaagatcgangaggaggtcgcggcggcagcggccgtcggctccggcggcttcgccttccacgagcaccacgagaagaagaatgacca

SEQ ID NO: 14011 - DNA, 118 bp, Zea mays
  Clone ID: LIB36-007-Q1-E1-C5
aacccaatcgtcagctgagtagcatggacttgcgcgactgctcatcacgtcatcctcatcctctcttctcgcgtcggacgcgtcggtagcaacggtcgctagacgcagatgaatcgca

SEQ ID NO: 14012 - DNA, 365 bp, Zea mays
  Clone ID: LIB36-007-Q1-E1-C6
acggcgtctgcgtggacgccacggaggacgagctcttccgcctcaacaccaaggaggggaagcacaccgtgaagcgctagagcgttaagattcagacacagcgcttatccctcgtggggccgttcgtgccggacaccgtgccgatgttggacatgctgcgtgcgctctagtccaacagggagatgatccgtgctctgcaggagtctctcgcgagcgagctcgcagcccggatgagcgccatgatcagctccaccgagctcagccatcgagcacctgcaagaaccccgagaacgcctacgtgctgaaggaccaggccaagatgatcggcgacacgctcgagattctcgacggtgtcaacaccatca

SEQ ID NO: 14013 - DNA, 437 bp, Zea mays
  unsure (1)..(437): unsure at all n locations; Clone ID: LIB36-007-Q1-E1-C7
ctcacaaaggtgccctctaatcctggagccggtgacgtactaatgactttccttgggtctgtgatcatatcatttgcattctcgatcttcaagcagagaaagcttgtgaagaggcacgcaacagagattttcacatcaattgccatcgcgtcgacattctctctgtactcaactgctatcatanggcgcctgattgggctagagccatcgttaaccatatcaatactgccaaggtgtattactctggcgctggctttgagcatagtgtctttctttgaaggtgtaaactcttcggtaactgctgtcgtggttgtccttaccgggctcatcggtgcgaactttgtgctagcagccatggagaaacttggtctgaacgaacccatctccagangagtagggacagcttccagcgctcaaagactgggaacagcagcact

SEQ ID NO: 14014 - DNA, 265 bp, Zea mays
  Clone ID: LIB36-007-Q1-E1-C8
agaagcagagcctcaaggagctcaccggcaagctcttcagcaccatcgacgatcttgaccatgccgcaaagatcaagagcaccccggaggccgagaaatacttcgcagcaaccaaagatgcgctcggcgacgtcctcgccaagctagcctagatggaagctaatagatgggttaacgatggccacgtaatttcggacttgtgtttgttcatatggagccggcaaatgtaccgtttcctgttcatattatatcacgagttcttgac

SEQ ID NO: 14015 - DNA, 416 bp, Zea mays
  Clone ID: LIB36-007-Q1-E1-D1
gaggtgcaatattatcacaggtacgagtgtttcacataccagtcatgtttccttctttctttggatcatttgtacatgcaacatgtactttttctaaagggtttgacatagagaacatcttgtttgactgcgagaattagtggctgcggctgatgccacaacttattatgttgtagtaagtactataaatggacaacgataagggtattaggtgaagaataaatggttgtaggttgctgcgatctactctcataagttactatagcattactgtacaattgtacatacaacaagagcagctgaaagtagctacaatgaatgcagacagtatctagaaaatttaaaactattttgatagccccttttttgcacaactagcagatcatattccattcttgactagcagcacaactagc

SEQ ID NO: 14016 - DNA, 386 bp, Zea mays
  Clone ID: LIB36-007-Q1-E1-D11
ttttatttatttttttttttgaacaaaaatgaggcagacattatggagaacaaaactttgacgatgaacaaattaaaacaaacccctatttgtgttggagagaaaaactatatgtacaaggtatgtacgggcactaaaaaccaatgtcagattgcctatgtaagcttcggttgggtgatcctctgtggcatggagcacatgcaaccacaccagaagcagtaagtcaccacattatttaccttgcagttccatccaccagcaatggccaaccgcagtttattgcatcttcatcaacgaatttgactggttaaggaatggggagaaaggggaaggggtccattactagaatttaaacttcatcgtttcaactatgaatgcctttacat

SEQ ID NO: 14017 - DNA, 341 bp, Zea mays
  Clone ID: LIB36-007-Q1-E1-D12
gtcactcttccaccttccaccacaagcgccgccgcagccggtgcctgctccttcccgatccccgaggcaaagctgcgactccgcaaccgccgccatggcgttcgagaagatcaaggtctccaacccaatcgtcgagatggacggtgatgagatgaccagggtattctggcagtctatcaaggacaagcttatcctcccatttctggacctggacatcaagtactatgatttggggatactgcaccgtgaagcaactgaagacaaggtcacagtggacgctgcagagggcactctcaagtacaacgtggccattaagtgtgcgaccattaacccagatgaaa

SEQ ID NO: 14018 - DNA, 387 bp, Zea mays
  Clone ID: LIB36-007-Q1-E1-D5
cgataggcagggacagcgacgagtgctcgccgccggggaaggaggaggaaggggagggggaggtgcagagcgcgtacgagggaggaggacggggcagcctcgctgggttggaggcattggaggaggcgctgcctattcggcgcagcatatccaaattctacaatggtaaatccaaatcatttgtgtgcctgaaagaagctataacattttcaggctctgcaagagacattactaagtcagagaatgcatactccatagaacggaagaatctctttgcctacatcatcatgtatggaaattcacatgaaccacgggcagctcaagtttatgaaactgctgcccctaagaggcatgctagtttgagtagaaactctttgatgactttgg

SEQ ID NO: 14019 - DNA, 425 bp, Zea mays
  Clone ID: LIB36-007-Q1-E1-D6
cacacagcaatccacacaagcacttcgacgtcacacgggcgctgcacacagacacaccaagcgtcggcaccaatggcttactaccaggaggtggactactgctcggaggaggtgaggtcggtggccccggccggcttcggccgccacggcggcggcgtccagcagcacgtcgtcaaggagaagttcgaggaggtcgacacggtcgcacgcgccggcgccaaccaccaccaccaccatggtcaccacggcggccacggcttcgtggtgcgcgagaccagggtcgaggaggacatcaacacctgcaccggcgaggtccacgagcgcagggagagcttcctcgccagggctaactgagcagcccgggcggccggcatccacgcccgttcgtgcctgcctgcgtgccttaggtatgtctgtgattgtgc

SEQ ID NO: 14020 - DNA, 446 bp, Zea mays
  Clone ID: LIB36-007-Q1-E1-D7
acgacgacgacgactggtcactacgcttcaagtggtcgagaccgtcgaagctgagcccgagaagctttgcgacgctggaatggaccgttcctggagacgccccgtcgggcgtttataggttgaggcattttggtgcctccaaaccactgattgggtccatcaaacattttacagggacctctcgggcgttcgcagtgcgttaggttgcacaccgttgcgttgcgttcgacggcacacctgtcagagaatcgacaccgggtcatatatttactttgcatacctgccacagtatatggacatgttttccctatagtttttacatgctcctgatattaataacgctgtccatcgcccgttctgtttggtcatgacaaatacccaaatcgccatatagctacagactcgatgtgtgtgaaatttctatatattaaagcaggaaagaaatc

SEQ ID NO: 14021 - DNA, 108 bp, Zea mays
  Clone ID: LIB36-007-Q1-E1-D8
cgcgtccatctaattctgccaccgctgacgtcgtcttcgtccgtcccagatctgagagcggggaggaagaaacagcgatcgacggcgtccaactatctggacactacg

SEQ ID NO: 14022 - DNA, 473 bp, Zea mays
  Clone ID: LIB36-007-Q1-E1-E1
cgtcggtatcagggtcgaccaggcgtccgcaagaacgcagtggacgaagttgtggtggcggacgagaagaactgggacgggttggtgatggcgtgcgagacgccggtgctggtggagttctgggcgccgtggtgcgggccgtgccggatgatcgcgccggtgatcgacgagctggccaaggactacgccggcaagatcacgtgctgcaaggtgaacacggacgacagccccaacgtggcgtccacctacggcatccgcagcatcgccaccgtgctcatcttcaagggcggcgagaagaaggagagcgtcatcggcgccgtcccaaagtccacgctcaccaccctcatcgacaagtacatcggtagctcatgagcatgccatgcatgcatgcatcgacgactagacacatatgtgtatctctagtagcctttgcataccggatatgatcaattcaagcagccagccgtctgcta

SEQ ID NO: 14023 - DNA, 208 bp, Zea mays
  Clone ID: LIB36-007-Q1-E1-E10
aaatcacaaggatcaaagaaagctacaaggatattcgttgctcgaattccgcaatcggtggatgagtcgatgtttcgtagacattttgaagcttttggggaaattcttgatctttacatgggaaaggaacatggttcaaaagggcatcgtggaattgggtttatcacgttgcagagtgcagagtctgtggacgacgtcaggcaagagt

SEQ ID NO: 14024 - DNA, 378 bp, Zea mays
  Clone ID: LIB36-007-Q1-E1-E11
cggaagcgtgggggtcgccggcgcggcggccgagctcctgcacgcggcgtccgcgtacggtaagctcgacgacaagccggccgggcagtacgtcgagaaggccgaggggtacttgaaggagttcagcgcgggcgcgggacacgccaccgagcaggagcagcctgcggcggcagcaggcgacgacgcggcgcccaagccaccggcgccggaggcgcccaaggagccggcggcggtgcctgcgccggccgcggaggaaggcagcaagtcgtcggagggcttcggcctcggcgacgtcatgaagggcgccgagcagctggtgggagggaagcagcagggcggcggggaggagagcgcccgcggccgtgggttgtttaagat

SEQ ID NO: 14025 - DNA, 315 bp, Zea mays
  Clone ID: LIB36-007-Q1-E1-E12
cccaagcgtccgagagggaagagcaccaaggaccttcggcgcccgttcaggatccacatcttcccgagcgagttcttggttgacctcttcctcttcggaccacctccaaggcttttggtgtagcttgccactctcaccaatcaagttttcatgtctgatctcgacattcagatcccaactgccttcgattccttcgctgaggccaatgctggggactctggtgcggcagcagggtcaaaggactacgtacacgtgcgcatccagcagcgtaatggtcgcaagagcctgactaccgttccagggattgaagaagga

SEQ ID NO: 14026 - DNA, 415 bp, Zea mays
  Clone ID: LIB36-007-Q1-E1-E3
gtcgaccacgcgtccgcgacattgtttcagtcagccttgtccaaatttgggctttcttgatcctgagtattttgtctgagcgattcactggtccacaatttttttccggcgttcacagttttgcccccactctgccgcggtgccgcctaagcttgtccagtacttgatcaatttgttggagaatcagcgtagaaggtgcgattagagggcaatatattattatcactaaattcagcaagagagcaatggagttttgcggagtaaaatcttatttgtattaattgggtgaactgtgcatttgtatatgactacatgtcatctagataaatagctaggttatttaggattgtgctagtgtgatgccttgacttcttctgaagggccttctttttcttgaaggatgtagaaacaacac

SEQ ID NO: 14027 - DNA, 187 bp, Zea mays
  Clone ID: LIB36-007-Q1-E1-E4
gtcgacccgagcgtccgcccaagcgtaaggtgggacatcaaccaagcaaagccaaattctacctggatgattcattcgaagtggtcactattctgaccgcagtggcagatgccacatgtcctgaactggagactgattcggcggatgaatctgtcgcatatatctcatcacttggtattggtcacga

SEQ ID NO: 14028 - DNA, 426 bp, Zea mays
  Clone ID: LIB36-007-Q1-E1-E8
agctatggtcgtagttatgactcttcctgggctaatactggtgatgggtttggcaccggtggactctatggtgctaggacaggctatggtggcagtggcggcagtggtgctgctggtcgttaccatccatatggaagatagaaaatctccagtgctgctgtttgctagagaagcttgcagaagatgaattctagatgtgtgctcaagagatcatctgcatctaaaagatgcactgaagttcaatatgctcagttttctgtattaggaagtactgttagatcaacttgtagaaatttaaacctttgttttggtatttggaattggaatttaagcatatttgataagcgtatgcacttttatagatagaaaatctagtgacccgtcaaaactagctgccagtacaagcatgagtgaatctttgttagt

SEQ ID NO: 14029 - DNA, 447 bp, Zea mays
  Clone ID: LIB36-007-Q1-E1-F1
caacgccgacggcatcatcgaggagtccttctggccgggcaagtacgccgtcgagcttagctccgtggcgtacggcgcgacgtggcagttcgacacggaggcgctgcccaacgacctcgtcaagcgcgggctggccgtgcgcggggaggacggggagctggagctcaccatcaaggactacccctacgcccacgacgggctcctggtctgggactccatcaagcagtgggcgtccgagtacgtcaacgtctactacaagtccgacgaggccgtggccgccgaccccgagctgagggcgttctgggacgaagtgcgcaacgtggggcacggcgacaagaaggacgagccgtggtggcccgtgctggacacccgcgacagcctggtggagacgctgaccaccatcatgtgggtccaccccggccaccactcggccgtcaactttcggca

SEQ ID NO: 14030 - DNA, 314 bp, Zea mays
  Clone ID: LIB36-007-Q1-E1-F10
cccaagcgtccggtaacgaacgacgcagcccaacccgttcccaccaaaccagcggcaccacccatggcttcggcggcggcgagatccggtctccggtcgctggcggtgcgcgccgccccggtgaggcgccgcatgtcctcctccgtccacgacgacgcctatgagacggccaagtgggagaagatcacctacgccgggatcgtgacctgcaccctcctggcggcgtacaacctgtccaagggcgacccccacttcgatgagccgccggcatacccctatctgcccctccgccacaaggagtgcccaggggggcc

SEQ ID NO: 14031 - DNA, 447 bp, Zea mays
  Clone ID: LIB36-007-Q1-E1-F4
cggacgcgtgggctcagctttaatgttggtcgaagtgagaaatgtcaggcagcaagagaagaaaagatgcacatattgccatgggactgggtacttgccatgtgctcgctgttctgctagtgggatgttattgaacacaaagcagttttcattattggggcataatatgtggtcaatgaaaggaaggtgtcagaattgttctggagctggaaaggtgatgtgtccgacgtgcttgtgcacaggaatggcgatggcaagtgagcatgatccacggattgacccttttgattagtttgatatgacaatacgctttttgtctgtttcgtggaaaatatgttgccgataacagcaataaactcatgtttgtatgtacgttatgtttgttactacgtgatcacttgagaggagttgagtgcaacccttgtccaaaagaggacactacaaatg

SEQ ID NO: 14032 - DNA, 207 bp, Zea mays
  Clone ID: LIB36-007-Q1-E1-F9
gtcggatatcagggtcgactacgcgtccgcccaagcgtacgcccacgcgtccgggtggatctccacctacatgttccgggtggccaacaaggacatgacctacgcgcaccagctcagggactacgagaagcacgtcatggagaaacggctggagagcttgtcggatgctgagctgcaagctctgctcgagcaagttgaggacgagaa

SEQ ID NO: 14033 - DNA, 157 bp, Zea mays
  Clone ID: LIB36-007-Q1-E1-G10
ggtcgaccacgcgtccgaacaacatttctgtgctgttgtttttagcacttagcagtgtaccatgacttgaatagttcatatgactgcctttagatattgactgcaagctgctgctgaagcgttgtcccttctgcggggccgttccaaattttagttt

SEQ ID NO: 14034 - DNA, 446 bp, Zea mays
  Clone ID: LIB36-007-Q1-E1-G3
cccacacgtccgcccacgcgtccgcccacgcgtccgcccacgcgtccgtgctacgagctgcgctgcgacaacaacgggcagtcgtgcctgccgggcaccatcaccgtcacggccaccaacttctgcccgcccaactacggcctccccagcgacgacggcggctggtgcaacccgccgcgcccgcacttcgacatggcccagccggccttcctccagatcgcgcagtaccgcgccggcatcgtgcccgtcgcctacaggagggtgccgtgcgtgaagaagggcgggatcaggttcaccatcaacggccactcctacttcaacctggtgctggtgaccaacgtggccggcgccggggacgtgcagtccgtgtccatcaagggctccagcaccgggtggcagcccatgtcccgcaactggggccagaactggcagagcaactcgctcct

SEQ ID NO: 14035 - DNA, 174 bp, Zea mays
  Clone ID: LIB36-007-Q1-E1-G4
tcggtatctaggtcgaccggcgtccgggggtcgaagagctatcaagaaggctcgtggcctagatcagtggccttcattgcactttggagggtgcgctggtttaccatctcccacggggagagtggacgtcataatttgtggtagagggggtacgcgttcgcgcggcccctgttg

SEQ ID NO: 14036 - DNA, 438 bp, Zea mays
  Clone ID: LIB36-007-Q1-E1-H1
cccacgcgtccgcagaatatgcaaggtattgtgggatcgaggcactagaaccattgggaatatatcttcctggtgacataaactacccaggaggacccctttttgatcccttgggcctgtccaaggatcccgtggcatttgaagatctcaaggtgaaagaaatcaagaacggtcgccttgcgatggtagcatggtttggattttacatccaggcggctgtcacaggcaagggccctgtacagaacctggttgaacacttgtccgacccactaaataacaatatattgtcctccttccactaaatgaaaatatgcaagagtggcacgaaccatagcaacgggtgtatattgtattagcgtttacagttttacactaatgggttctgaaaattggctattatatttatttagatagacatttaacggtgattagtgatct

SEQ ID NO: 14037 - DNA, 60 bp, Zea mays
  Clone ID: LIB36-007-Q1-E1-H10
cttaagatacgctcactcgatcttagcttcgcttccatgaagcgcaacgcccatgggtat

SEQ ID NO: 14038 - DNA, 295 bp, Zea mays
  Clone ID: LIB36-007-Q1-E1-H8
ggatccggatgctacttcatattcatccgattacagcgactaagaaagcagaaataagggaaccttatcccagattcctccctcggcatggaatgcatgtagtaccgagtaggcattcccccccgttgtgagccaaaagggagcttagatgcttaggttcgaaggagcgaggaactgttttttaggcaccgcaggttttaatagaatttctgacgcattcgacgaagtgtttggttgtaccgtggtagttgtgttactggggaattccccgagttattatacaatgtgttaagac

SEQ ID NO: 14039 - DNA, 382 bp, Zea mays
  Clone ID: LIB36-007-Q1-E1-H9
cggacgcgtgggtgacaaggccgaggcaaagaagagcgagaagcccaaggacgccggtaaggcggcggagccagccgccgtgacgacggagaggtcgctgcctgcgccgccggcgccggcgccaatgcccgcgtacgagcaggagttccgccacccatactacgccccgcagccggtggtgagctaccacgcgtcgcagccgagctcgagcgtgtcgtacacgtacttcgcgccgcagacgcagccggcgtactccatgcaacaggcacagccgcacccacaggccgcgggctcctactccgtgcagccgacaccgccggtgtactactccgcgcaggagctgcagccgcagcagccggcgaagcagtggtcgccgtcgtac

SEQ ID NO: 14040 - DNA, 254 bp, Zea mays
  Clone ID: LIB36-008-Q1-E1-A10
acccaagcgttcgtagaatatcaagctaaatatccactcccgtcgtcctggactcgcagttcatctacgacccacacgacccagcatggcgatgttcctgagaagctcaccggtgctcctcgctcttcacatcaccaggtcgctcatctccagcgcgctgccccggcacccggtaattgcggagatgcacagtctctgtatcgatgcacaccgaatgcatcgagccgtgcactctctgcgagcgcaaccacaac

SEQ ID NO: 14041 - DNA, 342 bp, Zea mays
  Clone ID: LIB36-008-Q1-E1-A11
aaagaagggtctccacggaggcgtcgtcgtgctccgcgcggccgtgctcaccgccgtcctcggcttcgtcgccgctgccgggttcatctcaaacgacgcgctgctggagcgcgggcacgacaccaccggccggagcctgctgcaggccacgaaagattgcccggtgagcttcgagggcgccaactacacggtgatcacgagccggtgtaagggcccgctgtaccagccgactctgtgctgcggcgcgctcaaggacttcgcgtggccttactccagctacatcaacgacgttagcaccaactgcgccgctaccatgttcagcggtacaaatggttggcaagc

SEQ ID NO: 14042 - DNA, 218 bp, Zea mays
  Clone ID: LIB36-008-Q1-E1-A12
gtcatcccacgcgtcgtgcccgacaagccacgctcagcggaagcaacaatggtgatgacctcggctaacggacggaggaaccgcaggcctgtaggcactgacgccgcagagacgccctcgaccccgtcctgccggatgacgccttgctgcaccaacacgtccacctgaggccccatgaccatctgtgcgaagtggacggcctggaacgcacgcctcgc

SEQ ID NO: 14043 - DNA, 376 bp, Zea mays
  Clone ID: LIB36-008-Q1-E1-A2
gatgcagatctttgtgaagactctgacggggaagactatcactttggaggtggagtcctcggacaccatcgacaatgtgaaggccaagatccaggacaaggagggcatccccccggaccagcagcggctcatcttcgccggcaagcagctcgaggacggtcgcacccttgccgactacaacatccagaaggagtccaccctccacctggtgctccgcctccgcggcggcgccaagaagcgtaagaagaagacgtacaccaagcccaagaagatcaagcacaagcacaagaaggtgaagctctccgtgctgcagttctataacgtggacgacaccactagcaaggtgacccgcctccgcaaatgagtgccccaaact

SEQ ID NO: 14044 - DNA, 324 bp, Zea mays
  Clone ID: LIB36-008-Q1-E1-A4
ggcagcagcacaagcaagaaccacacctcctcccttcgcctgtgatcatgtcgtcttgctgcggcggcaagtgcgggtgcggctccagctgctcctgcggcagcggatgcaacggctgcggtatgtaccctgacgtggagaccgccgccaccagcagcgtcaagaccacggtcctcgccgcgccgaccaccaaggccagcgccggcggcttcgaggcgggcaccgagggcggcggctgcgactgcaacacctgcaagtgcggcaccagctgccgctgctcctgctgcagctgcaactgagctgggccgggccggcgatggcgca

SEQ ID NO: 14045 - DNA, 402 bp, Zea mays
  Clone ID: LIB36-008-Q1-E1-A5
cccacgcgtccgcccacgcgtccgcccacgcgtccgcccacgcgtccgattcgggaggcggaggagggagcggcgcgcacaaggcggcctcgggctccgcgccctcgccggcgcctaaccccacggcgatgctctcggcgctcatgagcaagcgcgccaagctccaggaggagctccgctccatcgagcgccaggtttatgatatggagaccacctacctacaggagactaatcaatttggaagtgtgctgaagggtttcgaatcttttttgtcatcctcaaaaaacacctctaaccttaagcgctctcggaaatttcaggctgacgagaggttattctctctgtcatctgttacttctccagcggttgatgaacatttggctggacgagatgatggaagag

SEQ ID NO: 14046 - DNA, 111 bp, Zea mays
  Clone ID: LIB36-008-Q1-E1-A9
ccggggaaccgaattgaacaccataacaacaacagttttcctgtctaatgttgttgtaaatcgcgactgctacctatccttcctgctgagcctatatatgtttctattgct

SEQ ID NO: 14047 - DNA, 173 bp, Zea mays
  Clone ID: LIB36-008-Q1-E1-B3
ggcctctgggaaacctcaacttacagcccgcaggggcgctatcagacgagcagagcaggctagcagcactgcagcagtacaccagtaccgcagcggcgcagcgcaggtccgcagccggagatccccggcccgcgggcaggggcggtaggatcgccgcgcgcatagctgccagg

SEQ ID NO: 14048 - DNA, 307 bp, Zea mays
  Clone ID: LIB36-008-Q1-E1-B6
cccacgcgtccggtgggagcagcgcgtgccctcgccgcgcggcccgaggcgtggatcgacttccccgtgctcgccctagatgagggttctgtaatttctggtatccaaagagatgatatggaatccattgaaaaacttgtcccagatttagcatctctacggggtaggctctgtccttcttacatggatgaagacatattctggaagatttactttaggttgcttgagtcaaacataagtgagcatagttctgaggaagatgtcctgagcgtgccagattctggtcatcacaccaatgagagagagt

SEQ ID NO: 14049 - DNA, 369 bp, Zea mays
  Clone ID: LIB36-008-Q1-E1-C10
gtgaggttcaaggccggctcccagatcttcagcgagggtggactggactacctcgggaacccgagcctcatccacgcgcagagcatcctcgccatctgggcctgccaggtcgtgctcatgggcgccgtcgagggctaccgcatcgccggcggcccgctcggcgaggtcgtcgacccgctctatcgcggcggcagcttcgacccgctcggcctcgccgacgatcccgaggccttcgctgagctcaaggtgaaggagctcaagaacgggcgcctcgccatgttctccatgttcggattcttcgtccaggccatcctcaccgggaagggcccgctcgagaagctcgctgaccacatttgcgaccccgtcaac

SEQ ID NO: 14050 - DNA, 359 bp, Zea mays
  Clone ID: LIB36-008-Q1-E1-C11
gtaaactgactccggcggcggcggcggcggcgatcatggccgcgcagagggagaagtccgcggacgtggcggtcgccccagcacacggcgctgcggtttcggggtctccttcttcctcatccggaggcccggcagtgtcggcgtcctcgtcgggagaccggtggagcgccgcgatcggtaaccttggggagctcggcgccaacgtggacgcgctgcagaagctgctcgggcggaaagccgtcttcgtagacgatgacatcttccccaaggcctccctcgctgccgaccaggcccgcaccattaaggttcttgaccagagggtgcagtctctggaacgtgaactcgatgccgccatttca

SEQ ID NO: 14051 - DNA, 310 bp, Zea mays
  Clone ID: LIB36-008-Q1-E1-C6
cggacgcgtgggcaatctcccctacaccagaaaaatcaccagttcttcggtccgcgtcagagaggccgcggcgatgtctgggcgcggcaagggcggcaagggtctgggaaagggcggcgcgaagcgccaccggaaggtgctccgcgacaacatccagggcatcagcaagccggcgatccggaggctggctaggaggggtggcgtgaagcgcatctcggggctcatctacgaggagacccgcggcgtgctcaagatcgttcccgacaacgtcctccgcgagcccgtcacctagagcgagcacgcgcgcccc

SEQ ID NO: 14052 - DNA, 208 bp, Zea mays
  Clone ID: LIB36-008-Q1-E1-C8
ccaacatcgaccttcaagtctcgctacgtatcattgcaacaagaaaagcagccgcagtggcgagcagcaccatggccctctcctccacggccggtcgccggcaaggccgtgaacgtgccgtcgtcgtccgccttcggcgaggctcgcgtgacgatgcgcaggacggcggggaacgccaagcgggctgcggcgtccgggaggcccgtgg

SEQ ID NO: 14053 - DNA, 405 bp, Zea mays
  Clone ID: LIB36-008-Q1-E1-D1
cacacagttccccttcttcggcgcgctgctccgcccgctggcccccgcggctcggctcttccactcatcgccgctcacgcccttcctcctcttcctcacgctctacttcgccgttgtgcggaaccagcaggcgttctcccgcttcgtccgcttcaacgcgatgcaggccgtcgtgctcgacggtgctgctcatcgttcccgacgtgctcgcgcagtcgttcgcgccctccggtggggttgggttcgagatcttcgagagcatggagagcacggtcttcctcgtcctgctcgtcgccttggtgtacggcgggtgcgcctgcgtgctcgggaagaggagaggtctgcgccattgtcgcagatgcaggggagcggcaggtgatgtgactacaagtcgtttcctgcgga

SEQ ID NO: 14054 - DNA, 396 bp, Zea mays
  Clone ID: LIB36-008-Q1-E1-D11
ccgggctcgaccacgcgtccagctgatcccgtccaagtggaaccccagcaaggagcgggagttccccgggcaggtgctccgctacgaggacaacttcgacgccaacagcaacgtgtccgtcatcatccagcccacgtccaagaagagcatcgccgactacggctctcccgaggagttcctctcccaggtcgactacctgctcggcaggcaggcctacggcggcaagaccgactccgagggctggttcgagaccggcgccgtggccaccgccaacgtcctggagagctcgacccccgtgatcgagggcaagcagtaccacgccgtgtccgtgctcacgaggacggcggacggcgacgagggcgggaggcaccagctcatcgcggcgaccgtcgccga

SEQ ID NO: 14055 - DNA, 332 bp, Zea mays
  Clone ID: LIB36-008-Q1-E1-D2
ccaggagccaagctgctcggctcctggggcgtggacctccccatcaggccgctgcacacgctccacctctactggcgcgtgaagcccggccaggagcagactgtctcgacgagcgccgggttcccgaccttctccagctacggcgacccgcccgtgtacggcgcgccgtcgctggagctcccggggctcatcaagatcagctgcattagatcttagagtacactgttttacacaatttggagttgttactactatcaagctttagactttagactttggagtacactgtttttacactgtagtaagctttagccttttatgctacagtgtgt

SEQ ID NO: 14056 - DNA, 278 bp, Zea mays
  Clone ID: LIB36-008-Q1-E1-D3
gcaacagacagcatctcagtccactactccgtcatcgtgccatccaccagcagcagtgaaagcatatggctcgccgtgccagcctgctcctgcgccgcggcgctcgtcgtcgccgtcgctgccgcggcggtgcagccgaagtgcgagcgcatccagtgccagctgtacgtggtggtggacagcgccaacgggttctagatacggcggtagaccgacgccatgtgaattacgacggggctcatcgaggagatctacttcgtcgccagcaacgtcgcagc

SEQ ID NO: 14057 - DNA, 324 bp, Zea mays
  Clone ID: LIB36-008-Q1-E1-D9
ccgggtcgaccacgcgtcagctgagtttagtgacagatacgaggaatttgagaagttgaacactgaggttcttggtgtttccattgacagtgtgttctcccaccttgcatgggtgcagacagacaggaagtcgggtgggctcggcgatcttaaatacccacttgtttctgatgtgaccaaatcaatttcaaaggcctttggtgttctgatccctgaccagggtattgctttgagaggactgttcatcattgacaacgagggagtgattcagcactctaccattaacaaccttgccattggtcgtagtgtggatgagaccatgac

SEQ ID NO: 14058 - DNA, 233 bp, Zea mays
  Clone ID: LIB36-008-Q1-E1-E1
tccgtgctgaagcaggtggactacctgctgcgcaacggctggataccctgcctcgagttcagcacggtcggcttcgtgtaccgcgagaactccacctccccgtgctactacgactgccgctactggaccatgtggaagctgcccatgttcggctgcaacgactccacccaggtgtacacggagctccaggaggcgatcaagacctacccggaggccttccaccgcgtcatcgg

SEQ ID NO: 14059 - DNA, 367 bp, Zea mays
  Clone ID: LIB36-008-Q1-E1-E10
agcgagcgaacagggaaaaaggagaggccgagaagcgctttagcgataagactggtgcacccgtagcggcacggcatggcggccacggcgtactccgtggcgctcctcggcggcgcacgcctgccggccgccctcctccctcggcgcagcagcgtgtgccaccagcagcttcgcctccaagacgcgccgaggctctccctgcaccgtgccagggccgcttccgaggacacgtcggcctccggcggcgacgagctcatcgaagacctcaaggcaaagtgggacgccgttgaggacaagcccaccgtcctcctgtacggcggccgcgccgtcgtggggctatggttgacctccgttgttgtcggcgcca

SEQ ID NO: 14060 - DNA, 150 bp, Zea mays
  Clone ID: LIB36-008-Q1-E1-E11
cccaagcgtccgcccgcggcaagtctctctgaattgtgggtctccggcgatggcggctcttgctccagcgaggattctgggcaccaagctcaacttcgccggctcctcgtgcggcgccaccagagcgtcccagcgcgggggctcagacga

SEQ ID NO: 14061 - DNA, 123 bp, Zea mays
  Clone ID: LIB36-008-Q1-E1-E12
gacccacgcgtccaggccacactgtttgacgtcaacctgacgctcccggcgatcgcgaccgagttcctgctgctcacggtggcgctggacaagctctacctcacgccgctaggcaagttcatg

SEQ ID NO: 14062 - DNA, 423 bp, Zea mays
  Clone ID: LIB36-008-Q1-E1-E4
tagcgtcggattccaggtcgcccacgcgtccgatcatacacaagcatcaaagcagtaagataagcattgctgtcattattgatcaagtaacacatgcactgaagaatgtgatatcgcccaaaggagatgatggtgcaaacttttcctatggcagcgcagagatagaaaagatggtggctactctgataggaagagtaagcagcatggctgaaagatctagcaaagacaatgttatgagttcccgatcactctctcatgaaaagtctgaactcactttgcgactcgagcatctagttcatgtctgcagtgacgtactagatggaaaagctaaccatgaaaggctcactgatgaagtttgcttgatcctaaagtggaaggtgagacgatgccttttgtgtcctgaatgaagtagacattgtggag

SEQ ID NO: 14063 - DNA, 99 bp, Zea mays
  Clone ID: LIB36-008-Q1-E1-E6
acgcgaccgcccacgcgtccgcccacgcgtccgcccatgcgtccgcccacgcgtccgggacagcgtccacagaagggccagagagcacagagagtggag

SEQ ID NO: 14064 - DNA, 320 bp, Zea mays
  Clone ID: LIB36-008-Q1-E1-E9
ccgggctcgaccacgcgtccactcagaattgtgggtctccggcgatggcggctcttgctccatccaagattctgggcaccaagctcaacttcgccggctcctcccgctacgccagcgcagcgcccaccgcgggggctcagaagatcgtcgccctcctcagcaagaagcctgcccagaagcgcaagccctctgcggtgtcgtcctcgtctccggacagcagcgacgagctcgccaagtggtacggtcctgacaggaggatctacctgccggatgggctcctggaccgcgcggaggtaccggagtgcctcaccggacaggtc

SEQ ID NO: 14065 - DNA, 259 bp, Zea mays
  Clone ID: LIB36-008-Q1-E1-F11
cgggctcgaccacgcgtccaggaactcaagaacggccgcctcgccatgttttccatgttcggcttcttcgtccaggccatcgtcaccggcaagggcccgctcgagaacctcgctgatcacatcgctgacccagtgcggaacaatgcatgggcctacgccaccaacttcgtctccggcaactaagctcaacggctatgctatgccacttcactgtctttcggatcggagacggtgtacgtacctgcattgactgatgctg

SEQ ID NO: 14066 - DNA, 340 bp, Zea mays
  Clone ID: LIB36-008-Q1-E1-F2
acgcgtccgctcatcgccatcacatagaaccagtgcaagcagaagcagcgcaatggcgagcagcaccatggccctctcctccacagccttctgcggcaaggcagtgaacgtgccgtcgtctctcttcggcgaggcccgcgtgacgatgcgcaagacggcggcgaaggcaaagccggcggcgagctccggcagcccgtggtacggccccgaccgcgtgctctagctgcgcgcgctgtccggcgcgcccccgagctacctgaggggcgagttcccgggtgactacggctgggagaccgctgggctgtcgggcgacccggaaacgttcgccaagaaccgggag

SEQ ID NO: 14067 - DNA, 206 bp, Zea mays
  Clone ID: LIB36-008-Q1-E1-F8
ggtcgccgcacgcatccgggcattctcgctgtctctcgagcatttggtgataaactcttgaagccgtatgttgttgctgaccctgaaatcaaggaggaggttgtctacatctctctcgaattcctcatccttgctagcgatagactctgggatgttctcactaatgactaagctgttcccatggtcaatcctacccaggagcccca

SEQ ID NO: 14068 - DNA, 381 bp, Zea mays
  Clone ID: LIB36-008-Q1-E1-F9
cctcccgcggcaagtctctctgaattgtgggtctccggcgatggcggctctagctccatccaagattctgggcaccaagctcaacttcgccggctcctcccgctacgccacggcagcgcccaccgcgggggctcagaagatcgtctccctcttcagcaagaagcctgcccagaagcccaagccctctgcggtgtcgtcctcttctccggacatcagcgacgagctcgccaagtggtacggtcctgacaggaggatctacctgccggatgggctcttggaccgctcggaggtaccggattacctcaccggagaggtccctggagactatggctacgacccttttggcctgggcaagaacccagaggatttcgccatgtacca

SEQ ID NO: 14069 - DNA, 330 bp, Zea mays
  Clone ID: LIB36-008-Q1-E1-G10
cccaagcgtccgctcatggggaagtgaagctgttacccgcaagacccgtatcctcgacgtggtctacaatgcatcaaacaatgagcttgtgaggacacaaacccttgtgaagagtgccattgtgcaagttgatgctgccccattcaagcagtggtacctcactcactatggagttgacattggtaggaagaagaaaacccctgctgcaaagaaggataatgctgagggacaagaggttgaggcaacagctgaggaaacgaagaagagcaaccatgtcacgaggaagcctgagaagcgcaaggaaggacgtacccttggaccacacattga

SEQ ID NO: 14070 - DNA, 136 bp, Zea mays
  Clone ID: LIB36-008-Q1-E1-G11
agcccaagcgtccgcggacgcgtcggcgtggcgagcgccaacgtgcgggagagctccagccccgtggtcaaccgcagtcactacgacaacatcaccgtgcggaccaggacggccgacggcaacgagcgcggcagac

SEQ ID NO: 14071 - DNA, 220 bp, Zea mays
  Clone ID: LIB36-008-Q1-E1-G12
aaacgaaaagcatggctgtaggacaagagcaacgaacaacagtctgtgtccgtcaccgcgggacagaaacaccagactcatcgagtgcgtgtgatctggatggagcttggagatgacggaattgcgacggatcctcatgtgccagcggctccgcctgcgctgaaccgctgtcatgcctagcatcgttgaggaaaggcgagttcgtgttctgccgagcgtc

SEQ ID NO: 14072 - DNA, 392 bp, Zea mays
  Clone ID: LIB36-008-Q1-E1-G4
ctcagcacgcaggctagcagcacagcagcagccagagccatcccctctcctcgctacgcttcgcttcctcggcgccgattcctcctcctcctcctccaccctcgtccgtcgccttccggcgcacgagctcgcccgagatggcgaacgcgagatcgggtgtcgctgtgaacgatgagtgcatgctgaagtttggcgagctgcagtcgaagaggctgcaccgcttcataactttcaggatggacgacaagttcaatgagatagttgtggaccaggtcggggatcgcgctagcagctacgatgacttcacagacagcctccctgagaatgactggcgatacgcgatgtatgaattcgactttgttactgcagaggatgtccagaagagcaggatc

SEQ ID NO: 14073 - DNA, 371 bp, Zea mays
  Clone ID: LIB36-008-Q1-E1-G5
cccacgcgtctgatgaagagctagaaacacagctaaaggaggcagcagtgatatctatgggaacagaagttagtgacctcgacttgtcaaatataagagagctatgcgatcaagtgctggcactttctgagtacagagcccagctgtatgactatttaaaaagcaggatgaacactattgcaccaaatctgacagccctagtgggtgaattagttggtgctcgccttattgcacatggtggaagtttgctaaatttagccaagcagcctggtagcacaattcagatacttggtgcagagaaggctttattcaaagctctaaagacaaagcattctactcctaagtatggcctcatctagcatgcatcctta

SEQ ID NO: 14074 - DNA, 371 bp, Zea mays
  Clone ID: LIB36-008-Q1-E1-G9
agtcaaccctggcttacatgatgaaggaataccctgggactgaagaagaaaagatgcgagccgctgttggcaggttcggcctgtcaggaaaggcgcaggtgatgccgatgaagaatcgttctgatgggcaaaggagccgcgtcatctttgcatggctggcatataggcagccgcaactgctactgcttgatgagccgacaaaccatctggatatcgagaccattgactcactggcagatgcgctgaatgagtgggatggtggtttggtcttggtgagccacgatttcatgctgatcaagcaggtcgctcacgagatctgggtgtgtgagaatcaagaggtgacaatgtgggaaggcgatatcatggatttc

SEQ ID NO: 14075 - DNA, 431 bp, Zea mays
  Clone ID: LIB36-008-Q1-E1-H1
cccacgcgtccgttttttttttttttgctcaaaaaggtgtttctcatcagctttttataaagtcattagtttgagttcatacattaactatcctcatacgggcaacacttacaataatcaaatcccgtatgaagatcacttctttttttcctttaagccaaggtacagatttgcccgtccaatttgcatttcctcacctgggttacgcttacgcagtttccgttgcagcaaagactcgtctccactcgattgttcactcacagatagagtatgaaactcccagtcatgtctcaaagatgcccttcatatagaccatcccttctcgctgaacttgaggtccttcctcatctgctcaacctggacgtcatctccctgcacaaggatctccggaacgttcccgtcatcggataggatcatcttgaccttgatct

SEQ ID NO: 14076 - DNA, 149 bp, Zea mays
  Clone ID: LIB36-008-Q1-E1-H10
ccacgcgtcagcatcactctctcgcgtctatctcctcccttagtgccgcccgccatcatcgccatcgccgcacccgcccatgccgcgcccgctcccggcctcggccccgtccgccgtggaggccggggccgcgcgcgcccgcggcacta

SEQ ID NO: 14077 - DNA, 278 bp, Zea mays
  Clone ID: LIB36-008-Q1-E1-H12
gacccacgcgtccaggccacgagaagaaggagatagagtacacaggttacagacaggcacagagcaaagatgtgtggtggtgcgatcctcgccgagctcatcccgaccacgccggcgcgccgcggcggcgcggcatggcccgccggcaagtgcaagcggcggaaggcgaacgacttcgaggccgcgttccgggagttcgacgaggactccgaggaggaggacgagggtgtggtggagagcaggcccgccttcgtcgtccgcgccgcgtccgcggcgac

SEQ ID NO: 14078 - DNA, 71 bp, Zea mays
  Clone ID: LIB36-008-Q1-E1-H9
accgaatcctctgtgagtgtctacacggtggacttgattttaccacgacatgattaaagcgtaaaagcaaa

SEQ ID NO: 14079 - DNA, 442 bp, Zea mays
  Clone ID: LIB36-009-Q1-E1-A11
tccacccgacgcgtccgcactcgggtaaagctatctcgagctagctagctgctgtaagccgttgccatggccaaaatggtgttgctctgcgtgctcgtctccttcctcctgatgcccttggcctccctagccctgacgcaggacttctgcgtcgccgacctgacctgcagcgacacgccggcggggtatccgtgcaagtccagcgtcaccgccaacgacttctagttccacagcctggccgggcagggcaaaataaacccactcatcaacgccgccgtgaccccggccttcgtgggccaattcccgggcgtcaacgggcttggcatctctgcggccatgctcgacatcgaggtgggcggggtcatgccgctggagacccacccggcgggctcagagctcctcttcgtgatccagggcaccgtcgccgccggcttcatgagct

SEQ ID NO: 14080 - DNA, 255 bp, Zea mays
  Clone ID: LIB36-009-Q1-E1-A2
cacacgcgtccgaagacgacttgtttcattgattcttgaagagatcgagcttcttttgcaccacaacgtcgaggatgtcttgcaactgcggatcaagctgcggctgcggctcaagctgcaagtgcggcaagaagtaccctgacctggaggagacgagcaccgccgcgcaggccaccgtcgtcctcggcgtgggcccggagaagaaggccgcgccccgagttcggccaaggccgccgcggagtccggggaaggccg

SEQ ID NO: 14081 - DNA, 285 bp, Zea mays
  Clone ID: LIB36-009-Q1-E1-A6
cgaagatattgttccttcgtcacacaactgtgatattccgcatgtgaaccgtactgagtatcagctgattgatatatcagaggatggatttgtgagccttcttacttcagatggcaacactaaggatgatcttagactcccaactgatgagactcttgtggcccagatcaaggaagggtttgaaagtggcaaggatcttgttgtgactgtccagtctgctatgggggaggagcagatctgcgcgctgaaggatgttggccccaattaacttccctgccttggaat

SEQ ID NO: 14082 - DNA, 438 bp, Zea mays
  Clone ID: LIB36-009-Q1-E1-A7
cccacgcgtccgcccacgcgtccgcaaatcttctcagtcagtttcatgtggaaatgaacctagcgaacggggagctcgttctgaatgctgcaacggtggacagaactgcaactcaaatgatgaatcagaaaaaggagatctgaaaacaagatgtcgatcattggatagtgattctaatgaatcaaataagtctagttctccaggaaataagaaagaccagtctgattctgatggttgctgctgtcaaatggataagtttggcatgggagaaaagaaatcatgctgctcaccttctaagatcaatgatagttcaggtggagctgtgcttcgttatgctttgcacctgcgatttctgtgcccctccaagaaaaaatcctcgaaatcaatgcttcgttgcaaatctgatctatcaacgggaacatataacagcaatacgct

SEQ ID NO: 14083 - DNA, 427 bp, Zea mays
  Clone ID: LIB36-009-Q1-E1-B11
gacacagcttgcgcccgcaatggcactcgtctccgcctcctcgtcctccaccaccgccgtcacggcgctccccaggaatgggcagcgggcgtcgtcctccttcctcggcggcaagacgctgctgagacaggccgaggcggcccggccgtcgttcgccgtgcgcgccgcggcggaccccaacaggccgatctggttccccggcagcacccctccgccgtggctcgacggcagccttcccggcgacttcggctttgatccctggggcctcggatctgacccggagagcctgcggtggaacgtgcaggcggagctggtgcactgccggtgggcgatgctcggcgcggcgggcatcttcatcccggagttcctgaccaagatcggcgtcctcaacacgcccttctggtacaccgccggcgagcagcagtac

SEQ ID NO: 14084 - DNA, 433 bp, Zea mays
  Clone ID: LIB36-009-Q1-E1-B12
gaggacgcgagtgagtgaacaccagccgtattgtcccgactcctgacccctaccgatcctcgcctgctgcagccatggcgacctccgcggcgctctccaccgccgccaatcccacccagctctaccggtcccgcgcttcgctgggcaagccggtgaaggggcttggcctgagcatgggccgcgagcgcgcccagcggagcattgtgtgccaggcggcgagcagcatctccgccgaccgcgtccccgacatggagaagcggaagctgatgaacctcctcctcctcggcgccatctcgttgcccaccgtcggcatggtcgtcccctacggcgccttcttcgtccctgccggctccgggaacgccggcggcgggacctacgcgaaggacaagctgggcaacgacatcacggtggaggcgtggctcaacacgcacgg

SEQ ID NO: 14085 - DNA, 330 bp, Zea mays
  Clone ID: LIB36-009-Q1-E1-B2
cactgaactctgaccaggcgagggacttcgacctccccttgaaggagcggttctacctgcagccgctgccgccggcggaggcggtggcgagggtgaagacgtcggcgcaggacatcatcaacctcaagccactcatcgacaagaaggcgtggccgtacgtccagaacgacctccgcctccgggcctcctacctgcgctacgacctcaagaccgtcatcgcttccaagcccaaggaggagaagcacagcctcaaggagctcaccggcaagctcttcagcaccatcgacgatcttgacaatgccgcaaagatcaagagcaccccggaggccg

SEQ ID NO: 14086 - DNA, 395 bp, Zea mays
  Clone ID: LIB36-009-Q1-E1-B4
gcgtacccgtcgtctccatgcggccacctccagttcccgcggcggcacggcggcccgcgcgcggtgcggctgcgggtgcaggtgtccaccaccgagaccgcggaggcggagccggtcaagaagctggagaaggtgtccaagaagcaggaggaggggctcgtcaccaacaagtacaagcccaaggagccgtacgtcgggaggtgcctgctcaacaccaggatcaccggcgaccaagcgcccggtgagacgtggcacatggtcttcagcacagaaagcgaggtcccctacagagagggcagtccatccgcgtccaccccgatggccagggcaaaaacggaagccgcaaaccctcaggctcaatccaatcgccagaagggccctcggggatttcgggg

SEQ ID NO: 14087 - DNA, 432 bp, Zea mays
  Clone ID: LIB36-009-Q1-E1-B5
ggctcagattgagatcctgaggaagaaggggcactcctactctgagatcatcaacgagagcgtgattgagtcggtggactcgctgaacccgttcatgcacgcccgtggggtcgccttcatggtggacaactgctccacaacggctcgcctgggatccaggaagtgggcgcctcgcttcgactacatcctgacgcagcaggccttcgtggcggtggacaaggacgccccgatcaaccaggatctcatcagcaacttcttgtcggaccctgtccatggtgccattgaggtctgcgccgagctgaggcccaccgtcgacatctctgtgcctgccaacgccgactttgtgcgcccggagctccggcagtcttcctagattgaggcagtgaacggagagggaaacggagagagaaagagaggatttcgtgtcccgag

SEQ ID NO: 14088 - DNA, 405 bp, Zea mays
  Clone ID: LIB36-009-Q1-E1-B6
cacacgcgtccggtcagttgttgacctcactgtcagaatcgagaagggggcctcttacgaggaaatcaagaaagctattaaggctgcttctgagggcccactcaagggtattatgggctacgtggaggaggatctggtttccaccgacttcaccggtgacagcaggtcgagcatcttcgacgccaaggccgggattgccctgaacgaccacttcatcaagctcgtctcttggtacgacaacgagtggggctacagcaaccgcgtcgtcgacctgatccgccacatgttcaagacccagtagagagagatatttctgcctccctatcgtgggtcgtccccaatggcctttggtcgcagaccatctttgctgcttgtctatgctgagaataaatgtgaacggtgccc

SEQ ID NO: 14089 - DNA, 438 bp, Zea mays
  Clone ID: LIB36-009-Q1-E1-B7
acgatccgtcgtgtcaaccagacctatgtcattgctacatcaaccaaggttgacatctctggtgttgatgtcgcgaagtttgatgacaagtactttgccagggagaaaaggcagaaggtgaagaagtcggagggtgagctttttgagacagataaggaggcgtccaagtctctgcctgatttcaaaaaggatgaccagaaggccgtggatgctgctctgatcaaggctattgaggctatcccagagctgaaggcctatcttggcgctcggttctcccttagggatggtgacaagccccacgagatggtcttctaaaccgagttttggagttcggaggaagtcgctttggctgtactctcttgtgacaagccccacgagatggtctcccagagctgaaggcctaccttgtttcattctgcttgaagtctgtcaaataat

SEQ ID NO: 14090 - DNA, 425 bp, Zea mays
  unsure (1)..(425): unsure at all n locations; Clone ID: LIB36-009-Q1-E1-B8
agtgaggttctccggggttcggtttcgtgggtgagcggatcgagatggcggcgtcggatgttgagtaccgctgcttcgtcggcggcctcgcctgggccacggacgaccactccctccacaacgccttcagcacctacggcgaggtcctcgagtccaagatcatcctcgatcgggagacgcagaggtcccgcggcttcggcttcgtcaccttctccacggaggaggcgatgcggaacgccatcgagggcatgaacggcaaggagctggacggccgcaacatcaccgtcaacgaggcccagtcccgcggcggccgtggaggcggcggcggcggcgggtacggtggtggccgtggaggcngcggctacggcggtggcgggcgccgtgatggcggcggcggctacggcggtggcggcggctacggtggt

SEQ ID NO: 14091 - DNA, 303 bp, Zea mays
  Clone ID: LIB36-009-Q1-E1-C2
cgcacgcatacacagcacagagtgaggtaagcatccgaaaaaagctgtgatctgatcgacatggccgccgccaccatggctctcacctcccgcgcgctcgtcggcaagccggcgagcagcaccagggacgtcttcggcgaggggcgcatcaccatgcgcaagactgctggcaagcccaagccagcggcgtccggcagcccctggtacggggccgaccgcgtcctgtacctgggcccgctgtccggccagcccccaagctacctgaccggcgagttccccggcgactacggctgggacaccgcg

SEQ ID NO: 14092 - DNA, 443 bp, Zea mays
  Clone ID: LIB36-009-Q1-E1-C3
gcagtgggttatcaacctacccttagtacagaaatgggttctttgcaagaaagaattacttctaccaaaaagggatctataacttcgatccaagcagtttatgtacctgcagacgatttgaccgaccctgctcctgccacaacatttgcacatttggacgctactaccgtactttccagaggattagcttccaagggtatttatcccgcagtggatcctttagattcaacctcaactatgttacagcctcggattgttggcaacgaacattatgaaactgcgcaaagagttaaggaaactttacaacgttacaaagaacttcaggacattatcgcaattcttggattggatgaattatcggaggaggatcgtttaactgtagcaagagcacgaaaaatcgagcggttcttatcacaaccgttctttgtggcaaaagtttttac

SEQ ID NO: 14093 - DNA, 288 bp, Zea mays
  Clone ID: LIB36-009-Q1-E1-C4
ccggcgactacggctgggacaccgccgggctgtccgccgaccccgagaccttcgccaagaaccgcgagctggaggtgatccactcccgctgggccatgctcggcgcgctcggctgcgtcttccccgagctgctctcccgcaacggcgtcaagttcggcgaggccgtctggttcaaggccggctcccagatcttcagcgagggcgggctggactaccttggcaaccccagcctgatccacgcgcagagcatcctcgccatctgggcctgccaggtcctgctcaagggcg

SEQ ID NO: 14094 - DNA, 386 bp, Zea mays
  Clone ID: LIB36-009-Q1-E1-C5
ggcacaagccatggcgtccatgaccggcctctcgcagggcgttctgcccagcaggcgcgccgccaacagggccaggacggccgccgtcgtcagggcgtccgccgaggcgcaggcgcaggcgggccgccgcgccgtgctcgggctggtggccactggcatcgtcggcggcgccttgtcgcaggcggtgcacgccgagaccgtcaagaccatcaagatcggagccccgccgccgccctccggtggactccccgggattctgaactctgaccaggcgagggacttcgacctccccttgaaggagcggttctacctgcagccgctgccgccggcggaggcggtggcgagggtgaagacgtcggggcaggacatcatcaacctcaagccac

SEQ ID NO: 14095 - DNA, 411 bp, Zea mays
  unsure (1)..(411): unsure at all n locations; Clone ID: LIB36-009-Q1-E1-C6
cggacgcgtgggcgacatcacggtggaggcgtggctcaacacgcacggtcccaacgaccgcacgctcgcgcaggggctcaagggtgaccccacgtacctggtggtggagcaggacaagacgctggccacctacgggatcaacgccgtgtgcactcacctcggctgcgtcgtgccgtggaacggcgctgagaacaagttcatctgcccctgccacggatcccagtacaacaaccagggcaaggtggtccgtggaccggcgcctctgtcgctggccctggttcacgccgacgtcgacgacggcaaggtcctcttcgtcncgtgggtggagaccgacttcaggaccggcgaggacccatggtggaaggcatgaggatgatcgggaaccagcggtgctcagtgctcacacatgag

SEQ ID NO: 14096 - DNA, 358 bp, Zea mays
  Clone ID: LIB36-009-Q1-E1-C7
gcccgagggccgccgcgccgctctgctcggcctggcggccgtcttcgccgtcacggccaccaccgggtcggccaaggccacgatcttcgatgagtacctcgagaagagcaaggccaacaaggagctgaacgacaagaagaggctggccaccagtggcgccaactttgcgcgcgcctacaccgtggagttcggcagctgccagttcccctacaacttcactgggtgccaggacctcgccaagcagaagaaagtccccttcatcagcgacgacctcgagattgagtgcgaggggaaggagaagttcaagtgcggctccaacgttttctggaactggtgaagcaactagcagcagcgtctg

SEQ ID NO: 14097 - DNA, 367 bp, Zea mays
  Clone ID: LIB36-009-Q1-E1-C8
gagagagaccgacgcgccggcagatcccaagttcaccggagagggggaagagggcgaccgaaggcggcgatgggtttcatcatggacttcgcggagaatctgatcctccgtctgatggaggacccggacaagcgcgaccaggttcggcgggagcatgtctacaagatgaaggagcggtgcgagcgcactaaggcggcgtggagcctccctctgcgcccctacggcttctggaccttcgaccgcttcaactcgcagctctcctgggatccccagatcagccaggccgccggccgtcgggacccctacgacgacctcatcgcccgccactctggctcgccgccgtcttcctgaacacccgttccgatct

SEQ ID NO: 14098 - DNA, 421 bp, Zea mays
  Clone ID: LIB36-009-Q1-E1-D10
caccactccgcgctagctgaggacggtacagcggcacagaggtgcgacgtacgacgacgacgacgcaggcgccacacatggcatcccagctctccgccgccgtgccccggttccacggcctccggggctacgccgcgcccaggtccgcggtggcagcgctgccgtccgtgagggtgggcaggaagaggtcgtcgtcgcagggcatccgctgcgactacatcggctccgccaccaacctgatcatggtgacgacgacgacgctgatgctgttcgcggggcggttcgggctggcgccgtccgcgaaccgcaaggcgacggcggggctgaagctggaggcgcgcgactccggcctgcagacgggtgaccccgccgggttcaccctcgccgacacgctggcctgcggcgccgtccggcacatcct

SEQ ID NO: 14099 - DNA, 429 bp, Zea mays
  Clone ID: LIB36-009-Q1-E1-D11
cacacgcgtccgcggacgcgtgggcgcccgctcccggagagcatgtcggacttcctcatgggctccggcttcgagcggctgctggagcagctggcccagatggaggccggcggcggtctggcggcgcgcgcccgtgacgcgccgccggcgtccaaggccgccgtggactccatgcccgcgctccgcgtcggcgccgcccacgtcgcggccgacgcgcactgcgccgtctgcaaggaggccttcgagctgggcgccgaggccagggagatgccctgcgcccacatctaccatgccgactgcatcctgccctggctcgcgctccgcaactcctgccccgtctgccgccacgagatgcccgccgacaacgccgccccgcgcgctgccgccgccgccgccgctgacgaggacccagggtcggcctcaccatct

SEQ ID NO: 14100 - DNA, 436 bp, Zea mays
  Clone ID: LIB36-009-Q1-E1-D12
agcaagccaactcggccgtccgaacgaaagcgaagcgcggccaaactcactcgctaaacgctcccgttctcctccgcctgcccccaccggctccccttgtacacgagcgccggagacgccatggcggcggcgcagccgaagccggccaagaggctgggcggcatggcggaggcgctcgccatcgccgccgacctcggattccccgcctctaccacgcaggaagatcagactagctccgacaaaagcgatgatttggtgaaggttttgagggaactgactgtcgtgcagaggaacattgccaacttgcaagtggagctacagggaagaaaggatgataaaaacattgctcatttgactcatgtgagtgagatggaaaagaagtgcgagtctttggccagaatgactgcaattttgaaagatgtaattcagaacaagg

SEQ ID NO: 14101 - DNA, 435 bp, Zea mays
  Clone ID: LIB36-009-Q1-E1-D5
cacacgcgtccgcccacgcgtccgaagacgacttgtttcattgattcttgaagagatcgagcttcttttgcaccacaaggtcgaggatgtcttgcaactgcggatcaagctgcggctgcggctcaagctgcaagtgcggcaagaagtaccctgacctggaggagacgagcaccgccgcgcaggccaccgtcgtcctcggcgtggccccggagaagaaggccgcgcccgagttcgtcgaggccgcggcggagtccggcgaggccgcccacggctgcagctgcggtggcaactgcaagtgcgacccctgcaactgctgatcacatcgatcgacgaccatggatatgattattatctatctagcttgtggtggtggttgaacaataataagcgacgccgagctggctgccatacatacgtaatgtgtggtgtgtgtga

SEQ ID NO: 14102 - DNA, 317 bp, Zea mays
  Clone ID: LIB36-009-Q1-E1-D6
cacacgcgtccgcgcctgcttctcccccctcctgcctcttcgtgctgcttcctggtggggaagggaaggagaaggagaaggctgtgtgcgtcctgcgccgataacgcgatggtgtccattgtcaccgaggtatgggcgctcgctggatgcggcccagcgtccaaggcggcggcggtagcggtagcggcgcaggagttgccggcgcagcatccttctcctgccgcagcgggaggagggaaggccaagaagagagccgtgccagtgtcgttcagaggcgtcagcagcggccgtggccaggaccaccagccgtgaggccg

SEQ ID NO: 14103 - DNA, 83 bp, Zea mays
  Clone ID: LIB36-009-Q1-E1-D7
aaataatttggtatatttgccattccgctattgtgtactctttggcatacatacaataattaaaatggcgttgcgtggctctc

SEQ ID NO: 14104 - DNA, 439 bp, Zea mays
  Clone ID: LIB36-009-Q1-E1-D8
aggagacgtacgctctctgctagcacccatcttgcagcaggcggagccgcccgacccgatccgtgcgtgtgtgttggtagagatggctacagcagcttacgctcccatggcgagccaggtgatgaagagcagcccggtgcactcgaggccgaggggcctgtcaggcgctgcgctcacgcggccccggccccggttcagcgtcgtcaaggccgccatccagcccgagaaggcaacgtaccaggtggtgcagcccatcaacggcgacccgttcatcggcagcctggagacgcccgtcacctccagcccgctcatcgcgtggtacctctccaacctgccggcctaccgcaccgccgtgagcccgctgctgcggggcgtccaggtcggcctcgcccacggctacctcctcgtcgggcccttcgcgctcaccggcccgctcggc

SEQ ID NO: 14105 - DNA, 310 bp, Zea mays
  Clone ID: LIB36-009-Q1-E1-E4
gctcacttgggagatgcctctctacgctgccaggttatctgcaagccttggcacgctgcgccgtgaagcgaacagactagctgaactgccgtcttgagcggtgctgagcagaggacggtccatccaacagcgatggagtgcttgtttttttccctttctttcccagttgtgttctgaaactaatttaagctgtcgcggtttttatttgatagtgagtggtgttgcaaaggtgctatcttgtaacggtgaagtcctaactcatctaacagatctgcctcccatgaccctgtaatatgccattttgttcttg

SEQ ID NO: 14106 - DNA, 435 bp, Zea mays
  Clone ID: LIB36-009-Q1-E1-E5
cccacgcgtccgcagcgactcagcgagcgagagcagcacacacgcagctagctaggagcagcagcagagcagcggcgatggcggcctccatgatctcctcgtcagctttggcggtggcgcctcagggcctgccgcccctcggccgccgcgcctcctccttcgccgtcgtctgctccaagaagaagatcaagaccgacaagccctacgggattgggggtggcctgaccgtcgacgtcgacgccaacgggagaaagggcaagggcaagggcgtgtaccagttcgtcgacaagtacggcgcgaacgtcgacggatacagcccaatctacaacgaggatgactggtctcccagcggcgacgtctacgtcggtggcaccactgggcttctgatctgggccgtcaccctcgctgggattctcggcggccgcgccctcctcg

SEQ ID NO: 14107 - DNA, 399 bp, Zea mays
  Clone ID: LIB36-009-Q1-E1-E6
cccacgcgtccgcggcgatggccggtacccccatcaaggtgggctccttcggcgagggccgcatcaccatgcgcaagaccgtgggcaagcccaaggtggcggcgtccggcagcccctggtacggccccgaccgcgtcaagtacctcggccccttctccggcgagcccccgagctacctcaccggcgagttccccggcgactacggctgggacaccgccgggctgtccgccgaccccgagaccttcgccaagaaccgcgagctggaggtgatccactcgcgctgggccatgctcggcgcgctcggctgcgtcttccccgagctgctctcccgcaacggcgtcaagttcggcgaggccgtctggttcaagggcggctcccagatcttcaccgaaggcgggc

SEQ ID NO: 14108 - DNA, 366 bp, Zea mays
  Clone ID: LIB36-009-Q1-E1-E7
cagacgcttgggttcttatttgttgttgttacagcaattcgaggttttactgcgatttcgtcccaccagaagaaagttcacatactgggactatgctttttacacgtcggaactgtgcattctaaacgtacacagctcactgtcttccacatcatgttaattggcaaaatgttacgccttagaaacgctgactcgtgttcactgatcgtcactcctgtactatcaacgtacaccatttcagttatccaccgtcatgtacattccacaagacggatcaagacgcgtggtagtattcgtgctcaacaccttacatccttacctactgtacatccatgtgcctgtgcaacgtttctactcaactgtgcc

SEQ ID NO: 14109 - DNA, 414 bp, Zea mays
  Clone ID: LIB36-009-Q1-E1-E8
accacgcgtccgggagagcaaaggcagcacactcagctatccagcaaaagagatcgagaggcaggagtcatggccaccgtcagcgccgccgtggtgaccaccatcgttgcccgcgccgcgatcgccaggcccaatgctctagggctgcctgcgctgagggcgaggagcgagagggtgcggtgcagctacgccaaggacgcggccccagtcagcaccaagggcgcaggcgcgtcgctgctcgccgcagcgggcgcggtgaccgcgtcggcggggcccgcgctggcgctcgtggacgagcgcatgtccacggagggcaccgggctgagcctcgggctcagcaacaacctgctggggtggatcctcctgggggtcttccgcctcatctggtccctctacacgatcctacactctgac

SEQ ID NO: 14110 - DNA, 213 bp, Zea mays
  Clone ID: LIB36-009-Q1-E1-E9
cacacgcgatccgattcgggccgtgttgcaatgcatgcatggtctgaagggagcgagggctgaggagtgactggtatgtacattagctgaaggggaggttaagggtagagatcgtttgatcagtatcatctgtatatccccatgcatggggtttcgttttgtgcgcttacttctggcttgccagcgtatggttcaaaaaaaaagacacagaat

SEQ ID NO: 14111 - DNA, 438 bp, Zea mays
  Clone ID: LIB36-009-Q1-E1-F1
cccacgcgtccgcccacgcgtccgccgctaggcaagttcatggatgagcgggacgccaagatccgcggtgagctcggcgatgtcaagggcgcctccgaggaggtgaagcagctggaggaccaggcggcggccatcatgaaggcggcgcgcgccgagatcgcggcggcgcttaacaagatgaagaaggagaccaccgcggagctggaggccaagctggacgagggacgcagccgtgtggaggccgagctcgtagaggcgctcgccaacctcgaggcgcagaaggaggaggctgtcaaggcgctcgacgcccagatcgcctcgctcagtgatgagatcgtcaagaaggtgctcccatccgcgtgatgaaaccaaaccgggcctgccttatcctacgactatagttacatgaacatcataaattaatgataattttgaaga

SEQ ID NO: 14112 - DNA, 435 bp, Zea mays
  Clone ID: LIB36-009-Q1-E1-F10
aacaggcggagccgcccgacccaatccgtgcgtgtgttggtcgagatggctacaacagcttacgctcccatggcgagccaggtgatgaagagcagcccggtgcactcgaggccgaggggcctgtcaggcgctgcgctcacgcggccccggccccggttcagcgtcgtcaaggccgccatccagcccgagaaggcaacgtaccaggtggtgcagcccatcaacggcgacccgttcatcggcagcctggagacgcccgtcacctccagcccgctcatcgcgtggtacctctccaacctgccggcctaccgcaccgccgtgagcccgctgctgcggggcgtcgaggtcggcctcgcccacggctacctcctcgtcgggcccttcgcgctcaccgggccgctccgcaacacgcccgtgcacgggcaggcgggcgcgctc

SEQ ID NO: 14113 - DNA, 339 bp, Zea mays
  Clone ID: LIB36-009-Q1-E1-F11
gagccgccaccgcgcttgcggtcgccctcatcgctgccgttgccgccgcaaccgctgcggggtcgccggccgcgggcacgtgcgcgcggaggggcgcgccgccgttcctcgacgccgtcggatcccgctgccccttcgtccggatcgacccgtccccgcctctcgaggtgagaggagagactgttgatactgagttgaaccttcgaaggaggggtgcttcatactccattctcttttatgctgcatggtgtccattttctagcaaactgcgaccaatatttggaactctcagcactatgtaccctcagatacatcactttactgttgaaaaatcctctg

SEQ ID NO: 14114 - DNA, 208 bp, Zea mays
  Clone ID: LIB36-009-Q1-E1-F12
gtccgacaaaatagtgtagtggacaggaagaatagaactctattggacatgacaagaaccatgcttgatgaataccagactttggatcggttttaagccgaggcggtcaacaccgcttgccaggccatcaaccggttgtatctacaccgaatcctcaagaagacatcgtatgaactcctcaacggtaacaaacccagtatttcatagt

SEQ ID NO: 14115 - DNA, 445 bp, Zea mays
  Clone ID: LIB36-009-Q1-E1-F2
cggacgcgtggggtagtttgcccggcaagcaaacatctccggcagccatggcgtccactgtaacagccgccaatagcagccatggaagcgccctgcgtacccgtaccgcctccccaaggccggtcgcgggctggagctgcagacgcacgctttccacgcctgcacaccaccaccacgcgcggccgtcacccagagctcgggttgtcgccgtccgagccgccggcactcagcgggcgacctggttgcccggactggacccgcccccatacctcgacggcacactaccaggtgacttcggcttcgaacctctgggcctccgcgaggagcccgaagccctgaagtggtacgttcacgccgagctcgtgcactgccggttcgccatggcaggggtccccggcatccttttcactgacttgctccgcgtatcagggaacacgatctcccc

SEQ ID NO: 14116 - DNA, 420 bp, Zea mays
  Clone ID: LIB36-009-Q1-E1-F3
cacacgcgtccgattgaagattaattactatgtttagtatttgcttaacagactgtgcctgattgccacaatctgtacaagaattcattcacatatcacagtcttcaacgggacaggcctttggattttgatgaggcaaaccaatatctagagaaatgtgaaagagataaatcgcgtgttcttgttcattgcatgactggaaaaaacaggtctgctgctattgttgcagccttcttgatgaagtctagagggtggagacttgcacaatcttttcaatgggtgaaagatcgaagaccacaggttcaactgacagatggttagcttcataccctttgaagcttgttgactaattaagacaccgtctctactacattatgaatcattgggtccttgcctatcacatggttacattttttctca

SEQ ID NO: 14117 - DNA, 436 bp, Zea mays
  Clone ID: LIB36-009-Q1-E1-F6
agcccacgcgtccgcctcctcctcgtcgtcgtcgccgcggctgcggcgagcggcatcgcctccgctaagccgacggcgtacgaagccctcgccgactacgacttccccccggggatccttcccaagggcgtggtcgcctacacggtcgacaacgccacgggcgccttcacggccacgctcgatgcctccgcgtccggcgcgggatcctccatctgcgagttctccatcgagggctcctactcgctacgctaccagaccaagatcaccggcaagatctcccccgaccacctcaccgacctccagggtgtctccgtcaaggtcctcttcttttggctcaacatcgtcgaggtcacccgccatggcgataatctcgagttctccgtcggcatcgcctccgcggacttcgggattgacaacttcctcgagtgcccaacct

SEQ ID NO: 14118 - DNA, 437 bp, Zea mays
  Clone ID: LIB36-009-Q1-E1-F8
atggctacgacccttttggcctgggcaagaagccagaggacttcgccaagtaccaggcctacgagctgatccatgccagatgggccatgctcggtgccgctggcgctgtcatcccagaggcctgcaacaagttcggcgctaactgtggccctgaggctgtctggttcaagaccggcgcgctgctcctggacggcaacaccctcaactacttcggcaacagcatccccatcaacctggtggtggccgtgattgcggaggtcatcctcgtcggcggcgccgagtactaccggatcaccaacggactggaccttgaggacaagctgcaccccggtgggcccttcgaccccctgggcctggccagcgaccccgaccaggccgccatcctcaaggtgaaggagatcaagaacggccggctggccatgttctccatgttcgcc

SEQ ID NO: 14119 - DNA, 383 bp, Zea mays
  Clone ID: LIB36-009-Q1-E1-F9
gtccgaagctatcaaaccatcgaaactataggacttcatacgagcgcctctttgaacaggtacgtagactggaaaccgaaagcgatagcctaaagaaagacgccgccatctacaactttgtgcaagagcgtcttcagaagtcagcgccatacatgatgatcatggagctgagtgcaatggagctggacgctcaagaaatatcgttcgaggagcttctggctcgggagaaggaggacactgccttctggcagcgcaacgggaatatgagatcagtctcatccaagtaggacagaatgcccctgctacttgggctcactgacgatagcagaccttcaacatcggtagtgtctaggcacgagaccctttggagcagctgctgcatg

SEQ ID NO: 14120 - DNA, 364 bp, Zea mays
  Clone ID: LIB36-009-Q1-E1-G10
cagacgcattggcggacgcgtgggcatcgatgaaccaagcaatgtcaagaatgaacctgagagttcaactaaattgcaaggccaagcagctgcgtaccacaagccatagctgcgaccatcaagagttgctgggtttcttctaggcaacttcctgcttgatgtggacagtccagaaaacagaagtgaatccgcaatacgtccctgccatttcaaatttgacttggttacacctatctgtgacaatgttgaatgtatgagatcccatggcactagtgaagttcccaggtgtccacctgggaatgcttgcggttgagagagacgatactcagagtgcccatgtatacatgacgcccatgatctcatt

SEQ ID NO: 14121 - DNA, 400 bp, Zea mays
  Clone ID: LIB36-009-Q1-E1-G11
cgagttcaaccgcatgcgcaagaggattgctcgtatgctaaccgtgaaaagagagcgggaaattgaacaaggaatcaataaaagattgtctacgaagcttgataggaaatggaagcagagcattgtggtcagaccaccaccatctctaagggggaacaaagaggagtagaaagccgcaaaaagagggcaatgtgcaaaagtcgtttcatgcgagtgttgcaggaaagtcgcttcatgatttcaacccttattgcgttgttatgtattccatgtttacattttgctaagcattgctatctgaatctgaatttcagttgttagtctcatctgtaaattttgacttatttaaatttacacttctatctgtgttatcagtaattgatgatggcagtcatttgca

SEQ ID NO: 14122 - DNA, 432 bp, Zea mays
  Clone ID: LIB36-009-Q1-E1-G12
ccagcttgcttccctatcacaacgtcgccgttgtgcttcgctgctgctgggaaccccacgcgccgtctcagctcgtcttcggctcctcccgtccgcaccgagtgtagtaacgagcttgccgtcggtccaggtccccggatatgactcgtctccctcgaccagaagtcgtcgtaccgcagccaagtctacagcgctacctctagctcgccgtcacccatgcttctctggttgtcaacctcgctggctgcgttcgatccccagccgcgttaccaacacactcgtcatccgtccgaagaatacctagaagtggtgtttgaaggagtctacacgagtgcctgctcatcaagtggatggagctatctaactggttattgggtagaaaggtcttgagcctcttctctgcaacataggtgatgaggagtactctatgtg

SEQ ID NO: 14123 - DNA, 437 bp, Zea mays
  Clone ID: LIB36-009-Q1-E1-G2
gtgggacgacgcaagactctaaagtgagtcgtaatatatcgcaagatacagaatggtgatttcaggtgccctagttggttttcacacaaactcaagaagctcttgtacaagatcctcgaccccagcccagacagaggaatttcagtgcagaagataaaagagtctacctggtttcgaaaaggccctgtggagacccgtacagtaaaggagaaaattctgagtgagaatgacaccacagatgctgctccagccgttgctatgaggcgcaagaagaatgttcatgaagacgtgaagcccccgactgtcacaagcttaaacgcctttgaaattatatctttctccacaggattggacctctctggcctatttatcagaaacgagtgtaagaaggagacgcggttcaattctgataaggggtcccgtgtccatcaatctcg

SEQ ID NO: 14124 - DNA, 415 bp, Zea mays
  Clone ID: LIB36-009-Q1-E1-G5
accacgcgtccgcatggtcacaatgcttgcagctagttctctagtgaacagcaacctcgcttgctcatcaaggatatcatcctgttcagacttcacatatagccactcctggcgtcccatacatgctatgaaactccatcagatgcgtgctgtgagctcaatacgtataagttgtgctgccactaaacctgcaaagactcctgctgaagaagaatggaaagttaagcggcaactgctatcagaaaagcgggtacgaagtgtcgatgtgaaggaagcactgcgccttcaaaaggaaaacaactttgtcattcttgatgttaggccagaagcagagtttaaagaggctcatccacctggcgccatcaatgtacaaatatacagattaatcaaggaatggacatcgtgggatattgcg

SEQ ID NO: 14125 - DNA, 366 bp, Zea mays
  Clone ID: LIB36-009-Q1-E1-G8
cagacgcgtgggcggacgcgtgggtttcagaggaactccaaacgtgctcgctcacaaaaatccagaaactggagttttgaaacagacgaggaggatgaagtatcagctccatcagaggtatctttggcactacaagctcttgggttgagcacttctggtccgcttaaacttgaagatgttaaaagcgcataccgagcatgtgcacttagatggcatccagatcgccacaatggatcatctaagtctacagcggaggagaaattcaggcattgcagtgcagcagacaagaccttatgtgatactttggccgctgcatagataattttgaatgagcatggactctgggatgagccccttccaaacttt

SEQ ID NO: 14126 - DNA, 426 bp, Zea mays
  Clone ID: LIB36-009-Q1-E1-G9
cagacgcatgggcgacgccgcgcggcgccggcaacgtgtggcgcagcgtcttccacccggggagcaacctggccaccaagggcatgggcgccaacctcttcgaccggccgcagcccaactcccccaccgtctacgactggctctacagcgacgagaccaggagcaaccaccgctagatcgggcgagatggatggacagtgaagaggccatgtttgctggtccttgtggttatctaaaacgcacgcatgctctattatagctagtcatcactatatatatacttgtgtttgtgtattgttgttcttgttctgctggtgtctccgccgtttaatttgacctatgttatggagtgagtgatatatgtgccgtcactcctagtatatagtagtgagtgactaattggtatgtgtagtactgtactatctt

SEQ ID NO: 14127 - DNA, 449 bp, Zea mays
  unsure (1)..(449): unsure at all n locations; Clone ID: LIB36-009-Q1-E1-H10
gtccacccacccgtccgttcgctaactagctgacgacaatggcgtccctctcctctgccgccatcaccgccccttccttcacggccgcgcccgctcgcgcagtggtcagcaggaggtccttcaccgtgcgtgcctctctccgcaaggccactgccaccgccgccgtggccgttgccgccagcgtcctgcttgccggcggcggcgccatggcccaggaggtgctgctgggcgcaggcgacggcgggctcgtcttcgagcccagccagttcaccgtcaaggccggcgacaccatcaccttcaagaacaacgccggcttcccgcacaacgtcgtgttcgacgaagacgaggtgccgagcggcgtcgacgcctccaagatctcgcangaggagtacctcaacgcgccaggcgagacctactccgttcacttcaccgtgccgggcacctacggc

SEQ ID NO: 14128 - DNA, 431 bp, Zea mays
  unsure (1)..(431): unsure at all n locations; Clone ID: LIB36-009-Q1-E1-H11
cacgtacgcacgcaccgggacaccagcaacccccaacagcgccactgtccagtgcgcgcgtcaagcttgcttagctagccgccatggcctccctcgccgccgtctccgtgaagcccgtggccatcaagggtctcgccggcagctccatctccggaaggaagctcgccgtcgccaggccgtcggcccgctccatccgcaggccccgcgcagccgccgtggtggccaagtacggcgacaagagcgtctactttgacctcgacgacatcggcaacaccaccggacagtgggacctctacggctctgacgcgcnctcggcctacaacccgctacagagcaagttcttcgagacgttcgcggctccgttcaccaagagaggtctgctgctcaagttcctgctgctgggcggcggctcactttctggctacgtcagc

SEQ ID NO: 14129 - DNA, 418 bp, Zea mays
  Clone ID: LIB36-009-Q1-E1-H12
cacgcgtccgcttcgccgcaccagcgccagcccgcgccgtggtcagaaggaggtccttcaccgtgcgcgcctctctccgcaaggccaccggcaccgccgccgtggcaatggctgccagcgccctgcttgccggcggtgccatggcccaggaggtgctgctgggcgcaggcgacggcgggctcgtcttcgagcccagccagttcaccgtcaaggccggcgacaccatcacattcaagaacaacgccggcttcccgcacaacgtcgtcttcgacgaagacgaggtgccgagcggcgtcgacgccaccaagatctcgcacgaggagtacctcaacgcgccaggcgagacctactccgtcaccctcaccgtgccgggaacctacggcttctactgcgagccgcatcaaggagccgggatggt

SEQ ID NO: 14130 - DNA, 361 bp, Zea mays
  Clone ID: LIB36-009-Q1-E1-H4
cacacgcgtccgacgatgaggagctccacaaggagaacatcaagaacgccgcctcctccaccggcaacatcacgttgagcgtcaccaagagcaacccggagaccggtgaagtcatcggtctcttcgaaaccgtggagccgtctgatagcgagctccgtgctaaggcgcccattgatgtcaatatacagcgggtctggtacgctcagctcgagtgattcgagtgtctaactgctacgtgtccgaccgccgtcatggatcttgggaaggtgtatgtataccatggaaaactttggagagcacatgatgaatcgtgtatgtaatgtacttgttaatgcaaattcgggctgtcgcttttttactc

SEQ ID NO: 14131 - DNA, 401 bp, Zea mays
  Clone ID: LIB36-009-Q1-E1-H5
gtcatcccgcccaactacgtgtggcatgtccctgaccccagtggctctcctctcagatcctctctcaggagtttctatggcaaagctccagctgtcgtagagctgtgtgtgcaggctggggctgaaatacctgacgagtatcgggccatgatgaggactgacattgtcatcccggactctgtggaagctcggatggctgcataacaacaatgttctgagcttctacgactactatcctgcagttcttgtccagagtacagattccaaccaaatgtgccgctttctgggcatgctgtgatggtgggtctcttagccctgtggtaattactcaaggagcagcagatgcatagtttgtataatataattagcttagctaaatcatgatcgtttgggatttaaag

SEQ ID NO: 14132 - DNA, 435 bp, Zea mays
  Clone ID: LIB36-009-Q1-E1-H6
ggagaggagagatgatgatgatgccgacggcggcgtcgctgatggacgatcttgtcgaggagttcctcatccgcctcccgcccgacgaccccgcgagcctcgtcaacgcctccctcgtctgcaagcggtggagccgcctcatcgccggccgcgtcttccgccgcaagttccgcaagatccaccgcgccaagctgctgcacatggcccgggggcaggtctataggcagcggcggcgacggcggcagcggcagtgatggagcggcccgtccggtccgaccgtcgattggctgcttgctctgcatcttctggcttctgcaaccaggaagctgactgaacgctcgctattgccaataattaattagtactattttcttcgtttcttttttttatttgtcgtatacgaactaaaacagagttagtgataatgataatgat

SEQ ID NO: 14133 - DNA, 269 bp, Zea mays
  Clone ID: LIB36-009-Q1-E1-H7
gttcgtcgttgttcgccaactccctgttagtcgatttctaaatcgacgtacaatgaaatacatcatcgctgcaaactcacaaatgaaaacaagggaaccttgtagcaaaaaaaaaaagaagtggacagaataatgaataagcatgtcaaatatctcttgagtatctatttgttcaagtatgaatgactttgtacaagtatcaaagattgtgagtggaaccaaattaagcagggctttgtgcaaaaagaaataagctaaaagactacgag

SEQ ID NO: 14134 - DNA, 427 bp, Zea mays
  Clone ID: LIB36-009-Q1-E1-H9
aaggaagagtgcctgactggagcaaggcttctgtgcaggagatgaaggataggttcgtcgctgttgggttgggtcctcgccagcttgctgtcatgtcagcgttccttggacctgaccaggctgctaccgagggacgactgatagctgatccggattgccgtccatgggtggagaagtaccagcggagccgcgagaccgtctcccggactgactatgaggttgacctgataaccacactcacaaagctgagctcccttggccagaagataaactacgaagcctacacataccctaagcagaagattgacctgggaaaactgaaactgtaagagttgattgccgggcacctgcatcggccgtatccaggaatcgggagctaattgtatggtaggctctgtctgctagagtgatttgattcggcgctgac

SEQ ID NO: 14135 - DNA, 258 bp, Zea mays
  Clone ID: LIB36-010-Q1-E1-A12
agcaaattttttatcttatagatgctacttaagtacatatacaagatatgccatcaggaaaattttcataaaatgtgcagtaaacagcacttcgcaaggctgccgatcatataagccgccttcggcctttttattgtatctgggctccatttcgtgaattaaacctacgcaattcgccgctcttaactgctaaaaaagaaaaaagaaaaaaataaaatcaaaaaaaaatattaaaacaaaaaaaacatgaagccagac

SEQ ID NO: 14136 - DNA, 418 bp, Zea mays
  Clone ID: LIB36-010-Q1-E1-A2
cccacgcgtccgcccacgcgtccgtgcagttcgaactggactcgctggaccagaacctggccaagaacgacgccggcggcatcatcggcacccggttcgagtcctccgacgtcaagtccaccccgctccagccctacagcgaggtgttcggcctccagcggttccgcgagtgcgagctcatccacggccgatgggccatgctcgccaccctcggcgctctcaccgtcgagtggctcaccggcgtcacctggcaggatgctggcaacgtggagctggtggatgggtcctcctacctgggccagccgctgccgttcaccatctcgacgctcatctggatcgaggtgcctgtgatcggctacatcgagttccagcgcaacgccgagctcgacccggagaagaggctgtacccggcggctcc

SEQ ID NO: 14137 - DNA, 288 bp, Zea mays
  Clone ID: LIB36-010-Q1-E1-A3
atcagaatcacgatttctcagatactggagcatccttggttcaaaaaggggtacaagcctcctgtttttgacgagaaataccaaactaacttggatgacgtggatgctgcttttggagattcagaagaccggcatgtgaaagaggaaactgaacatcagccaacctcaatgaatgcattcgaactgatttctctaaaccaggcactgaatctggagaatttgtttgaagcagaggaggagtataaaagagagacaagattcatctcacagtggcccccaaaagaagat

SEQ ID NO: 14138 - DNA, 452 bp, Zea mays
  Clone ID: LIB36-010-Q1-E1-A6
cccacgcgtccgcacaagccatggcgtccatgaccggcctctcgcagggcgttctgcccagcaggcgcgccgccaacagggccaggacggccgccgtcgtcagggcgtccgccgaggcgcaggcgcaggcgggccgccgcgccgtgctcgggctggtggccactggcatcgtcggcggcgccttgtcgcaggcggtgcacgccgagaccgtcaagaccatcaagatcggagccccgccgccgccctccggtggactccccgggactctgaactctgaccaggcgagggacttcgacctccccttgaaggagcggttctacctgcagccgctgccgccggcggaggcggtggcgagggtgaagacgtcggcgcaggacatcatcaacctcaagccactcatcgacaagaaggcgtggccgtacgtccagaacgacctccgcctccgggcctcc

SEQ ID NO: 14139 - DNA, 65 bp, Zea mays
  Clone ID: LIB36-010-Q1-E1-A7
cccaagcgtccgcagatgcattggagtgaatgttggaggtcgcgcagggcgttctgcacaacagt

SEQ ID NO: 14140 - DNA, 406 bp, Zea mays
  Clone ID: LIB36-010-Q1-E1-A9
cggacgcgtgggcgcggagtggatgcccggccagccacgccctgcccacctcgacggctcctctcccggggacttcggcttcgatccgctgggcctcgcgaccgtgccggagaacttcgagcggttcaaggagtcagaggtgtaccactgccgctgggccatgcttgccgtccccgggatcctggtgccggaagctctgggcctgggcaactgggtgaaggcgcacgagtgggcggccgtccccggcgggcatgccacgtacctgagcgccccggtgccgtggggcacgctgcccaccatcctggtgatcgagttcgtggccatcgccttcgccgagcatcagcgcaccatggagaaggaccccgagaagaagaagtaccccggtggcgccttcgacacgctcggc

SEQ ID NO: 14141 - DNA, 445 bp, Zea mays
  unsure (1)..(445): unsure at all n locations; Clone ID: LIB36-010-Q1-E1-B10
agcgagtacggccgaccagaccaatggcactgcggctacccatctcctcgacccacgggctggcctcctcgccagcgcccatctcctccacgacgacgtgccggccggccgccgccagtgggagcttgatcccgccagctgccctggtcgcagttgccatccgctgggcgtcggcgtcggcgtcccaaaagaggggcctgctgctgacgacggcgaggggcggcggagtcctcgcgccggtgaggtcgagcgggatcgagacgacgacgacctcggtgggagctgaggccgtcaccgggcaggtcacggaggtcaacaaggacaccttctggcccatcgtcgaggccgccggcgacaaggtcgtcgtcctcgacatgtacaccgaatggtgcgggccttgcaaagtgatggctcccaagttccangagatgtccgagaagaacct

SEQ ID NO: 14142 - DNA, 427 bp, Zea mays
  Clone ID: LIB36-010-Q1-E1-B11
agccgacagacaacatggccgcctccgcctccaccgtctccggcctcgccggcgcctccctggccagccgcccggcgttctccaccagcttcacgcggggcagccgggtgtcggcgaggaaccccctgatgagcaggaacctggagaggaatggcacgatcacctgcatgacgtttccccgggactggctgcggagggacctgagcgtcatcggcttcgggctcatcggctggatggggccgtccagcgtcccggccatcaacggcaacagcctcacggggctcttcttctccagcatcggccaggagctggcccacttcaccacgctcccgcgcgtcacctcccagttctggctgtggctagtgacgtggcacctgggcctgttcatcgtgctcagcttcggccagattggattcaagggcatgac

SEQ ID NO: 14143 - DNA, 223 bp, Zea mays
  Clone ID: LIB36-010-Q1-E1-B2
gttaaacaatcgccagctgtctacagatatgaatagcctgccaattttttttaacttgggctaaatgtattctgaaaacgtttatacatagcatagtagcacactggactttttttttgtttgataacattagtgtgtgcgcgttactttgccatttctcatgaaagccatggcaaaataagaaactttggacgtgttactagctccggtatatcacctttgc

SEQ ID NO: 14144 - DNA, 384 bp, Zea mays
  Clone ID: LIB36-010-Q1-E1-B3
gcgatcgacagcgtggtggatcccctccgcgacttcgccaaggacagcgtccgcctcgtcaagcgctgccacaagcccgaccgcaaggagttcaccaaggtggcggcgcggacggcgatcgggttcgtcgtcatgggcttcgtcggcttcttcgttaagctcatcttcatccccatcaacaacatcatcgtcggttccggctaggcttacaggagtacacggcgactagcatgggagtagtgcaatacttttgggagcaatagataacgaggatcctggtctttcgaatagtattgttaatgaaatttttcgttcggttgtgtttctgatgtaaccgttgtactgagtagaccttcgggataccggattctgagtaaacctttg

SEQ ID NO: 14145 - DNA, 326 bp, Zea mays
  Clone ID: LIB36-010-Q1-E1-B5
cctcactcgggatcaaagctgccaatggtgtagtcattgccactgacgaagaagctgccttctattttagtggatgaaacatctgtgcaaaagattcaggcactaacacctaatattggagttgtctatagtgggatgggtccagatttccgtgttctggtgagaaaaagtcgaaagcaggcacaacaatattatcggttgtacaaggaacatatacctgtaacacagcttgtacgagagactgctgctgtcatgcaggagttcacacagtcacgtggtgtgaaaccatttggagtatcactgttgattgctgggtatgatgacaa

SEQ ID NO: 14146 - DNA, 405 bp, Zea mays
  Clone ID: LIB36-010-Q1-E1-B7
aaggagagtacgtggaggagcagccatggcttcatcggtggccgccgcggcgagcacattcctgggcacccgcctggcggacccggcgccacagaacgggcgcatcgtggcccggttcgggttcgggttgggcggcaaggcgaagcctgctccgaagaaggtggcgaagacatcgacctcctctgaccggccgctgtggttccccggcgccgtggcgcccgactacctggacggctcgctggtcggcgactacgggttcgacccgttcggtctcgggaagcccgtggagtacctgcagttcgagttggactcgctggaccagaacctggccaagaatgaggccggcggcatcatcggcacccggttcgagtcctccgaagtcaagtccaccccgttgcagcccta

SEQ ID NO: 14147 - DNA, 454 bp, Zea mays
  Clone ID: LIB36-010-Q1-E1-B8
acacactcctcccttcgcctgtgatcatgtcgtcttgctgcggcggcaagtgcgggtgcggctccagctgctcctgcggcagcggatgcaacggctgcggtatgtaccctgacgtggagaccgccgccaccagcagcgtcaagaccacggtcctcgccgcgccgaccaccaaggccagcgccggcggcttcgaggcggccaccgagggcggcggctgcgactgcaacacctgcaagtgcggcaccagctgcggctgctcctgctgcagctgcaactgagctggcccggcccggcgatggcgcacgagagtcgagaggaggaggacgacgacgaggcgtataaatataatagcggcgtccagtaaataagatcctgtcaactgcacccgccattatccatggtcgctcgctcctcgcctgcgtctcctggtcctggggtccgtctgaacgtcctc

SEQ ID NO: 14148 - DNA, 422 bp, Zea mays
  Clone ID: LIB36-010-Q1-E1-C10
cggacgcgtcggctgacgcgtcgggacacctgcaggaagctccaccacctcctccatgagagagatctaccaaagcatagcctccttcctgctgacgggatcgccgtttgggtcgcagcttatcacataataggaggtcgcacaacaccttggcaaatgattaagtctcagcagctgcagctacggattcacgatatgatgagtctgaaagggatatcattcatcagcagcaaggtgataatgcatgaatccactgcagtcgcgtcatcatcatcatcacctgcacgtgcggctacaggccagcatgttgctgcccatcgtagtcccagcaagattgcggcgtcctcgtggactcattaccgccgtctgcactgacagacgacgaatacgcctcagatggccgtgagtccgaatcttcgacc

SEQ ID NO: 14149 - DNA, 391 bp, Zea mays
  Clone ID: LIB36-010-Q1-E1-C11
ataacgttggaatgggcaaggatcacacactcctttctttgatacatggactcgtcaagtttgataagtatgggccggacaagaaaaaggttaatgtttacccatatgagaacgatcctgaaaacccaaacagttacagagcaaggaatagagagtacttccgcatgcggcgtgaacagcacaaggcgagagcggaaggcgccgctgagcctcagttggtatcacctgctgttgatgaaaactctgaggtcagcgctgactgctgataagtttcctgtgtggtgtttctctttttcacagcccttgttacactttttcatccttaattgtaagatcatatgatctatcaaggtcatacttacatctgttgtttacatcaatggatatgttc

SEQ ID NO: 14150 - DNA, 441 bp, Zea mays
  Clone ID: LIB36-010-Q1-E1-C12
gtgctcgatctccatctcgaccgtcgctcaccgggaagctacgctacgacgaagcatggcgtccgtcaccgcccgcgccccggtcgcggccctgcgcccgtcggcgtctctcaagtcgtcgtcgtcgtcggcggcggccttccttggccactctagccgcctcggccgcactgctaccgcgtcgccgacgaggcgcagcctaaaggcggaggccaagggcgagtggctcccgggccttccctcccctgcctacctcgacggcagcctgccgggtgacaatggcttcgacccgttgggcctggcggaggacccggagaacctgaggtggtacgtgcaggcggagctggtgaacgggcggtgggcgatgctgggcgtggccgggatgctgatcccggaggtgctgaccaaggccgggctgatcaacgcgccgcagtggtacga

SEQ ID NO: 14151 - DNA, 337 bp, Zea mays
  Clone ID: LIB36-010-Q1-E1-C3
tccgcggacgcaagtgttaccacaggctcattcagctagacgcagatcagacagacatgaaaagtagaaagaattttgatcaaatcaatagaacgaaggatcccttacctgatttgaatttcatcctcctttaaatatgatatgctctaagtcttcccatacattcctataatgactgctacgattttctccattttgcgaattcctagtttacttgaagtatattactatcatattcattatctaaatcgatccactttaaataaaataaaagcaatctacttgaactaaggtagaaagagtacatatacaacaagatattctgtttcagaattct

SEQ ID NO: 14152 - DNA, 360 bp, Zea mays
  Clone ID: LIB36-010-Q1-E1-C5
gtaacgtgtaccctccgtggcaagaggctggacggtggtgtatctgtgctctcggttggcgtgaacctgatctggtcttaagaaccccggtggcgagttgacatatgcaagggttaagtgctacatatgtcgtgtgattgaagatcctcagctgagtataatcgattcggatcgccgtaccttcgtggttatgaatacttggtcactgccctacacgtagcaatccagtgaagatgaagggatgatgaaaagacggctagtataggccaagtgcttgaactagggtagaaagaactctagatgcaggtaactttacttaacctgataagtaaaattggattttaaggatccactcatagt

SEQ ID NO: 14153 - DNA, 350 bp, Zea mays
  Clone ID: LIB36-010-Q1-E1-C6
gggatggcttctcctccccctccggttcgggttcgggttcgtgaggttctccggggttcggtttcgtgggtgggcggatcgagatggcggcgtcggatgttgagtaccgctgcttcgtcggcggcctcgcctgggccacggacgaccacaccctccacaacgccttcagcacctacggcgaggtcctcgaatccaagatcatcctcgatcgggagacgcataggtcacgcggcttcggcttcgtcaccttctccacggaggatgcgatgcggaacgccatcgagggcatgaacagcacggagctggactgccgcaacatcaccgtcaacgatgcccagtcccgcgggggc

SEQ ID NO: 14154 - DNA, 442 bp, Zea mays
  Clone ID: LIB36-010-Q1-E1-D10
gacgacttgtttcattgattcttgaagagatcgagcttcttttgcaccacaaggtcgaggatgtcttgcaactgcggatcaagctgcggctgcggctcaagctgcaagtgcggcaagaagtaccctgacctggaggagacgagcaccgccgcgcaggccaccgtcgtcctcggcgtggccccggagaagaaggccgcgcccgagttcgtcgaggccgcggcggagtccggcgaggccgcccacggctgcagctgcggtggcaactgcaagtgcgacccctgcaactgctgatcacatcgatcgacgaccatggatatgattattatctatctagcttgtggtggtggttgaacaataataagcgacgccgagctggctgccatacatacgtattgtgtggtgtgtgtgagagagagagaaacagagttcttcagtttgctat

SEQ ID NO: 14155 - DNA, 425 bp, Zea mays
  unsure (1)..(425): unsure at all n locations; Clone ID: LIB36-010-Q1-E1-D11
cggacgcgtgggatcttgcagcaggcggagccgcccgacccaatccgtgcgtgtgttggtcgagatggctacaacagcttacgctcccatggcgagccaggtgatgaagagcagcccggtgcactcgaggccgaggggcctgtcaggcgctgcgctcacgcggccccggccccggttcagcgtcgtcaaggccgccatccagcccgagaaggcaacgtaccaggtggtgcagcccatcaacggcgacccgttcatcggcagcctggagacgcccgtcacctccagcgcgctcatcgcgtggtacctctccaacctgccggcctaccgcaccgccgtgagcccgctgctgcggggcgtcgaggtcggcctcgcncacggctacctcctcgtcgggcccttcgcgctcaacggcccgctccgcaaca

SEQ ID NO: 14156 - DNA, 412 bp, Zea mays
  Clone ID: LIB36-010-Q1-E1-D12
cccacgcgtccgatactacaacgcggaggccgacaagatcctgcacatcaatctctcggacggggaggcaacagccacgttaccgtcccggctgagcaatgcgcgccaacagcaggccagcgcacgccaggctcaaggagcatcgtcatgctcgttctctcatcaccgtcccgggcaccattgaccaatgaccgtcagtggacatgcgagctcatcaaccagatacttcccacaccattgaaggacaatcagcgcgtcatcgaatgatctcctcggctgttcatcccgcatagccccagagcggtgagcgacatctccatccagatcctcgacggcctcctgcacggatcctctgtcgccaaacactaagctgccggcctgctgttgcagctgcagctgctcaacaagacca

SEQ ID NO: 14157 - DNA, 429 bp, Zea mays
  Clone ID: LIB36-010-Q1-E1-D4
ccccagccccactctctccatctagctccctaactgcaccggccgccacaccaccccgaccggaccctccacaacaatggccaccgtcctgggcagcccccgcgcgccggccttcttcttttcgtcgtcctccctccgcgccgcgccggcgcctaccgccgtggcgctgcctgcggccaaggtgggcatcatgggccgtagcgccagcagcaggcgcaggctgcgcgcgcaggccacctacaacgtgaagctgatcacgccggagggggatgtggagctgcaggtgcccgacgacgtgtacatcctggaccaggccgaggaggacggcatcgacctgccctactcctgccgcgcggggtcctgctcctcctgcgccggcaaggtcgtctccggctccgtggaccagtccgaccagagctacctcgacga

SEQ ID NO: 14158 - DNA, 445 bp, Zea mays
  Clone ID: LIB36-010-Q1-E1-D6
cccacgcgtccgggtgggttggcttctcctccccctccggttcgggttcgggttcgtgaggttctccggggttcggtttcgtgggtgggcggatcgagatggcggcgtcggatgttgagtaccgctgcttcgtcagcggcctcgcctgagccacggacgaccactccctccacaacgccttcagcacctacggcgacgtcctcgagtccaagatcatcctcgatcgggagacgcagaggtcacgcggcttcggcttcgtcaccttctccacggaagaggcgatgcggaacgctatcgacggcatgaactgcaaagagctggactgccgcaacatcaccgtcaacgatgcccattcccgcggaggccgtggaggcggctgctgaggctacggtggtggccgtggaggcggcggctacggcggtggcgggcgccgtgatggcggcgg

SEQ ID NO: 14159 - DNA, 290 bp, Zea mays
  Clone ID: LIB36-010-Q1-E1-D7
ctagaagagaaccagtgtgctagtgctacagctacggcctagctacctactacggcgcagctagcagcggcggtcatgagcggcgggcgcgaggagagcaccatcagcatgtggtcagagctggccgccctgcgcgcgctggtgcgcgacgcggcggcccgggccgggagggagacggcggggtggcgcgggcgggagtgatacgaccaccgccacgtgctgtgcctgagcgcaatggcgatccagctgctgatctgcgtaaccagctaatttgcagtcaactactgctg

SEQ ID NO: 14160 - DNA, 342 bp, Zea mays
  Clone ID: LIB36-010-Q1-E1-D8
cttgctctgatagcttgctccaggacgtacgtacgtacgtagatcgatccatcgatcgctagctagctgacgaccatggcgtccctctcctctgccgccatcaccgccccttccttcacggccgcgcccgctcgcgcagtggtcagcaggaggtccttcaccgtgcgtgcctctctccgcaaggccactgccaccgccgccgtggccgttgccgccagcgtcctgcttgccggcggcggcgccatggcccaggaggtgctgctgggcgcatgcgacggccggctcgtcttcgagcccagccagttcagcgtcaaggccggcgacaccatcaccttcaagaac

SEQ ID NO: 14161 - DNA, 333 bp, Zea mays
  Clone ID: LIB36-010-Q1-E1-E1
gtcggattctagggtcgactcacccatccgctctcctcagccgccgtcatcgccccttccttcgccgcacgagtgccaacccgcgacgtggtcactaggaggtccttcaacgtgcgcgcctctctccgcaaggacaacggcaacgtcgccatagcaatcgctgctacccgcgctggtgccggacgtgccatggcccaccaggtgcagatggccgcatgctacggccggctcgtcttcgagcccagccacttcaacgtcaaggccggcgacaccatcacattcaagaacaacgccagcttctcgcacaacgtcgtcttcgactaagacgatgtg

SEQ ID NO: 14162 - DNA, 410 bp, Zea mays
  Clone ID: LIB36-010-Q1-E1-E10
gctagctcctgcgtgagctagtagctagtgccatgcgtcgtctctgtcgttcggttttgcttcgggtcaccgtgtaccctttgcttgcttggtttcttctttccttttttcctttttttttcttcttttccccggccatggttcctttgctttccagcagttctctgctggatgtgatgtatccattgttgcaatcatggccttgcattggctacctctatacctgctacaaaactactgcaacgcctatatatacttggggtgaggaacatgtgaatgcaagctccggctatcatatacatgtaatatggatacaaactatatatataaatccgccgaggcgccgacaatactaaaaaataaaaataaatctcaaaaccctaattaacaatacaaaaaagaactagatt

SEQ ID NO: 14163 - DNA, 434 bp, Zea mays
  Clone ID: LIB36-010-Q1-E1-E11
ctccgcggcgctctccaccgccgccaatcccacccagctctaccggtcccgcgcttcgctgggcaagccggtgaaggggcttggcctgagcatgggccgcgagcgcgcccagcggagcattgtgtgccaggcggcgagcagcatctccgccgaccgcgtccccgacatggagaagcggaagctgatgaacctcctcctcctcggcgccatctcgttgcccaccgtcggcatggtcgtcccctacggcgccttcttcgtccctgccggctccgggaacgccggcggcgggacctacgcgaaggacaagctgggcaacgacatcacggtggaggcgtggctcaacacgcacggtcccaacgaccgcacgctcgcgcaggggctcaagggtgaccccacgtacctggtggtggagcaggacaagacgctggccacct

SEQ ID NO: 14164 - DNA, 125 bp, Zea mays
  Clone ID: LIB36-010-Q1-E1-E12
aaaactaccaataatttataacagttcaaagtaacttctttgaatcacttttgtaatcactccgatcatgtacattgtaaaacttgatgtaacttgtaaaaatttagtaataagatttctgctgc

SEQ ID NO: 14165 - DNA, 447 bp, Zea mays
  Clone ID: LIB36-010-Q1-E1-E3
agcaacctcagattctactcggctctcaaacgccacttgttctcgctccctctctgcctgaccagctaggatcagcggaagcagcaatggtgatggcgtcgtcgagcgggctgaggagctgcagcgccgtgggcgtgcccagcctgctggctccgtcgtcccggtccggccgcctggcgccgttctgcgccaacgccaccacctctggccgcgtcaccatgtccgcggagtggatgcccggccagccacgccctgcccacctcgacggctcctctcccggggacttcggcttcgattcgctgggcctcgcgaacgttccggagaacttcgaccggtttcaggagtcagaggtgtaccactggcgctgggccatgcttgccgtcccgggaatctgtggcggagctctgggctgcgcaactgggtaaggccaggattggcggcgtcccg

SEQ ID NO: 14166 - DNA, 439 bp, Zea mays
  Clone ID: LIB36-010-Q1-E1-E4
ctgagctcacgccagtagatatgaaggccacgtcgtcgcccgtggctgccgccatcctcgcagcaccttcctccgccgccgtccgtaatcctcaagcctctgcctcgtggcgcatcgaatggctgcagcacgggcaggcccgacgtgcttgcctggacttggctgagcgcgtgtctgcagctggcgctggggcatgtgtgcggagcggcgcgtgcggcagaccaggaatacgtgagcgatacgaacgaagtgatatggaacgtgcggtcgacgatcaatctggacaagtcggaccctagcgtggcagacgctgtggcggagctccgggagctgtccaactcgtgggtggccaagtaccggcaggataaatcgctgctggggcggccgtcgttccgggacatgtactcagcgctcagcgccgtgtctggccattacatca

SEQ ID NO: 14167 - DNA, 431 bp, Zea mays
  unsure (1)..(431): unsure at all n locations; Clone ID: LIB36-010-Q1-E1-E5
ggagattcgaagattgagaatacagcaaagaataaaaaatgtggaactcggaatttcagatgaagagcgtgaccatgaactccctgattttccatcatttattccgttcttgcctcctctgagtgcagctaatctaaaggtctactatgccacatgtttcaccctcatagctgggataatggtgtttggtggttttcttgcaccaatcctggaacttaaacttggtgtanggggcacgtcttatgaagacttcatccgcagcgttcatctgccgatgcagttgagccaggtagatcccattgtggcatctttctcaggcggagcagttggagttatctctgccctaatggttgttgagatanacactgtcaagcagcaagagcttaagcggtgcaaatactgtttaggaacggatacctgcatgtgcccgc

SEQ ID NO: 14168 - DNA, 448 bp, Zea mays
  unsure (1)..(448): unsure at all n locations; Clone ID: LIB36-010-Q1-E1-E6
ggaaatgcttgtctataagtacatggcaaaaggtgacctcacaaccgcactgcacaagaagtcagtggaagttgaacaggggttgcgctcattggattggataacgaggctcaagattgcaataggtgtggctgaggccttgtgcttccttcatgacgaatgcaatcctccgttggtccacagagatatccaagccagcagtgtgcttcttgaggacaaatttgaagtgtgccttgggagtctgagtgaaatatgcactcaacaaagtgcaggaagccaaagtttcttctctcggattctaagatcatcgaagttccttgacaagaacataccaggtccaccagctagctgctcatacgacatttactgtttcgggaaggttctactanagctaatcactggaaacttcggtgcgagtggctcaaacaacgcagattcagaagagtgg

SEQ ID NO: 14169 - DNA, 236 bp, Zea mays
  unsure (1)..(236): unsure at all n locations; Clone ID: LIB36-010-Q1-E1-E8
ccgggcgactacagctgggacaccgcggggctgtcggcggacccggagacgttcgccaagaaccgggagctggaggtgatccactcccgctgggccatgctgggcgcgctcggctgcgtcttcccggagctgctcgcccgcaacggcgtcaagttcggcgaggccgtgtggttcaaggccggctcccagatcntcagcgagggtggactggactacctcgggaacccgagcctcat

SEQ ID NO: 14170 - DNA, 433 bp, Zea mays
  Clone ID: LIB36-010-Q1-E1-E9
gcaaggcgttcggcgtcgactccggcgccgccaggatgacgtgctccctgtaggacgtcgacagcaggtgcgtcgacgccgcgaagctcgccggcttcgcgctcgccatctcggtgctcctcggctcgggcgcgagcgcggcgggcacgcacaagatgctgacctacgacgagatccagagcaaaacgtacatggaggtgaagggcacgggcacggcgaaccagtgcccgaccatcgacggtggcgtggcgtcgttcccgttcaatgccggcaagtaccagatgatgaagctgtgcctgcagccgaggtccttcaccgtcaatgcggagggcatcgccaagaacgcaccgcccgagttccagaagagcaagctcatgagacgccgcacgtacacgttggacgagatcgagggcccgctcgatgtctgctccga

SEQ ID NO: 14171 - DNA, 259 bp, Zea mays
  Clone ID: LIB36-010-Q1-E1-F11
caacaacgtgctcaccagcctcaagttccactagaacgtggtgcatcagcatacctgctgctgccgccgccgccgccagttgtttgctgtggaaagctagatgcatgcgtgttgtaaaggaacctgaagcgttgcatcggtcatgattcatgcatggccagcctgctgcctgtaacaacaaactagtattgatcttattgagaccggaaactgtattgcacatggtaaatcaatgtacaattcctccctagatgcggac

SEQ ID NO: 14172 - DNA, 435 bp, Zea mays
  Clone ID: LIB36-010-Q1-E1-F12
gcacagaggacgacgcggcagcgaggcggaagcaaaggaaaggggatatgtcgaggccgcccaacaggagcgacgcgcacctctccgccgaggacgaggcggcgctggaggccgaggtgcgggagtactacgacgacgcggcgccaaagcgccacaccaagccctcccgcagcgagcactccgccgcgtacgtcgacgcgctcgtcccggacgtcggcggcaactcccacccggagctggacaagttccaagagctggaagcccacaccgagaggttggtgtacgagggcgccaatgtgggagatgagttcgtggagacggagtactacaaggacctcggcggcgtcggcgagcagcaccacacgaccggaacgggcttcatcaagatggacaaagctaaaggcgcccccttcaaactgtctgaagattccaatg

SEQ ID NO: 14173 - DNA, 299 bp, Zea mays
  Clone ID: LIB36-010-Q1-E1-F2
atccgtccaccgaacctcgcccattagcaaattccaggtcacttggcggacactctcatgtacgccaagctccatgagctgttggccctcgaatagcttgcgcacatgctgagtgcgaacccatacgtgatccaggagtatcactcacgcaacggagttcccttccagcaggtcatttggatcctcgacagggccctgataatcaacctgcgtggcatgaactacctcggaacatcatacctcatacaaggcaaactgtccgcctacaacttgccatgttaggtatcgcacatcatgcc

SEQ ID NO: 14174 - DNA, 365 bp, Zea mays
  unsure (1)..(365): unsure at all n locations; Clone ID: LIB36-010-Q1-E1-F3
aacaaatctaggcttccaagcgagcgaaagcctacctccgccagccgatctaccaacatcctctccgccgattggaggcacctgcgaagatgccgcagcggcactcaaagaacaacaacgacctcgccttcttcacgtacgaggagaagcggaagctcgggtacggcacgcagcgggagcgcctgnggaaggactccatcaagcccttcgacgcctgctgcctctgcctcaagccgctcatcgacccgctctgctgccccaagggccataccttctgcaaggagtgcatccttgagtgcctcctcgcccaaaagaaggacatcaagcgtaagctagcagctcacgaggcccagaagaagcaagag

SEQ ID NO: 14175 - DNA, 448 bp, Zea mays
  Clone ID: LIB36-010-Q1-E1-F4
cgccaagatcctggggctggaggccatgatccgcgtgcagtgccacaagcgcaaccacccgtcggcgcggctgatgacagcgctccgcgagctcgacctggacgtgtaccacgccagcgtgtccgtcgtcaaggacctcatgatccagcaggtcgccgtcaagatggccagccgcgtgtacacgcaggaccagctcagcgccgcgctctacagccgcctcgcggagcccgggtctgccatgggcacgtaatcaatgaggagagctgctcagctcgcttgtggctgccggaataggcactgatactactgctactcaccagcggactgtcctgtcgtcgtggtcaccacggttacaacacgataggcagaaagactcacgagggatggagacgacgacgatgccggtgctgtataaactttagaatgaacgatggatggatgatgatac

SEQ ID NO: 14176 - DNA, 357 bp, Zea mays
  Clone ID: LIB36-010-Q1-E1-F5
gaggaggcccgccgccggcgtcacgtacgtggagggcatgaacgcctacagcggcctcaaggggctcaacaaggtgaccatgctcggggtgcgcaagaccgccgactactccttcgccaaggtcgtggcgtcgctcagccccgcgggcaggaagcggcgcggcggggcgttcggcgcccagatgaacgccgccgccgagatcttcaggatcgccgccaccatgagcggcctcgtgctcgtcggcgtcgccgtcggcttcgtgctgctccgggtggaggccgccgtcgaggaggccgagtagggcgctcgcgcctgcttcataagccgtgatatatatataaaaacgtgatgtatgct

SEQ ID NO: 14177 - DNA, 399 bp, Zea mays
  Clone ID: LIB36-010-Q1-E1-F6
gaatgaacagcatgttccttttcttgctccagcaccgtcatacagtggagggatggttccacctcaaggaatgtatccatcttctgattggagtgggtatcatcaggtacctttgaatccatattaccctcccggtgttcctttcccgcattttccagctgcccatatgaatcacccgatgtacaaggctgcagatataccaggacatcaaccaccaccatctgatgagtatcccgagagacctggccaacctgaatgccagcatttcgttaagagcggtttctgtaaatacaggatgaaatgcagatatcaccatccaaggtcgcgccagtctgcaccaccaccagcaggtcttagccccatcggcttgcctatcagacctgatcaacctgtgtgcac

SEQ ID NO: 14178 - DNA, 443 bp, Zea mays
  Clone ID: LIB36-010-Q1-E1-F7
agcaaagaggaccagtgctgttgatctgctgaatgatcggtactttaccgaagagccattgccggcacctatagaaggattacatgtcccggcatcaaaggatgaggatgatgacagctcaacagaagaatggggtaattacagggatggtgtctctcggattgactttgatgagtttggtagtatggatgccaccaaaactgagaagggtttcagcatacagttttcgtgatgaacaaagacgtagacgtacggatcatgcgtgccatgttcacactaagatcatatcatggtatttatctacatgggatttgaattgctgtcaaaataaacgaccatccttaagcaataaaagattgtgcatggttcctttgggttaacaatttttttaagttccaatggaacttggtgatccttggtacggcagacccatttttttccct

SEQ ID NO: 14179 - DNA, 435 bp, Zea mays
  Clone ID: LIB36-010-Q1-E1-F8
cgggatcatgttcctctccggcgggcagtcggaggtggaggcgacgcagaacctcaacgccatgaaccaggggcccaacccgtggcacgtgtccttctcctacgcgcgggcgctgcagaacacctgcctcaagacctggggcggccagccggacaaggtcaaggcggcgcaggacgcgctgctgctgcgcgccaaggccaactccctggcgcagctcggcaagtacacctccgacggcgaagccgccgaggccaaggagggaatgttcgtcaagaactacagctactaattaatcgcccggccatcacccgggataccgccgcgcctccgagagatacgtgtgtactgatcatggttaagcacgtactccgatccattcgcatcccatgaagccatgataatgatgatatgatccatggaccatgcatggtgctc

SEQ ID NO: 14180 - DNA, 446 bp, Zea mays
  Clone ID: LIB36-010-Q1-E1-F9
cggacgcgtgggcggacgcgtgggcacccccacaacccgaagcagcgaaagctcccctaaccctctccgcgcatccgatcgcaaggaagaagagggagatgagctactacgggcagcagccccccgtcggcgtcccgccgcagcaaggctacccgggcaaggacggctacccgccagcggggtacccgccggccggctaccccccgccggcgcagggctaccctccgcagggctacccgccgcagtacgcgcagccgccgcctccacagcagcagcagagcagcgggccttccttcatggagggatgcttggctgccctctgctgctgctgcctcctggacgcctgcttctgagagtgagaggggccgaccgacggattcgacacggcgacaagtgaaactactagctttctatgcgagggagagagagagagagctggaactggg

SEQ ID NO: 14181 - DNA, 450 bp, Zea mays
  unsure (1)..(450): unsure at all n locations; Clone ID: LIB36-010-Q1-E1-G10
acgccatggcggagaacaacgtcatgttcgagggcatcctgctgaagccgtccatggtgacgcccggcgcggaggccaaggacagggccaccccggagcaggtggccgcgtacaccctcaagctcctccaccgccggatccccccctccgtgcccgggatcatgttcctctccggcgggcagtcggaggtggaggcgacgcagaacctcaacgccatgaaccaggggcccaacccgtggcacgtgtccttctcctacgcgcgggcgctgcagaacacctgcctcaagacctggggcggccagccggacaaggtcaaggcggcgcaggacgcgctgctgctgcgcgccaaggccaactccctggcgcagctcggcaagtacacctccgacggcgaagccgccgaggccaagganggaatgttcgtcaagaactacagctactaattaatcg

SEQ ID NO: 14182 - DNA, 142 bp, Zea mays
  Clone ID: LIB36-010-Q1-E1-G11
agcgaacgactaggcgcgcacatagacaagaacctcggcgctgacatgactgatgacatggtgtccaggtcccacctctcccacgacatcctgcgcaacaagcgtgcctacagcagggccgaagcagccgtgtaccgtgtca

SEQ ID NO: 14183 - DNA, 329 bp, Zea mays
  Clone ID: LIB36-010-Q1-E1-G2
cgaacggacgagccccgcagagaaagaacgcctcgcatgcaactgctcaaaccgaaggaagccgccacactcccgcgcgaggccctcgaggcccacatcgtctcgctggtccgcagatgcccgggcttcctcgcgctccgcagcgcgcacgcgcacctcacgcggctccgcttgccgcgcctcaccgccgccttcgcgctctcgaagctcctcgcctcctgcgtctcggcgcccgcaacagccgcagcccaagccgcggggtcctcctacgcccgcaacctgttcggacaaatccccgaacccgacgccttctgctacaactccctcat

SEQ ID NO: 14184 - DNA, 329 bp, Zea mays
  Clone ID: LIB36-010-Q1-E1-G3
cgcacatctccggggtcaacttcgacctgccgcacgtcatctccgaggcgccgccgttccccggcgtgcgccacgtgggcggggacatgttcgcgtccgtgcccgccggcgacgccatcctcatgaagtggatcctccacgactggagcgacgcgcactgcgccacgctgctcaagaactgctacgacgcgctgccggaaaatggcaaggtcatcgtcgtcgagtgcgtgctgccggtcaacacggaggccacccccaaggcgcagggcgtgttccacgtcgacatgatcatgctcgcgcacaacccaagcggcaaggagccgtacgag

SEQ ID NO: 14185 - DNA, 429 bp, Zea mays
  Clone ID: LIB36-010-Q1-E1-G5
gccagccgtctcgcgagggtttctccgccgccgccgccgccgccatgcctcgccgcagctcaggaaggtctgcgccacgcgcagctccccgtgctgctccagtgaggaacccgccacagccagcacgccaggctcctcctccagctcctgttcgagatggtggtggctccatgtttggaggaattgggtccaccattgctcaaggtatggcgtttggcacgggtagtgccatggcacacagggctgttgatgctgtattacgtccccggaccattcagcatgagactgttgcctcagaagctgctgctgctgcccctgcccctccattgatgaatgcggatgcttgcagcatccattctaaggctttccaagattgtctcaacaactatggcagcgagatcagcaattgccatttcaacctagacatgc

SEQ ID NO: 14186 - DNA, 379 bp, Zea mays
  Clone ID: LIB36-010-Q1-E1-G7
cccaagcgtccggggagacccgcgagaggctgccgtgtacggaccgtcgactcagcgactgcgaacgatggataacgggatggccgggatcggaccgatcaggcacgactgggagccggtcgttgtgcggaagaaggcacccaccgccgccgccatcaacgatgacaacgccgtcaacgccgcgcgccgcgccggtgcggagatcgataccatgaagaagtacaacgctggtacgaacaacgcggcatccatcggtacatcgctcagacacaagcgcctcgacgacgacaccgaaaacctcgcgcatgagctacttccaagtgatctgaataataatctcatgcaagcaaagctcgataagaagctgacacatgcacaa

SEQ ID NO: 14187 - DNA, 403 bp, Zea mays
  Clone ID: LIB36-010-Q1-E1-G9
cggacgcgtgggcggacgcgtgggcgggaccacgggcccagcctacaacattgacaatctggtcaagtctctcaaattcgtcaccaacaaacgcgcttacggaccgtacggcagggacgagggcaccccgttccgtgtcaaggtgatgaacaacggccacgtcgctggcttctttggccgctctggagattgcctggacgcgatcgggctctacgtgaaccccaactaataactaaaacgatggatcggatcatctgcatgcatgcatatgcagtatgcatgctgcttgcctgcctgtaacgaatatgaatgcataaaataacgcccctgctgctcccatgcatcagcagtgtgtaccactatgttatatatatatatactgtatttcgctaaaaaaaaagaa

SEQ ID NO: 14188 - DNA, 388 bp, Zea mays
  unsure (1)..(388): unsure at all n locations; Clone ID: LIB36-010-Q1-E1-H1
gttcactcatgaagaccttatcgcatcccttaatatgaacaacaagggagacaaccttactggagcttactaccacaaggtgagcgaattgacaaacacagctgttggggcagagcttacccacagtttctcgaccaatgaaaacaccctcacctttggcgggcagcacactctggacccactaaccgtcttgaaggcacgcatcaacaactctggcaaagccagcgccctgatccagcatgagtggaggccaaagtcgctggtcaccatctcggctgaggtcgatacaaagaccattgagaagagctcgaaggtcggaattgctgtggccctcaagccctgattgattatcangactattttttcttctaaggtcctagcatgactg

SEQ ID NO: 14189 - DNA, 403 bp, Zea mays
  Clone ID: LIB36-010-Q1-E1-H10
cccacgcgtccgcaaccatggcggcaaccggaatgtccccctccccctcggccgcaataactcgccacatccatgctcgtcgttcctgtgctgctgcttccttgtccctccgccgctcgggcttcctggggcgcgtcgtgctggccgcggtgccagtggccgtggacgccacccggcgccgccgcgtctccgtgtcggtgcggatggcctgggacggtccgctctcgtctgtgcgcctcatcatgcacagcaggaacgcgaagctgagcgagaagctcaaggatcacatcgaggacaacgtgggtcgggcggtgtccaagcactgccacctggtccgggatgtagacgtgcgcctctccgcgcgcggcggctatctcggccggggccccaatacgtcgcgctg

SEQ ID NO: 14190 - DNA, 441 bp, Zea mays
  Clone ID: LIB36-010-Q1-E1-H11
cccaaatcgcatctgcttccagagccccccgccgccgctgcgccctcatctcggtcctgccgtccgtcaaggtaaaaggacagcatggtgagggtcagcgtgctcaatgatgctctcaagtccatgtacaatgctgaaaagatacggaaacgtcaggtcatgatcaggccgtcatccaaagtgatcatcaagttcctgacggtcatgcagcgccatggttacattggcgagttcgagtacgtggatgaccacagagctgggaagatcgtggtggagctgaatggaagactgaataaatgtggtgttattagcccacgttttgatgtaggtgttaaggagatcgatggatggacagcgaagcttcttccatctcgccagtttggctacatcgtcctaacaacttctgctggaattatggaccatgaggatgcccgccgtaag

SEQ ID NO: 14191 - DNA, 425 bp, Zea mays
  Clone ID: LIB36-010-Q1-E1-H12
acgcgtacgccaacttcggagtctggcccggcgacaagctgaccggagtgaccggcggcgaccaggtcgctgccgcgatgggcatctacggtcctcgcacgacctacattgtcgccctcaaggattgccctgggacgcacgagttcctcctcctcgacgaaggtaaatggcagcatgtgaaggacaccacgaccattggggaagggaagatgttctctcctgggaatctgacggcgacattcgataaccctgagtacgacaagctcatcaactactacgtcaaggagaagtacacattgcgctacactggtggaatggttcccgatgtcaaccagatcatactgaatgataatggcatcttcaccaacgtgacgtccccgacggccaaggctaagctgcggctcctcttcgaggtggcgcccctg

SEQ ID NO: 14192 - DNA, 504 bp, Zea mays
  unsure (1)..(504): unsure at all n locations; Clone ID: LIB36-010-Q1-E1-H2
gcgtaccggtactctaggctcgacccacccgtccgaatcaccaagaggagtgtgcttgatcgangggtgagtgagggttgactaagcacaccatcgtcatggacggcggatactacggcggtcgcgatcagcgctacagcggcgggtactacggcggcggtggcatcgcaacgccggggtacgctccggcggtcccgtacgggatgtcgcaggtgaacatcgacggcaacgggtgcgggcgggcgctgccgccgcagccgaccgtgaacgtgtactgccgcgccaaccccaactacgccatgagcgtccgcgacgggaatgtggtgctggcgccggcgaaccccacggacgagtaccagcactggatcaacgacatgcggtggagcacgatcatcaaggaccaggaaggttacccggcgttcgcgctggtgaacaaggcgaccggggaggccatcacgcactcgctggggcagtcccacacggtgcgcctggtgccctacaacc

SEQ ID NO: 14193 - DNA, 434 bp, Zea mays
  Clone ID: LIB36-010-Q1-E1-H3
gcgcaagaatcgcaaaccagatccctcctatccgagctggataaacgtctccaggcgatcgattccaaatgggaatcccgtgttggcttgctggaacagcgcgccgccgagtcggccagatccatgtccgatttctccaccgcgctgcgcgccgatgtggaggctcacctgacggctgccgacagcgagaccgactcgaagttgctccagatcgacgcagctgccaactctcggatggcggcgctggagtcatccatgcgctccgtcgagacttggcgcccgcgcgtggactcgacgctcgacgccttacgctcgtctctggactccgtcgctaccgaggtgtcgaaaatggagattcagtggtccccgggacggacgcgccgatggcttacacaagccggggcgtgctcggggcacctggatcggtgccggga

SEQ ID NO: 14194 - DNA, 491 bp, Zea mays
  Clone ID: LIB36-010-Q1-E1-H4
gtaccggtacggtagtctcggcccgcccgtccggttgagcaaaccctacatcaacaccctgaacgtgttccaggcctacacgcagaagcggataagggaccccagcttcaaggtgacgccccagccgacgctgtccaaggagttcgccgacgagaacaagcccgccggactggtcaagctgaacccggcgagcgagtacccgcccggcctggaagacacgctcatcctcaccatgaagggcatcgccgccggcatgcagaacactggctatgcggcttctcttcactcacctgcagagtgcatcgcaataatcaacttccggatggtggcgttttgtcagttttggatggcaatgccgaactggcagcgtctgttttccctatgcagatgtaatttcctgcctcattataatcacgcctgttgtcaagtccaagtggaaaatcttggcatattatacatagtgtaataatcaacatcctacaatctgcatg

SEQ ID NO: 14195 - DNA, 414 bp, Zea mays
  Clone ID: LIB36-010-Q1-E1-H5
gtgatacatgaagcatacctgtatttagccagaataccacagtaaaaacgcattaatgagcaagatggtctggatacttggtatccatctttgcaaactctgatacaaaacagtctaaacagagcagtagcatggaacacgccaaatacgccattctctggtctgcatactttccgctcagctatgctgtgaactacccatctggatttgctcctctcctgtggaaaacgttggagttgaatgaaacaaggaacagcaacacggtcgcatgccggatgtagcatacaactcattacaaaagatagcaagatacgataaacccttccaaatgaatgaaagacgaatcagtttacgaatcatctgcacagcatgtctgaaactgaaacgaacaagcataactcaaccaccagccat

SEQ ID NO: 14196 - DNA, 371 bp, Zea mays
  Clone ID: LIB36-010-Q1-E1-H6
cccaagcgtccggccagttgactcaagcgccatacctctgctccatactgggcacccgtgtgtcacgggcacgatgagattcagcggggatggcgcggtggcgggcgcggcgcctgctgcctctggccacctgtcgtcacactcggcatgatccttggatccttgcttcaattatcacttcttcatctgctagatggctatgcagtgcatgcagatagtgatcgagaagctgttcttcatcgccatggatatgttaagcctgaagttatcaactggacgccagggataattgttttccatgattttcttaattcataggtgtgtgactacctaatggcaattgccataccagaactcgaaagttccactgt

SEQ ID NO: 14197 - DNA, 430 bp, Zea mays
  Clone ID: LIB36-010-Q1-E1-H7
caaggaccgcaactgggccaggggtgtccggagcaccaagtaccctggtgttccttacaccttcttctcgcagaggcaggggtgcaaggttactctgtaccaggacgctcatgtcccggacaacttcgttcccaggatcccgctcgccgatggcaagaactacgagccacacaggtgctgggaggatatctttgatgccataagcaaggcccagcatctgatttacatcactggctggtccgtgtacaccgagatcaccttggttcgggacaccagcaggccgaaacctggaggcgatgttactcttggggagttgctcaagaggaaggccagcgaaggtgtccgtgtccttatgctagtgtgggatgataggacttcggtcggcttgcttaagaaggatggcttgatggctacccatgatgaggagact

SEQ ID NO: 14198 - DNA, 454 bp, Zea mays
  Clone ID: LIB36-010-Q1-E1-H8
cccacgcgtccgcccacgcgtccgcccacgcgtccgccgtcggttcacttctccaggtaaggaaagggttcgtactcatggcgccgccgcagccaaagtcgggcctcttcgttggcatcaacaagggtcatgtcgtcaccaagcgcgagctgcctccccgcccgtgccaccgcaaggggaaatcaacgaagagggtgtctatggtcaggggcctgatcagagaggttgctgggtttgctccttatgagaagcgtatcactgagcttctgaaggttggcaaggacaagcgtgccctgaagcttgctaagagaaagcttggaactcacaagagggcaaagaagaagagagaggagatggcgggcgtcctcaggaagatgaggtcggctggtacgcacactgacaaaaagaaatagagagcatttcaagttcatggagctggctgccagagattatg

SEQ ID NO: 14199 - DNA, 59 bp, Zea mays
  Clone ID: LIB36-011-Q1-E1-A12
cgtaacaccctgaggtgagtcgtattaattaatacgactctctatattgtgtcgtttta

SEQ ID NO: 14200 - DNA, 53 bp, Zea mays
  Clone ID: LIB36-011-Q1-E1-A9
tcaccacaccctgacgtgagtcgtattaaatgctgccacactcgattttcagt

SEQ ID NO: 14201 - DNA, 310 bp, Zea mays
  Clone ID: LIB36-011-Q1-E1-H9
tccgtctcctatcttcagcggtagcactggcgggctgctccgcaaggcgcatgtggaggagttctacgtcatcacgtggacgtcccccaatgagcatgtgttcgagatggggatcggcggcgccgccatcatgcgggagggccccaacctcttgaagctggcgcgcaaggagcagtgcctggcgctcggcaccaggttgcgctccaagtacaagatcacctaccagttctaccgcgtcttccccaacggcgaagtgcagtacctccaccccatggacggcgtcctaccggacgaaggtcaaccccggcag

SEQ ID NO: 14202 - DNA, 472 bp, Zea mays
  Clone ID: LIB36-011-Q2-E2-A1
cgcgggtcgacccaagcctctatatcaagtctctcaatttcgttattccagcctcatgctgaatgcccgatcgcctacgcatcccttgcttctgccggaggtactgcaccacctcggttgctatcttccccgtcctacgcttctccttagtctaggagtttgccgcacatggcaccgtgccttgcagccatatctgtggtcgactctgcagctcgagaatcagccttgcaacttcacacctcgccaggcgactcccacggtgcttctcaggaataagcaccatatcaggcacctccatgagatcggctccaactctctgctaaagttcctagccttctcaaccgcaagcttgccgatgcaactgactagcatccatgtgtccatgctcagccctgaaatcctgattgtcgctcagcagagtgtggagacccttgttacgttcagctggcgcgccaaaccggcaccaaaagga

SEQ ID NO: 14203 - DNA, 457 bp, Zea mays
  unsure (1)..(457): unsure at all n locations; Clone ID: LIB36-011-Q2-E2-A10
gtggagctggtcatactcccgctgggcgtcctcaagtccaactctgtcgcgttctcgccccctttgcctgagcggaaacagacagccattcaccggctcgggttcggcaccatggtcaagattgtcctgtacttcccgacctgcttctggcccgaggacaagcacttcatcaactttttacccatacccaacagtatacccaatcctaaactctgtcgccacctcaacaggcgacagatggcggccttgaaaacatacatgaatgatctcgccaactatacgtcgctcatgcccatccacggggcacccattctgattgcatacgcagccaacgactcggccgaggtatttggaaagttgacggaccaggaggctatggaggtacttgtttgccagctgtcgcattattttgacgtccttgtcaagggagntggcgccacaaggcccactcgcacgt

SEQ ID NO: 14204 - DNA, 474 bp, Zea mays
  Clone ID: LIB36-011-Q2-E2-A11
cgtagtccgacccaagcctctacataaagtcgcttgaccaccgcttcacttccctccattccttcgccctatcactcaagctgtagccaattcaaacacctccaccccactctcattcctctctgtcatacccgcacgcactttcgcaaggaccttgacttctccttctgtacatattcttatttcctgtaaagcgtttaatcgcccgccatgtcgaccccctctcgccgccgtctgatgaaggacttcaagcgcctgcagagtgaccctccaggtggcatctctggtgctccttgctctgataatatcatgctgtggaatgcagtcatctttggtccaggtgatacgccctttgaagacggcacattcaagttgctgctccagtttgacgagacgtaccctaacaaaccaccgacggtcaagtttgtgtccaagatgtttcatccgaacgtgtatgccaacggcgagctgtgt

SEQ ID NO: 14205 - DNA, 466 bp, Zea mays
  Clone ID: LIB36-011-Q2-E2-A12
gtcgacccgcccgtccgatgatggtcagccacaagattgccaagaacggccccgctgatgagatcgagctctctgttgctcaggctctcttcgatttggcgaacaacgtcgctgacttgaagaaggagctcaagccccttcagatctccagcgccaaggaggttgagaccggcaacggcaagaaggccattgtcatcttcgtccccgttccccagctgaaggccttccacaagatccagcagagactcacgcgcgagctcgagaagaagttctctgaccgccacgtcgtctttgttgcccagcgtcgcagcatggctaagcccatccgcacctcccgtgccaagcagatgcgtctccgctcccgcaccctcacctcggttcacgagaagcttttggaggacttggtctaacccaccgagattaccggcaagcgtacccgtgtccagactgaacagaagcgcatcat

SEQ ID NO: 14206 - DNA, 477 bp, Zea mays
  Clone ID: LIB36-011-Q2-E2-A2
gtcgacccaagcctctacacaagactcgtgatagaacagcttagactcttgcaccacaccacaccaccacacacgacgctcattgctctcacacctttcccttctcccttgtccatctccaccgcttttgcacacaaacgcaaacactcacagtcagcacacacacacgcacaaagaggcaacgctgtagcggctcggtaccaatgtacgttatcgtgcgaccgtctaggtcctatgggcccattcagaacgccatcgcagtcctcaatctgctctccttgctcgtgggaatgattttgctctgcgtcggcacgtttgtctactttgcacccggcgcagtctttgtgacctcaacgcttttaccacacttggtccttgtcctcggcgccacaatctcaatggtcccctttttggggtactaagggggtgataatgaaaagcgctggatactctggctccatggattgaatccgttga

SEQ ID NO: 14207 - DNA, 413 bp, Zea mays
  Clone ID: LIB36-011-Q2-E2-A3
gacccaggcctctacatcaagtcaacttgatcgcttctcctcgtctcctcatcctctcttccgacactccttccttcttctcacccgtcctagtccccttcaacccccctctttgacaaagacaacaaaccatggctgctgctcccagtgtgaggacgtttactcgggccgaggttttgaatgccgaggctctgaatgagggcaagaaggatgccgaggcacccttcttgatgatcatcgacaacaaggtgtacgatgtccgcgagttcgtcgctgatcatcccggtggaagtgtgattctcacgcacgttggcaaggacgggactgacgtctttgacacttttcaccccgacgctgcttgggagactcttgccaacttttacgtcggtgatattgactagagcaaccgcgat

SEQ ID NO: 14208 - DNA, 375 bp, Zea mays
  Clone ID: LIB36-011-Q2-E2-A7
gtttactccgcgaaaaaaaaaaagcaccactgaccgagctcaccacagcacccacaacagcttatagctacagtatgcttgcctcacccaaccctgtcgcgaccaccgtcatgcccaagccggtccgctcccccctcgacccaagccaaatccaatacgcgtccaaaaagcagcagcaagctgtcgccgagattgttgagcagctgacagttgatgcgtcgacgctgaaggggatcaaggaccactttattcaatagatgagaaagggccttgccaaggatggcgagaccatagccatggtgccctcttacgtcctggatcgactgaacggtacggtgacaggttcttatctgacgctggatgtcgggggcacgt

SEQ ID NO: 14209 - DNA, 484 bp, Zea mays
  unsure (1)..(484): unsure at all n locations; Clone ID: LIB36-011-Q2-E2-A8
cgcgggtcgacccaagcctctacactagagtcagtgagtagccagaaccctgttcgccacctcaacccgcgcactcttctcccgtccttcgctcattctccgccagcagtccacaaaagccatgtctgtccctactttgctctctgtcgctgacctcaagagcaagctcggtgggcccgtagtggtcgatggcagctggcacatgcccgccgccaacagagacccgtacaaggagtttaaaggaaacggccatatcccaggagcacgctactttgatattgagtccatcaaggacaagacgagcagccttccccacatgatgccgtctgcggagcaattcgcacagcaagtcggagagctaggcatctcgaacgatgatcatgttgtcgtatacgacactgtcggcttcttctctgcaccacgcgtatactggatgtttaaggcatttgggcacaagaaagtgtctgtnttggatggtggattc

SEQ ID NO: 14210 - DNA, 479 bp, Zea mays
  Clone ID: LIB36-011-Q2-E2-B1
tcgacccaggcctccaaattgtctcaaatgattactcctctcaagaagcacaccatcgtgaagaagcacaccgctaccttcaagcgtcaccagtctgaccgctacaagaccgtcaaggagtcatggagaaagcccaagggtattgataaccgcgttcgtcgccgtttcaagggccagattgccatgcccaagattggttacggtaacaacaagctcacccgccacttgatgccctctggcttcaagaagttcctcgtgtccaacattgccgagttgaacctcttgttgatgcacaaccgcacctttgctgccgagattgcccacaacgtctcgtcccgcaaccgcatcgccattgtcgagcgtgcccagcagctcaacatccgcgtcaccaacgccaacgcctcgtgtcagaacccgatgcttaaatatcttcgtctggaaccccgcccccccttcctccctcctacattttttttttg

SEQ ID NO: 14211 - DNA, 460 bp, Zea mays
  Clone ID: LIB36-011-Q2-E2-B2
gtcgacccaggcctctgctctttctcagataatcttggtccacattctcgtgccctgtcctttctcacatcccgagccttctccccatccgcaaacactcgctttcactcgcactgcgtggaacactcacgcatcctcaggtaccacgagtgatcacacagttcccacgttctcgccacttggtggccccaaccatagtctaccatgaacgaagtcggagccggtgtcgcgacggtctcgtcgctcgtatcctccatcatcagcagctcgaaccgtgtgcgggtgaacaagatccagtgccaggagttggcaagagagtgcaactggctccgcgatcgcctggaatctggcaatctaagcgctgctgatggtcccactgtcgaggctatcaacgaccttctggtgcagtgcgacaaggacatgaagaagtttgcaggaatcggcttttccatgcgcacca

SEQ ID NO: 14212 - DNA, 471 bp, Zea mays
  Clone ID: LIB36-011-Q2-E2-B3
tcgacccaagcctctacagtaagtcatattatgtctctcctccgcacgcacgcctcgtcgcgacagccccattgccgcatccctcgtccctcgcacactccgtctctcgtggtctctcctttgctgactgcattctcgtttgactcccacggaaacaagagaccattcaacatcagcagagcgagaaagggtctcatcctcgttgggaaagacggcaggtacattgtctcgacagagtggagtggagtgcaggagagacatcagctaggacagcgttaaaggcatgaatcgaagagagcaagagcacccctgctcttccatccaccatccaccacagcaacaacaccaacccctcgcaaggtctattctgagcacactttcgcctccaccagcaccgtctgcaaagcaagcgttcttgcgtcaaagtcgatatgggacaagagcgccagccggtgcaactgaatcacatcg

SEQ ID NO: 14213 - DNA, 469 bp, Zea mays
  Clone ID: LIB36-011-Q2-E2-B7
aaccctctagagtaaatcgtacgatcacgcacatcaaatacaaccgcgagggagatttgctcttttccgtgtccaaggatcatgtcgtcaatgcctggttctcgcacaatggagagcgtctcggcacatacgagggacacattggtgctgtctggaccgtcgatgtcaactccacgacgacgctcttggtctctggttctgccgacaacactgccaagctctgggatgtttcgaacggaaagtgcttaaagtcatgggagttcaacactgccgtcagacgtgtgcagttctcagaggacgacaagatgatccttctcgtcactgagccccgtatgggtttcctcgccaccctccagatcttcaacgtcgagaacggcgccacggagaccgtctcctcggagcccttgaccgtcattcatcccgaacgtcccaagatcatcgtcgctgcatggggagctctcatcaaata

SEQ ID NO: 14214 - DNA, 469 bp, Zea mays
  Clone ID: LIB36-011-Q2-E2-B8
aagactctatagataactcgtattaagccatgttcgccgctctccgccaacctcttgcccgtgcctctgctgcaaagcctcttgctcgcgccttctctgcctacagccctgtccaaaatgctgtagcccccacaaagtcacctaaactcgagtacttgctgactgagacccgcggacgcgtcggtctcgtcaccctccaccgtcccaaggccttgaacgcgctctgcaacggtctctttgtggagttgaaccaggtcttgaaggagctcgatgacaacaaggagattggcgccattgtcatcactggaagcgagcgcgccttcgctgctggtgctgacatcaaggagatgaacgacatgaactttatcgagaactatgccgaagatttcctcgggcactggactcagatcatcaagattcgcaagcctatcatcgctgccgttaatggattcgctctcggcggtggatg

SEQ ID NO: 14215 - DNA, 466 bp, Zea mays
  Clone ID: LIB36-011-Q2-E2-B9
tcgaccaagcctctagagtgagtcatactacatccgatccacgaacacccaggactgcacgtattcggcccaacgtctgcacttctgaccgcgactgggcagatgtccaggctgtctgtcgacagatcgggatccctgcgaggcgtctcgacttttcacggcagtactggaaccaggtctttgaggtgatgttgcacgagtatgagcggggcaggacaccgaatccagatgtgacatgcaatcgcgaaatcaagtttggagagctgatcgagtggtgcaaccgcaacggcggactgggcaaggatcggttctcagacgcagacgggcgccgccaccagcacgatcgcctgttacctgaggatggcatgaacgatacgtctagctcagagcaggaaaaggatacgcctcttggatgggactaccttgcgacgggacattacgcgcgggtcgagcgtgatcccgagac

SEQ ID NO: 14216 - DNA, 480 bp, Zea mays
  Clone ID: LIB36-011-Q2-E2-C1
tcgacccaagcctctacactaatccatcacaccttcctgcccactcactcctgcacgctcacacgcttaagaacactgttccccgtcaccttcgtttccttgaaccacagccgcctgcctgcctccctctctgtccctcaaggctcacacattaattccctctttgcgttcacttctcccacactcgcctcgatcgatcacacggctcgtgcaacagcttcttcaaaccttgtcactttaacctcggctcaccccaaattttccggctactgcacaccagcgatggcgtcctcaaccgctctctcctcatcgtcaccccccgttctggcggctctggcccgtgttctcgcccagatcttgacccgctccaatatctcaaagtcgctgggggtttacatcctctacctattgatcaaatatcgcaataccgccttttgggttcgtccccgttctgaaatcactgggccatggagcgtgccc

SEQ ID NO: 14217 - DNA, 455 bp, Zea mays
  Clone ID: LIB36-011-Q2-E2-C10
cccaaccacgctcgccccctcgccgcgtcatcctccttccaccatgtcgcgtctcgctcctgtcgtcatcgacaatggtacaggcttcacaaagatgggctttgccggaaacaatgacccttcgtttatccagcccactgtcatcgccaccagagaaggtgggtccggagcatcgggaggaccctctgttccctcaaagccctcgttcctgaactcgtccgcaagctcgaatatcgcctccaagcgcggcatcgaggatctcgacttttatatcggagacgaggctgtggccaactcgaagacctatgcgctcaactaccccattcgccacggccagatcgacaactgggaccacatggagcgttactgggagcagagcatcttcaagtaccttcgctgcgaaaccgaagatcactccttcctgctgacggagcctcactcaacctcccgagaac

SEQ ID NO: 14218 - DNA, 434 bp, Zea mays
  Clone ID: LIB36-011-Q2-E2-C2
tagagtgattcatattatccaagaggactggggtgcatatcagcaggccaacacgctctttgcaaaggctatcacggagattgttcgcgatggcgatctggtctgggttcaggattaccacctcatgctgctgccccggcttttgcgggaagaggtccacaaccagcgtgagagcgatcagcctgtcaagaatatcaagattggattcttcttgcatacgccattccccagtagtgaggtctacaggattctgcctgtgcgcaaagagatcctgctcggggtcctgaactcggatctgattggcttccacacctacgactatgcgcgtcacttcctctcttcctgcactcgcatcctcggtctttccaccatgcccaacggcggtcgacttttaacgggtccctatgcccaagttcggcacccttccccattgg

SEQ ID NO: 14219 - DNA, 464 bp, Zea mays
  Clone ID: LIB36-011-Q2-E2-C3
ctctacagagagtcactactactctccactctcccatcatcatgtctgctgcctcccaagccgtcaagaaggctcccaccttcttccagacctggttccgtgtcgaggtcattcccatctacgctgtcctcggcgttgcatgcggtggtgccgcctggtacgttacccgtcttgcccgtggcccggatgtcacctgggaccgcaagaacaacccccacccttggttgaacattgaccaggagacccagctcaagctgatgaccgtcaaggagaaccagggcttcaccaagacctactcccgcgatcgtctgtaaagaaaagcctcggccgctctctctctctccttcatttcagcacactagacattcaaaacacagaatcaatccgggaatccttgggtcatcaagagtctttgttgatgccgttggacgaaactggcacgtggatgtgaggcgtttgatgag

SEQ ID NO: 14220 - DNA, 466 bp, Zea mays
  unsure (1)..(466): unsure at all n locations; Clone ID: LIB36-011-Q2-E2-C4
ctgacattccaacgccatccctttccgctaacgccagatcactgtcgccatggaggttgcgcctcggcctagccatagccatggcagtaccaatggttacgtccgccgctgcagggatcccttcctacagttcgagcttgggctagtcaaccgcgtacgattccgcaaccagtttctcgctaagcgtattctcgacctcgctctcgatcccttgaccacaatccaaagggagcatgtaggggccgtcaacaccatcgatatcgaagaggcggaaggcagatatcttatatctggaggcggcgatggcaacgtccatgtgtacgatcttgacgactctgaacgggaagagcgccgcgtcatcaagagcatggtgaccacacaaggctctcaaggtcataaaggangaatctcgcgtgtgcgatggtaccctttcgacaacggaatgtttacgacatcctcgttcgac

SEQ ID NO: 14221 - DNA, 459 bp, Zea mays
  Clone ID: LIB36-011-Q2-E2-C5
aacaccctatagctaagtcgtactagtgctctgtagcctctcagcactagttcgttgcttccttggtgttcccactgttcacgagtttctttcgctgctgctgaaggaactttgttgcgtctgttctcgctccccagccctccctgcttcctggtcaatgtcctcgtactttttccagaacggaaagcacattggtcgcgacgttgacatatcgttctctgcccagtaccagtaccagtagcccactgccacccgctgcagtctagccataccatcccgtcccatcctcttgtccgtatctcgctgtatcattatcaccctccttccttttctttctgctgcgtgtattatccgatcaaaccaaaaacctaatcttttgtgactgtctgcactatggatgtcgttagaatcacccaagccttgagacagcagcagcatgcccccgcccgattgaactcg

SEQ ID NO: 14222 - DNA, 488 bp, Zea mays
  unsure (1)..(488): unsure at all n locations; Clone ID: LIB36-011-Q2-E2-C7
tcgcggttcgacccaagactctacagtgagtcactattaaacatgaaagactttccccacaacgaagaattcttcatcgctcttcgcgacactgaccttgtcctcgatgtgcaaggcggcagcgctgatgcaggcgcccccatcattctgtacacccagaagcatgaggacaatgacaaccagaagtggatctacgagaacaagcagcttaaaaacaagcagactggtctcgtcctgaccttccctaatctcgatgctaacgttactgccactcagaaccacgctggatgctctgacgagcagacattcgagtactacgactacaccatctcggcccaagctcaggaggacctcgtccttggaatcaatggagaaaagaaggagctcgctcccatcaccttgattagacgcgacaacgattccgacaagcagcagtgggagatcacgcgttgatgggtgctgcatancgcaggctcacaaatcatgtc

SEQ ID NO: 14223 - DNA, 482 bp, Zea mays
  Clone ID: LIB36-011-Q2-E2-C8
gggactcgtggttcgtaccaagactctagagtaacgtcgtattaactcgccttttctcatctccctcaagacacacaaagcataccctacaatggccgtcactctccccacccctactcacgctgacacccaggtgctcagcaaggctgtccagtctaaggactcgacctacaaattcctgtactttggcctccacggccgtggcgagttcacacggaccctcctcaaatatggaggcgtcaaagttgaagagctgacagctgactggcccgctcaaaagtccctcgttccattcaggtgcctccctgttgtctatgagaccactacagacggcactgtgctcgagctcgcagagtcggcggccatcgagcgctatttgtccaagaagttcaacctcttgggacagaacgattacgagaacctcctgcttgatcagtacgtctcttccacggattctctcgcccagaccttcagcgtcaaga

SEQ ID NO: 14224 - DNA, 452 bp, Zea mays
  Clone ID: LIB36-011-Q2-E2-C9
tcgaccaagcctctaatcaaattcgaacaaattgaaaaggctttccagaagcagcatggtatcttccaaaacgccaaggttgctggcaagaagtccgtcaagaacaaccgctggtacaaggaggttggtctgggcttcaagacccccagggaggccattgagggacactacatcgacaagaagtgccccttcaccggtgatgtttccattcgtggccgcatcctcactggtgaggttatctccaccaagatgaagcgcaccatcgtcatccgtcgcgagtaccttcacttcatctccaagtacaaccgttacgagaagcgccacaagaacttggccgctcacttgtctccttgcttcattggagtccaacagggtgactctgtcactgttggtcagtgccgccccctttccaagactgtccgcttcaacgtcctcaatgtccagaagaagat

SEQ ID NO: 14225 - DNA, 475 bp, Zea mays
  Clone ID: LIB36-011-Q2-E2-D10
gtcgacccaagcctctgtactgcgtcatatcacagccctgcttccttctctcactctctcccactttcttccactctctctctctctcgcaagcccttcagcgccacatagcactcacaatggagcacatcgagcattcccagttgcacaccgaccccgtctaccgcttccagtacgtggccaagttcatgaactttggcgatgaggacatccaagccatccagggtgccgcagagctcatcaagcccctggtacccgtcgttgtcgatgccgtctacgccaagctccatcagttcgacatcacctgggacgtcatggccaagcgccacgagggatacacgcccaaggacgcaaaggtcattgagaagtccagcgagcttaccgaggacgctgagcaaatcaaattccgcaaggacatgctgagcaagtactttgccaagctgggtgacaaccctacgacgagcgcatggtcaag

SEQ ID NO: 14226 - DNA, 453 bp, Zea mays
  Clone ID: LIB36-011-Q2-E2-D11
caaccctcgtccactctactcctattgacaacaaacaacatgcgtttccagaccgtcgtcgcagcgctgctcgtagccacactcgcccatgctcagacaccgccaactccaccaacgatgcccgagcctccatcgatgccggcaccgccatcgattcccgcaccaccctccatgccggagccgccaaagatcccatcacctcccgtggttgaagtgcccagtggcgagtgcttgacgtgcttgaatggagccatgaagtccgtcccggcctgcagcaaagtcgattacatctggggtagtcttggcaacttgcccaaagatcaaaaggactgcatttgtgcccttgccgcgtcctctacctgggtggatacttgcaaagctacttgccccgccaagatgattgagccgagcaatctctacaacaacgactggaccaagagtcagtgcggagct

SEQ ID NO: 14227 - DNA, 458 bp, Zea mays
  Clone ID: LIB36-011-Q2-E2-D12
gcaatggataacattcaagccaaagcccgctactacaatgcgcaactggacaaggagctgagcaaatacccgcaactgaatcagttccaggccgcgacgggtgttcccaaaacctacttggccttaggcgccggaacgttcatgactgcaatgatatttttcaactttgcgggaaagcttctctccaacgtcctcggttgggtctaccctgcctatcgctccttcaaggccctggaaacacctagcaaggatgatgataagcaatggctgacgtactgggccgtatatggattcgtctccattctcgagtcattcacggacgtccttctatactggttcccattctacttctttctcaagtctgtcttcttgctttggctcatggtaccctcatttaacggtgccgccacgatttaccttagaatccttcgtccgttcttggttcaacatcgtggcga

SEQ ID NO: 14228 - DNA, 346 bp, Zea mays
  Clone ID: LIB36-011-Q2-E2-D2
ttcgtcccaggcctctattctaagtcatattaaactcgccttgatctcagtcaacacaatcccattgcctcaagcacgttgactcttctcccccatccctaatgacactcaccaaccctgccaatctcgtggtcgttattaccggttgcgataccggtttcggctcagagatcacggaggacctctatcagcgtggacgctttaccatctatgcgacctgcttgaccgatcaagccgtcgagaactacaacgccagacagtcatcccgcatccgcgctctccaagtggatgtcacaagacagaacgacgtccaccgtcttccggctcaagttgcggcggagtgccc

SEQ ID NO: 14229 - DNA, 473 bp, Zea mays
  Clone ID: LIB36-011-Q2-E2-D3
cgacccgaccctctacagtaagtcagtgttacagcatgatcggaaactttgacaacgccttcttccgtggtgttctggacgctccctctgtcggctcggccaagatccccgacattgtctttatgctgttccagggtatgtttgcggccttgaccccagcactggctatcggtgctgctgctgagcgtggtcgcatcctccccacgctggtctttatctttctctggaccacctttgtgtacgactttatcgcctgctggacctggtcggccaatggctggagctttgttatgggcggcctcgactttgccggtggcacccctgttcatatttcctcgggcggtgctgccttggcctacgctcttgtcctcggcagacgctctggcgaccacaaagatttccgcgctcacgccatgagcaacgtcgtcatcgggacttgcttcatccgggtccgctggtttggattcaacggt

SEQ ID NO: 14230 - DNA, 495 bp, Zea mays
  Clone ID: LIB36-011-Q2-E2-D5
ctgggactcgtgggtcgacgcaagactctacactgagtcgtatgtacgcatcatgaccgacgtgaccattcctgaagactacctgcctattgtcgatggcctcctctggaagaagatcctcagggagggatcgggtgaatcgcccagcataaagtcgaatgtcaatgttcactatgtcggaacccttttcacaaccggagagaaattcgactcctctcgcgatcgctcctctcccttcaacttcaaacttggcgttggccaggtcatcaagggttgggacgaaggtgtcaagaccatgaagattggagagctggctgaactagtgtgcgcacctgaatatgcctacggagctcaaggaagccctcccaagatccccggcaactctactctcaagttcgaggttgagctgcttgacttccaggagtccgctgacaaacccactgccaagctggctttggcccagaagaagaacgatcaacgaaatgcatctttcaa

SEQ ID NO: 14231 - DNA, 282 bp, Zea mays
  Clone ID: LIB36-011-Q2-E2-D6
gggaatgaccagagactcgcgccacaagcgctccgcttctggagccaagcgcgcccaatagcgcacgaagacaaagttcgacttgggccgtcatgctgccaacaccaagctcggtgctcaccgcatccatgacgtccgcaccagtggcggtacccgcaagttcggtaccgtgcgtttggatgccgaaaacttctccagcggttccgatgccatctcccgcgagacccgtaacattgctgttgtctacgacgccgccaacatccacttcgtccttaccggtac

SEQ ID NO: 14232 - DNA, 458 bp, Zea mays
  unsure (1)..(458): unsure at all n locations; Clone ID: LIB36-011-Q2-E2-D7
ctttatataaccatgctcagatctctcagccgcgctgcccgccccgctgccatcgccttggcccgcagctcccctgtggttcgcgccaacgttggtgccttctctgccatccgcaactacgccaccgccaagcccgccacctctgaggtcacctccatccttgaggaccgcatcagtggccttaactcgtccgttgacattcaggagactggtcgtgtcttgtccattggagacggtattgcccgtgtgtatggcttgaagaactgccaggccgaggagatggttgagttctccagcggagtcaagggtatggccatgaacttggaggccgataacgtcggtattgtcgtcttcggtaacgatcgtctcattcgtgagggtgataccgtcaagcgtaccggtaacattgtcgatctcnccgtcggcgaggctcttttgggccgtgtcatcgatgccct

SEQ ID NO: 14233 - DNA, 486 bp, Zea mays
  Clone ID: LIB36-011-Q2-E2-D8
gggactcgcggttcgacgcaagactctacactgacgtcgtattagtctttgatcggcctctatattctctctgaggaggaatgggcataccatgatgaagcccctgtcaagatcgacttttggatgaggaacctcaccagcttgaagcattcactagacaagttggccatacctttggtcgtcaagagggctgcttgcaaagcagaggtcgccggcattgtcgaggccgtcgttcgtgagatggagatcagtcatgtgttttggaatgcagagctgatgatagatgagcaaagacgcgacgcagccgtcaggaaagtgctctccaggctgtccaacgtgcatgtggaggagtgtgatgatcagtgtgtcgtaccacctatggatgtcaaaactaagacagggaacccgtatacagtcttcacgccattccacaacagctgggtgcaaactggtggaaacagagcctcattagccccaaactgtcag

SEQ ID NO: 14234 - DNA, 465 bp, Zea mays
  Clone ID: LIB36-011-Q2-E2-D9
gacgacccaaccctctacatagagtcgtatcatcatcatgaccgagcagaccagcaacaccggcaccgccccagtccacaagcccaactttgtggaaaagatcgtggacaagatcaagcatcacgggcacggacacggccaggaccagaaccagcactagcaacctgctaccgctaatgattcccaaaagatgtgccacacctatggtggtcccgacaacgaacacgacaatgcctatgttgctgaggcctcgattgtgggagcccatgcaattccccctatgacgtttcacacagaagcacaccgctctgaccatgtatcctctggagcaccccgctctcagactcagcctcaggcagcacaagcgcaacagacctcgacatcgacgggtgcgcacgggcactcgccaaatgagccattccatgagtttggtgatcgagtggccggacatgatctccattccgc

SEQ ID NO: 14235 - DNA, 375 bp, Zea mays
  Clone ID: LIB36-011-Q2-E2-E1
tcgtcccaggcctctactctacagcaaacttaatacgctcccagcccatcccatcatccactcctccgctcccctcacgggccctccatctggtcattcctgactccaacgctcctcactctctgccgcctctcgccctccgccatcatgacacgcatcgctctcttcaccctcttgctcgtcgtgatcctcgccctgttctcgcaagccgacgctcagtccaggtcaaccgtcaagccccactgtgctcctctgcacaccctcttcaatgacgctgttgctgtctttaaccataacgggtataacattcccaactcagattccgaactacgatgcaatgcatgcatctgcacagacggtgtcatcactctcgct

SEQ ID NO: 14236 - DNA, 462 bp, Zea mays
  Clone ID: LIB36-011-Q2-E2-E10
ctccatttcctcaacaacaaaccaacaccaacactccccaatcatcaacatgactcactccctcaagattaccgtccacaattgcgagcacttggaagacgtcgagaccgggggaaagaacgatccctatgtccggatctccctcgcttgcacggatgacaagcagtacggcgcgcacaagactagcactaaaaagaacgctggcaagaaccccgagtggaacgagaccatcacctttgagaactacgagaagagcacgagccctgagtgtttcatcgaggtcatggagcaagatatgaccgccgacgccccaattggttactgtatgatccccttgacgcaggttctcaatgctgagaatcacgtcctcaagggtcgcttcaatctgtttaacactaaaggaaaggagcacggaagtatttctcctgaccttgccattgtcgctcccggccaggctgcgcc

SEQ ID NO: 14237 - DNA, 474 bp, Zea mays
  Clone ID: LIB36-011-Q2-E2-E11
ggtcgacccaagcctctacacagagttctctatacatctgtactctctcttcactctctcactttatatccgagaatggtgcgttctaatctcaaaatcgtcatcgcggccatgcttgtggccttgatcgctaccgccgccatggctgcccctcaagctaaaaagaagcccgccgcacccaagcctatcaagggcaaggcaggccaaacaggagtgatcctcaaccaatccgacttttgcatcttcttgcctcccatgtacggaggagacatcgctgcgaacgaggaccgcgctgttgccttctgcaccaagcctggccttcccggtgccaacgctcagaacctgcccgccggctttattaagtcggctcactttttgtccgacccggccaatggttacgttcaggtcaccggtcgcatggatggcagcaagtacggcttgagcaagaatgatggcggtggacagtatgatatc

SEQ ID NO: 14238 - DNA, 466 bp, Zea mays
  Clone ID: LIB36-011-Q2-E2-E12
caaacccatatcctcgacatcctgacccagcaccctccactcccacaacccactcttataaaacacctttacaacatggactcttcaatcgagaacaagatcaaccgcgcccctgccgccaaagtcggaggcatgagagtcgccgcaccagaccaccccgtccccgttgtccgcaaggagcacgaacgcaagaaggccgactccgaggaggaaagcaacgaggatgagcgtgagctcgagaagacggatcggttcgagcacgagcaacagacccgcatggccgccgctgaacgccaggcaaagatgcagcagaaccagcccaagcacgagcccatcaacaacttccgtcaaaaccagaacatccaggtcaaccagcccatcctgcatacccacagcaagtccggtgccgctgcccagaactaagcaagtataatcactggaacgacgagcgcatgaacctgtattc

SEQ ID NO: 14239 - DNA, 395 bp, Zea mays
  Clone ID: LIB36-011-Q2-E2-E2
tcgtcccaagcctctacagtgagtcgtactatcctcacgtagaagcttttttccctcctcccctttgtacctctcccctgccctcgttgactgacaagaaaaagttgagcaaccatggttaactttactattgaccaaatccgtgccttgatggacaaggttgcgaacgtccgcaacatgtccgtcattgcccacgtcgatcacggaaagtcgaccttgacagactccctggtgtcgatggctggtatcatctcccaagcccgtgccggtgaagcccgctttacggacacccgtcaggacgagcaggaccgtggtatcaccatcaagtcaacagccatctcgctgttcttcgagatgacagaagatgacctcaggggacgtcaagcaaaagaccg

SEQ ID NO: 14240 - DNA, 408 bp, Zea mays
  Clone ID: LIB36-011-Q2-E2-E3
tcgtcccgaccctctacagtgagtcatattagacgtcgagcatgcggcgttctcaccttcgcacatggtacccgggatcgacgtctcgaacgatcgcatgctccagggtcgtctgttctcctaccccgacacccaccgccacgcgtctcggcgccaactacctgcagctgcccatcaaccagccctaccgtgctcgcgtggcccatcaccaacgggacggtccatcgacgttctcacaaaactttaatgggtcccccaactatgagccccaatccgtggatccctcgggtccggtccagcagcttcaggatgtgacggccaagtactcgcccgtgagtctgaatgggaccacgggtcggtacccgcatcgcagatccgaggatgactttgtgcagcctggaaatttgt

SEQ ID NO: 14241 - DNA, 447 bp, Zea mays
  unsure (1)..(447): unsure at all n locations; Clone ID: LIB36-011-Q2-E2-E7
gtctacagctcgctgctcgccccatcgtctgcacactctctccaccatgtctttcgtggactgacagtcgttcgaccttcaagcgcacctctgccacaccacaactcgcctcgccatgaaacccacgcggcaccatctgcttctggcgcttggcttctcgctcctggccatcaccctttccatcctctactcgctccggcagagtgcgctcgataacctcctctccaaccatgtctcggcgtcaccaaagccctcgcgtcctgttgcgctggctcgtccacccgcgccaaagagccggtgggaccctgctcaaaagtaccttgtctatctgccctttgagggcatatccaaccagttctactccttccagaacgccgccaccatggccaaacgcctcaaccgcaccctcgtcgtgnccccatcacctcanaccgccatgaccgtctc

SEQ ID NO: 14242 - DNA, 456 bp, Zea mays
  Clone ID: LIB36-011-Q2-E2-F10
cgacccaaccctctataaaggctcatgttgacatcttcacctgccccttggatgtcgcccaaaccgagaccaaacgaacagtcgtgatgcacaacgccaatgatatgcgtgattgcactaaaggagaggagaagcacatggagcagatgttgcaaggtatcgccgatgcatgtgtcaatgtcgtcgtcagtggcaatgatgtcggagagctcgcccttcactacttgaacagatttggcatcatggtcgtcaaagttctctcaaagtttgatctgaggagattgtgccgtgtcactggcgctaccgcgctggctcgtgttggtgcccctatggctgaagagatgggattcggcgacattgtcgagagtgttgaacacggaggtgaccgtgttactgtgttcagacatgatgatgagatttcatagactgccacgattgtcagtcgctgtgccaccc

SEQ ID NO: 14243 - DNA, 409 bp, Zea mays
  Clone ID: LIB36-011-Q2-E2-F11
cgacccaagactccacaaaaagtcagactaactttctatcattatttggagttaaaatgcgatgcattctaaaccaggaaacattcacgtagtccacatacaaaaagggctgttcatagagtaataattcctgcatcatgaacactaaatcataacgatgacatgaaacacagattcagtcactacgcagtaacttgagggcacctacggtcagcaagtaataggacacagggtcgacgtcccagtgactactgatgagacatcaacagtccatacatccatgtcattcatcatgcaacgtgtcactttcacatgtggctgcactcattcagcagcataaggcaatttacttcgacaaccagcatcaactttgcacacatgatcagggctatcacgagatggggacctc

SEQ ID NO: 14244 - DNA, 371 bp, Zea mays
  Clone ID: LIB36-011-Q2-E2-F2
gtcgaccaagcctctacagaaactcgtgttaaggtcgacgacaccaagatcaccgaggagacgaccaccactgtcaccaaggaagaggtcactctcgagcacgtcaccaaggagactgttgtcgtggaagagaccgaggagcacgatgaagccgtcaaggaggtcattgtcacggagaagaaggagaccggagtggttgctaagcccgccgtttccgagaagtcatcgtggttccgccgtgctctctctaccggtgctgcagccgtcgctggcgcaggtgccattgcagccggtgcagcctctggagctggccaggccgcctctggagctctcacccaggttgacggtgtctggaaacgcactgtccaggt

SEQ ID NO: 14245 - DNA, 464 bp, Zea mays
  unsure (1)..(464): unsure at all n locations; Clone ID: LIB36-011-Q2-E2-F3
ctctactttccaccgccatcacgcgattgcttctgtcccttcgcccaaacctttgctcctagcatcacaaccccgactcttcaactctctcaccatggctaagaaagctgccgccgccgacgtttccaagaagagctgcgcttgcggcagacactccatgggcgacaaggagccctgccgcttttgccctcgcgtcgtctgtgacagctgcagagaagagtactgctgtggcccgatctgtgaaccttgcaacgcggaccgcgagcatctgatgcagtgtgacaagtgcgaggcccccgtctgtgaaaagtgcattgtcatcaccaagggcgctcgcgagggaaactcgtgcaagagctgcaagaagaacgcccatgctgccgcggccgatgcccagcctgctgccatcagcgtctannatagaggacacganaggaatgttcatcatgtcaggcaacccgacg

SEQ ID NO: 14246 - DNA, 415 bp, Zea mays
  unsure (1)..(415): unsure at all n locations; Clone ID: LIB36-011-Q2-E2-F4
caagaactcacagccctgcttccttctctcactctctcccactttcttccactctctctctctctcgcaagcccttcagcgccacatagcactcacaatggagcacatcgagcattcccagttgcacaccgaccccgtctaccgcttccagtacgtggccaagttcatgaactttggcgatgaggacatccaagccatccagggtgccgcagagctcatcaagcccctggtacccgtcgttgtcgatgccgtctacgccaagctccatcagttcgacatcacctgggacgtcatggccaagcgccacgagggatacacgcccaaggacgcaaaggtcattgagaagtccagcgagcttaccgaggacgctgagcanatcaaattccgcaaggacatgctgaacaagtactttgcc

SEQ ID NO: 14247 - DNA, 454 bp, Zea mays
  Clone ID: LIB36-011-Q2-E2-F5
cttactgcttcgatctaccattcacatctctcaacagcacccttcgcccccactgcgcatcgccatctgtttcgggaattctctctgcctgcaaacatgggatgcttcactcgcaagacgcacgcagccgcacagccaggagttaacaccaccactgggaatgccccccacgacatatattccatgcagacccggccaacgtttggccagtggatcaaacacacatggcttgaccttttgaccatggcaatcctgggcgctattggcctcggagtctacatggctcgtccagttccttctcgatcctttgccgtcaccttctcagatggcgagatcgtctaccccgattttggctaccctttgcgcaaagagctcgtccccatttggctcgccgccttcctggccgtccttgtacccgttctgggtttcctgatcatgcagattcgcgtccggt

SEQ ID NO: 14248 - DNA, 455 bp, Zea mays
  Clone ID: LIB36-011-Q2-E2-F6
gacacacgcaccttcaccaccttggacaccttcatcagcaccctcaacgagctctactgcagcacacttgcagcacactgtagcacacatacaccaccagcaaacactcttgacgacacttcctccttcacgacattcatcatgacccattccacatcacacagcaagaggcgcaccaggaccgcacactcgaggaaaccatggtcctggctgggcttgaccacagctgccctcttcatgacctcgctccctctcctggccgccgcagcgccgtcatcacggctggtcaagcgcgccccggtcgagtacattgccgactcggaaccgacgatcgagctcacgtttgaggccaatgactcgtactaccttcaagccctgaccctcaaccaatgtcagaaccagctcgtcctgcccgagaacggaacgcatgtccgctcttactacgccatctacac

SEQ ID NO: 14249 - DNA, 449 bp, Zea mays
  unsure (1)..(449): unsure at all n locations; Clone ID: LIB36-011-Q2-E2-F7
cacaaccacaaccacggccacggccacaatcacgcccttgttcacggacacgctcatgcgcacacgcatggccatggacatggacatggcccagggcacgctcatttgcatcaccacggccgtacgccgtcaacaggccatactagccatgtctcctcctcgcggactcattcacaccgccattcaaaatcaccgtcctatcaaaagagccccagcctcgagcgtgctcaacagcaaaagcgtgagcaacaaacctcagatcaggcacggcgccggtctcagattttggcgctcccagcaccgcagccgcagctatccacgtttacgagtggttcgtcctgtcgggaaggcttcgcagtanggtcagataccaacggctttcatcgtccttcaagtccgtcaatacagaggcaggataagcgctcgccatcgccagcgcatgaggatgt

SEQ ID NO: 14250 - DNA, 475 bp, Zea mays
  unsure (1)..(475): unsure at all n locations; Clone ID: LIB36-011-Q2-E2-F8
cgggtcgaccacgcgtctatccaatgtcatactatgcttcccctccaactcccctctcctcttgcgcatctccattctttgcatataatataacccacactcccctctaccacccccactcttatctacaacacatcatggtcaaggagacaaagtactacgaggccctcgaggtcgaacccggctgctctgattccgagctcaagaaggcctacagaaagttggctctgaagtaccatcccgacaagactggaggcgctaccgctgaaaaattccaggagatcagccatgcatacgacattctctccgacgcacagaagcgtcaggtctatgatcagtatggagaggctggactctctggcgagggcggagccggtggcggaatgggtggcctctctcncgaggacctcttctcgcacttctttgggggtggtggtggcggcggacgtggaggccgtccctccggcccccgccg

SEQ ID NO: 14251 - DNA, 459 bp, Zea mays
  Clone ID: LIB36-011-Q2-E2-F9
cccaacatgaagctgaccatcacccccaggtcaccaaagtcgcgcaaattccccattactcttgacctgaatggcacccccgctgaggtcaaggttgaggctgtgcaggccgccatcgcgaagcagttccctgagttctaccctgaccgccagcgtttgaccgtcgagaagactgctctggagaccggcaagactctggctgaatatggactcaaggatggcgactcggttgccttcaaggaccttggccctcagattagctggcgcacagtcttcttgatcgaatatggaggcccactgttgatccaccccctgatttactacctcccgtccttgttctacggcaaggactttacacacagctggatgcaaactgtcgcctactggatggtcatgctccatttcttgaagcgtgaatacgaaaccgtgtttgtacaccgattttcacatggaacgatg

SEQ ID NO: 14252 - DNA, 463 bp, Zea mays
  Clone ID: LIB36-011-Q2-E2-G1
ctccacgtcaccaccgtcgcctgtctccgtccactcgacactgagctaagcacgtcttgagcagcagtgcagcccagcccagcacacccgcacggtcaacagataactccgcgaacgcagctcccatgacaacgcacgacagcgacccgcagagtaacagctccatcgcgcaggtcgtgtcgtccctcagcagtctcgacatgaaccacacacacgacagtaccgagtccagcaagcgcgtaatgccagccatggccgcaactcacaaccacgtcggaatgaatgtcaacaggatacggcctacggaggacatcttcaacccgcacgacccacatattcgcgaggatatcatccggatgattatgcagtacctcagcgacgaaggctacaatgcttcccagatgacgattcaggacgaatccaacgtcaaatggcatgaccgggaggaaaacacgcatgagac

SEQ ID NO: 14253 - DNA, 458 bp, Zea mays
  Clone ID: LIB36-011-Q2-E2-G11
ctctctccataccaccacactgcctcccaaaacaaactcattcttattcatcaaacacacagcctacaccgccatgtccgaaatgcgctctgaagaaatcaaagaagccttcgctctcttcgacccccagaacacgggcagaattgagccgtctgcattccagaactttgttaataccttgggagacgaagagctgaagaggtcgatccgtatccctacgcacgccattgaccttcgtgagttcacagacttgatgaaccgctacaacaatgacacgaacaaggaccccgaggagccctaccgccgtgccttcgcctccatcaacaacgacggctctggccatgtgtctgcggaggagcttcgagccgccgtggggaagtttccttggaccaatacactctctgaggctgatatcgatgagatcatccacgagggcgacgtctcgggcgatggacgca

SEQ ID NO: 14254 - DNA, 388 bp, Zea mays
  Clone ID: LIB36-011-Q2-E2-G3
caacagcatggactggatgtacgccaactgctcgaccacagcccagcgtggtgctctcgactggtggaagaagttccatgatgcctccaagcccatctttgaggagctgtacgagtctgtcgccaacggcaccgagaccaggaggtcgctcaccaagaactcagcccccaactaccgtgctgagctcgaggctgagttggccgagatcgccaaccacgagatgtggcgcactggcaagtctgtccgcaagttgagacccgagaaccagtaaaacgcatgcccaggccgactatccatttctcctttctagactgttttcctcattatgcgctttgcaattgtaccataccacactgaagtcagagaataaatgcaccttctgaacccc

SEQ ID NO: 14255 - DNA, 465 bp, Zea mays
  unsure (1)..(465): unsure at all n locations; Clone ID: LIB36-011-Q2-E2-G5
cgccatcaacgccaaggacgcctttgctcgacacaccgacgagatctggggtacgcagctcagcaagaagtctgttcaggacaagtctggacgcgccgcgcgccgcgcagctgaaaaggcccagaaggctaaagagcaagcgcaggctaatgctaagcacgccaaggccgaagccgacgcccaggcagagagcctcaaggacacgctgttgaagaaggcggccagtgcccaaaagctggcggaggagtatgcagagggcatcaaggcagctgtgcgcggtcaagccgacgaggtcaagaaggcagccgatcatcacgccaaggacgtacccaagcctgaggagatcaaggctgctgccgccgagaagggacagggcgctcagcgaaaggccggggagtttatcgagcatctgagcgaaaccatgatcaggaaggcacacgacgcgcaaaanaattgtcggtgatg

SEQ ID NO: 14256 - DNA, 459 bp, Zea mays
  unsure (1)..(459): unsure at all n locations; Clone ID: LIB36-011-Q2-E2-G9
ctcacacctgctcctgcatcctcacctcactctgctcggcaggtagcattcctcttgatcatccgctctgtccagggaagccgatccatccgggtgccgatctgatcccaccaccgcaaccagccatgcagttcctgaaagtcgtctcgcccctgcgcaggacccagtctctacgcatcctggccatcctcgtcatcttcttcgtcctggcatccgtctcccgctaccaggggtcatacgaatactccatcgacgaggacggccaggtccagtccgtgccctcagacgtcacagagcacgatatctactttacgcaccacatcgccacctttgaccccaacgaccttcggccctggaccaaaagcgacacagaggcgctcaagacgccagnaggacaggaagtggtcgactacctgacagactccagtttccaaaagcacgtcgccgagaatgacacag

SEQ ID NO: 14257 - DNA, 429 bp, Zea mays
  Clone ID: LIB36-011-Q2-E2-H1
tgccgtagtgctctataaaagcccagcacatacccgccctctctcattccgttttcacacctcacccgcgttccattctcttttttagcattcgcttcctggcgcacggctcattcacgtcctacgcctactcgacctaagccccgcccttgttgatagagcagcaattccactctccactctacactctacactctccactctccactctctcatctcccccttcgccgccctgttcccctgtttagtccttccttacaatgccgctctttgcgcctctaaggatgcccatcaagcgtcgtatgcagacaggagctgtcctgctctggatctcggggatcatatacatgctcggtatctttgtctttctctgcacgttcaaggtcctccggaccctgatcatcatgtacctgctctgggccttcatac

SEQ ID NO: 14258 - DNA, 458 bp, Zea mays
  unsure (1)..(458): unsure at all n locations; Clone ID: LIB36-011-Q2-E2-H10
ccaccactcactaccccctggctataacttccagagttacctctgtcaaggaaagctatcctcggtattcgaaccaaccgatgcaaagccaaggactggcatcagagtcctggccgtaccaggcccctgggcatcgccttggaagcaacgtacccaggacaagtgacctttgcaaacacgccgaaggctggggtccgctgagtccaagtcggtacgatctgaccccatgtttcgagtacagtgtcctctttggcgccgtgtccctgatcgccattctcgggttcaccatacggatatactacctgactcaccatgcaaaggcacataatttcggaagaactgcttggatctattggccgacgcaactctgcatgggactcggagcgcttatggcctgcacgttatcgancgcgcatttttcgtctgagaactcatcgccaatcttttcctgnagctgc

SEQ ID NO: 14259 - DNA, 361 bp, Zea mays
  Clone ID: LIB36-011-Q2-E2-H3
actctaactagttcgcctcctgtctgctgtgcagaacattaccgtgcactcgcctccctcgtcaccattcattcgctcaccccaccaaccaccgaggcagtacaagcactactcactattgctaatgctaacaagcacatgctggtcattggcctcagagattaaatccatcctcagaaacttgacggcatctacatgatggatgtcgtacaactcacggtacactttcaagtgccttgggtcaaaacagcgatccttacaagccgacgtctctatcagcatcaacagtatcactttcacaaatggctgcaatcctgcccaacgcaaagtacactttcttaacgactcagcagctgtcttg

SEQ ID NO: 14260 - DNA, 452 bp, Zea mays
  Clone ID: LIB36-011-Q2-E2-H5
cattatcaccgagtggaacaagggagagctcgactcgtacctcattgagatcacccgcgacattctcaagtttaaggacactgatggctcgcctttggttgagcacatcaaggacacagctggccagaagggaaccggaaagtggactgtcgtctctgctctcgataacggcatgcccgttaccctgatcggtgaggccgtctttgcccgctgcctgtccgccatcaagaacgagcgcgtccgtgcttccaagatcctttccggccccaacggcaagttcactggtgacaagaagcagttcatccacgatgtctccaaggccctgtacgcctccaagatcatctcgtatgcccagggcttcatgctcatgcgcgaggctgccaaggagaaccgctggcacttgaacaacgccggtattgccctcatgtggcgcggcggctgcatcatccgct

SEQ ID NO: 14261 - DNA, 430 bp, Zea mays
  Clone ID: LIB36-011-Q2-E2-H6
ggagttagaatgctatgaattccaaaccagagaagattcaaataaaacagagactaaaaaggctgttcaaacagtaataattcttgcacatgaacactaaaccagaacgataacaggaaacaaagatacagtcagtactcagtagtttgagggcacctacggaaagcaagtaatactacagagggtagacgttccagtgcttaatgatgaaacatcatcagtacaagcaaacgtgtttttcatcatacaccgtatcactttcacaagtggctgcagtcattccgcagcataaggagattgacttcgagaagcagcatcaactttgcgcagaggagcagggctaccaggagatggggacctctcattgctacgcctttcaggagacatctccttagaaggagaggccttttgcaaagcagggcttcttggg

SEQ ID NO: 14262 - DNA, 455 bp, Zea mays
  Clone ID: LIB36-011-Q2-E2-H7
cggacgcgtgggtttatacgcaccattcgcatgcccttactcttcagcgaagaaaccagcacagcagcagatatgactggcatactcgacgtcaacttcgatgaggctctcgccgccgccatgacaagccactacactgaggacctggagccccacctcgctcagaggtcgtttttaccgcactcgcccaacattccacgtaacagccgcagcagcattagctcgccctcctccagtaacagctcattctctgcccggaatgactcacccgcttatagcaatgggtctccttcgagcactggctcctccctcagcaatggcttttctcggtatgccaatccagtggacaggagaaccatcttgaacacccgccagcagtttgaagaccaaagacgggcaaagctggacagcctcgaggaagccctttcgcgattggaccttagtaacgcccgcat

SEQ ID NO: 14263 - DNA, 383 bp, Zea mays
  Clone ID: LIB36-011-Q2-E2-H9
tgacacactctccagcggcccacccttacccctgctcaagacgtctttctctcttttgctcactcacgcacgcatacacacacacgctctctctctctatctcttcttcagtcacgtatataactcccagtgcgatggtcgcaacagccctcctccgtagaactccagggacgttgtccgcggctatccgcctgcatcgagccaccacagcttttgccacacctgcagctcgcgcgttgagtacgcatgtcacaaacgccgcctgtgaggaccacgaaccaagcttcctaggttctgtcgaaacgttttacgatcgcgcggccaagattagcgggatctccgaaaagtctctaatgggcatcaaggccgttgactctgtgctc

SEQ ID NO: 14264 - DNA, 342 bp, Zea mays
  Clone ID: LIB36-012-Q1-E1-A10
cacacgcgtccgacgatacgcacccaccagaggaaaagggcaaaagccaaaaggcatcaccgccgcgacgacgatggcagcctcgctccaagccgcggccaccctgatgcagccggccaagatcggcggccgggcgccctttgcctcgctgccgtcccgcccgtcgtcgcaactcgcctgcagggcgttcggcgtcgacgccggcgccgccaggatcacgtgctccctgcaggacgtcgccagcaggtgcgtcgacgccgcgaagctcgccggcttcgcgctcgccacctccgcgctcctcgtctcgggcgcgagcgcggagggcacgcccaaagaggctga

SEQ ID NO: 14265 - DNA, 421 bp, Zea mays
  unsure (1)..(421): unsure at all n locations; Clone ID: LIB36-012-Q1-E1-A11
agcaaccggtccagcactttcacgctcagctccagcaatggctgcctccaccatggcgatctcctccacggcgatggccggcacccccatcaaggtgggctccttcggcgagggccgcatcaccatgcgcaagaccgtgggcaagcccaaggtggcggcgtccggcagcccctggtacggccccgaccgcgtcaagtacctcggccccttctccggcgagcccccgagctacctcaccggcgagttccccggcgactacggctgggacaccgccgggctgtccgccgaccccgagaccttcgccaagaaccgcgagctggaggtgatccactcccgctgggccatgctcggcgcgctcggctgcgtcttccccgagctgctctcncgcaacggcgtcaagttcggcgaggccgtctggttc

SEQ ID NO: 14266 - DNA, 428 bp, Zea mays
  Clone ID: LIB36-012-Q1-E1-A12
acaaaagctattattggaaccataggcgatgttgacgcctaccagctaccagatgctaaaggttacagcagcctaatgagatatttgctgggcatcacggatgaggaacgccaacaaagacgtgaagagatactagcaacaagcccgaaggatttcaaggagttcgctgatgctgttgaaaccatcaaggacaatggggtcgtggttgccgttgcctcgatagatgatgttgaagctgcgaataaggaaaacccgctattccctgaagtaaagaagtgtctgtgaggtccaccaccacttgataaggattctagtcgggaggtgtttttttaccagtgaatgcggagtgtgacaatatacgtaacatattgcaagagcaccatctctccgaccacggttatagctagccgaatcttggcttctcaaaa

SEQ ID NO: 14267 - DNA, 429 bp, Zea mays
  Clone ID: LIB36-012-Q1-E1-A8
cccacgcgtccggtcatcatgcgtggtataaatgatgatgagatctgcaattttgttgaattgacgagacacaagcccatcaacgttagatttattgagtttatgccatttgatggtaatgtttggaatgtgaagaagctagttccttatgcagagatgttggacaaagtgcggcaaagttataaaggagtagagagacttcaagatcaccccacagacactgcaaagaatttcaggattgatggacatgttggcactatttcatttattacatcaatgacagagcatttttgtgctggctgcaatagattacggttattggctgatggaaacctcaaggtgtgcttatttggcccctcagaggtaagtttgagagaacccatccgtactggtgttgatgacgctggactgaaggagataattggtgcc

SEQ ID NO: 14268 - DNA, 356 bp, Zea mays
  Clone ID: LIB36-012-Q1-E1-B1
gttgccggagcctttcagtttcatcttcacatggttcgccgcactgcctttaatattttgggtagcgcaggcgatcactaatgtcatagtgaaggacttcctgatcttgaagggtccgtgtccaaactgcgggaatgaaaacctctccttcttcggtaccatactgtcagtgcctagcggtggctcaaaaaacagcgtgaaatgtgcaagctgtggcactgagttggagtacgactcatcaacccgattgatcacactcccagaaccggctgaggcttaataagtgatggcgtggtttcgatttcgctagcaggaaagatggcccggcccgcccgcaaattcttgattgtcgacag

SEQ ID NO: 14269 - DNA, 428 bp, Zea mays
  Clone ID: LIB36-012-Q1-E1-B10
caaaagggtcccaactctcaactcgcgctcaatgcatccgctatcgtctctcctcctgttccgttccgccgcgccgcccagcgcgctccccttgcggcggcggcggcggagtcacacgccagtgcgagcatcatggcaggagctgggggcgtgctggtgttttccgccatccccttcactgcagtcaaggccctcgccaacagtcccctgggtgcccgcctccgccgccgcctcgaggacaggaaggccgccgcagctgccgaggctgacgctctccgcgctgcctcgcgcggcgcccgtaacaacagcttttggtacggtggagatcggccacggtggcttggtcccgtgccttacgactaccctgagtatttgacaggagagtaccctggagattatgggttcgatattgcaggtctgggaaggga

SEQ ID NO: 14270 - DNA, 427 bp, Zea mays
  Clone ID: LIB36-012-Q1-E1-B12
cggaccgacgagcgacgaagcgcgcagaaagagaagaacctcggagctgagatggcacaagccatggcgtcgatgaccggcctctcgcagggcgtcctgcccagcaggcgcgccgacagcagaaccaggacggccgtcgtcatcgtcagggcgtccgcggagggcgacgccgttgcgcaggcgggccgccgcgccgtgatcgggctggtggccactggcatcgtcggcggcgccttgtcgcaggcggcgcgcgccgagaccgtcaagaccatcaagattggagccccgccgccgccctccggtggactccccgggactctcaactctgaccaggcgagggacttcgacctccccttgaaggagcggttctacctgcagccgctgccgccggcggaggcggcggcgagggtgaagacgtcggcgcagg

SEQ ID NO: 14271 - DNA, 425 bp, Zea mays
  unsure (1)..(425): unsure at all n locations; Clone ID: LIB36-012-Q1-E1-B2
cggacgcgtggggtcgaggtcgaggacggcaacatgctggtcatcagcggacagcgcagcagggagaaggaggacaaggacgacaagtggcaccgcgtcgagcgcagcagcggccagttcgtcaggcgcttccgcctgccggagaacaccaaggtggatcaggtcaaggctggcctcgagaacggcgtgctcacggtcaccgtgcccaaggcggaggagaagaagcctgaggtgaaggctattgagatctctggttgagcatccaatccaatatggacgattggacgtggaaggtttcctgtgtcttctacgatataataattggtcgctgtcctgtgtggatgtttcctgtgtcgtctacgatatattaatgtacttctgtctgtntcgtttcgtatgtacaatcttccgggtatccttcatgt

SEQ ID NO: 14272 - DNA, 431 bp, Zea mays
  unsure (1)..(431): unsure at all n locations; Clone ID: LIB36-012-Q1-E1-B5
cgcacgcatacacagcacagagtgaggtaagcatccgaaaaaagctgtgatctgatcgacatggccgccgccaccatggctctcacctcccgcgcgctcgtcggcaagccggcgaccagcaccagggacgtcttcggcgaggggcgcatcaccatgcgcaagactgctggcaagcccaagccagcggcgtccggcagcccctggtacggggccgaccgcgtcctgtacctgggcccgctgtccggccagcccccaagctacctgaccggcgagttccccggcgactacggctgggacaccgcggggctgtccgccgacncggagactttcgccaagaaccgcgagctggaggtgatccactgccgctgggccatgctgggcgcgctcgggtgcgtgttcccggagctgctcgcccgcaacggcgtcaagtt

SEQ ID NO: 14273 - DNA, 456 bp, Zea mays
  Clone ID: LIB36-012-Q1-E1-B6
actcgcgggtcgacgcaagcctctacactgacgtcgtgactagagcctgatccacgcgcagagcatcctggccatctgggcgtgccaggtggtgctcatgggcgccgtcgaggggtaccgcatcgccggtggcccgctcggggaggtggtcgacccgctgtaccccggcggcagcttcgacccgctcgggctcgccgacgacccggaggcgttcgcggagctcaaggtcaaggagatcaagaacggctgcctcgccatgttctccatgttcggcttcttcgtgcaggccatcgtcaccggcaagggtcccgttgagaacctcgccgaccacctcgctgaccctgtcaacaacaacgcctgggcctacgctaccaacttcgtccccggcaagtgagcgagggcatatacatacgtgtatgcgtgtaccgtagacatacctaatcgtatatgtactgc

SEQ ID NO: 14274 - DNA, 435 bp, Zea mays
  Clone ID: LIB36-012-Q1-E1-B7
gcaatttcgccctcgattcgaccccgattcgtccgcccgcgaccgggattccctccgccaagcgcggatctgaacgctgcgctccgtgtcgccgctcgaatccgccatgaagggggccaaatccaagggcgccgccaaggccgatgccaagctggcggtgaagagcaagggggcggagaagcccgccaagggcaggaaagggaaggccggcaaggaccccaacaagcctaagagggctcccagcgctttcttcgtgttcatggaggaatttcgcaaggagttcaaggagaagaaccctaagaacaagtctgtcgctgcggtggggaaagctgctggcgacaggtggaaatccctgagcgagtcggacaaggctccctatgtagccaaggctaacaagctcaagctcgagtacaacaaggccatcgctgcctacaa

SEQ ID NO: 14275 - DNA, 409 bp, Zea mays
  Clone ID: LIB36-012-Q1-E1-B9
cacacgcgtccgcccacgcgtccgggctcacgatcatctctcggaacgggtcgcgcgcgatcgagaacgaagccgagctggtgcgcgccgctgcgggcgccgggttccgcgtcgccgtgctccagccacgccaggacacggagctcgccaggatgtaccgcgccctaaacgcctctgacgtcatggtgggcgtgcacggcgcggccatgacgcacttcctgttcatgcgcccgggctcggtgttcattcaggtggtgccgcttggcaccgactgggccgccgagacgtactacggcgagcccgcgcggcggctgggcctacgccacttgccgtacagaatcctggcgtccgagagctcgatttacaggaagtacgccaacgacgacccggtgctgactgacccggatac

SEQ ID NO: 14276 - DNA, 426 bp, Zea mays
  Clone ID: LIB36-012-Q1-E1-C10
cccacgcgtccgcccacgcgtccgcccacgcgtccggtcacttctgtgacttctgtctgcgtctcgctctccggcgactggtgggccgccgccaccctaagttgtggaggtttacattggtctcttcgccggcgacgagcacccaccagtcttgacaagtttttccaatggaccaagtaccgaatggaaggcataaggtttcttttgcgaagccaagagtagttgtgctttcagattctgactctgactctgaaggttttgtagaagagctaactcctgttcactcaaagtcaaacgggaaggcttcatctgcgagcctaaaaactggtggaaaggcttcagccttttctaaaggtgaggcaagcaaaggaaaagcatacagtagtgacaaaggtggaaagggttcttcatcacatgcagtgccta

SEQ ID NO: 14277 - DNA, 433 bp, Zea mays
  Clone ID: LIB36-012-Q1-E1-C11
cacacgcgtccgagcaaccggtccagcactttcacgctcagctccagcaatggctgcctccaccatggcgatctcctccacggcgatggccggcacccccatcaaggtgggctccttcggcgagggccgcatcaccatgcgcaagaccgtgggcaagcccaaggtggcggcgtccggcagcccctggtacggccccgaccgcgtcaagtacctcggccccttctccggcgagcccccgagctacctcaccggcgagttccccggcgactacggctgggacaccgccgggctgtccgccgaccccgagaccttcgccaagaaccgcgagctggaggtgatccactcccgctgggccatgctcggcgcgctcggctgcgtcttccccgagctgctctctcgcaacggcgtcaagttcggcgaggccgtctggttc

SEQ ID NO: 14278 - DNA, 426 bp, Zea mays
  Clone ID: LIB36-012-Q1-E1-C12
cagacgcgtgggctcggatctgacccggagagcctgcggtggaacgtgcaggcggagctggtgcactgccggtgggcgatgctcggcgcggcgggtatcttcatcccggagttcctgaccaagatcggcgtcctcaacacgcccttctggtacaccgccggcgagcagcagtacttcaccgacaccaccaccctcttcatcatcgagctcatcctcatcggctgggccgagggccgccgttgggctgacatcatcaagcccggaagcgtcaacaccgatcccatcttccccagcaacaagctcaccggcaccgacgtcgggtaccctggtggcctgtggtttgacccgctcggctggggctccggctcgccggagaagatcaaggagctgcgcaccaaggagatcaagaacggacgcctcgccatg

SEQ ID NO: 14279 - DNA, 363 bp, Zea mays
  Clone ID: LIB36-012-Q1-E1-C2
cacacgcgtccggggccatatgtctggatcaaatacctttcctttaggaggaagaaggccatattgatgtgtgcaaaagaactgtgggagtatgggactatttgtatactactcggcattaagtgcattctttgggaaatttctgagaaatttcccctactaccaggattgataacaccatcgattttcgctacagtacctggagcttcttatatgaaagaacaacacatcaactatctagcaacagcatatgcattccattcagatatttcttttggaaggaccctgtcttgttttagtggagtccctgtgatcgtttaaagtcgtctgtatacttgtactgaacttcttgtggtgttactg

SEQ ID NO: 14280 - DNA, 353 bp, Zea mays
  Clone ID: LIB36-012-Q1-E1-C4
tcgcaagtctctagattgagtcgtatctatactcttctcccccccagtccggaccccggaggagccaagccatggcgtccacctcctgctgcctcctccaccagtcaaccgcccgcctcggcgcgtcgccgcgcctggccgccgccccgccgcgcagcgcccagctgctcgtctgcaaggcccggaagcaggaagccgccgcggaccagagcgacgtctcgcgccgcgccgcgctcgcgctcctcgcctgcgtcacggccgccgccggcgccaaggtgggtcccgccgccgcggcatacggagaagcagccaacgtgttccgcaagcccaaggggagcacggggtacatcgcg

SEQ ID NO: 14281 - DNA, 426 bp, Zea mays
  Clone ID: LIB36-012-Q1-E1-C6
cacacgcgtccgacgctatggcgggtgcagtcgcagggtgccagggagtctttcatgtcgccactcctgtgccttcagggaagatcaccgatccagagcgagagatgctgggtcctgctgttaccggcaccataaacgcactcaaggctgtgtctgctgcaaatgctcgtcgagtggtcgtcgtttcatccatggttgccgttgagatcaacccgaaagactggcccagagacaagatcaaagatgagaactgctggtcagataaagagttctgcaggaaccaatagaactggtattctgtcgccaagatctcgtcagaagaggccgcacttgaatacgcgaagcagaccgggctggatgttgtgacggtcaatccagctgtggtctttggccctcttctgcagccgacgctcaacacgagctgcc

SEQ ID NO: 14282 - DNA, 433 bp, Zea mays
  Clone ID: LIB36-012-Q1-E1-C7
aggacgcgtgggcggacgcgtgggcggacgcgtgggcggacgcgtgggttcgtgcttgtttgctctagggtttttgccacgccgccgccgctctgccccttccaccccaccgatataccaagatgacggcgcaggctgcggaggagctcgccgcccagatcgagcagcagaagctcgaggagcagaagaccgaggcagaagaggttgtggtggaggaggatgacgaggatgatgaggatgacgatgatgatgacaaggatgatgatgaactggatggacaagaaggggatgggagtggcaagtcgaagcaaagcaggagtgagaagaagagccgcaaggccatgctgaagcttggcatgaagcccatcactggtgtcagccgggtcactgtgaagaagagcaggataagctttttgtcatctcgaagccagat

SEQ ID NO: 14283 - DNA, 401 bp, Zea mays
  unsure (1)..(401): unsure at all n locations; Clone ID: LIB36-012-Q1-E1-C8
agcaaatgctatcttcaaccacactccgaccgccggcgccggcgccggcgccggcacacctcaccatctgctcctcgcccgcagcgtggcggcgtgcgccggcggtgcgcgcggtgcggaactacgactccatcccgaagcgggagcccttcagctccagccgcagcatcctccacgagttcctcaggcaggacaagcccctcatccagcgcaccaaggaccagatcacagattattgcacggccatcgaaggcgatgagtgctgcagctgttgggacgcttactttgaactgaataaacttgagcaagagctgcccanagacgaaatcgcaaggatggtgaaggactcggagggtgacgtgaggtacctgatanagagcatccaccatcgctcggatctg

SEQ ID NO: 14284 - DNA, 434 bp, Zea mays
  Clone ID: LIB36-012-Q1-E1-C9
ctcgcgcctcccactcctccccgccactcgccgccagcgaccaaccatcgcccgcccagcagcagcacggccccacgccaggactcgacccacgcgcggctagctaagctcccgccgccatgatcacggccctgcaggtctccggcggcggcctgccgctcctgttcgcccggcgccggcgccgggcgttccggccgccccaagcggtggcgtccgacgccgccgccgccgccgagggcacggcgagggaggatggcgggaaggtggccctgggcgggtccggcgtctccgtcaccaagctcggcgtcggggcgtggtcctggggcgacaccacctactggaacgagttccggtgggacgatacgaagctgaaggcagccaaaggagcgtttgacgcgagcatcgactgcggaataactttcttcgacaccgcc

SEQ ID NO: 14285 - DNA, 418 bp, Zea mays
  Clone ID: LIB36-012-Q1-E1-D1
caagaagcgcagcgcccatggccatgtccacgcaagcctccgccgccacgcgccacctgctggccgccgcctgggcgccggcggcgaagccgcggcagctgagctcgcagctcgcgctgccgtcgtcgtcctcccgcgggccggccccgctccgcgcgtccaccgaggaggcggtggaggcgcccaaggggttcgtggccccgcagctggaccccagcacgccgtccccgatcttcggcggcagcacgggcgggctgctccgcaaggcgcaggtggaggagttctacgtcatcacgtggacgtccccaaggagcaggtgttcgagatgccaccggcggcgccccatcatcgggagggcccaactcttgagctgggccagggacatgctgggctcggacaggtgcgctcagtaagatac

SEQ ID NO: 14286 - DNA, 430 bp, Zea mays
  Clone ID: LIB36-012-Q1-E1-D10
gttaactagctacctaattaccagctgccagccatcttgtgtcagcacactgcagtgttcgtttctgtcgggaagagagagaagaggcagcgacgatggatgagcctccgccacagagcgacgacgaccggaagctgtcggccatggagcacgtcaagaaacgccacgaggagaagggattcctctatgcctgcgccttcatgttctgctgctgcttctgctgctacgaggcctgcgagcactgcctggagtgcttctgctgctgcggcaagaaggacgagtgattaaggccggtccaaccagttccgcccgcccaccaatgatgaatgatcggtttgtaattcgtcgtggatttgatttgtttcggttgtgatttgtgaagaactgcgatcaatctggaactgttcgtcgtgatagaacatgcatgttg

SEQ ID NO: 14287 - DNA, 401 bp, Zea mays
  unsure (1)..(401): unsure at all n locations; Clone ID: LIB36-012-Q1-E1-D2
cgcctcctcgtcctccaccaccgccgtcacggcgctccccaggaatgggcagcgggcgtcgtcctccttcctcggcggcaagacgctgctgagacaggccgaggcggcccggccgtcgttcgccgtgcgcgccgcggcggaccccaacaggccgatctggttccccggcagcacccctccgccgtggctcgacggcagccttcccggcgacttcggctttgatccctgnggcctcggatctgacccggagagcctgcggtggaacgtgcaggcggagctggtgcactgccggtgggcgatgctcggcgcggcgggcatcttcatcncgggagttcctgaccaagatcggcggtcctcaacacgccccttcctggtacaaacgccggcgaagcagcaagtac

SEQ ID NO: 14288 - DNA, 390 bp, Zea mays
  Clone ID: LIB36-012-Q1-E1-D4
catccgcgccgccacagccgggcgcgcctccccgatcgagatccaggagatatgcctcgttatgatgatcgccatgggaatacacgcttgtatgttggaagattggcccctcgcacccgttcccgcgacctagaatatcttttcagcaaatatggaagaatacgtgaagtggagttgaagcgtgactatgcattcattgaattcagtgacccccgtgatgctgatgatgcgcagtacaacctagatggcaaggaagtcgatggaagccgtattattgttgaatttgctaaaggagttcctcgtggttctgggggttcacgtgagtacatgggaagaggacctccaccaggaacaggtcgttgttttaactgtgggatggatgggcactgg

SEQ ID NO: 14289 - DNA, 429 bp, Zea mays
  unsure (1)..(429): unsure at all n locations; Clone ID: LIB36-012-Q1-E1-D5
cccacgcgtccggccgcatcgccgccgccggaagcgcctccctcgatccagatccaggagatatgcctcgcaatgatgatcgctatgggaatacacgcttgtatgttggaagattgtctccccgcacccgttctcgtgacctagaataccttttcagcaaatatgggagaattcgagaagtggagttgaagcgtgactatgcattcattgaattcagtgacccccgtgatgctgatgatgcacagtacaacctagatggcagggacgtcgatggaagccgcattattgttgaatttgctaaaggggttcctcgtggttctggtggttcacgtgattacaacggaagaggacctccaccaggaacaggccgttgttttaactgtggagttgatggtcactgngcaagagactgtcaggctggtgactgga

SEQ ID NO: 14290 - DNA, 323 bp, Zea mays
  Clone ID: LIB36-012-Q1-E1-D6
cccacgcgtacgcccacgcgtccgcccacgcgtccgcccacgcgtctgccaatacagggatcgccatgtccgactcggatgagcaccacttcgaatccatggccgacgctggggcgtccaagagctacccgcaccatgctggcaccgtccgtatgaaccgcttcatcgacatcacgaaccgtccctgcaaggttgtagaggtttctacctccattactggtaagcatggccacgccagatgccactttgtcgccatagacatattaagtgggaaaaagcttgaagatattgttccttcatcagacaggctgtgacattccaca

SEQ ID NO: 14291 - DNA, 423 bp, Zea mays
  Clone ID: LIB36-012-Q1-E1-D7
atcgaccttcaagtctcgctacgtagcagtgcaataaaaaaagcagccgcaatggcgagcagcaccatggccctctcctccacggccttcgccggcaaggccgtgaacgtgccgtcgtcgtccgccttcggcgaggcccgcgtgacgatgcgcaagacggcggggaaggccaagccggcggcggcgtccgggagcccgtggtacggccccgaccgcgtgctgtacctgggcccactgtccggcgagccgccgagctacctgacgggcgagttcccgggcgactacggctgggacaccgcggggctgtcggcggacccggagacgttcgccaagaaccgggagctggaggtgatccactcacgctgggccatgctgggcgcgctcggctgcgtcttcccggagctgctcgcccgcaacggcgtc

SEQ ID NO: 14292 - DNA, 431 bp, Zea mays
  Clone ID: LIB36-012-Q1-E1-D8
aaaaaaaaaatcaaaaatagaaaaagtctcttgcccccgcggccgtgccgagccggcatcccctcccccagcaacgatcgcgacgacccaaaccggcaagggtgaccagcggctggccgccgccgcggcagacgagtcccatgggagacaacaagtctccgctgagcctgagcccgatgggcgggcgcgaccgggaccgggagctcctcatcccggtctccggcggcggctcggcgcccggcgtcgatgacgagggcgctgacagggcctcctccgcctccgcggcgctctcctcctccggccgcgaggctttccataaggtcgtccgcagttgggcttcaaagaagttcatgactggatgtgtaattctcttccccatagcaataacgttctacatcacctggtggttcattcattttgttgatggattc

SEQ ID NO: 14293 - DNA, 431 bp, Zea mays
  Clone ID: LIB36-012-Q1-E1-D9
catccgcagagagcttgttccgtccaggcaaccaaaaagcaagttgccccgccgcgcagaggaagaagagagcagaggaggatggctcgtacgaagcagaccgcccgcaagtccacgggaggcaaggccccccgcaagcagctcgccaccaaggcggcgaggaagtcggcgccgacgaccggcggcgtgaagaagccccacaggtacaggcccggaaccgtggcgctgcgcgagatccgcaagtaccagaagagcacggagctgctgatccgcaagctgcccttccagcgcctggtgcgcgagatcgcgcaggacttcaagacagacctccggttccagagccacgccgtgctggcgctccaggaggccgccgaggcctacctcgtcggtctcttcgaggacaccaacctctgcgccatccacgctaagcg

SEQ ID NO: 14294 - DNA, 429 bp, Zea mays
  Clone ID: LIB36-012-Q1-E1-E10
ggcggtcgcgtcgcttctgatgagaagccagaagtacgccatgctaaagcagcagctcgccgtggccgcccaatttgaggattacaaggaagcagcgaggttgagggactcgctgaggtccttcgaggagaaggagcccgtgttgtgcctccgccggttgatgaagaaggccattgaggaggagaggtttgaggatgctgctaaatacagagatgaattaaagattttggctccacactccctcctcaaatgttctagcgatgcaactactttggggataagagttcaagtcaggagtgtctatattgaaagccggagccagccattgaaagggcaattcttttttgcttatagaattagaattacgaatagttctcagcgccctgttcagcttctcaaaaggcactggattgttacagatggaaatgg

SEQ ID NO: 14295 - DNA, 446 bp, Zea mays
  Clone ID: LIB36-012-Q1-E1-E11
cccggggtcacgcacgcgtccgcaaatttacgggctcaaacaaagtgtgatagtgaaagtcattttgcttccagcttaagaaccaagccaagaaaacagttatcaactgtgacgccacactcaaaagcttgtttggtgagagggataaggttgggatgctggagatctctaagcttttgagccgtggcttcccgaaaatctccaagcttttgtggtccatggagccagggatggctctttggtaaaagacttcgttgtggatggcctcttttatggtccatgttaagtcccaagtcccactaggtggttaagcagaaaaatcttgtgatggcattaagactttcagactttgtttttgggtctgatgcatgtaaaaaggattcccagtgtttctgttgctcttgcgatcctgtgaggacacatatgacagaaatatttagtttgtt

SEQ ID NO: 14296 - DNA, 418 bp, Zea mays
  unsure (1)..(418): unsure at all n locations; Clone ID: LIB36-012-Q1-E1-E4
cacataaaatatctcacacacaatcacataacaatttttaaatccatagtctcatcaattacatcacaaaagtctcatccgtagtcataataagacacatctcatcatccagtactaataagagacaatatctcatacataatcataataaacgtctcaagtatcagaacacaataacatggaagctcatggttgccgatcaccatcgggttacagtgacgagtgatggtcgatacctccactagtgaagagggttttgacaaagtctaactcgtcttctcgttcttgcgttggcaaggtagctggaggtgtctaatatatatgtacaaatgacatttgctgagttacattattgagagtgctcgtactctttttcccaaganacacaagatcagcaatagcctacagacagtttatt

SEQ ID NO: 14297 - DNA, 429 bp, Zea mays
  Clone ID: LIB36-012-Q1-E1-E5
cggacgcgtgggcgcgcccccagacacgcatcgcacagccacacgcgtacacccgtacaccgtacgcagccatggcatcagtaggcttcggcacggtcgcgccggccgtggcatcatcgccggcggccaggacgacgagcgtgggccgcccctccgcggtgcacgtccctgcggcgacgaccaaggtcgtcgcggcggcggcgggtaagcgggtggaggagaagggcctgttcgacaccatcttcggcgcgctgtacaaggaggagcagctgctggagacggaccccgtcctgaacaaggtggggagcaagggcaaggccgccgccgccccggcgcccaagaaagccgctgaagagggcggcaacggcgggctcagcctcggcgggttcttctccaggcccaagaaagggtgaacgtacgtacgttatg

SEQ ID NO: 14298 - DNA, 430 bp, Zea mays
  Clone ID: LIB36-012-Q1-E1-E6
gtcggtattgccttgcgaagagctttacttggagaaatagaaggaacatgtatcacacgcgccaaatttgggaacgtgccacatgaatattccacaatagtaggtattgaagaatccatacaagaaattttactaaatttgaaagaaattgtattgagaagtaatctctatggagttagagacgcatcaatttgcgtcaaaggtcctagatacataaccgctcaagatataatcttaccgccttccgtagaaatcgttgatacgacacaacctatagctaacttgagagaacccgttgatttctgtattgagttacagatcaagagagatcgcgcatatcatacggaactcagaaagaactctcaagatggaagttatcctatagatgctgtattcatgcctgttcgaaatgtgaattatagtaattttt

SEQ ID NO: 14299 - DNA, 356 bp, Zea mays
  Clone ID: LIB36-012-Q1-E1-E8
ctcgcgggtcgacgcaagcctctagactgagtcggattacgctaggccactgattgggttggcagcgcgccgcggcagcacacggggagagagagaggcagagcgagcgagcgagacagcgctggtcatggcgtcactgtctgtcgccgccgtggcggccaccatatcgatgccagtcagcagcggtgtgagagggcgccgtctcatggtcgcgtccatggccacccagaacggccacaagccgacgcccaagatcgtctccggcacgacaagatccggcacgatgacggtgttcccggtgggcgagccgggcccgcggccggccacgacgagcggcagagcgccggttaagctgc

SEQ ID NO: 14300 - DNA, 424 bp, Zea mays
  Clone ID: LIB36-012-Q1-E1-F1
cgagtcctcgacaagcacccaaatcgacgaattcttcccccctctccgatctcgacgcgcaccgatgcgggcgatgtcgtcggcggttaatggtatgttgcgggcacggctgcgcggggcagcgcgcgttcgcggcggcggcggcgagggggccgggcggtggacgaccccaggtcacgaggagcgccccaaggggtacctcttcaactggccgccgccgcctccgggggaatctcgcaagtgggaggattgggagctgccctgctacgtgacctccttcctcaccgtcgtcatcctcggcgtcggcctcaacgcgaagcccgaccttacaatcgagacgtgggcgcaccagaaggcgctcgagcgcctccagcagcaggagctcgccgctgccgacacccaagccgagtgatccgcgcgtctc

SEQ ID NO: 14301 - DNA, 459 bp, Zea mays
  Clone ID: LIB36-012-Q1-E1-F10
acaggtccgagactcgcgggtcgacgcaagcctctaaacagaggcctataagcgcagaaggcagtcgcggacaggaggaagaggaagaagaagcggcagcgagcgaggatgccgtgcctgaacgtgtcgaccaacgtgaacctggagggggtggacacctccgccatcctcgccgaagcctccaagtccgtcgccaacatcatcggcaagcccgaggcctacgtgatggttgttctcaagggttcggtgcctatggcatttggaggtacccaggagccagcagcttacggtgagctggtttccatcggaggcctgaaccctgatgtgaacaagaagcttagtgctggcatcgcttctatcctggagtcaaagctgtctgttcccaagtcacgcttctacctcaagttctatgactcgaagcgctcggacttcggttggaacggctccaccttctagact

SEQ ID NO: 14302 - DNA, 423 bp, Zea mays
  Clone ID: LIB36-012-Q1-E1-F11
ccgtatagagaggggcagtccatcggcatcatcgctgatggcgaagacaagaacggcaagccgcacaagctcaggctatactccatcgccagcagcgccctcggagatttcggcgactccaagacggtatcgctttgcgtgaagaggctagtctacaccaacgatcagggggagattgtcaaaggagtctgctcaaacttcctgtgtgacttgaaacctggcgccgatgtgaagatcacagggccagtgggcaaggagatgctcatgcccaaagaccccaatgcaacagtcatcatgctcgcaacggtgaccggtattgctccgttccgctccttcttgtggaagatgttcctggaggagcacgaggactacaagttcagcggccttgcgtggctgttcttgggagtcccgacgagcgacagc

SEQ ID NO: 14303 - DNA, 356 bp, Zea mays
  Clone ID: LIB36-012-Q1-E1-F2
caaatcctccacgacacgacacctcgtcgaggacctcgagggcatcagttatcgacggcgtgaactccagcgtcttccggctcaagctcgccgcagtattgcggcacggctcggccggcgcatcgcccgttaaccgggtgcagctggacgcgcccgaggggtgccgcaccgcacttcacgacctggccgccgtcttctccgtcatcagacacgacggcggtcggccaaggccgaaactcttcaagtggtacgatctgagagatcacctgcaacatggactccttcctcaacgtcatgatggtcagcattggcgtcaactttgcgcgcgcccataccgtcgagttctggacctgcca

SEQ ID NO: 14304 - DNA, 106 bp, Zea mays
  Clone ID: LIB36-012-Q1-E1-F3
gacgcattacgagccattgctaaaagtggtgtacggttaagttgtatacgcgatgtaacacctatgccgcataatggatgtcgacctcctaaaaaaagacgtctgt

SEQ ID NO: 14305 - DNA, 190 bp, Zea mays
  Clone ID: LIB36-012-Q1-E1-F4
atccccgtatggggatttatatatatctgtagctgaaggccttcagcaaaccgttgttgtatacttgtgtgttgttacttaacagcgtgtgtagtgattagcactgcacactccctgattgtaccatggtatattgaatgtttatactgctggaagaaaaaaagggggaccttgtgatggtcagatgttt

SEQ ID NO: 14306 - DNA, 416 bp, Zea mays
  Clone ID: LIB36-012-Q1-E1-F8
ctcgaactggtggccgtctaagttcttgctgaaatcgagtcggagcatcacgtgtaacgaaccacatcatgcgaaggacaagagccgagttgatcccaaaatgatgctagtgaacgaacctaaggatggatgatctgatagagtgccagaatgggagatgctcaccaagtggtcgtcaattaacaacactaacttagtgttatcccaggttataattttgttctgttatggatgctgctaagtgccggtgggctcagtcttcttatataagtatatcccatctttagcttctttattgaggattgtcacttaagctagcatgtatttgaaaacctataaatattttatacattttaaattgtaattttttttgaatcactttcttttgtaatcactcggatgatatatattgtaat

SEQ ID NO: 14307 - DNA, 425 bp, Zea mays
  Clone ID: LIB36-012-Q1-E1-F9
cagacgcgtgggtttttttttttttttttttttttggcaagtgatcttgcaatacaatataagcatattcgagtggaacaaccagattcagttccttagatttcacgcgcttgtgctttgagccgtaggcaactgcaatcggtttcttgaacagcgaagcatcggaggtctggtaactggccagaaaataggtatgccggagcagaactattgtgtatgtgtatcttgtttagaatggcttccctgcagcttccatcatctcctttgcacggatcagcttctcgatttgcctcacgatttcaaggaccatgtcctcaagcgtcaccaagtcaatgctactgtacccccgctgagaagccacattttgtactgaaacagtaatatcagaaaccccatagcgctctttcagttcatcataccgctga

SEQ ID NO: 14308 - DNA, 427 bp, Zea mays
  Clone ID: LIB36-012-Q1-E1-G1
gtagccgtagcgataagagtgagctagctggtgcacaccggcatggcggccacggcgtactccgtggcgctcctcggcggcgcgcgcctccccgccgctccgcgctccgccctcctccctcggcgcagcgtctgccagcttcgcttccaagatgcaccgaggctctccctgctccgtgcgaaggccgcttccgaggacacatcggcctccggcgacgagttgatcgaggacctcaaagcgaagtgggacgccgttgaggacaagcccaccgtcctcttgtacgggggcggcgccgtcgtcgccctatggctgacgtccgtggtcgtgggcgccatcaacgccgtgccgctgctccccaagattctggagctccttgggctcggctacaccggctggttcgtgtacccgaacttccccttaaggaaag

SEQ ID NO: 14309 - DNA, 426 bp, Zea mays
  Clone ID: LIB36-012-Q1-E1-G11
cactctctctattcgttccccgcctcaccccgagccagccgtctcgctagggtttcgccgccgccgccgccgccgccgccgctatgcctcgccgcagctcaggaaggtctgccccacgcccagctacccgtgctgctccagtgaggaacccgccacagccagcacgccaggctcctcctccagctcctgttcgagatggtggtggctccatgtttggaggaattgggtccaccattgctcaaggtatggcgtttggcacgggtagtgccatggcacacagggctgttgatgctgtattaggtccccggaccattcagcatgagactgttgcctcagaagctgctgctgctgcccctgcccctccagtgatgaatgctgacgcttgcagcatccattctaaggctttccaagattgtctcaacaact

SEQ ID NO: 14310 - DNA, 429 bp, Zea mays
  Clone ID: LIB36-012-Q1-E1-G12
cccacgcgtccgggacttgctatgaggttcggggctggcattttcacaagtgacgtgcccgtgatccaagtcattcacagaggcatcccgtttgtcgccggcacgcagaccatcaattccctggccttcgtgtttgatggcatcaactttggagcgtcagactacagatactctgcttactccatggttgctgttgcgtctgtgtcgataccgtgcctgctgtacctttctgcgcataacggattcatcggtatatggatcgcattgacgatctacatgagtctgaggaccatagctagcacctggaggatgggggcagcgaggggaccatggacgtttctccggaactgatgatggattggcttggaactgatgatctgcggcacactgctgacagataaggctgcgccgcgctgcgccggcgcctct

SEQ ID NO: 14311 - DNA, 424 bp, Zea mays
  unsure (1)..(424): unsure at all n locations; Clone ID: LIB36-012-Q1-E1-G2
cccacgcgtccgctcgaccgtcgctcaccgggaagctacgctacgacgaagcatggcgtccgtcaccgcccgcgccccggtcgcagccctgcgcccgtcgtcgtcgtcggccttccttggccactctagccgcctcggccgcactgctaccgcgtcgccgacgaggcggagcctcaaggcggaggccaagggcgagtggctcccgggccttccctcccccgcctacctcgacggcagcctgccgggtgacaatggcttcgacccgttgggcctggcggatgacccggagaacctgacgtggtacgtgcaggcggagctggtgaacgggcggtgggcgatgctgggcgtggccgggatgctgatcccggaggtgctgaccnaagccgggctgatcaacgcgccgcagtggtacgacgccggcaag

SEQ ID NO: 14312 - DNA, 414 bp, Zea mays
  Clone ID: LIB36-012-Q1-E1-G4
cagacgcgtgggcggacgcgtggggcgcacagggcgtgagaacctcaagaaactatttgcagcttggtacgagaggaggcaaatgaggaagatatactcgccgcttctggaaggaatcttggctttctaccttggcttcgaatggatccagaccgacaatatcctggcacctatgatcacccacggcatatactccactgttgttcttggccatgggctctggaagatccacgaccaccggagaaggctacggcagcggattcagaaggtcaggagtgaagggagtagctctgcagacgacacattgtaactgcagcatgtagatcggcgtggtctactgctggatagctagctgctgattgcacgcgcgtactgggtgatcgatcgatctaccgatcagtcagaagaccagag

SEQ ID NO: 14313 - DNA, 429 bp, Zea mays
  Clone ID: LIB36-012-Q1-E1-G6
gggccattggcaatcggcatcaatgctgcctacatgcagacatacatcggaggcgtgtcatgcccatacatctgtggcaggcaccttgaccatggtgttctccttgttggatatggtgcttctggtttcgcccccattcgcctgaaggacaagccttactggatcatcaagaactcgtggggcgagaactggggggagaacggatactacaagatatgcaggggttccaacgttcgcaacaagtgcggcgtcgattccatggtctctaccgtgtccgcagtccacgcctcgaaggagtagactctggtcagcggtgataatcgtgattccatatattgtagaactataatccctgctagtaatccatttgtgctgtttatgtatcgaaggcagcaaagatgtgtgaagcggcaatgggatgcttgctgt

SEQ ID NO: 14314 - DNA, 412 bp, Zea mays
  Clone ID: LIB36-012-Q1-E1-G7
tatggacactcttcataagttgcagcatctgctgcccagtctgctgccagtgctgtccaagttggcacaaaagaaatccaatcaaagatgagggatgggggctatgaccagaaggtgaatgaaactgtcagtgttgttgccaataaaactgcagagattggaagcaggacttgggggatcatgagaggagttatggcgctggcctcacaaaaggtagaggaatatgccaaggaaggaggagtgggtggctggggagaggattggcaacacagcgagcagaaaagtgagccttaccaaaggtttgagcatgagaccaacggcaacagttggaattcctcccaaaattcttcatcgaagaacaattccagttcttgggacgactgggacgacccaggcaagacagatgagcctg

SEQ ID NO: 14315 - DNA, 430 bp, Zea mays
  Clone ID: LIB36-012-Q1-E1-G8
ccttgatccatctagtagtgggtgtcgtatactgcctcatcagctggagtgtcggtctccccaagcgagcgcctatcaatggcacgctcctcaagcttctctttccagtcgccctgtgccatggtattggtcacatcactagcaatgtgtccttcgctgctgttgcagtctcatttgctcacactatcaaagctctggagcccttcttcagcgcagcggctactcagtttatccttggacagcaagttcccttctctctgtggctttctcttgcccctgtggtcattggtgtttcaatggcatcccttactgagctttcattcaactggactggcttcatcaatgccatgatatcaaacatctcattcacttacaggagcatttattccaagaaagctatgactgacatggatagcaacaacgtgtatgc

SEQ ID NO: 14316 - DNA, 425 bp, Zea mays
  unsure (1)..(425): unsure at all n locations; Clone ID: LIB36-012-Q1-E1-H10
caggagtttctatcaacatgcaagattgcaaatctgactattagagcagaactcggatgctgcttgctgcatcgaggcggtagattgaccatccaggagtgtctgctgcagtgcgagcaaaaccctttggaccacctgtccttcccaataatcagcacagcgatagagtacgatccattctcatccctcaaggagcaagggcacggagtaacggtcgtccgcaccaggatcgaaggaggcgcgagggccgtcaggacgaacggcacactcgcgctgcgccatgtgcgggccatctattcccgcagctctgttttcttctggttcgaagtangagagaaagtagaagcgcctgtacactagcaaaaagcccgtgttagttcttgtatttcagtgttggtatcaccctagcgtgcgtttggtgaact

SEQ ID NO: 14317 - DNA, 400 bp, Zea mays
  Clone ID: LIB36-012-Q1-E1-H3
gaggcacaataaatggcgtcaaagccacgggccttcgcgaaggtcttcctccccgcgctcccgccgccgcccctcctcactgcccccgtcttctcgcgccggccgacgaatcggggtgccggcgcggcggcgatgtcggctgcggcggctgcgccagcgcaggctccaaggaagtgggagggactagtggacgaggtgctcgagagggaagtgctgggagcgtgcctggaccaggcccccgagcgccgccgcatccgcgaggctttcaaggacgttcagctcagcatcgaccattgcctcttcaagggacaatatagtggcatcagaacaaaggagtcatgtgagcataactctaagggtgtggagattttctcaaaatgctggtttccggagaatcgtc

SEQ ID NO: 14318 - DNA, 432 bp, Zea mays
  Clone ID: LIB36-012-Q1-E1-H4
ggcgatgcgcgggaagcggctcatgttcgtgggggactcgctgaaccgcaaccagtgggagtcgctggtgtgcctcgtgcagcccatcctgtccaagggcaggaagaagatcgtcaagcggggctccttcaacaccttctacgctaaggagtaccgcgccacgctcgagttctactgggcgcccttcctcgtcgagtccaactctgacaaccccaacttccacagcatcaaggaacggatcatcagtcccgagcggatcgaggcgcacgccaagcactggaaggatgctgactacctcatcttcaacacctacatctggtggatgaacaacgccgacatcaaagtcaggagacccaattcgaggtactggtctgacaacgatgaggttcccaggattgaggcgtatggccgtgtgttcaagacatggtctga

SEQ ID NO: 14319 - DNA, 431 bp, Zea mays
  Clone ID: LIB36-012-Q1-E1-H6
aagacgacttgtttcattgattcttgaagagatcgagcttcttttgcaccacaaggtcgaggatgtcttgcaactgcggatcaagctgcggctgcggctcaagctgcaagtgcggcaagaagtaccctgacctggaggagacgagcaccgccgcgcaggccaccgtcgtcctcggcgtggccccggagaagaaggccgcgcccgagttcgtcgaggccgcggcggagtccggcgaggccgcccacggctgcagctgcggtggcaactgcaagtgcgacccctgcaactgctgatcacatcgatcgacgaccatggatatgattattatctatctagcttgtggtggtggttgaacaataataagcgacgccgagctggctgccatacataggtattgtgtggtgtgtgtgagagagagagaaacacagttc

SEQ ID NO: 14320 - DNA, 404 bp, Zea mays
  Clone ID: LIB36-012-Q1-E1-H7
gaagcatgcatgtcgtcgttgaccacaaaagtgtttggagtgccccagccagggtggtacagggtttattacatcattagtaatattcaagagttagtaaccgctctgagccaagagcatccggtggtgctgatgttctgggcggactggaaccagccaagcaaggccacgtactgggatctggccatcgctaaaaaggatgaggccgtattctgccagctggactttgataagtttaaagatgtcgtagagaagttcagagtgaagggtctgccgacgttcctcctgatcaaggagggccaggagcagcgcagggtcgtccgtgccaaggtcgaggagctcaacatggcattatcagatatcggataatctatggaactatagcgctcacattctaacttcat

SEQ ID NO: 14321 - DNA, 429 bp, Zea mays
  unsure (1)..(429): unsure at all n locations; Clone ID: LIB36-012-Q1-E1-H8
agcacaggcagcacactcagctatccagcaaaagagatcgagaggcaggagtcatggccaccgtcagcgccgccgtggtgaccaccatcgttgcccgcgccgcgatcgccaggcccaatgctctagggctgcctgcgctgagggcgaggagcgagagggtgcggtgcagctacgccaaggacgcggccccagtcagcaccaagggcgcaggcgcgtcgctgctcgccgcagcgggcgcggtgaccgcgtcggcggggcccgcgctggcgctcgtggacgagcgcatgtccacggagggcaccgggctgagcctcgggctcagcaacaacctgctggggtggatcctcctgngggtcttcggcctcatctggtccctctacaccatctacacctctgacctcgacgaggacgaggagtccggtggcctct

SEQ ID NO: 14322 - DNA, 239 bp, Zea mays
  unsure (1)..(239): unsure at all n locations; Clone ID: LIB36-013-Q1-E1-A12
atcaccaccggtgtctctgctcaacctccttgtcggtcgtctctctcgctcaacgtgatcgaggcaccagaaggtcattttttgtgattgccatggagccgacgaggtttctgcgcgaccggcgggaccaacgcggangaagagcagagcgacagccagctcgagcatgagcaggaggtcccctgcgtgcccgacatcttcgtgcaaaatgtgcccgtgtcccgccgctcttctcccgc

SEQ ID NO: 14323 - DNA, 298 bp, Zea mays
  Clone ID: LIB36-013-Q1-E1-A4
cggggaagccggtgccggtgaccgtggtcgggttccgggagggcggcaacgtggtgacgcacgtgaagacggccgccacggacgggtacgacgccgtccaggtcgggtaccacggcgtgcgcgatgacaagctcagccgcccggagctgggccacctgtgcaaggccggcgccccgccgctgcgccacctgcacgagttccggctcaccgccgtcgacaccttcaagcccggccagcccctcgacttcgccgacctcttcaaggagggcgacctcatcgacgtcgccggcaactccat

SEQ ID NO: 14324 - DNA, 448 bp, Zea mays
  Clone ID: LIB36-013-Q1-E1-A6
cacacaccaggccaccaccaccaccaaccagggtccagactccagagacaatccagccatgccgcctccgtccaccgccgcggcagtctcctccattatccgcccgacgccgcctccggccgtatccttccaccccgtacccctcccgcagatcaggcggcgctcatcagctggcgccgcagccgcttcccggctcgccgtggcgcgcgccgccgcctcgggggccccccggcggcggcgacgccgagacggtgttcttcgacggcggcgcgcactacgggcacctggcggggaaactgctcctggggccgaccctgctgtggctgccgctgacgctggcggccgtgtcgcgcgcgttcatcctgcggtaccgcttcacctcgcggcgcgtgacggtggtctcggggctctccggcgccgaccgcaccgaacttccctactcgtccgt

SEQ ID NO: 14325 - DNA, 418 bp, Zea mays
  Clone ID: LIB36-013-Q1-E1-A8
cacgcacgcatacacagcacagagtgaggtaagcatccgaaaaaagctgtgatctgatcgacatggccgccgccaccatggctctcacctcccgcgcgctcgtcggcaagccggcgaccagcaccagggacgtcttcggcgaggggcgcatcaccatgcgcaagactgctggcaagcccaagccagcggcgtctggcagcccctggtacggggccgaccgcgtcctgtacctgcgcccgctgtccggccagcccccaagctacctgaccggcgagttccccggcgactacggctgggacaccgcggggctgtccgccgacccggagactttcgccaagaaccgcgagctggaggtgatccactgccgctggggcatgctgagcgcgctcgggtgcgtgttccggagctgctcgcccgc

SEQ ID NO: 14326 - DNA, 400 bp, Zea mays
  unsure (1)..(400): unsure at all n locations; Clone ID: LIB36-013-Q1-E1-A9
cccacgcgtccgatccaattccggcgccggagaagacgcgcgcaggccccacccagccgcctacaggcgctccgcttccacagacggacagcttgggctcgacggatgagcatgtgtgagaaagatcagaatttgccatggggatacgacctgttccgcgacccttttgctcctcccaacgggtttttcattttccatgtgacaagtcatggggcaggaagcacccatgagcacgagcacgagacagtatatgtagaaccgtctagttcctctccagacacaggtggtgacggttgttttgagatggaggaggaagtanggaagaggttttaccccatggtcccagttccccatgtccccaaaattaatggagaaatcccatcaattgatgaagccacta

SEQ ID NO: 14327 - DNA, 485 bp, Zea mays
  Clone ID: LIB36-013-Q1-E1-B1
cggtctggacaaccgggtcgaccccagccttcggcccacacttcgggcattgcaacgtcggtaggttcagccgcgccgacctgttggaggcgagcgtggagcttcgtcatcacgccctcggctacgtcaagtccacgggcctccggtgcgctgtcaagctcggcgtcgccaatgccatctagcgccgtggcggcatggcctccgtcgaggacctgctcaccgagctctctctggacgcatgcagactccgctgcctgcacagcgtcatgcgcgcgctcgccgcgttgggcgtcttcaaggacgggagcgacggcgagtaccggctcactgccgtttcctctctgctcgtggacgacgacagcagcgtccgacgtagcctccggtcgatcacgctcttgtacctggagcctgcattcatggggccagtgctcaacctggcagattgggcccttgctggtgtcaatggtagccaagacgacaacaac

SEQ ID NO: 14328 - DNA, 437 bp, Zea mays
  unsure (1)..(437): unsure at all n locations; Clone ID: LIB36-013-Q1-E1-B10
cggacgcgtgggcgaggactacaagtacaccgggctcgcgtggctgttcctgngcgtcncgaccagcgacaccctgctgtacaaggaggagctggagaagatgaaggagatggcgccggacaacttccggctggacttcgcggtgagccgagagcagacgaacgcggccggggagaagatgtacatccagacgcgcatggcggagtacaaggangagctgtgggagctgctcangaaagacaacacctacgtctaaatgtgcgggctcaaaggcatggagaagggcatccacgacatcatgctcgacctcgcagccaaagacgggatcaactggttggactacaagaagcagctcaagaagagcgagcaatgggacgtcgaagtctactgatgatgattcttcattgtaatgttcagctcaagcaatctggtggtga

SEQ ID NO: 14329 - DNA, 363 bp, Zea mays
  Clone ID: LIB36-013-Q1-E1-B11
cccacgcgtccgggaggaagaggaagaagaagcggcagcgagcgaggatgccgtgcctgaacgtgtcgaccaacgtgaacctggagggggtggacacctccgccatcctcgccgaagcctccaagtccgtcgccaacatcatcggcaagcccgaggcctacatcatggctgttcacaagggttcggtgcctacggcatttggaggtacccaggagccatcatcttactgtgagctggtgtccatcggaagcctgaaacctgatgtcaccaagacacttagtactggcatcacttctaccctggagtcctcgctgtctgtgcccaagtcacgcttctacctcaagttctatgactccgaacgct

SEQ ID NO: 14330 - DNA, 209 bp, Zea mays
  Clone ID: LIB36-013-Q1-E1-B2
gtggaagggccaggcacttccagctgtcctcgtcggtctgcatcgtctcgtcgacctccttggcagccatcgccttgaacctgctgttgctgctggagctcttgccatggtaagtcacggacgctgagacctgccgcttgttgagcttcttcccgatgaagctgctcctggtctgcgtggaggacggatctccgactgtggatgagaat

SEQ ID NO: 14331 - DNA, 199 bp, Zea mays
  Clone ID: LIB36-013-Q1-E1-B4
gttcaattaccacagactgaaccgcaactagaggatacagccatccattggtattacacagggtcccacccacaagagaggcatggcggccacatcgtccctgaagagcagccttctcctcccgtctaccatctccgacttcagtggcgcagccgcagccgtctccatctcaacggcagagaggacatcacggggggca

SEQ ID NO: 14332 - DNA, 450 bp, Zea mays
  unsure (1)..(450): unsure at all n locations; Clone ID: LIB36-013-Q1-E1-B7
gtgggtcgaaaccttctacgccatggcggagaacaacgtcatgttcgagggcatcctgctgaagccgtccatggtgacgcccggcgcggaggccaaggacagggccaccccggagcaggtggccgcgtacaccctcaagctcctccaccgccggatccccccctccgtgcccgggatcatgttcctctccggcgggcagtcggaggtggaggcgacgcagaacctcaacgccatgaaccaggggcccaacccgtggcacgtgtccttctcctacgcgcgggcgctgcagaacacctgcctcaagacctgcggcggccagccggacaaggtcaaggcngcgcaggacgcgctgctgctgcgcgccaaggccaactccctggcgcagctcggcaagtacacctccgacggcgaggccgccgaggccaagagggaatgtncgtcaagaactac

SEQ ID NO: 14333 - DNA, 205 bp, Zea mays
  Clone ID: LIB36-013-Q1-E1-B8
cggacgcgtgggttaatacaaaggtcactgatggatagatgtattggcaacctcatatcgaaagcccataatcccaacataattgactatgcggcagtaaaatctcatatcagaacttgataacttctattgcacgccattgtaatcgcttaatttaatcacgcttcaaactacataaccagaagcaagtacaaaatcgtcgtcg

SEQ ID NO: 14334 - DNA, 214 bp, Zea mays
  unsure (1)..(214): unsure at all n locations; Clone ID: LIB36-013-Q1-E1-B9
accactctagaatcacgtcgtattacttatcaagtcctcctcgggttanggttccttanggttttgtggacgggcgatggcagcggctgatgtggagtatcgttgcttcgtcggcggacttgcctgggccaccagcaacgagtcgctggagaatgccttcgcctcctacggcgagatcctcgactccaaggtcatcaccgaccgggagaccggg

SEQ ID NO: 14335 - DNA, 420 bp, Zea mays
  unsure (1)..(420): unsure at all n locations; Clone ID: LIB36-013-Q1-E1-C10
ggaaaactcctgcagcacaagctgaacccaaaggttgtgcgcgcactgaaaggtcttangaacaagcttgaagaacaagagcggggaaagaagtgaacaggaaccactggttgacaggaaacagagcaggtgtacagaagtggcgtttgtgcggcggacggacatcaactaacactggaggctggatccactgaaagttcgatgccaacatcatgtaaatggatctggcttccttttgggtgcagtcagttttgtgtaggcaccattagagccctgtgaaaaatagaagcactcacgcatggtagcagcttgttattgttgttagctgctgacgctttgaggcatgtcaacangtagagatggattgcaaatcctaatcaatgcatattactttgtgtgtgtgtgtgtgtgtgtgttgtt

SEQ ID NO: 14336 - DNA, 395 bp, Zea mays
  Clone ID: LIB36-013-Q1-E1-C11
ggaaggaggaaaaaaaaagagctgcagctttaccaattcccatgggttccaagccgggcgaggcgccaacctgggcggaccagtgggcctccggcgagggcgacgggagcagcgcgaacggcaaggcggccggtaagaggacggtggccggcaacgtgaaggcggcggcgtcggagggactcgtcaaggccaaggcggcggcgctggtcggagcgcacaagctcaagaccgggacgagctcgggcatcaagtgggtcagggagcagtaccagaagaagaggacgtccaagtgagctacgctgcgtcaattgtgatggaggagcactgctactctctgttctgatctttcttagtgaagcccattagagcaacaggtttttctcttgggtggagac

SEQ ID NO: 14337 - DNA, 310 bp, Zea mays
  Clone ID: LIB36-013-Q1-E1-C2
cgtcaagtggttgcagaccatcaccacgctgccgatcctcgtcaagggagtgctcaccgctgaagacacgaggcttgcggtggcgaacggcgcggcggggatcatcgtgtcgaaccacggcgcgcggcagctggactacgtgccggcgaccatcagcgcgctggacgaggtcgtgaaggccgcccggggccagctccccgtgttcgtcgacggtggcgtccgccgcggcaccgacgtcttcaaggcgctcgcgctcggcgccgccggcgtattcgtcggaaggccggtgggtgttctccctgccggtggc

SEQ ID NO: 14338 - DNA, 416 bp, Zea mays
  unsure (1)..(416): unsure at all n locations; Clone ID: LIB36-013-Q1-E1-C5
cccacgcgtccgcccacgcgtccggacatactcaagccctcccaaccatatatattcattgatccatcctatacacaagatttagaccactacaaacaacacaagtgccacaaaagagaaagtaagcaagagagagctactcatttgagtttagcactagtgccttgtgagattcattgagagatagtgtgtgctacatatttgtgttcatttgtgcatggagttttgactcccattgaacttcctccgaagttttggaggccttgtaaaagctagcaacaccaaagagtgtggtggtccttgtggggtcttaagtgatccttgagaagaagaagagctcgctgatcttgagtgatcggtggagagagggaaagggttganaaaganccgtccttagtggactcctcaacggggac

SEQ ID NO: 14339 - DNA, 303 bp, Zea mays
  Clone ID: LIB36-013-Q1-E1-C6
gctaggtcagcatatgatagcggctctagagaccacccttcagctgacaactatggtggaatggccagtgcttatggaaactacaggggtggtggatttggtccttataggagcgatacaggatttggtgctaggctcagcagctatggtggggtaggtgattttggtggtgcatatggtcgttactatgcaggattaggagggggatatggagccgcgtcttcgtttggttatcctggtcgctttgggttatatggaggaggttttggtggatcttatgctggtgctgacttaagtggctat

SEQ ID NO: 14340 - DNA, 301 bp, Zea mays
  Clone ID: LIB36-013-Q1-E1-C7
cagcaatggcgcatcccatgcctcccctctcagcatcacagagcacaatcaccaccgttctgaagatccttccaaaacctcctgctgctccggagagcagaagcaataattgtgcttttggggccaaattcgacagtaggagggcacttctatgcggcttggtcgctgctgctgctgctgctggcaccatgctgggcgctgacatcgctggtgctgcttcgaagaggcggcctccaccgccagcgccggcagaggcgaagaaagaccgaacgtcagcggagtgcaggctaaagtgcttgct

SEQ ID NO: 14341 - DNA, 283 bp, Zea mays
  unsure (1)..(283): unsure at all n locations; Clone ID: LIB36-013-Q1-E1-C8
gttcgggctggcgccgtccgcgaaccgcaaggcgacggcggggctgaagctggaggcgcgcgactccggcctgcagacgggtgaccccgccgggttcaccctcgccgacacgctggcctgcggcgccgtcggccacatcctcggcgtctgcatcgtgctcgggctcaagaacaccggcgccctcgaccagatcatcggctagatccctacgtcgccgttgttanaatcagactcagcagcctcgatcgcgccgccggccggcaggtgcaagtggtgactttgt

SEQ ID NO: 14342 - DNA, 379 bp, Zea mays
  Clone ID: LIB36-013-Q1-E1-C9
agccgttcgtgcagcagacgatagccatggccagggccgtgcaccggcagcggtaccgcatgggatgcggctacaagctcacagacgatgggacaataaccgaggagtactgggagccggttgaggactctaacactgacgaggaaaacgaagtaccggcaaggaagccctaccggatcgagctcgttggtgtggtctgtgacgcatatctagcggttgtcaggggaatcaggagagctgtagtcactgggagagcagtgagggtgaagtcgcagctgcagtctcacaagcgatttgctacggctttcaacagctactgcagcctcgtcgacaacgccatgctctacagcagcaacaccttgggtgttcccaagctgat

SEQ ID NO: 14343 - DNA, 374 bp, Zea mays
  Clone ID: LIB36-013-Q1-E1-D11
ctctgatagcttgcaccaggtcgtacgtacgtacgtagatcgatcgatcgatcgctagctagctgacgaccattgcgtccctctcctcagcggccatcaacggccattccttcacgggcgcacccgctcgcgcagtggtcagcaggaggtccttcaccgtgcgtgcctctctccgcaaggcgattgccaacgccgccgtggtcgttgccgccagcgtcctgcatgccggcggctgagccatggctcacgatgtgctgctgggcgcaggcgacggcgggctcgtcttcgatctcagacagttcaccgtgaacgtcggcgacaccatcacctttaagaacaacgccggcttcccgcataaagtcgtgttcgacgaa

SEQ ID NO: 14344 - DNA, 406 bp, Zea mays
  Clone ID: LIB36-013-Q1-E1-D12
gtactctcataacgatcttgaagagaagtccacatctgatgagactgatcaaatggaacaatctctacaacaaattgatcctccacactagcaacaagaacagaactgacacgagcatcctgatgcaaccacaacttgtaagcattgaactaagactcatatgatgccatgagatcatcaaaatcagcgagaaactttgccttgtcttcatcaattgcctttggtatctaagaaggcgagcatggaagcttgctcgtgagaaactcctagaggtgcatgccacacgtggtagcatatgcgaggaacccagacatgatagatggtcccatgaaatagcagtggacaacgaaggacgagagcatcaccgttggaggaaaatggtgacatcttagacaagcagatgatg

SEQ ID NO: 14345 - DNA, 293 bp, Zea mays
  Clone ID: LIB36-013-Q1-E1-D2
cgacaacagcggggccgtggaggcgcccgaccgcctcgtggccgcggtcgcctacctatacccgttcctcgacggcgcgcaccacgggcgcttccttctcacgcagttccccttcttcggcgcgctgctccgcccgctggcccccgcggctcggctcttccactcatcgccgctcacgcccttcctcctcttcctcacgctctacttcgccgttgtgcggaaccagcaggcgttctcccgcttcgtccgcttcaacgcgatgcaggccgtcgtgctcgacgtgctgctcatct

SEQ ID NO: 14346 - DNA, 440 bp, Zea mays
  unsure (1)..(440): unsure at all n locations; Clone ID: LIB36-013-Q1-E1-D3
cccacgcgtccgcccacgcgtccgaaccagggttcgtgcgggtcgtgctggtcgttcagcgcgtctggagcgctggagggtgcgcactacctcgcaactggcaagctggaggtgctttcggagcagcagttcgtcgactgtgaccacgagtgtgattcatcggagcctgattcatgtgattcgggttgcaatggtgggctaatgacgacggcattcagttatctccagaaggccggtggccttgagagtgagaaggattacccttacactgggagtgatggcaaatgcaagtttgacaagtccaagattgttgcttcagttcagaacttcagtgttgtgtctgtggacgacgctcanattttcggctaacctcatcaaaacatgggccatttggcaatcgggatcaattgcgccctacaatggcagacatacatcgggag

SEQ ID NO: 14347 - DNA, 304 bp, Zea mays
  Clone ID: LIB36-013-Q1-E1-D6
gaagagctcccaaaataaagagtgaagatttaagatgaagtggttgttgaagaggagtttactccagtgcctgttcatcaagtggatggagccatctaactgatcatcgtgttagaagtatctagaacctcttctctgcaacaaaggagaagttttattcccttatttttttggttagttacttcatgtggaggccttgaagcttagaatgtttatgtatatatcttatggaaaggcttcacccttccaactattttaataagttatgcactttgggtactatcaggacttgtaataaatacat

SEQ ID NO: 14348 - DNA, 452 bp, Zea mays
  Clone ID: LIB36-013-Q1-E1-D7
ccccggtgagccttgacgccgaggacatccgcaacgagaaggtgaaggtgctgaggtccatgaggcagctgaagctcgaggacgtggtggtgggccagtacaagggccactccaagggcggcaagtcgtacccgggctacgccgacgaccccaccgtgcccaagggcagcgtcacgcccaccttcgccgccgccgcgctcttcatcgacaacgcgcgctgggacggtgtgccgttcctgatgaaggcaggcaaggcgctgcacacacgacgcgcggagatccgggtgcagttccggcgcgtgccgggaaacctgtaccggcggaacatcggcgcggacctggacaaggcgaccaacgagctggtgctccgggtgcagcccgacgaaggcatctacctcaaagtcaacaacaaggtgcccgggctgggcatgcgcctcgaacgcagcaacctc

SEQ ID NO: 14349 - DNA, 323 bp, Zea mays
  Clone ID: LIB36-013-Q1-E1-D8
cccacgcgtccgctaacggatcggagtcggagtccttcttgtgcttcgcctgctcggctggtgccgctgccatgggtttcgccagcacccccaacctgaagctggagcctcgccctcgcacgcggaggctcctgcgctgcgccctcagctctgagcctgtgcagcctcccatgactgtttccatcactggagccacatgtttcattggacgcagattggttcacatgcttctatcggatgatcagaaggtttgcatcttaacacggtctgcctccagagctgcgtcagtttttcctgcttccacctatcctggactcacaata

SEQ ID NO: 14350 - DNA, 442 bp, Zea mays
  unsure (1)..(442): unsure at all n locations; Clone ID: LIB36-013-Q1-E1-D9
cggacgcgtgggggaaagtgtttttctgttattcttggtggagatcaagtcccaaatggaaaaccttcccctgacatatttttggaggctgcaaagaggcttggtgcaaatccatcgtcttgcttggttatagaagattctgtcgttggagtcaagggtgccaaggcttctggggcaaaggcagttgcagtaccatcacttcaaaatcagaggaaccactattacattgctgatgtcatcctatattcgcttttggactttcaacctgagatgtggggtcttcctccatttgaagatcgcattcaaggtgttctgccaattgatcccttactttcaaatgcccggataagtggtaaaattttgaacaacattcattgggtaatttcagatgactgtgcctacgagtatattccntgacaaatatcangaattttttttgggt

SEQ ID NO: 14351 - DNA, 415 bp, Zea mays
  unsure (1)..(415): unsure at all n locations; Clone ID: LIB36-013-Q1-E1-E1
tcgaccacgcgtccggctcgatctccctcgacggcagcctggcgggtgacaatggcttcgacccgttgggcctggcggaggaccccgagaacctgcggtggttcgtgcaggcggagctggtgaacggccggtgggccatgcttggcgtggccgggatgctcatcncggaggtgctgaccaaagccgggctgatcaacgcgccgcagtggtacgacgccggcaagtcggagtacttcgcgtcgtcgtccacgctgttcgtggtcgagttcatcctgttccactacgtggagatccggcggtggcaggacatcaagaaccccggcagcgtcaaccaggaccccatcttcaagagctacagcctgccgccgcacgagtgcggctacccgggcagcgtcttcaaaccgctcaacttcgc

SEQ ID NO: 14352 - DNA, 400 bp, Zea mays
  Clone ID: LIB36-013-Q1-E1-E11
cccacgcgtccgaaaagcagccgcaatggcgagcagcaccatggccctctcctccacggccttcgccggcaaggccgtgaacgtgccgtcgtcgtccgccttcggcgaggcccgcgtgacgatgcgcaagacggcggggaaggccaagccggcggcggcgtccgggagcccgtggtacggccccgaccgcgtgctgtacctgggcccactgtccggcgagccgccgagctacctgacgggcgagttcccgggcgactacggctgggacaccgcggggctgtcggcggacccggagacgttcgccaagaaccgggagctggaggtgatccactcccgctgggccatgctgggcgcgctcggctgcgtcttcccggagctgctcgcccgcaacggcgtcaag

SEQ ID NO: 14353 - DNA, 311 bp, Zea mays
  Clone ID: LIB36-013-Q1-E1-E2
cggacgcgtggggtttgatgaagagacacttgtcaacgtgaacagcatcaagaggaataaaggaggcagccaaagatcaagtggttttagcaacgagtacattgtgataaccatattggttgctgctgagggagtacataagctgccggttataaatagcagcaatgacttaaagacagctctacaaaagatgggtgccataccatcaagcaaaatactggcagtcgaggtcctgtggactccgcaaaatgagaatgacacattgtccgagcgagagctccttgaagattacccgctcttagggcctctgt

SEQ ID NO: 14354 - DNA, 203 bp, Zea mays
  Clone ID: LIB36-013-Q1-E1-E4
cccacgcgtccgtgcttccaagacgaagcgcgtctgcaccgaaggtcgagcagacggagccatgatgccaccccgacgaacgacgtccctgaaccacccaccaagcacagaaagatgcctcccaggacaatgaatctggtaccagttgtaatgcccctggccgccgaggagagttcctcgcagacgtgagccgcatacatgag

SEQ ID NO: 14355 - DNA, 434 bp, Zea mays
  Clone ID: LIB36-013-Q1-E1-E5
gttgaggttgttaaggaacaagataaagagtttaataaactggcaactgatgccatgattccttctatgcctggacatgtggttcaagcttttacgttgctgaaatcaagcacggaggctcagagtgttgtcgcctcccttgcatcagatagaaatgtctgggatgcagtattgaagaacgagaaggttatggagttttataagactcaccagacaagtacctcatgagactttagacagttaaacttatcgtattcatcgtctctaccaacttgtttgaccattgttgatgtcctctgctatgacacagctctagttcagacatcccctaacgaagccgtcacagtagagttgccggggaagctggaagatgctgcctctgaaaacacatccagcggcgaactccccgctggctcaggcctgagtttctccga

SEQ ID NO: 14356 - DNA, 430 bp, Zea mays
  Clone ID: LIB36-013-Q1-E1-E7
cccacgcgtccgcccacgcgtccgcggacgcgtgggccctccctccggtctgcgctcccacagcctcacccctgcgcccccgccgattcgcgtcgccctttgttggaaggaacgatggagcagaccttcatcatgatcaagcccgacggcgtccagcggggcctgatcggggacatcatcagtcgcttcgagaagaaagggttctacctcaaggggatgaagttcatgaacgtggagaggtccttcgcgcagcagcactacgctgacctttccgacaagcctttcttcaccgggttggtggagtacatcatttccggccccgtggtggcgatggtgtgggaggggaaggacgtcgtgttgactggccgcaggatcattggggccaccaagccttgggaggcagcccccgggtacattcgtggggactacg

SEQ ID NO: 14357 - DNA, 211 bp, Zea mays
  Clone ID: LIB36-013-Q1-E1-E8
cgaacctttgctgtatacggttccgatttcgtcgaatgtaatgtatgatgctacttttgagcttcaatgtaaaatctatgccgtccggccccaaaacaaagaaagaaaagaaaagaaagaaacaaaacttcatcatgatcaagcccaaaaagagtcaaacagcgcctgaataagagacatcatcaatcgcttcaaaaaagggggggctcca

SEQ ID NO: 14358 - DNA, 389 bp, Zea mays
  Clone ID: LIB36-013-Q1-E1-E9
gacagcatggccgcctccgcctctagcgtctccggcctcgacggtgcctcgctgcccaggcgcccggcgttctagacgagcttcatgcggggcaaccgggtgtcggcgaagacacctctgatgaacaagaacctggataagaatggcacgatcaactgcatgacgtttcacctggactggctgtcgacggaactgagcgtcatcggattcgggctcatccgctggatggggccgtcgatcgtctcggccatcaacggtaacagcctcacggggctcttcttctacagcatccgtcatcagctggatcagttacccactcgcccgcttgtcaactcccagttctggctgtggctagtgacgtgtgacctgagcctgttcatcgtgctcac

SEQ ID NO: 14359 - DNA, 203 bp, Zea mays
  Clone ID: LIB36-013-Q1-E1-F1
ctcactatacactgctctgctgcagcaagaaggaagaagctagcgcctccctagctctcgttgtcagcaatggccaccaccgccgcgtccagcctcctcaagtcctccttcgcgggctccgggtcccttcgccagccacacaccgtctcgtggcgtgatcgccccgcggcatgctcattcctccaccctaatgatctcgtaca

SEQ ID NO: 14360 - DNA, 410 bp, Zea mays
  unsure (1)..(410): unsure at all n locations; Clone ID: LIB36-013-Q1-E1-F10
aaaagatctgtcgcgaaacgcatgggcttgaaggagctgaaaatgggatacaacattgacatccatgattacagcgtgaggcttaaagctgcanaaaaagtttcttaaagctggcgacaaggttaagataattgtgaacctgaaaggacgggaaaacttgtataaaaaagaagctatcgaactccttagaagattccaaaatgatgttggcgagctggcgacagaagaaagtaagaatttcgcggagaggaatatatatctggttcttgttccaataagatagctatacagaaagaacaagatgaattgaacaaaaagggtgctgtgagagaagagaaagaccaatcagacagtgatgaaccagaagagaacgaacaaccagacagcgatgtacccctgacagaactgct

SEQ ID NO: 14361 - DNA, 389 bp, Zea mays
  unsure (1)..(389): unsure at all n locations; Clone ID: LIB36-013-Q1-E1-F12
cccacgcgtccgcccacgcgtccgccaccaacaggtcgaggcctggaagccgatcgtcgacgccgtccacgccagcggtgccgtcttcttcgcccagctctggcacaccggccgggcctccccctcagaattccaaccaaatgggcaggcaccgatctctagcacggacaagcaaatcccagcacaggtgaaccattccggtgacgtcaacacgttcgcggtgcctcggagactagagacagaggagataccacacgtcgtcaatgacttccgggttgccgccagaaacgccatcaaagcaggctttgatggagtggagattcacgcggcaaacgggtacctgttcgatcagttcatgaanggacagcacaatgaccgagacgactcct

SEQ ID NO: 14362 - DNA, 410 bp, Zea mays
  unsure (1)..(410): unsure at all n locations; Clone ID: LIB36-013-Q1-E1-F3
gtgtaggttcgccgcatcggatgtgagagaagactactcttccactccgatagatattgtcgctgatgttaagacggagaagattgtggtgttaggaggaagtggattcgttggttctgcgatttgcagagctgctgtatccaaaggcattgaggttgtgagcttcagcaggtcaggaagaccatcttactctgatccctgngttgatcaagtcaattggctgccaggagatgttttctatgcaagatgggatgaagtattggttggggctactgctgttgtgtctaaccttgggagggtttggcaatgaagaacanatgaaaaggattaattgtgaggcaaatgtcatagcagtaaatgctgcaaaagaaaatggagtcccanaattcattttaatctccgttcatgac

SEQ ID NO: 14363 - DNA, 173 bp, Zea mays
  Clone ID: LIB36-013-Q1-E1-F4
acgtgtcgctccagaacctcaagagctaccccttcgtcaaggaagggctggccggcgggacgctcaagctggttggcgcccactacgacttcgtcaaagggcagttcgtcacatgggagcctccccaggacgccatcgagcgcttgacgagcgggttccagcagttcaaggtc

SEQ ID NO: 14364 - DNA, 322 bp, Zea mays
  Clone ID: LIB36-013-Q1-E1-F5
cggacgcgtgggcgtcagcgcagatgagtccaattttgccgttgaggttgcttgttcctgctagctacccgaaatgctccccggtgcttctagacaagtttcctgatgaacaatgcaggaactcagacgacctgtctaccaaggccaagacaaagttcagcgtattgctccggggtctagctgagcccatgtcactgcgagaaatcgcaaggacatgggatgcttgcgctcgcaaagtgatcacagagtatgcccagcaaaccggaggacgcagtttcagctcgagctatggttgctgggaaagctgcgtacgcgcctgtta

SEQ ID NO: 14365 - DNA, 322 bp, Zea mays
  Clone ID: LIB36-013-Q1-E1-F6
cggacgcgtgggactagggctaaggcaattctaccggcccgccgactcctgcattatcataaatatatatactatactatactatactactacgtacctaccgatatgcacccgagcaatgtgaatgcgtcgagtactatctgttttctgcatctacatatatatatatataccggatcaatcgcccaatgtgaatgtaataagcaatataatttccacaacttttcattcctacgcctgaacttttaagttccaacaaacctaatatgtggattattattaggacggccttgtgattaaaaaaaaaaaaaaaagggggggc

SEQ ID NO: 14366 - DNA, 427 bp, Zea mays
  unsure (1)..(427): unsure at all n locations; Clone ID: LIB36-013-Q1-E1-F7
cgagaagaacctggacgtcgtgttcctcaagctggactgcaaccaggacaacaagcctctcgcgaaggagctgggcataaaggttgtgccgacgttcaagatcctcaagggcgggaaggtcgtgaaggaggtcaccggcgccaagatcgacgagctagcggaagccatcgagatagccaacaagaagtcaggctgacaaaggaatagcaagatcgacgtgcagtgcaagcaaggatgaatggatgatcgatgaactagctagtgaagactgcgaatgaatgcgccccggccgcgcatttgtgggaccggcaacatgcatgcagaanacaagctattctagttcttctgcttaggccgtccgcaattgctatctcaaatagctagctgatgtggagctgagagaagaatacaaatagtaagttatctc

SEQ ID NO: 14367 - DNA, 438 bp, Zea mays
  Clone ID: LIB36-013-Q1-E1-F9
ggtggatacgccggcgatcgtcgggatctgagggctactccggaccggctgatcgaggtgaaggtcacggcggacaacagcagctgcatccgctccatctccttcatctacatcggagccgatggcaaaccgtacgaggaggggccatggggtttcggccatgctggcacggagtacaagattgatctgtgcaggttcgacgagagcttgacggagatctccgggaccacgggcccagcctacaacattgacaatctggtcaagtctctcaaattcgtcaccaacaaacgcgcttacggaccgtacggcagggacgagggcaccccgttccgtgtcaaggtgatgaacaacggccacgtcgctggcttctttggccgctctggagattgcctggacgcgatcgggctctacgtgaaccccaattaataactaaaacga

SEQ ID NO: 14368 - DNA, 451 bp, Zea mays
  unsure (1)..(451): unsure at all n locations; Clone ID: LIB36-013-Q1-E1-G1
ccacgcgtccggaccagaaggccatcatgtccaacgaggagttcgacaacctcaaggaggagctcatgtgggaggggagcagcgtcgtcatgctaaacgaagatgagcaaaagcttttggaagcttccttggcctatacctccggcaacccaatcatgtctgatgctgagttcgacgaactgaaacttagattaaagacagacggcagtgtcattgtgaagganggtcccaggtgcagcctaaggactcataaggtgtacagtgacttgaatgttgactacctaaagatgttcctcctaaatgttccagccaccaccgtagctctgggactgttctttttcattgatgaattgactggttttgagatcaatgtgttccagctgccagagcctttcggattcattttcacatggtttgctgctttgcccctaatattgttcttagcgcagtc

SEQ ID NO: 14369 - DNA, 352 bp, Zea mays
  unsure (1)..(352): unsure at all n locations; Clone ID: LIB36-013-Q1-E1-G10
cccacgcgtccgcgagagtagacgatcagaaccaccatatatgtcctcaccagcaagttgtgccaagaaatggaatagttgtaaaacgagtagatacaacgaaaattagtgatgtggtgtctgcaattggaccctccactagactggtttggctcgaaagtcccacgaaccctcgtcagcaaattactgacattaagacaatctcagagatagcgcattctcatggtgctcttgttttggttgacaacagcatcatgtctccagtgctctcncgtcctatagaactgggagctgatatcgtgatgcactcggctaccaaatttatagcgggacatagtgatcttatggctgg

SEQ ID NO: 14370 - DNA, 405 bp, Zea mays
  unsure (1)..(405): unsure at all n locations; Clone ID: LIB36-013-Q1-E1-G11
cggacgcgtgggtaaagttcgagcctgagctgccccagtggaagagctccgccatcgccgacctcggcgtgggcaccgagaacaagatcgccatgcacttcgacagggtcttttggcccaacgtcgaggtgctgggaatggtcgggccgacgcccaaagcctgtgggtacttcctgaacctgcacaaagccaccggcaatccggtcctcgtgtacatggccgccggaaggttcgcccaggaggtggagaagctgtcggacaaggaagccgtcggcctggtcgtttctcacctgaagaagatgctcccggatgccactgaaccgacgcagtacctggtgtcgcgatggggctccgaccccaactccctgnggtcctactcgtgcgacctggtcgcgaagccggcga

SEQ ID NO: 14371 - DNA, 442 bp, Zea mays
  unsure (1)..(442): unsure at all n locations; Clone ID: LIB36-013-Q1-E1-G12
cccacgcgtccgatcactctatgctagtgggcgtactactggtattgttcttgactctggtgatggtgtgagccacactgtgcccatttacgaaggatatgcccttcctcatgccattcttcgtttggatcttgctggtcgggacctcacagactccctcatgaaaatcctgactgagaggggttactccttcacaacctctgccgagcgagaaattgtaagggacatcaaggagaagctggcatatatagcccttgactatgagcaagagttggaaactgccaagaacagctcctcagttganaagagctatgagctacctgatggccaagtaatcaccattggtgcagagagattcagatgccctgaggtcctcttcccagcatccatgattggtatggaggctgccggaatccatgagacaacatacaattcaatcatg

SEQ ID NO: 14372 - DNA, 449 bp, Zea mays
  unsure (1)..(449): unsure at all n locations; Clone ID: LIB36-013-Q1-E1-G5
aggacggcgacgtcgccctcttctttggcctctcaggtaccgggaagacgacgctgtcgacggatcacaacaggcttctgatcggcgacgacgagcactgctggagcgacaatggcgtgtccaacatcgagggaggctgctacgccaagtgcatcgacctggcgcaggagaaagagcctgatatttggaacgccatcaagtttggaactgtgctggagaacgtggtctttgatgagcatactcgtgaagtcgactacgccgacaactctgtcaccgagaacactccggctgcctatccgatcgagtacatccccaacgccaagatactatgcgtcggcncgcaccccaagaacgtgatcctcctggcgtgcgacgccttcggcgtgcctccgcgggtgagcaagctgaacctggcggcagacatgttacacttcatcagcggctacacc

SEQ ID NO: 14373 - DNA, 68 bp, Zea mays
  Clone ID: LIB36-013-Q1-E1-G6
acgtcatgttcctcaagctggactgcaaccaggacaacaagcctctcgcgaaggagctgggcataaag

SEQ ID NO: 14374 - DNA, 429 bp, Zea mays
  Clone ID: LIB36-013-Q1-E1-G9
atcacccacccctcccggcctcccctgacctctctcgatcactcgtcatctccaccacacacacacacgcgcgagcgaatccaaggaagaagaagaggaggaggatccatggagaagtgcaggtcggtgccgcacgagcactcgtcggcgtactacggctgcggaggcgggtacgactacgaggacgtcggcggcgggcccgggcaggccggcaagtcgtacagcttcaacgggccgagcggccgggacgacccggaggcgaagcggccgcgccgcgtggcggcgtacaacgtgttcgccacgcagggccggatcaagaccaccgtccgcagcagcgtcaagtggctcaagtccaagttctccgacgtccgctacggtggcctctgaactgatctgatgagcgtgagcctactgcatgcaacgcatcct

SEQ ID NO: 14375 - DNA, 404 bp, Zea mays
  Clone ID: LIB36-013-Q1-E1-H10
ctcctcgccatcacataaaaccagtgcaagcagaagcagcgcaatggcgagcagcaccatggccctctcctccacagccttcgccggcaaggcagtgaacgtgccgtcgtctctcttcggcgaggcccgcgtgacgatgcgcaagacggcggcgaaggcaaagccggcggcgagctccggcagcccgtggtacggccccgaccgcgtgctctacctgggcccgctgtccggcgcgcccccgagctacctgacgggcgagttcccgggcgactacggctgggataccgcggggctgtcggcggacccggagacgttcgccaagaaccgggagctggaggtcatccactcccgctgggccatgctgggcgcgttgggctgcctgttcccgggagctgctcgcccgc

SEQ ID NO: 14376 - DNA, 344 bp, Zea mays
  unsure (1)..(344): unsure at all n locations; Clone ID: LIB36-013-Q1-E1-H11
cccacgcgtccgcacagagcctagtatagaggagcttgcggccaaagaacgtgcggagccaggctactgcggtcgagtgagggacttcgttgtgggtcgacatgactacggcagcatcaaatttttcggggagacggacgtgaggtgcctcgatctggagtcaattgtggagtttaacgaccgggaggttattgtgtacaaggacgatagcaagaagccccctgtgggcgaggggctgaacaaggctgcagaggtgactctactgaacatcaagtgcgtaaacaagaagaccggggagccgtgccagggggcaagagtggagaggtacanggagatgctggtga

SEQ ID NO: 14377 - DNA, 244 bp, Zea mays
  Clone ID: LIB36-013-Q1-E1-H2
gtcgagcacgcgtccgcccacgcatccggcaagctcgatctactactactactagctggtacacatactagccagcctgccagccagcttgccatggcgcccaccgtgatgatggcctcgtcggcaaccgccgtcgccccgttccagggtctcaagtccgccgccagcctccccgtcgcccgccgcagcaccaggagcctcggcaacgtcagcaacggcggaaggatccggtgcatgcaagtgt

SEQ ID NO: 14378 - DNA, 289 bp, Zea mays
  Clone ID: LIB36-013-Q1-E1-H4
aacccacccgtcggcccacgcgtcggcacacacacgcacacacactatcgtccagcaagctcgctgttgcttgccacccaccgcctcagctcgatcgcaacgcgctcggcatggcgtccgaggtgtggctatcgccggcgtctcgcctcccatccctctccaacgcaccacctcgcttacgctccaagcctgccaccacaaccgcctctttgctctctccctgtccccgccctgcccgcgccctgcctgtgctgcgtgtccgtcgccgccgccgacttcgcgccaccga

SEQ ID NO: 14379 - DNA, 407 bp, Zea mays
  Clone ID: LIB36-013-Q1-E1-H5
catcggcatgatcagcgccgtgcccgggatgaaggcgctcgacatgaacgccgccgaggacgagatcgtgcgcctcacgcgcgaggtcgtgcccggcatgatcgtcaccgggatggaggtcgccgagatcgacggcgccccgaggatgggcccgacgttcggcgccatgatgatctccggccagaaggcggcgcacctggcgctgaaggcactgggcaggcccaacgccgtggacgggaccatccccgaggtgtcgccggcgctgcgcgaggagttcgtgattgcgtccaaggacgacgaggtcgtggacgcctgagcgagcatccacgcgccagcatgcaagcagcgtcttatctggggcggcgccatcacggggtttcttcttttaatctgggactttgttggtg

SEQ ID NO: 14380 - DNA, 221 bp, Zea mays
  unsure (1)..(221): unsure at all n locations; Clone ID: LIB36-013-Q1-E1-H6
cggacgcgtgggcggtggaggcgtggctcaacacgcacggtcccaacgaccgcacgctcgcgcaggggctcaagggtgaccccacgtacctgntggtggagcaggacaagacgctggccacctacgggatcaacgccttttgcactcaactcggttccttcttcccttggaacggccctaaaaccagttcaaccggcccctgcaacggttccaattacacc

SEQ ID NO: 14381 - DNA, 424 bp, Zea mays
  Clone ID: LIB36-013-Q1-E1-H7
gtcatcacactcctcgccatcacataaaaccagtgcaagcagaagcagcgcaatggcgagcagcatcatggccctctcctccacaggcttcgccggcaaggcagtgaacgtgccgtcgtctctcttcggcgaggcccgcgtgacgatgcgcaagacggcggcgaacgcaaagccggcggcgagctccggcagcccgtggtacggccccgaccgcgtgctctacctgggcccgctgtccggcgcgcccccgagctacctgacgggcgagttcccgggccactactgctgggataccgcggggctgtcggcggacccggagacgttcgccaagaaccgggagctggaggtcatccactcgcgctgggccatgctgggcgcgttgggctgcgtgttcccggagctgctcgcccgcaacggcgtcaag

SEQ ID NO: 14382 - DNA, 435 bp, Zea mays
  Clone ID: LIB36-013-Q1-E1-H9
cccacgcgtccgcaggccagtttggcaaatgatagatgaaagagtatgaacatagagggaactgatgctggagaaaccgacaaggtcctttcttccaaaacggataagcagaaggattccgtggaaagtgtaacaaagcagatgagtggcattgctatttctgagtcacatgcaatgccgtcgacagatactataaacaattcgcaaccagaatcatctgctccagacatagacaagaagattcgagcactgaaaaagaagatacgcttagctgaagcacaagtacaaggcgaccctgaaaaattgaaatctgaaacgctggaaaagattaaaaagattgatggatggtgtatggaactgaagcttttggaggacagcatagctcctgcggcctagacaaaatcgacttcggctctgatgtagtagaatagacag

SEQ ID NO: 14383 - DNA, 431 bp, Zea mays
  Clone ID: LIB36-014-Q1-E1-A10
cggacgcgtgggcgccggcggcccgctcggagaggtcgtcgacccgctctaccccggcggcagcttcgacccgctcggcctcgccgacgaccctgaggccttcgcggagctcaaggtgaaggagctcaagaacggccgcctcgccatgttctccatgttcgggttcttcgtccaggccatcgtcaccggcaagggcccgctcgagaacctcgccgaccacctcgccgaccccgtcaacaacaacgcatgggcctatgccaccaactttgtgcccggcaagtgagggggtggaggcgccaccgcccaccggccaccgctgcggatatctaggtgttcggatgcacgtgagcgcgcactggttccagtttgtaccatgatgtaaattacttaccgtaccagggttcaatcggcaaggaagaattgttgtgttc

SEQ ID NO: 14384 - DNA, 437 bp, Zea mays
  unsure (1)..(437): unsure at all n locations; Clone ID: LIB36-014-Q1-E1-A11
cccacgcgtccgccggtgtgggaagtgacagcacgtgtgtgttctgccaccatctgctcgatgaaatcatgtccaaactgaaagatccagatgcggagtttgagataattcagattcttgtcaaggagtgcaataagatcgaaggtcacgtccagcagtgcaagaggctggttctgcaatacattcccctcatcttggtgaacggtgagaagttcctcgagaagaacgatgtctgcgcgctcgcacaggcttgtccagcgagcagtaggaagacgttcagctcgatgttgaagggagcgttgtggagtgacgcctggcttgaaggttgaagaagaacacacggagcggtttagcagtggtcaganatagtgtgaacaagtgctgtgctgtacatataataatgtcgtgtataaacgcatgaaggacgtgtgccctgc

SEQ ID NO: 14385 - DNA, 153 bp, Zea mays
  Clone ID: LIB36-014-Q1-E1-A12
ggtaaatcttctgtccacaccagtgttcacctctcctcttcccaagtttgcctagtccctaggtggtgaccatcgtcagcagttagtccacctcgccgtgaccagaactcccagcacgaggactgaagattcaagctgaagtggtgactgaag

SEQ ID NO: 14386 - DNA, 407 bp, Zea mays
  Clone ID: LIB36-014-Q1-E1-A4
cccacgcgtccgtggaaagacagttcattccataaaaggacatcgggactactcatttgcatcggcttggagccctgatgggcgaacatttgctaccggcaaccaagacaagacatgccgaatctgggacgtgaggaacctttcaaaatccgtccatgtgttgaggggtaaccttggagccatccggtccatccgcttcacctcggatggccagttcatgtccatggctgaacctgctgactttgtgcacatctacgacgtgaagagtgactacaacaaaaggcaagagctggacttctttggcgagataaccggcacatcgttcagcccagacactgacacgcttttcgttggtgtgtgggataggatgtatgggagcctgctacaatttggcgcctgtacaacta

SEQ ID NO: 14387 - DNA, 435 bp, Zea mays
  Clone ID: LIB36-014-Q1-E1-A5
caacaatcatcatgctcgcaacgggtaccggcatcgctccgttccgctccttcttgtggaagatgttcttcgaggagcacgacgactacaagtacaccgggctcgcgtggctgttcctgggcgtcccgaccagcgacaccctgctgtacaaggaggagctggagaagatgaaggagatggcgccggacaacttccggctggacttcgcggtgagccgagagcagacgaacgcggccggggagaagatgtacatccagacgcgcatggcggagtacaaggaggagctgtgggagctgctcaagaaggacaacacctacgtctacatgtgcgggctcaagggcatggagaagggcatcgacgacatcatgctcgacctcgcagccaaggacgggatcaactggttggactacaagaagcagctcaagaagagcgagc

SEQ ID NO: 14388 - DNA, 389 bp, Zea mays
  Clone ID: LIB36-014-Q1-E1-A8
ctctccagaaactgctttctcctcaacttcatctctctcgctttcccccaaaaaaaaagaccctttcagggatttgggggacacagcacccagatatccaactcacactcatttcacacaactcttccccaaatcttcgattagattctcgttgacaagaagactataaccgaacctgaccatgtcgctgatccgccgcagcaacgtgttcgatcccttctccctcgacctctgggacacctttgagggcgtctccttcggctccggcagcagcagcagtctcttctcctcgttctcgcggaccagctcggagaccgcggccttcgctggcgcgcggatcgactggaaggagactccacaggcgcacgttgtcaatgcagacgtaccgg

SEQ ID NO: 14389 - DNA, 353 bp, Zea mays
  Clone ID: LIB36-014-Q1-E1-B1
cgctatctcgtggcttcctggcggcgactgggcgagcgccgccgccctcttcgtcgggcccgcccttcaccggcgacgtgcatccctccggagaagaatattgcgctcacataactgaataactgatattaggatgagtctctgtacaatagcacgacggctatgtctttcaaaaccatcctctggcagtcgtctttcagcaatttgggctcatctatacagcactgaggctgcaaaggacatgggtgctaagaagtacaagtaccccgatgtatacgacccctacgggcctatgccgccgccttcggagaaagtcgtggaactagctgatcgcatcgctgctcttcctcccg

SEQ ID NO: 14390 - DNA, 436 bp, Zea mays
  Clone ID: LIB36-014-Q1-E1-B11
cccacgcgtccggaggccgagaagcgctttagccgtagccgtagcgataagagtgagctagctggtgcacaccggcatggcggccacggcgtactccgtggcgctcctcggcggcgcgcgccttcccgccgctccgcgctccgccctcctccctcggcgcagcgtctgccagcttcgcttccaagatgcaccgaggctctccctgctccgtgcgaaggccgcttccgaggacacatcggcctccggcgacgagttgatcgaggacctcaaagcgaagtgggacgccgttgaggacaagcccaccgtcctcttgtacggcggcggcgccgtcgtcgccctttggctgacgtccgtggtcgtgggcgccatcaacgccgtgccgctgctccccaagatcctggagctcgttgggctcggctacaccggctggttcgtg

SEQ ID NO: 14391 - DNA, 434 bp, Zea mays
  unsure (1)..(434): unsure at all n locations; Clone ID: LIB36-014-Q1-E1-B12
cccacgcgtccgcccacgcgtccgcccacgcgtccggtccggcgtcttgctccctgctgtgctcgccctggtcccgacgcgcgctcacctctgttcctgtcgggtccggccatggagttcgcagcgacgcccactgttctgcctacttgtgctcgccccagcacttgtgcttgccctcggctcgcattggcgctcgcgtgcctgctcatcgtcaccgctgcgcgttcgctcttcgtctatcgggtttcgtgcgtgctcgcatttgccatcgagccgtttgaaccgtttttccctgctcgacctcgtcgaacccgaatcccggacgttgggcanatgtaagcgaggtccgtgtgcatcgcttatcaagtgctcggtcaaagacttcaatcaaagttcgtcgttgtnccgtgcgtcatcaagaaatcccaagagtc

SEQ ID NO: 14392 - DNA, 436 bp, Zea mays
  Clone ID: LIB36-014-Q1-E1-B5
ccgacgcgtgggtcagtatcaccgtcagggatggagagacgtattggcgaccgcatatcgaaggcacagaagcacagcacgattgactaagcggcagtaaaatctcatatcacaacttgctcgcttcgagtgcacgctatttcaatcgcttaatttaagcacgcttcatactacatgaccagacgcacgtataaaatcgtcgtcgaactaagcttgccaactcagcaccgccacacaggatatacagagagatcgaggcctgtcacattcatttttcgactcgatgcacctgcatgcgccggttggctaccgacttcgtgccgccgaggaactcgttcgggacgaccttgatctgcttgcccgtcttggacttggcgatcatctggatcgtccgtgggttggtgagcctccgcaatttggtgcacgtgccggacac

SEQ ID NO: 14393 - DNA, 438 bp, Zea mays
  unsure (1)..(438): unsure at all n locations; Clone ID: LIB36-014-Q1-E1-B9
cccacgcgtccgcccgttgcgtctctcgcgcgttaccaagctctcaagttttctcgcgccgacggcaatggatgaggtcaccgaggccgtgaacaacctcaacatctcgggcgtaggggccgcgggcgttgccggggcggaagggcacaagaagaatcgcatccaggtctccaacactaagaagcccctcttcttctatgtcaacctcgccaagaggtacatgcagctgcacaacgaagtagagctgtcggccctcggcatggccattgcgacggtggtgacagtagcagaaattctgaaaaataacgggcttgctgtcgcgaagagtatcatgacatctactgttgatatcaaggacgagactangacccggcctatccagaaagccaagattgaaatattgcttggcaagacggagaagtttgatgagctgatggc

SEQ ID NO: 14394 - DNA, 443 bp, Zea mays
  unsure (1)..(443): unsure at all n locations; Clone ID: LIB36-014-Q1-E1-C1
cggacgcgtggggaacaggggaagcagacagataactcaagctgtttagtgcagacaggcagctcaagcaggagtcggaattggatgatgaatcggattaaggagggagagatcaaaggaggggaagagatanggaggcgggggccggggagggagatgagagggtggtcaggaggattacctggtggtggtggtggccggtggcaattcgtgagggttggcggcgcgcaaccgctgacggtggcagcggcgcgtctagggttgctgtgctcgtgtgcgggagcgggagtcaccaagtatagcgaaggccatacaggtcaaggagtcgcagaaccatgcagcaccaaggacgatggatgcactctttgcacggatgaaagcgcaacgcatgaagaacggcacacagcagcaggcaaatcctgcctctggacgtgatttcaaac

SEQ ID NO: 14395 - DNA, 370 bp, Zea mays
  unsure (1)..(370): unsure at all n locations; Clone ID: LIB36-014-Q1-E1-C10
gcggaacatccggctgagctcaaggacttcctgaacctctctggagaagcttcatggagaggcggtttccatggagagagcagcggcgtcgctttcagattcagagagaaggtggagtttcagttcttgtctgaacagctcgggatcgccatcaccgaccacgacgagagccctcgactagatgatcaggaggacatatacgacaggccgccgcaaacctcttcttgtccggtactgtcttgccccaaccaagaagagggtctccaganggcagggtctcctgttaaagctcagctgagttcatatcgagctgcatgtaataacaagccaagactgaggtggaatctggagctccatgagcttttcgtga

SEQ ID NO: 14396 - DNA, 463 bp, Zea mays
  Clone ID: LIB36-014-Q1-E1-C2
gagaattcttaattcatgagttgtagggagggacttatgtcaccacaaacagaaactaaagcaagtgttggatttaaagctggtgttaaggattataaattgacttactacaccccggagtacgaaaccaaggatactgatatcttggcagcattccgagtaactcctcagctcggggttccgcctgaagaagcaggagctgcagtagctgcggaatcttctactggtacatggacaactgtttggactgatggacttaccagtcttgatcgttacaaaggacgatgctatcacatcgagcccgttcctggggacccagatcaatatatctgttatgtagcttatccattagacctatttgaagagggttcttttactaacatgtgtacttccattgtgggtaacgtatttggtttcaaagccttacgcgctctacgtttggaggatctacgaattccccctg

SEQ ID NO: 14397 - DNA, 295 bp, Zea mays
  Clone ID: LIB36-014-Q1-E1-C5
gttcaggctggcgccgtccgcgaaccgcaaggcgacggcggggctgaagctggaggcgcgcgactccggcctgcagacgggtgaccccgccgggttcaccctcgccgacacgctggcctgcggcgccgtcggccacatcctcggcgtctgcatcgtgctcgggctcaagaacaccggcgccctcgaccagatcatcggctagatccctacgtggccgttgtgaagatcagactcagcatcctcgatcgcgccgccggtcgggacgtccaggtggtgactttgtaacgtgtgtgcg

SEQ ID NO: 14398 - DNA, 404 bp, Zea mays
  Clone ID: LIB36-014-Q1-E1-C6
cccaagcgtccgcataattcgtgacaaggttgatgttcttgtaaaagtggagaagatagccaatgccatgaggtggaagacaagattggctgatcatgagggtggccctcatgtacctgagaagatactcttcgcggtcaagcaatactggactgctgaaaaaacaagcagctaacgttgttcattttcatttttttctccagtcacagctaacttgccccctggctgtgtttattggaaaaatttctgtcgattatacagcccatgtatgttactgacaatataaaacagcccccttgagggggagtaaattatgtgggatttagctgtgaacttgggatttgattattccactggtgccgagacgcacaagacatgccaaaacgattaattggcactgtact

SEQ ID NO: 14399 - DNA, 455 bp, Zea mays
  Clone ID: LIB36-014-Q1-E1-C8
cccacgcgtccgcactgatccaaattctactggaccccctcctgatatgcaacttctgctcccatttgtggaatcggctttgccagtggcttacggtgtcttggctatccaattatttcatgaaattggacactttttggcagcatttccaaaaaatgtgaaactaggcattcctttctttattccgaacttcacccttggaacttttggtgcaattactcagttcaagtccattcttccggatcgaaagacaatgtttgacatatcaatggctggtcctgtggctggagctgcactttccttttcaatgttctttgtaggcttattactctcttcaaatcctgttggggcaagtgatttagtagaagtacctagccagctgttcccaggttcattgttgcttggactcattagtagagcaacacttggatacagagctatgcatgctgctacag

SEQ ID NO: 14400 - DNA, 459 bp, Zea mays
  Clone ID: LIB36-014-Q1-E1-D1
cccacgcgtccgcccacgcgtccgcccacgcgtccgcccgtgtcgtgtagtgtgtagtcgcagcagctagcgcccggccggccagtcgagtgagtccatcctccatcgccatccaatgggcgccaccgccctgagcatgagcatcctccgcgcgccgccgccctgcttctcgtctccactcaggctcaaggtcgcggttgccaagccgctggcggcccccatgcggcgccagctgctgcgcgcgcaggccacctacaacgtgaagctgatcacgccggacggggaggtggagctgcaggtgcccgacgacgtctacatcctggacttcgccgaggaggaaagcatcgacctgcccttcccctgccgtgcggggtcctgctcctcctgcgccggcaaggtcgtctctggctccgtcgaccagtccgaccagagcttcctcaacgacaacaggtcgccgac

SEQ ID NO: 14401 - DNA, 413 bp, Zea mays
  Clone ID: LIB36-014-Q1-E1-D10
ccgaattcattccacccccgtctcctccgatcggacggaccaccgggccagcagcggggcggatcgcgtcagcagccatggtgaaggcctaccccacggtgaacgaggactacctcaaggcggtcgacaaggccaagcgtaagctccgcggcctcatcgccgagaagaattgcgccccgctcatgctccgcctcgcatggcactccgcgggcaccttcgatgtggccaccaaaaccgggggccccttcggcaccatgaagaaccccgccgagcaggcgcacggagccaacgccggactggaaattgccatcaggctgctagagcccatcaaggagcagttccccatcctatcctacgctgacttctaccagcttgctggagtcgtggcagtcgaggtaaccggcggacctgat

SEQ ID NO: 14402 - DNA, 431 bp, Zea mays
  unsure (1)..(431): unsure at all n locations; Clone ID: LIB36-014-Q1-E1-D11
agggattatagtagctgggtttggtttgtggctggctggctggctggataccacaccggtaatagcggccgagagagcaaccacgtccacggccatttaactgtcatctctcctcctgatttccttctctcctttcctttttgctccgatccgatccgatcaatgaccaagtcgaagggtggttcggtggacgcgcgcacgctggtggcgcacgtcctggcagcgggcgccgtcgtgctggtgctcttgtggtgcatccacttccgcggcggcctcgccctccgctcccaggacaagccgctcatcttcaacgtccaccccgtgctcatggtcctcggccccatcgtcctcggcggagaagccatcctcagctaccgctctctcncgctcgcncgcgacgccaggaagaaggtgcacctggcgctgcacgc

SEQ ID NO: 14403 - DNA, 135 bp, Zea mays
  Clone ID: LIB36-014-Q1-E1-D5
cccaagcgtgcgctaacggatctgagtctgagtccgtcatgtgcatcgcctgcacggctggtgcggctgccatgggtttccccaccacgccgaacctgaatctggagcactcacctcgcggacggaggctcctgc

SEQ ID NO: 14404 - DNA, 457 bp, Zea mays
  Clone ID: LIB36-014-Q1-E1-E1
gcgagggcgggctggactacctcggcaaccccagcctgatccacgcgcagagcatcctcgccatctgggcctgccaggtcgtgctcatgggtgccgtcgagggctaccgcattgccggcgggccgctcggcgaggtcgtcgacccgctgtaccctggcggcagcttcgaccccctcggcctggccgacgaccccgaggccttcgccgagctcaaggtgaatgagctcaagaacggccgcctcgccatgttttccatgttcggcttcttcgtccaggccatcgtcaccggcaagggcccgctcgacaacctcgctgaccacatcgctgacgcagtcaacaacagcgcatggggctacgccaacaacttcgtccctggcaactaagctcaaacggtatgctatgcaacttcactgtctttccgatcggagaaggtgtacgtacgtggattgattgatgc

SEQ ID NO: 14405 - DNA, 437 bp, Zea mays
  Clone ID: LIB36-014-Q1-E1-E11
agaccccatccatcgattggaacccagatccgcaggccgcagcacaagagggtgggatcggatcggatcggagcagagcaaaggggacaaccgaccagaatccgccggcgaccaccatgggctccgcgagccgtgccgtctcgtgcctgtgctgcccctgcaagtgcctggcgtgcgggctcctgagctgcctgtgcagcatcctcgtctcgctcgccgtcgtcctgggcgtcgtcgccctcatcctctacttcatcttcaagccgcacatgatcgcggccaccgtggactcggcctcgctctcgcagttcgcgctgtcggcgtcctccacgctctcctacgacctcaacgtcaccatgacggtgcgcaaccccaacacgcgcgtggggctctactacgacgacgtccaggcgctggccctgttcagcgaccagcgc

SEQ ID NO: 14406 - DNA, 444 bp, Zea mays
  Clone ID: LIB36-014-Q1-E1-E4
ccgactccaccgccgtcacgccatctcgccgggggcggaaccccgaccgcgagtatggggaacatcttcgtgaagaagcccaagatcactgacgtcgatagggccatcctcaccctcaagacgcagcgccgcaagctcgcccagtttcaacagcagcttgagaaggtaatcgaagcagaaaaggaagctgcacggcagttggttcaacagaagaagagagacagagctttgattgctctgaagaagaagaaagctcaggaagagctgttgaaacaagttgacacatggcaaatgaatgttgaacaacagctggcagatattgaactagcaagtaaacaaaaggctgtatttgaaagcctgaaggctggaaatgctgccctgaagtctatacagaatgagataaacattgatgatgtccaaaagctgatggatgacacagccgag

SEQ ID NO: 14407 - DNA, 150 bp, Zea mays
  Clone ID: LIB36-014-Q1-E1-E7
cacaacagcgccactgtccagtgcgcgcgtcaagcttgcttagctagccgccatggcctcactcaccgccgtctcagtgaagcccgtggccatcaaaaggtctcgccggcagctccatctccggaaggaagctcgccgtcgccaggccgt

SEQ ID NO: 14408 - DNA, 299 bp, Zea mays
  Clone ID: LIB36-014-Q1-E1-E8
cccaagcgtccgctcacgcgtccgaccaaagccatcggaggagcagctggacgaccatggcctcgccgctgctcacgtcacactctcagctcgccgccgccgccgccctgcactccgtgaggagagccgaccgctgccctgcgacactacacctgggcaagttccatgaccaggggctcaagtctggccgttctaagagatccggttcagcgatggtgggcgccttgccgttgctggacgctgtgccgctgatggtgatgattctggaatcaccttgacatggtcgcggggactacgtc

SEQ ID NO: 14409 - DNA, 399 bp, Zea mays
  Clone ID: LIB36-014-Q1-E1-F10
gagacaccagtcaccatcccatcatcagcgacactgtactgtatagcaatcgggagatacacgatactccaacgcgtaaaaaagcgtaaaagatacgtcaaaacagatgtgatttttgcatccatgcatatgcgaaacaggagtttgaatcctatcacctaacggatttaaatgatgaagtttcagttctacgagaggaactgagttgtacgataaggataacttagctgttgtcggactgtgtacattgttggcatcatcatgcacaatattgtacatctagaagccatattgtagttacggtacgtatacagtatcactttgatcatgtaatacagtatacagttgtttacggcaaaaacaagaacgacaaacaagacagcgatgtaaccctgacag

SEQ ID NO: 14410 - DNA, 392 bp, Zea mays
  Clone ID: LIB36-014-Q1-E1-F11
cggatgacgagaaggaaatggtcatgcgaactgtctattgtacaaacatagataagatggttactcagttagatgtaaagaaattctttgaagaactttgcggtgaggtctctcggttgaggcttctaggggataatgtacattccacaaggattgcttttgttgaatttgtccatgctgagggtgccatcatggctctgaattgcagcgggatgattttgggaacactgcctgtcagggtgagcccttccaagactccggtgaagccccgtgtaaatcgagtgggatctaactgactctgcgcaagctgaactggattgttcacgggaaggcgtcgccataagctcgaaggttccgcggtccggtgcatcatgatgcgtctgctcacattc

SEQ ID NO: 14411 - DNA, 183 bp, Zea mays
  Clone ID: LIB36-014-Q1-E1-F12
cacgcgtcaggtaagcagttactgccgcggtcagagcacggcaggaaggagcgagcattcgtgcgggagagctggtggcacatggatcgccgggactcctccgacgcgccggggccagccgtgatctgcactggcagcgtccgacgcgctggcgcggctgtgcccgccgtcgtcgactcgatc

SEQ ID NO: 14412 - DNA, 186 bp, Zea mays
  Clone ID: LIB36-014-Q1-E1-F2
ctgaaatctggactgggccgtgtggctgacgggctgcttcgtgcgcgcatgtgggacgcgaggagctctggcggtgacccctgacgatgacgtgttctacctggtggcgttcctgcggtcggcgctgccgggcgcgccggttagcctggtcgcgctggcgctgcagaggcaccgggtgctcgactt

SEQ ID NO: 14413 - DNA, 480 bp, Zea mays
  Clone ID: LIB36-014-Q1-E1-F4
tcggtattcaggtcgaccacgcgtccgcggaagcgtgggcccacgcccagctacccgtgctgctccagtgaggaacccgccacagccagcacgccaggctcctcctccagctcctgttcgagatggtggtggctccatgtttggaggaattgggtccaccattgctcaaggtatggcgtttggcacgggtagtgccatggcacacagggctgttgatgctgtattacgtccccggaccattcagcatgagactgttgcctcagaagctgctgctgctgcccctgcccctccagtgatgaatgctgacgcttgcagcatccattctaaggctttccaagattgtctcaacaactatggcagcgagatcagcaagtgccaattctacctagacatgctgaacgagtgccgccctggtggtgtgtctgcctaacctgcctctgggggttattcgtggattttctttcggtgatgctatctcat

SEQ ID NO: 14414 - DNA, 301 bp, Zea mays
  Clone ID: LIB36-014-Q1-E1-F6
aggcaattcgacacggaggcgctgcccaacgacctcatcaagcgcgggctggccgtgcgcggggaggacggggagctggagctcaccatcaaggactacccctacgcccacgacgggctcctgttctgggactccatcaggcagtgggcgtccgagtacgtcaacgtctactacaagtccgacgaggccgtggccgccgaccccgagctgagggcgttctgggaccatgtgcgcatcgtgcggcacggcgacaggacggccgagccgtggtggcccgtgctggacacccgcgacagcctgg

SEQ ID NO: 14415 - DNA, 438 bp, Zea mays
  Clone ID: LIB36-014-Q1-E1-F9
cggacgcgtgggcttacaacaccaggcaccatgactttgagagttcagtagtcgcacgaggagacctttggaggttggagtcatcgcgtggcaatttaacttcagggaatgatagctcaccacttttccttgttcaacttgggcctttactgtttgttcgagactccacgcttcttttgccggttcatctgtcaaagcaacaccttctttggtatggttatgatcgcaagaacggaatgcactccctatgcccagctatctggtcaaagcatagaaaatggatgctgatgtcaatgatgtgcctcaaccctgtagcttgttccttcatggatgtgcaatttccaaatggacaaatgacatatgttgctggtgaggggataacagcaagtggttttatccctttatttggtggattactccaagcacatgcaaagtgtc

SEQ ID NO: 14416 - DNA, 339 bp, Zea mays
  Clone ID: LIB36-014-Q1-E1-G10
acgcgtcagcgaacgcgtgggcggaagagtggggaaatggtggcgtatcgtcaaatggaatcaccttcgagaaaattcctcgctgcaccacgactagcgacgacgacgattagtgcagtggtgtcggccagtgcaccctcgactagactggcttggctcgaaagtcccaggaatcctcctcaggaccttactgagattaagacaatctcacacatagcgcattctcatggtgctcgtgttttggttgacaacagcatcatgtctccagtgctctcccgtcctatataactgggaagctgatatcgtgagtgcactcggctaccacatttatagccggga

SEQ ID NO: 14417 - DNA, 428 bp, Zea mays
  Clone ID: LIB36-014-Q1-E1-G12
ggtactagtactaccatatcatgtgacgtgcatgcggctgtgatgcacaccaacccagccatggccaaggcagctcctcctctcctcgccgccggcagccgcactgccatcacagcgcagcagccatcgtcgaggaaaggcgccgctggcgcaggtttgttctgtagtcgcgtcatcgtcagcaagcgcgccagggtaacagcgaagctcggagacggagagctgaagcctgcaggcaagcggaagttcatcaccaaggaagaggagccagaacagtactggcagaccgcgggggagagggagggcgagaaccccatgatgacacccctgccctacatcatcatcttcggcatgttcaccccttcgtcatcctcgccatcgccttcgccaatggctggatcaggtccctgtgcggatgacgttacgcg

SEQ ID NO: 14418 - DNA, 119 bp, Zea mays
  Clone ID: LIB36-014-Q1-E1-G2
cccaagcgtccgtcctagtatatagtagtgagtgactagttggtatgtgtagtactgtactatcttttctccatatgcatgttttgccagcgcgtaatgaatgtaatgtcagtactgct

SEQ ID NO: 14419 - DNA, 71 bp, Zea mays
  Clone ID: LIB36-014-Q1-E1-G5
agcaagcgtccgcacacatgcatagacagcatatactcacgtaggcatcctagaacgtctgtgatctgatc

SEQ ID NO: 14420 - DNA, 109 bp, Zea mays
  Clone ID: LIB36-014-Q1-E1-G8
atttatatgatatataacaatggtagcaaagtatgaacaactggctagtaacatatacatgtatataggtattgaaatatttgtttaaatataattattgtttatttct

SEQ ID NO: 14421 - DNA, 261 bp, Zea mays
  Clone ID: LIB36-014-Q1-E1-G9
acgcgtcagccaaggctcccttctctgagcagaacacacgatgactccgcggctcgagcagacacacacacgcccagagccagtccatagaagacaaggagcaggacgctccagggtcaactgcaagtcggtgccgcacgagcactcctcggattacgacggctgccgacgccggtacgactactacgacctccgcggcgggcccgcggcatgccggcagctcctagagcttcaaccggcccagccgcccgggacgacccg

SEQ ID NO: 14422 - DNA, 391 bp, Zea mays
  Clone ID: LIB36-014-Q1-E1-H11
cccacgcgtccggccggctccgcggggctgtcctgcgcgtacgagctctccaaggaccccgccgtgagcatcgccatcgtggagcagtcggtgtcgccgggcggcggcgcgtggctgggcgggcagctgttctcggccatggtggtgcgcaagccggcgcacctgttcctggacgagctgggcgtggcgtacgacgaggccgaggactacgtggtcatcaagcacgccgcgctcttcacgtccacggtcatgagcctgctcctggcgcgccccaacgtgaagctgttcaacgccgtggccgtggaggacctcatcgtcaggggagggcgcgtccggggcgtcgtcaccaactgggcgctcctgtccatgaaccacgacacgcagtcctgca

SEQ ID NO: 14423 - DNA, 235 bp, Zea mays
  Clone ID: LIB36-014-Q1-E1-H12
ctccgcgctagctgaggacggtacagcggcacagaggtgcgacgtacgacgacgacgacgcaggcgccacacatggcatcccagctctccgccgccgtgccccggttccacggcctccggggctacgccgcgcccaggtccgcggtggcagcgctgccgtccgtgagggtgggcaggaagaggtcgtcgtcgcagggcatccgctgcgactacatcgggtccgccaccaacctga

SEQ ID NO: 14424 - DNA, 453 bp, Zea mays
  Clone ID: LIB36-014-Q1-E1-H2
cccacgcgtccgcaagacagggattgccatgtcggactcggaggagcaccacttcgaatcgaaggccgacgctggggcgtccaagacctacccgcagcaggctggcaccgtccgtaagaacggcttcatcgtcatcaagaaccgtccctgcaaggttgtggaggtttctacctccaagactggtaagcatggccacgccaaatgccactttgtcgccatagacatattcaatgggaaaaagcttgaagatattgttccttcatcacacaactgtgacattccgcatgtgaaccgtactgagtatcagctgattgatatttctgaggatggatttgtgagccttcttacttcagatggcaacactaaggatgatcttagactcccaactgatgagactcttgtggcccagattaaggaagggttcgaaagcgggaaggatcttgttgtgactgt

SEQ ID NO: 14425 - DNA, 465 bp, Zea mays
  unsure (1)..(465): unsure at all n locations; Clone ID: LIB36-014-Q1-E1-H3
caccgatccatttcagccgccgccgcgcgtatcaagcacgagcagcaaggatgccggctggccacgggctgcgctcgcggacgcgcgacctgttcgcgcgccccttccgcaagaagggctacatcccgctcaccacctacctccgcacctacaagatcggcgactacgtcgacgtcaaggtgaacggcgccgtccacaaggggatgccgcacaagttctaccacggccgcaccggtcgcgtctggaacgtcaccaagcgcgccatcggcgtcgagataaacaagcaggtgaatggtcgcatcatcaggaagcgtatccatgtccgcgtggagcatgtgcagccgtcccgctgtacagaagagttccgcctgaggaaggtgaagaatgatcagctgaaggcggatgcaaaggagcgcggcgaggtcatcangcacaagaggcacccgttgggtcgcaagcctggct

SEQ ID NO: 14426 - DNA, 448 bp, Zea mays
  Clone ID: LIB36-014-Q1-E1-H4
gttttctcaggcgggacagcatttaacggtgttgttgaagaattgaagaaagtcactactcgagtcgcgcacgtgctccctgtttctgatgatggtggaagcacagctgagattgtgcgtgtgcttggcgggcctgctgtgggagacataagatcaagatgtttgaggttgtctgatgaaagtactgcagaagctctttctgttcgaaaattgcttgggcatcgtttgcctattgatccttcggaggcaaagctggaatggtaccagattgtagaaggagaccacactttatgggagggagtctctcgtccatacagggaaacaattcgtgcctttttggtctactttcacagtgagatacttcgacggtcagctgaaatgttttgcttcaccaatggcagcattggaaaattcctttttgctggggcacgcatattcttccagtcgt

SEQ ID NO: 14427 - DNA, 103 bp, Zea mays
  Clone ID: LIB36-014-Q1-E1-H5
cacaaaccactccacagatgcacttcaacgtcacacggccttctgcactatcaccacaccacgcgtccgcaccactggcttaccaccaggacgtggatcattg

SEQ ID NO: 14428 - DNA, 440 bp, Zea mays
  Clone ID: LIB36-014-Q1-E1-H6
cggacgcgtgggtgactactgtgttgccatcctgtcatttgaaacgcacctcaagctccgtgttctctcactgtcaggctgctctagggttactcagaagaacgtgctgttcttggtcaaccttggacagtcaatagacggcctcaatcttcagttctgtgacatcattggcatccacaccattgcatcgctggtcagatagctctggtggtgtgatatccttgcatacgcagacaagatggtccattgctggaacggctcatgtctagtctactgggagccacctccagatgcagatatacgatcgtcgcagtagcacatccaggtgatcttcaggtttttggctcacatgcgatgcgacttatgatggtgggcttccgcattgttcatcgaccacttgttttacggggtgctttctactcaagtggcccgttttcaca

SEQ ID NO: 14429 - DNA, 386 bp, Zea mays
  Clone ID: LIB36-015-Q1-E1-A10
agctgaaatagagcaggaggcaccaggaaatgcttctacaggaaagaagcgcagaaggaaggcttgaagctaacactgatggaacttcttttgtaaatggatgtgcaccttgtattatgagtgttaactcgaaatttcgtctgtttggtctctgatagttaggtgtggaagcaacatttgctatagctgtaatgctaggattaacatgtgttcattgtggtcagatgcatggtgcattggtgttgagctttgagcggaatcaacccaatgctcgctgtgaggcccatggcatcgtgttgtctggtggtgttgtagcttattgatgttctatttattagaagcaatttaagcagtggattttgtaccacaaaaacaacaatttggat

SEQ ID NO: 14430 - DNA, 402 bp, Zea mays
  Clone ID: LIB36-015-Q1-E1-A2
gcgtccgacattatgtcgaagcctgagcagatccgggctaagattgtcgaagggcgtgtaaagaagaggcttggagaattcgcgttgttcgaacagccattcatcaagaacgacaaggtcacaataagtgagtggctgaagcaaactatagctacaactggagagaatatgaaggtcaggagatttgcccggtacaacctaagtgaagggctggagaagaaaagccaggattttgctgctgaagttgcagcccagacagcagcgaagccgccaccagctcctcccaaggatgacaagcctgctgaaacaacagaatccgcggagaagaagccggctgttgcactttcagcctcgttggtgaagcaactccgagacgaaaccggggctggcatgatggactgc

SEQ ID NO: 14431 - DNA, 177 bp, Zea mays
  Clone ID: LIB36-015-Q1-E1-A6
aactctctattatgagtcgtattacatcatatttcaccgcatcacgacatgcacgccgcacgcgcagaatcaaagatacagctactgaggctcggcgtcgatcacctgccgctctctctcactcaatgtagtcgactgcacaggcgatagcggcgactgatgacgctatgctcaccg

SEQ ID NO: 14432 - DNA, 438 bp, Zea mays
  Clone ID: LIB36-015-Q1-E1-A8
cccacgcgtccgcttcgtggggcaggcgtggagcggcatcccgtggttcgaggccggcgcggacccgagcgccatcgcgcccttctcctttgggtcgctgctgggcacgtagctgctgctgatggggtgggtggagtcgaagcggtgggtggacttcttcaacccggactcccaggccgtggagtgggccacgccgtggtcgcgcaccgctgagaacttcgccaacttcaccggcgagcagggctacccgggcggcaagttcttcgacccgctcggcctcgccggcaccgtcaaggacggcgtctacatccccgacgtcgacaagctcgagcggctcaagctggccgagatcaagcacgcccgcatcgtcatgcttgccatgctcgccttctacttcgaggccgggcaaggcaagacgccgctcggcgcgctcggcct

SEQ ID NO: 14433 - DNA, 361 bp, Zea mays
  Clone ID: LIB36-015-Q1-E1-B1
tcgacgcccgcatccgtcgacaaatgggttatccgccggcctcttcattccgtcgctgctgcttgctcacactccactcacgactcgccgacgcaccagctcccatgagttgtccattgcctccagcaccctctcatctgtctttagcctcctctctagacactcacatctctgcgatctgggatggtctactccctaggtctaccatcctcgttgctcaacacaccactgatgactccacggtttacaagttacatccatctggcaccaatcagccaacgttttagtcctcagcgatatcattgcctttctcaattttgactatgcattgctgcgttcttaactacttctacgaccggtt

SEQ ID NO: 14434 - DNA, 415 bp, Zea mays
  Clone ID: LIB36-015-Q1-E1-B11
gctactcaagttgctgcccttgattacataatcgcagttgaaagtgatgtgtttattccatcacactctggcaatatggcaaaagctgtagaaggccatcgtcgatttctagggcatcgtaaaactatcactcctgacaggaaaggattggtggaactctttgatttactggaaaaaggggatctcacggaaggtcctaagctgtcggcacttgttactgacatgcacaagtacagacaaggggctccaaggaagaggtatggctccttgccaggaagcaagggcagagcacggcttaagagtgaggaatctttttacgaaaacccgtttcctgagtgcatctgtttgactgggaggtcctgatgtatagctttgcatgatgatgacacggtgcacccatcattggaagtgtgct

SEQ ID NO: 14435 - DNA, 421 bp, Zea mays
  Clone ID: LIB36-015-Q1-E1-B12
gagatgcccaccggcggcgccgccatcatgcgggatgggcccaacctcctgaagctggcgcgcaacgagcagtgcctcgcgctcggcaccaggctgcgctccaagtacaagatcacctaccagttctaccgcgtcttccccaacggcgaggtgcagtacctccaccccaaggacggcgtctacccggagaaggtcaaccccggcagggagggcgtcggccagaacttccgcagcatcggcaagaacgtcaaccccatcgacgtcaagttcaccggcaagagcaccttcgactaatcacacatcacgccgcccgcccggccggtgatccaaatcaaaggacttcttcttctagttcttatattaataattaagctagctgctggatgcatggtttgatctaaatatatgtgggcatggatgt

SEQ ID NO: 14436 - DNA, 429 bp, Zea mays
  Clone ID: LIB36-015-Q1-E1-B3
ccaacgagtccgcccacgcgtccgactctatgcaattgaatgcatctcgcatcaaagttcttcaagctcaggatgatctagttaacacaatgaaagacgatgccatgaaggaacttctccttgtcagccacaaccaccatgaatacaagaaccttttgaaagacctaatcattcagggtttgctccgtttgaaagagccagcagtattgctccgttgccgcaaggatgatcaccatcatgtggaatcagtgctgcattcagcaaagcatgagtatgcatcaaaagcagatgtccatgaaccatagatatttgttgatcatgatgtatacctgccacctgccccaagccatcatgatgctcatggccaattttgctctggacgtactgtattggcttctccacattggaacattgtgtttgacaatacac

SEQ ID NO: 14437 - DNA, 385 bp, Zea mays
  Clone ID: LIB36-015-Q1-E1-B9
aaaacaactgcttggagcctccgcacaacaaaaaaccccacgggtagtctcggatctccacgccaccaaaacattcgaagcttcttcgatgtcttgcgcggcgttctggaatctgaatcttcaatcttggagagcggcgcgtccccgaagaattagatcagccatggccaagcaaaagatcgtgatcaaggtgccgatggcgagcgacaagtcccggtccaaggcaatggcgctggtggcggccgtgtgcggggtcatctccgtggccatcgccggcgacgacaaggaccaggtggtcgtcgttggcgagggcgtcgacttcatcgagctcatcaccatcctgcgcaagaagatgggcggcgcgcacttcgtcgaggcaatgact

SEQ ID NO: 14438 - DNA, 203 bp, Zea mays
  Clone ID: LIB36-015-Q1-E1-C1
tccccaaaccctagctcccgatctccatggccaaccctcgccgtcttcgtcgagatgaccgtccgcggcgccccggcgggccggatcgtgatggagctgtcgccaacgacgtgcccacgaccgcggagaacttccgcgcgctgtgcatcggcgagaagggcctgggcacgtcccggaagccgcgcctgcgacaaggggtccag

SEQ ID NO: 14439 - DNA, 437 bp, Zea mays
  Clone ID: LIB36-015-Q1-E1-C10
ctcatcatcagcaaggtgtatcggctatttggatgggagtaccggagacctgaaagagtcccacctgcatgtccatacaagcctgcagctcagaagaacgatgagggtgcgagtgaatcaaaacccctggccgaaccgcacggtgctggtgctgcggcggcagaagataagaaagtggaatgatgcagcaggcgcttaaaatggtggccacggctctgtgtggttagctaagaaacaataattgttgtggatggttatgtacttggttgatgggttgaacttgttatgacactccggatccttaccagttgcattactaatcactgctgctggtctggtctgtctgaatagaagggagttgaacttgcagtcgcaaatgtaatagcgagagtgaatcttgttgtccaaggctttcgtatagaatataatgcttgaat

SEQ ID NO: 14440 - DNA, 449 bp, Zea mays
  Clone ID: LIB36-015-Q1-E1-C11
cccacgcgtccgctgggcatgacattgttaaaaatcacatcatggtgtccttgcgtaacggtttagatgctaatgtggctgatatagtgattagagagtatgtgagctttattatggttcatcttcagtcttcttgcaccagctgtaactttgaaagaggagagatagtgtcagaactacggaagagtcctatattccttacaaaccatggatacaagagcccagctgatgaaccaattcacttcagtaaagattatggaaattccgtggatgctactagactcttcagaatgtagaaataagttggattgaacttgatagtacctatttgcagcatcatggttcacagtcgtcatcatttgcactggaaaaatggaggcaattttttgaagaaatgggtgtgactgattttgtgcaggtagtgaaagttgaaaaaactttatcccaag

SEQ ID NO: 14441 - DNA, 217 bp, Zea mays
  Clone ID: LIB36-015-Q1-E1-C12
ccaggtgacttgtactactggttctcaactatgcattgggcggtggtaatactaatacatgctcctacatattcagttactatctcctcatctgagtctgacgaatctggtacaacgtcaacagtttgctcacttactatctcaatgagttttagtcgcactgccagcgcctcgccaatcaggctcagactagtcgcggatggatatggcaaatggg

SEQ ID NO: 14442 - DNA, 270 bp, Zea mays
  Clone ID: LIB36-015-Q1-E1-C5
cccacgcgtccgcccacgcgtccgcggacgcgtgggcggacgcgtgggcgagtcataagaaggtactgctgcaatcgacgtcacttgagaatgctgatgctccaatggaccacgcgagacattcaaaagcacaggggtccattgatccacagactcgtgggagtgatagtccagtgccctctaagagcacttaagcttttgcaatgttcgtgaaagcttgcaggtccatgcagtaaaggattgcttccactgtgttgaacaccttattac

SEQ ID NO: 14443 - DNA, 390 bp, Zea mays
  unsure (1)..(390): unsure at all n locations; Clone ID: LIB36-015-Q1-E1-C6
gtggccccgcagctggaccccagcacgccgtccccgatcttcggcggcagcacgggcgggctgctccgcaaggcgcaggtggaggagttctacgtcatcacgtggacgtcccccaaggagcaggtgttcgagatgcccaccggcggcgccgccatcatgcgggagggccccaacctcttgaagctggcgcgcaaggagcagtgcctggcgctcggcaccaggttgcgctccaagtacaagatcacctaccagttctaccgcgtcttccccaacggcgaggtgcagtacctccaccccaaggacggcgtctacccggagaaggtcaaccccggcaagggagggcgtcnngccagaacttccggcagcatccggcaagaacgtcaaccccat

SEQ ID NO: 14444 - DNA, 457 bp, Zea mays
  Clone ID: LIB36-015-Q1-E1-C8
ctcgcgggtcgccgcacgcgtctacaacgagtacctacacagcgagcgagagcagcacacactgcacgcagctagctaggagcagcagcagcggcggcgatggcggcctccatgatctcctcgtcagctctggcggtggcgcctcagggcctgccgcccctcggccgccgcgcctcctccttcgccgtcgtctgctccaagaagaacatcaagaccgacaggccctacgggattgggggtggcctgaccgtcgacgtcgacgccaacgggagaaatggcaagggcaatggcgtgtaccagttcgtcgacaattacggcgcgaacgtcgacggatacagcccaatctacaactacgatgactggtctcccaccggcgacgtctatctcggtgggaacactggggctctgaattgggccgtcaccctcggcgggaattctcgccggggcgtccctcctc

SEQ ID NO: 14445 - DNA, 452 bp, Zea mays
  Clone ID: LIB36-015-Q1-E1-C9
acggtcggactcagggtggcccacgcgtccggacagtgacgcaggaagctataagctagccaagacaggaataataatggcggcgtcgacggtggcgagcctctctgtcccggtgacgacgacgaccttcgcggcggcgggcggcggcgacgtgctgatcgtcgtcccgaggagggcgggcgccaagcgcgtcgtctggttccccgcggcggcgcgccgcggcggcgggcggttggtcgccgtgcggtccagcgggccggccacgccgccggagatctccgacaaggtgtcggagagcatcaagcaggcggaggagacgtgcgcggacgaccagaagggcgacgccgagtgcgcggcggcgtgggacgaggtggaggagctcagcgccacggccaaccacgcccgcgacagcctcaaggagaccaacgccaaacgaccgctcgaaaagtact

SEQ ID NO: 14446 - DNA, 401 bp, Zea mays
  Clone ID: LIB36-015-Q1-E1-D10
atgagcccaccgtccaggagttcgcatcgagcagctcgacgccgttatcctgggcagtctggtacgcggaccacgacgtgatatagatgaggtacgcatcgacctgctcgatgcgcccaccgtccaggagttcgcggcggcgtggggcggcgatgccaacgaggtgaagaccgtcacgtaccccatcttcctcaggattggcactgtcaggtcagagtgagctgcacgggcaaatgaaacttgacaaactatggatacactacggacgcgccgacgattgatgatcgatcatctatgaatcgatgcgtagaacctttttgaagaatgttctaatcgactgcagatgtttgttcctcacaactgtacttcaaattccaatgcatgcactattctgttcgaaa

SEQ ID NO: 14447 - DNA, 408 bp, Zea mays
  Clone ID: LIB36-015-Q1-E1-D12
ggaaaattttgatccggttcagatcgctcaggcatatgagaaaaacggagcagcatgccttagtgttcttacagatgaaaagtactttcagggaagtttttacaacttggaggctatacgcaatgctggagtccagtgccctcttctgtgcaaagagttcattattgatgcttggcaactttactatgcacggtccaagggtgcagatgctgttcttctaatagctgctgtattacctgaccgcgatatcaaatacatgttgaaaatttgcaaaatacttgggatggctgctttagttgaggttcatgacgatagagaaatggaccgtgttttaaggattgatggtgtacagctcatcggcatcaataaccgtaatctcgagacatttgaagttgatattacaaacac

SEQ ID NO: 14448 - DNA, 347 bp, Zea mays
  Clone ID: LIB36-015-Q1-E1-D2
ggtcgacacaagcgtctacagtgattctcacaagtgggtgggggaaatgctgcgtctcgggatgctcaggcattcgcgtaaacgatgcggagaagctcgtgacgatcggaggccatgtgctgcgcgaaggtgagtggctgtcgctgaatgggtcgactggtgaggtgatccttgggaagcagccgctttccccaccagcccttagtggtgatctgggaactttcatggcctgagtggatgatgttagaaagctcacggtcctggcaaacgccgatacccctgatgatgcaatgactgcgcgaaacaatcgggcacaatgaattggagtacgcccgacagagcacatg

SEQ ID NO: 14449 - DNA, 417 bp, Zea mays
  Clone ID: LIB36-015-Q1-E1-E12
tgaaaaaagaagagcaaacctgggaaatctgtctatgcaaaagccacagatactggcatcgatcctgagacagctgctaaaagacttaaccttgactgggactctgctgctgatatagatggcgaagaggaggacgatgatgaaactgaagtgccgtctgcagtgggatatggtgccttgtatttgttgacagcttttccggttattattgggatctcagtcgtcctaattcttttctacaattctctgcagtagctcctccccttcttgagtgagaatgtgagatgttgctgcattcttgtaaatctgagttacaaggctagttaatcagtaacattttttacgccagtgttgcaaagatatgacaacttgtatagatgtcaaaatccaaattttggaattgtagatacttttttt

SEQ ID NO: 14450 - DNA, 433 bp, Zea mays
  Clone ID: LIB36-015-Q1-E1-E6
gtataaatccactccacaggtgacagcacaacacctgcggacagatgcacctaacgcaagcggctgtcttgcatgatgagttgcaattcccaccgttgctgctgctagagagcatggacaccatatcacatgtaagatacgtgatcatatcagcacggtgaacggtgctgcgctaacttgtactggcccgcgcaatgtgatccatgtcatgagacctagacatgctccccggcagaatcatcagcgtcaagtcagtgagcaacattcgatctgctgctaccagtggcaatgcagtgaactcgaaggtcgacgactccttccatgaactgtaggatcacgacctcgatcgcttgatcacacacgatctgatgtagagtcggtttgtcggagacgcgacaagattgtgagcatgtccaccacgctcaaactacta

SEQ ID NO: 14451 - DNA, 433 bp, Zea mays
  Clone ID: LIB36-015-Q1-E1-E7
ccaacatcgaccttcaagtctcgctacgtagcagtgcaataaaaaaagcagccgcaatggcgagcagcaccatggccctctcctccacggccttcgccggcaaggccgtgaacgtgccgtcgtcgtccgccttcggcgaggcccgcgtgacgatgcgcaagacggcggcgaaggccaagccagcggcggcgtccgggagcccgtggtacggccccgaccgcgtgctgtacctgagcccactgtccggcgagccaccgagctacctgactggcgagttcccgggcgactacggctgggacaccgcggggctgtcggcggacccggagacgttcgccaagaaacgggagctggaggtgattcactcccgctgggccatgctgggcgcgctcggctgcgtcttccccgagctgctcgccccaacggcgtcaagttc

SEQ ID NO: 14452 - DNA, 404 bp, Zea mays
  Clone ID: LIB36-015-Q1-E1-E9
agctcggacaaggcacagcgccatcgttcggtttccttgctgaattcccgatcgctcgctcgctcgaaaagaaagaagctagcttttagcatggcgtctctggcgttcggcagcaccgtagcggcggccgtggcggcgacatcggggaggacgcggccggcgcgccggtccgtgctggtcgtgccgcccgctgccagcaggggcggcccggcgccggccaatgaggataagggcctcggcgagaccatcttcggcttcatcttcacgaaggaccagctggtggagacggacccgctcctcaacaacgtcggcgccgcgccggccgccgccttccgcgccaagacgaccgccggcaagaatgctgccggcggcgacgacagcggcagccgcggggggttcaacct

SEQ ID NO: 14453 - DNA, 468 bp, Zea mays
  Clone ID: LIB36-015-Q1-E1-F10
gtcgacgcgcgcgtccggtcattcaccgtgcgcgcctctctccgcaaggccaccggcaccgccgccgtggcaatggctgccagcgccctgcttgccggcggtgccatggcccaggaggtgctgctgggcgcaggcgacggcgggctcgtcttcgagcccagccagttcagcgtcaaggccggcgagaccatcacattcatgaacaacgccggcttcccgcacaacgtcgtcttcgacgaagacgatgtgccgatcggcgtcgacgccaccaagatctcgcaggaagagtacctcaacgcgccaggcgagacctactccgtcaccctcaccgtgccgggaacccacggcttctactgcgagccgcatcaatgagccggaatggtcggcaagatcaccgtcaactaagtaagctagctatcgatcgatatccattcatgtaatagctgttgcctcctgccttgtccttcc

SEQ ID NO: 14454 - DNA, 360 bp, Zea mays
  Clone ID: LIB36-015-Q1-E1-F2
ctctacagtgaatcgtattaagagatagagaagacagagataatagagagatagatcagaggagtgggagacccgcgagaggctgccgtgtacggaccgtacactcagcgtctgccaacgagggataacgggatcgccgggatccgaccgatcaagcatgactgggagccggtcgttgtgcggatgaatgcacccaccgccgccgccaacaaagatcagaaggccgtcaacgccgcacgccgcgcccgttcggacatccataccatgacgaactagcaacgctggtacgagataagcggcatccagcggtacaaccctcaatagcacacgcctctattacgacacctcctgacctccccc

SEQ ID NO: 14455 - DNA, 357 bp, Zea mays
  Clone ID: LIB36-015-Q1-E1-F3
tctataaagaatcgtaataaaatggtgtccagcacatgagcaaggtaaaaatgattgggtgcagtgcagatccgacaagttcatgtaatgcaagtcacctctcatgataggaacttctccaggggaatatatctgaagcacaggacgacacgtacaagtaatgtaagccagtctcacgtaatggaaatttctccatgtggatgtggtcaaagcatacgattttttttctccaattgttaactgtacgcgaatggaagcgacagatcatttgtacgttgtgagggcttcaaagatcatctgctgctgtacatgttttgttgctgtcttgtgaacatacatgttttgttgtttctcaaa

SEQ ID NO: 14456 - DNA, 332 bp, Zea mays
  Clone ID: LIB36-015-Q1-E1-F8
ccgggctggccccacgcgtccgcaatctatggtcatggttgatgaaactgtggaggcaaaagtagtaccactcgaggagagtacagagaataatgctgctaccataggagtagttgaggagacagctgaatgtgaaactaaggaggaagcaccagacgagaaggggaaaatataaaataatgaagatgctgacaaattagctggagagaccagggcaggtgaaattacagttgaggcaccacgatgagaaaacagaacttaaagcagatgctgacacaccagctggtgagaccaaagaatgtgaaattacagtagaggcaccagatgagaaa

SEQ ID NO: 14457 - DNA, 382 bp, Zea mays
  Clone ID: LIB36-015-Q1-E1-G10
gtcgacgcaagcctccgcggacacgcgggttatttttttttttttttgtttttttttatgtttgtgatatttctatgttgttcattatgatctattctcattctcttttaaagacgaagccgtccattttgcagcagtgagagattattaagtccacggtgaacgaaacatgcacaaaattacatgcggattgaggagactaacccataagtcgactcacgcttcgacgccatcagctgaagtcgcacccaggcgctagcctcatctcacaactacaaatccaaaccgagcagtgggtccttgacgacactgggctgacacatttctccgcgaagatcgcgtccaaggcggacttcttgggagacagcccggagtactacac

SEQ ID NO: 14458 - DNA, 460 bp, Zea mays
  Clone ID: LIB36-015-Q1-E1-G11
gggtcgacgcaagcctctacgctgagtgcatactacagcttgtgcgcgcgcaatggcactcgtgtccgcctcctcgtcctccaccagcgccgtcgcggcgctccccaggaatgggcagcagcgggcgtcgtcgtcgttgttctcctcctcctcctcttcctccttcgtcgtcggcaagacgctgctgatgcatgccgaggcagcccggccgtcgttcgccgtgcgctccgcggcggattccgacaggccgatctggttccccggcagctccgctccgccgtggctcgacggcagccttctcggcgacgtctgctttgatgcctggggcctcggatctgacccggagagcctgccgtggaacatgcatgcggagctggtgcactgccggtgggcgatgctcggcgcggctggtatcttcatcccggagttcctgaccaagatcggcgtcctcaacacgccc

SEQ ID NO: 14459 - DNA, 406 bp, Zea mays
  Clone ID: LIB36-015-Q1-E1-G12
catctaccagcgactcagcgagcgagagcagcacacacgcagctagctaggagcagcagcagagcagcggcgatggcggcctccatgatctcctcgtcagctctggcggtggcgcctcagggcctgccgcccctcggccgccgcgcctcctccttcgccgtcgtctgctccaagaagaagatcaagaccgacaagccctacgggattgggggtggcctgaccgtcgacgtcgacgccaactggagaaagggcatcggcaagggcgtgtaccagttcgtcgacaagtacggcgcgaacgtcgacggatacagcccagtctacaacgaggatgactggtctcccaccggcgacgtctacgtcggtggaaccactgggcttctgatctgggccgttcacctcgctggga

SEQ ID NO: 14460 - DNA, 379 bp, Zea mays
  Clone ID: LIB36-015-Q1-E1-G3
gggtgcggttggcacaaaagttccaaagatggcaaacatgttagaaggtggtggtaaaactcccatattgagccctgctgaacttgaggaaattggtttcaggcttgtagtatatcctttatccttagttggggtatcaatgcgtgcaatgcaggatgctctagttgcgataaaagacggcggtgtacctccacctagcgtcctgccatcttttcaggagatcaaggatacattgggttttaaccgctattataaagaagagaaacaataccaagtggacaagtgaaggaagcagctgaagtctgatcctgtggattcagtcggatcgtggccatggcttaatttccaccggacatgctgggctttcaccggacatgat

SEQ ID NO: 14461 - DNA, 407 bp, Zea mays
  Clone ID: LIB36-015-Q1-E1-G4
cgggtcgccgcacgcgtccgccaacacgtccgcccacgcgtccgggtacgcaaggcacagcccaagaccaccgcaccgcacctgcacaccgccagggatggcggcaaccgcgcacctcaccggtgtcctcggcgtgtcgtcgccgcctctcgctccgtcccactgcagctgcagcggcgccaagaagcagagctgctctctgcgtcaggggcggcagcagaggaggcgcctccgcgtcgcccgcgccgtcgaggtggacgcgccttccgccggcgcaccggagccggaggaggcggaggagccgtccgtcgacttcgctttcgtcagcccgcggctgctgccggacgggacgccggacgtgcactaccggacagcgcgcggcgggcagaagctcagggacatcatgc

SEQ ID NO: 14462 - DNA, 452 bp, Zea mays
  Clone ID: LIB36-015-Q1-E1-G5
ctcgcgggtcgccgcaagcgtccgcacacacgttctgacgtgacgcgtgggcgcagctgacggacgactgaaccaccgacagacaacatggccgcctccgcctccaccgtctccggcctcgccggcgcctccctggccagccgcccggcgttctccaccagcttcacgcggggcagccgggtgtcggcgaggaaccccctgatgagcaggaacctggagaggaatggcaggatcacctgcatgacgtttccccgggactggctgcggagggacctgagcgtcatcggcttcgggctcatcggctggatggggccgtccagcgtcccggccatcaacggcaacagcctcacggggctcttcttctccagcatcggccaggagctggcccacttcgccacgcccccgcccgtcacctcccagttctggctgtggctagtgacgtggcacctggg

SEQ ID NO: 14463 - DNA, 279 bp, Zea mays
  Clone ID: LIB36-015-Q1-E1-G6
cgtcaaccatcgcgtccgcccatgcgtccgcccacgcgtccggcaagctgcagccctggtgaccctgctggtcctcatgatcatcaaactcgcgatcggcatcctcgcgcacgtcgactccttcgcgcatatcggacggttccacagcggcttcctcctcgggtacgtcctcatcatctccctgcattacgggtggatgcagcgctaggccctgcccgtcgacgtcaacttcaacatcgacacgtagttggtctaccaatcggctctgctggccgtggc

SEQ ID NO: 14464 - DNA, 399 bp, Zea mays
  Clone ID: LIB36-015-Q1-E1-G7
acgcgtccagccactctgcggtggtgcagctgcactcgcgggaggacgtggaggcgctcatcgacgagcaccgcggcgacaagggcaagctcgtcgtgctggacgtgggcctcaagcactgcgggccctgcgtcaaggtgtaccccaccgtgctgaagctgtcgcggtccatggtcgacaacaccgtcttcgcgcgcatgaacggcgacgagaacgacagctgcatggacttcctcatggccatgaagatcgtggaggtgcccactttcgtcttcatcagggacggccagatcgtcggccgctacgtcagctccggcaagggggagctcgtccgtgagattctccgatacaagcgcgtcacggtcacctactgaagtgaactactgaacatcaaaccag

SEQ ID NO: 14465 - DNA, 386 bp, Zea mays
  Clone ID: LIB36-015-Q1-E1-G8
gcgtcaaccaacgcgtccggtcagttgttgacctcacggtcagaatcgagaacggggcctcttacgaggaactcaagagagctattaaggctgcctctgagggcgcactcaagggtattacgggctacgtcgaggacgatctggttgccaccgacttcagcggtgacagcatgtctagcctctgcgatcccgggggcaggattgcgactgcaactaccagttcatcgcgctcgtcacgtggtaccaccactcagtggggccaccggagccccgtcatcgagctgatccgtcagtcgatctcgacttagtcaacacacagctgtctgcgtcacgaacgccggtcgtccacaaccggactgggtcccacaggaacaatgccacggatc

SEQ ID NO: 14466 - DNA, 434 bp, Zea mays
  Clone ID: LIB36-015-Q1-E1-G9
cgctgagaagaaggatcggctgcagctggcggagatcaagcacgcgcgcctcgccatggtcgccttcctcggcttcgccgtgcaggccgccgtcaccggcatggggccactcaacaactgggccattcaccttagcgacccactccatacgacacatcttcgacactttctgacgatcctcttaatcccgtcattgctctgctccgtccatcgatcgaaacgtggtcttgaattaactattatcgctatgagcctgcagatggatcaacccgtcatgcgtcgtgtcagtttgtgatgaatgggagagagggtattggacaacattgatcacaccgtcgtgcttatgtctcgttaattatgagagctacagctccgatttggcgatttgtaatatatgaaccagtgatgaataaatgcattcacttgttcaaaaa

SEQ ID NO: 14467 - DNA, 244 bp, Zea mays
  Clone ID: LIB36-015-Q1-E1-H11
ctgccctgttgcaatgcctgcatggtctgaaaggacctcggctcatgcgtgactgccatgtgcattagctgcaggggacgttcagggtatatatcctttgatcagctccatccgatgttccccatgcatgatggtttcgttttgtccgcttacttctggcatgccagcgtagtgctcatcaagtacttgactctcatacaccctcatggatacattgaactaattccaatacctgcctgatcac

SEQ ID NO: 14468 - DNA, 283 bp, Zea mays
  Clone ID: LIB36-015-Q1-E1-H3
gcgtccggtaataactcccggtgggcgatgctgggcgcgctgggctgcgtgtttccggagatcctggctaagaacggcgtcaagttccgcgatgcggtgtggttcaaggccggcgcgcagatcttctcggagggtgggctggactacctgcggaaccccaacctggtgcacgcacagagcatcctggccatctgggcgtgccacgtggtgcccatgggcttcgtccagggctaccgcgtccggcgcggcccgctccgggaatggctccacaaagtgtaccccg

SEQ ID NO: 14469 - DNA, 347 bp, Zea mays
  Clone ID: LIB36-015-Q1-E1-H4
gcgtccgccaacgcaatccgcccacgcgtccgcggacgcgtgggcgcggctccagaggctggggcggcggcatccggtcctcctgaccccagccctctctccgcggaggccgaggccgaacgcgccaagctggctcacgttagcaaaaagctagagaacacagcacgggatttcaagaatgtgggcaccctggggttctggtcccaattggtgtgtacggtcgtttcggccgggatcctgtcgttctctgcggtcgctacagggaatgtcacaactcccttcacattcagtgcgactgcggttggcatcgtcgtgggcttcatctgcgtcgtccggtcatttggtta

SEQ ID NO: 14470 - DNA, 354 bp, Zea mays
  Clone ID: LIB36-015-Q1-E1-H7
gcatccggtaatacaccccggtgggcgatgctgggcgcgctgggctgcgtgtttccggagatcctgtctaagaaccgcgtcaagttcggcaaggcggtgtggttcaaggccggcgcgcacatcttctcggagggtgggctggactacctggggaaccccaacctggtgcacgcacagagcatcctgcccatctgggcgtgccaagtggtgctcaagggcttcctcgagggctaccgcgtcggttgcagcccgctcggggaagggctcgacaacgtgtacccccgcggcgccctccacccgctgggcctcgccgaccacccggacaacgccgccgagctcaatgtgaacgacctc

SEQ ID NO: 14471 - DNA, 412 bp, Zea mays
  Clone ID: LIB36-015-Q1-E1-H9
caccaccggacgctagctcaccaccaacctcagcacatcgaggagaagaggagtggccatggcttcgtcggtggccaccgcggcgagcacattcctgggcacccgcctggcggacccggcgccgcagaacgggcgcatcgtggcccggttcgggttcggcggcggaaagcccaaggctgccgtcccgaagaaggtggcgaagacgtcgatctcctctgaccggccgctgtggttccccggcgccgtggcgcccgactaccgcgacggctcgctggtcggcgactacgggttcgacccgttcgggctcgggaagcccgtggagtacctgcagttcgaactggactcgctggaccagaacctgaccaagaacgacgccggcggcatcatcggcacccggttcgagtcctccgac

SEQ ID NO: 14472 - DNA, 148 bp, Zea mays
  Clone ID: LIB36-016-Q1-E1-C12
cacgcgtaagattttttttttttgtttttcgagcacaatctgctgttaggtacatatgatgcaaaggttgtcgattaagaagcgtatacagctggtgataacgttgcgacatccagacagcgtgtaggatgcctatcaggcgaaacat

SEQ ID NO: 14473 - DNA, 209 bp, Zea mays
  Clone ID: LIB36-016-Q1-E1-E10
gatgtcctctcgcgaattgacaagctttcacaagtacaacccatgcttggcttccgtgggtgcacgcttggtatatcgtactctcaattgacagagatgcaaccccgggccatttttcaatctgctatagcaatgagcaaccagggtgttcaagtgttcccaaagataatggttcctcttgttggactatcacacgaaccgcatcatca

SEQ ID NO: 14474 - DNA, 205 bp, Zea mays
  Clone ID: LIB36-016-Q1-E1-E9
tgcgtacagaacacgcgtccgccgacgcctgcgctcgttctgccttcagtgcttgctcgtcagctcggatactatatctcctatctgcactggccatgcgaagcgttccagctcctcccaccgcggctatggtcacggccagcacctccgggctcttcacgctgccctccctccgcgccttccctctttcctcgatctgacttca

SEQ ID NO: 14475 - DNA, 84 bp, Zea mays
  Clone ID: LIB36-016-Q1-E1-F10
aagcctatagactgagtcttattatctgctcaagtctggtgtctgggatccccgtattctgagagcaaccaatcgctcggggcg

SEQ ID NO: 14476 - DNA, 230 bp, Zea mays
  Clone ID: LIB36-016-Q1-E1-H10
cacgcgtccgcccacgcgtccggctctctgcactccgtgatcaccaccacacctctatcctgctagctaggtagctgaattcggagccagggtcgagctacggggtggggaggggagatggaccaccctgcggacgcgggccggacggacctgacgaccatcacgcggcccgtgcggaacgaccacagtctgaagccccactcccgcggctacttcatcatccgtctctc

SEQ ID NO: 14477 - DNA, 434 bp, Zea mays
  unsure (1)..(434): unsure at all n locations; Clone ID: LIB36-016-Q2-E2-A10
cggacgcgtgggtcacgccaagagcgagggcgcggcggcggccacggacaagcagcggttcaagacgctgccggcgtcggaggcgctgccgcggggccaggccatcggcgggtacatcttcgtctgcaacaacgacaccatggacgagaacctcaggagggagctgttcgggctgccgtccaggtacagggactctgtgcgtgctatccgcccgggactgcccctcttcctctacaactactccacgcaccagctccacggcatctttgaggccgcgagcttcggcgggaccaacatcgacccgacggcgtgggaggacaagaagtgccccggcgagtcgcgcttccctgcgcaggtgcnggtggcaacgcggaagatctacgacccgctggaggaggacgccttcggccccatcctgcaacactacaacgggc

SEQ ID NO: 14478 - DNA, 327 bp, Zea mays
  Clone ID: LIB36-016-Q2-E2-A12
gtcgcagcagctagcgcccggccggccagtcgagtgagtccatcctccatcgccatccaatggccgccaccgccctgagcatgagcatcctccgcgcgccgccgccctgcttctcgtccccactcaggctcagggtcgcggttgccaagccgctggcggcccccatgcggcgccagctgctgcgcgcgcaggccacctacaacgtgaagctgatcacgccggagggggaggtggagctgcaggtgcccgacgacgtctacatcctggacttcgccgaggaggaaggcatcgacctgcccttctcctgccgtgcggggtcctgctcct

SEQ ID NO: 14479 - DNA, 457 bp, Zea mays
  Clone ID: LIB36-016-Q2-E2-A2
gtctccggcagaacaaagcggcggcgaggcgggagatatagaggagagacgagagcgggatggggtacctgtggagggtgcggctgtcttcatttgctgccggcgcggcgacggcttcggcggcggggttcttcctcctctacaaggaccacctgctcgcccgcgctgccatcatcagccaggtggaggacatcaaggaaacttctgaaaagcattatgcagccctaaataagaggatatcagcactggaaagcagaagagaaccaggaactatcaaagaggcatcagattaattctgagttgggcttatgtcatggttacatctgcccatgtgtttttgattgctgcaggcggtataaactgcagcattttaagctgtactattgtgttgttgaaattctatgaactctgaatttgaattgtgttacacttcttgtctatgtcgtctttatgagat

SEQ ID NO: 14480 - DNA, 459 bp, Zea mays
  Clone ID: LIB36-016-Q2-E2-A5
cggacaatcgcgcccaggctgcattagctcgccttgaagctcttgagagcgataatggtggggtcgaggtggtagatcttaatgatgatgagtacggatccacggatgaagaagaccctgttctcatgcaaaaaaaacagtccaagatcatgaaacgtaaaacaaggcaagggaaagctttggagaagagggcagcaagatcactcatggatgtgctacaagaagcaaatttggagtccgttcctcctcatgtgccaacatattcaagggctgctgtgggtccaccgagcacttcatctcgacgccactactgctcagtttgcggtagctctgcaacctacacatgcgtgaggtgtgggacgcggttctgttcatgccgctgtcaagtcatacacaatgatacacgctgcctgaagtttgtggcttgatcggctggatatgtataagctacatttgatg

SEQ ID NO: 14481 - DNA, 454 bp, Zea mays
  Clone ID: LIB36-016-Q2-E2-A6
gctgcttcgtcggcggcctcgcctgggccacggacgaccactccctccacaacgccttcagcacctacggcgaggtcctcgagtccaagatcatcctcgatcgggagacgcagaggtcccgcggcttcggcttcgtcaccttctccacggaggaggcgatgcggaacgccatcgagggcatgaacggcaaggagctggacggccgcaacatcaccgtcaacgaggcccagtcccgcggcggccgtggaggcggcggcggcggcgggtacggtggtggccgtggaggcggcggctacggcggtggcgggcgccgtgatggcggcggcggctacggcggtggcggcggctacggtggtggcggcggcggctacggtggtggtggcggcggctacggcggtggcaaccgtggcggcggctacggcaactccgacgggaactggaggaactgagcggt

SEQ ID NO: 14482 - DNA, 458 bp, Zea mays
  unsure (1)..(458): unsure at all n locations; Clone ID: LIB36-016-Q2-E2-A7
caacgaagtgcgagcgacccacgtccacacgacacgaaccaccaccaccaaccagcagccgcaccacgcacccagcgcaaagcgatggcgtcgctcaccatgatggcgtccttcgccgccgtggcggtggccgcgccctcgcgccgcggcaccttcgccgtggtcaggtccgccaaggtcgaccgctgccaggagcccgccacgctagcagcaaccgaggccaggcccgccgccgacggacgccgcgccgtcatgctcgcggctgctgcggcggccgtggcagccatcggcggcgccggcgccgccatggcgggccccaagaacgggacccccgaggcgaagaagaagtacgcggccatctgcgtcaccatgcgcaccgccaaggtctgccacaactgagcacgcccgcgttgcatgcagctgcagggccggngggtggtatataattaatgtacgtg

SEQ ID NO: 14483 - DNA, 453 bp, Zea mays
  unsure (1)..(453): unsure at all n locations; Clone ID: LIB36-016-Q2-E2-A9
agcccacgcgtccgggtaggagtcatggccaccgtcagcgccgccgtggtgaccaccatcgttgcccgcgccgcgatcgccaggcccaatgctctagggctgcctgcgctgagggcgaggagcgagagggtgcggtgcagctacgccaaggacgcggccccagtcagcaccaagggcgcaggcgcgtcgctgctcgccgcagcgggcgcggtgaccgcgtcggcggggcccgcgctggcgctcgtggacgagcgcatgtccacggagggcaccgggctgagcctcgggctcagcaacaacctgctggggtggatcctcctgggggtcttcggcctcatctggtcnctctacaccatctacacctctgacctcgacgaggacgaggagtccggtggcctctcgctctagatccactcctctcctgttaatgatctgaatgtanacatggtggtg

SEQ ID NO: 14484 - DNA, 280 bp, Zea mays
  Clone ID: LIB36-016-Q2-E2-B1
cccatgacgtccgcggccgcgtcagaaaacccgaagcgtcagatgagggataaatatgacaaacaggacgatatcgaagacgacgagaaggccaaccacgtggtcccttcttccgccaccaagaacccgcctccgccgccgcacactggcgaagattcggaggcttccgacgaataagaggatatggacgcggacgacgagatgccgcagactaagcccgctccaaatcaataggtggaagctaacggtgcttaacggccgagcgcgccgttccaccgca

SEQ ID NO: 14485 - DNA, 458 bp, Zea mays
  Clone ID: LIB36-016-Q2-E2-B10
gatttatcacccgaatgtcgatgagatgtctggctctgtctgtttggatgtcataaaccagacatggagcccaatgtttgatctagtaaatgtttttgaagtattccttccacagctgttgctgtacccaaatccttctgatccattaaatggggaggctgcagcactgatgatgcgtgatcggcctgtttatgaacagaaagtgaaagaatattgtgaaaagtatgctaaaccagaggacgctggcatcaccccggaagacaagtccagtgatgaagagcttagcgatgatgacgacgacgacgacaatgactccggggacgaagctatacttggcaatcctgatccttagtctgagtaggaaacagcgcagtcaggtcatcaatacattgtccaattgcagaaactgcaagtaaacaaaaactgaaaaactaaaaagaaaaaaaacctctggatgt

SEQ ID NO: 14486 - DNA, 458 bp, Zea mays
  unsure (1)..(458): unsure at all n locations; Clone ID: LIB36-016-Q2-E2-B11
ggcagcgacacgatcgcgagcgcacgcacgtaagcacgttgtcggaagctcaagttagaagaagcaccagtgcctgatcgatggcggcccatgctctcctctccggccggcagctgctgggccgccccgtgcagtcggccgtctctaggtcgtcggcgaggaaggcgcccttcgtcgtcagggccagctccagccctccagccaagcaaggtgccgacaggcagctgtggttcgcgtccaagcagtcgctctcctacctcgatggcacgctgcccggcgactatggcttcgacccgctgggcctctcggacccggacggcaccgggggcttcatcgagcccaagtggctggcctacggcgaggtgatcaacggacgctacgccatgctgggcgcggtgggcgccatcgccccggagatcttcggcaagatgggcatcatcncgccggagatcgcgctg

SEQ ID NO: 14487 - DNA, 458 bp, Zea mays
  unsure (1)..(458): unsure at all n locations; Clone ID: LIB36-016-Q2-E2-B12
cccacgcgtccgcactcatcgatctacacacatacatagtttcttctactacacgacgacaaacatggggaagcctgcgaagatcggagagtggggtggatacgccggcgatcgtcgggatctgagggctactccggaccggctgatcgaggtgaaggtcacggcggacaacagcagctgcatccgctccatctccttcatctacatcggagccgatggcaaaccgtacgaggaggggccatggggtttcggccatgctggcacggagtacaagattgatctgtgcaggttcgacgagagcttgacggagatctccgggaccacgggcccagcctacaacattgacaatctggtcaagtctctcaaattcgtcaccaacaaacgcgcttacggaccgtacggcaaggacganggcaccccgttccgtgtcaaggtgatgaacaacggccacgtcgctg

SEQ ID NO: 14488 - DNA, 450 bp, Zea mays
  Clone ID: LIB36-016-Q2-E2-B2
cggacgcgtgggtgccatcaaccttacttgatgatctccctaacgaagttgctctccagtgccttgcacgggtaccattcttgttccatccgacgcttcagttggtttgccgctcttggcgagcatcagtttgcagtggcgaacttctcaaaattcgtaaccagattggtacgacagaagagctcttgtgtgtgttggcgtttgaaccagaaaacatgtggcaactttatgatcccctacgagacaagtggataactcttcctgtcatgccatctcagattaggaacatagcccgctttggcgtggcctcagttgctggcaagctctatgtaattggtggtggcagtgatcgagttgatccgcttactggagatcacgacaggatctttgcaagcaatgaggtttggtcttatgatccgctgcaccgtgtgtggtcccagagggctccta

SEQ ID NO: 14489 - DNA, 373 bp, Zea mays
  Clone ID: LIB36-016-Q2-E2-B5
cttgctctgatagcttgctccaggacgtacgtacgtacgtagatcgatccatcgatcgctagctagctgacgaccatggcgtccctctcctctgccgccatcaccgccccttccttcacggccgcgcccgctcgcgcagtggtcagcaggaggtccttcaccgtgcgtgcctctctccgcaaggccactgccaccgccgccgtggccgttgccgccagcgtcctgcttgccggcggcggcgccatggcccaggaggtgctgctgggcgcaggcgacggcgggctcgtcttcgagcccagccagttcaccgtcaaggccggcgacaccatcaccttcaagaacaacgccgggttcccgcacaacgtcgtgttcg

SEQ ID NO: 14490 - DNA, 456 bp, Zea mays
  Clone ID: LIB36-016-Q2-E2-B6
gtgtagtgtgtagtcgcagcagctagcgcccggccggccagtcgagtgagtccatcctccatcgccatccaatggccgccaccgccctgagcatgagcatcctccgcgcgccgccgccctgcttctcgtccccactcaggctcagggtcgcggttgccaagccgctggcggcccccatgcggcgccagctgctgcgcgcgcaggccacctacaacgtgaagctgatcacgccggagggggaggtggagctgcaggtgcccgacgacgtctacatcctggacttcgccgaggaggaaggcatcgacctgcccttctcctgccgtgcggggtcctgctcctcctgcgccggcaaggtcgtctctggcttcgtcgaccagtccgaccagagcttcctcaacgacaaccaggtcgccgacggttgggtgctcacctgcgctgcgttacccacctccgacg

SEQ ID NO: 14491 - DNA, 444 bp, Zea mays
  Clone ID: LIB36-016-Q2-E2-B8
cccacgcgtccgcagtcaccaaaccaaaaccgctctcgagtctccatccattctctccgctcatccgcagctctcgagtctccagctctagctagccttagtctcgtccaagggacgaaggggccaccatgagcgtggtgatcctggacggctccacggtgcgcggcttcgtggcggacgaggcggccttcgcgcgcagcctggacgcgcggttcgccgcgctggacgccaacggcgacggcgtgctgtcccgcgccgagctccggcgcgcgctcgagtccttccgcctcctcgacggcggcggcttcgggtccgcccagccggcgccgctccccgccgaggtcgccgcgctctacgacgccgtcttcgagcagttcgacgccgaccacagcggcgccgtcgaccgcgccgagttcatgacgagatgcgccgcatcatgctcgc

SEQ ID NO: 14492 - DNA, 482 bp, Zea mays
  Clone ID: LIB36-016-Q2-E2-B9
tcgtggtacgacgcaagactctagactgagtcgtatcatcctcctctgccgactgccctcatccactccactcccaagtccccaccacccccaaccccgtctctccactgcggcgcaggcttcgcttcggctccgctcggctcgagcagaaaatgcaacgggcagtgcagaccgtcaggtcacacggcaatgttcttaaatatgctgttctacaacacatcagcgctcccaagccagcaatgcttcctgctgccttttctcgtttcatgtcagtttcatctgctcgcctagaggatcgtggatttgaaactgccactgtagcagatgtcttgaagtctaaagggaagagtgctgatggatcttggctctggtgcaccacagaggatagcgtctatgacgctgtcaaatctatgactcagcacaacgtgggagctttggtggttgtcaaacctggacagaataaatcaatcgctggcattgtc

SEQ ID NO: 14493 - DNA, 474 bp, Zea mays
  Clone ID: LIB36-016-Q2-E2-C10
tcgtgggtcgacgcaagcctctacagtgagtcatatatacgagagcagcacacacgcagctagctaggagcagcagcagagcagcggcgatggcggcctccatgatctcctcgtcagctctggcggtggcgcctcagggcctgccgcccctcggccgccgcgcctcctccttcgccgtcgtctgctccaagaagaagatcaagaccgacaagccctacgggattgggggtggcctgaccgtcgacgtcgacgccaacgggagaaagggcaagggcaagggcgtgtaccagttcgtcgacaagtacggcgcgaacgtcgacggatacagcccaatctacaacgaggatgactggtctcccaccggcgacgtctacgtcggtggaaccactgggcttctgatctgggccgtcaccctcgctgggatcctcggcggcggcgccctcctcgtctacaacaccagcgccctctccggct

SEQ ID NO: 14494 - DNA, 454 bp, Zea mays
  Clone ID: LIB36-016-Q2-E2-C11
gtctgcgtccagctcagctactccaatttcgcaacaagttgcaagcaataaccgaccaaggacgacgaacgggtcgatggccacgctctcctcctgcagccgcctgagtagcggcaccggcgccgcggccatccaccggcagccggcccgtgctggagccgtcctcgtcgtcacctgcaggcggagctcctccgcgaccgtccgcgccgcagccgctgccacggcggcggcgccggctgccgtagagctgcagaacaagggggtgtcgctgccgacgtgggcggagttcgagctcgggcgggcgccggtctactggaagaccagcagcggcctcacgccctcgccgggcgaggggctgaccctgttctacaacccggcggcgacgaagatggccccgaacgaggtgttcggcgtggcgttcaacggcggcttcaaccagcccatcatgtgcggc

SEQ ID NO: 14495 - DNA, 477 bp, Zea mays
  Clone ID: LIB36-016-Q2-E2-C12
cgtgggtcgacgcaagcctctatattagagtcgtttatttttgagcacaacataatgttatgtacatattattcaaatgttgtcgattaaaaagcgtatacagctggtgataacgttgctacatccaaatagcgtgtagcatgcctagcaagccaaacatattaccttacagcaagcatcccattgccgcttcacacatctttgctgccttcgatacataaacagcacaaatggattactagcagggattatagttctacaatatatggaatcacgattatcaccgctgaccagagtctactccttcgaggcgtggactgcggacacggtagagaccatggaatcgacgccgcacttgttgcgaacgttggaacccctgcatatcttgtagtatccgttctccccccagttctcgccccacgagttcttgatgatccagtaaggcttgtccttcaggcgaatgggggcgaaaccaga

SEQ ID NO: 14496 - DNA, 459 bp, Zea mays
  Clone ID: LIB36-016-Q2-E2-C6
cactaacctagtgttacccaggtgcactgcacgtaagtcagtgatccctttttgccttctcacctggcggagcatccactgcgtcgcacggtgccaggtcagctagtcacctggagagactgcatcgtcgcctgcacgaggagcaggagcgctgacaccacgagcaggagcaggaccaggagcagcaagactcttccccctcgcctcagcaggaggtggagactaggaggctgccttcccctgcacctcagccagagatgcccctgcactaccatagggcatcccagctactgacggagacgacgacgacgttggtggcagttcgagccatgacacgaagctctaggaggagccagagccggagggatggatcgctagacccatcactcgcgacgctgctcctaagtgtcacttccacgacgctctcaacatgctgctgcgttcgggcatcgactgaca

SEQ ID NO: 14497 - DNA, 463 bp, Zea mays
  Clone ID: LIB36-016-Q2-E2-C7
gcaactgcaaagcagcaagctctactcttcttctgtactgaacgtgtgactagataacaataagcgtgaaccatggcggacgagtacggccgcagcggctacggcaggtccggcgccggcgacgactacgacagcggctacaacagcaagtccggcactgatgactacggccgtggcgaaggtggctacaacaagtcgggcggcgatgacgactacggccgcagcggcggcgatgggtacggcaggtccggcggcgacgactacggccgtggcaccggcggtggtggctacaacaagtccggcggcggcgacgactacggccgcagcggcggcgatgggtatggaaggtccggcggcgacgactacggccgtggcaccggcggcggcgggtacaacaagtccggcaacgacggctacgacagcgggtacaacagatcgggcagcaccaacgacgacgaatacg

SEQ ID NO: 14498 - DNA, 460 bp, Zea mays
  Clone ID: LIB36-016-Q2-E2-C8
cccacgcgtccgcacgcacgcatacacagcacagagtgaggtaagcatccgaaaaaagctgtgatctgatcgacatggccgccgccaccatggctctcacctcccgcgcgctcgtcggcaagccggcgaccagcaccagggacgtcttcggcgaggggcgcatcaccatgcgcaagactgctggcaagcccaagccagcggcgtccggcagcccctggtacggggccgaccgcgtcctgtacctgggcccgctgtccggccagcccccaagctacctgaccggcgagttccccggcgactacggctgggacaccgcggggctgtccgccgacccggagactttcgccaagaaacgccagctggaggtgatccactgccgctgggccatgctgggcgcgctcgggtgcgtgttcccggagctgctcgcccgcaacggcgtcaagttcggcgaggccgtgtg

SEQ ID NO: 14499 - DNA, 466 bp, Zea mays
  Clone ID: LIB36-016-Q2-E2-C9
tcgtgggtcgacacaagcctctacactgagacgtagaagttgagtgttttccgctcaaacaaacatctgtatgctcaagtcatcgacgacacaaagcaatgtactctggcttcagcttcaaccatgcacaaatctctctccaaggaatttgaatactcagctgggccaacgatcgaaatagcacaaaagatcggtgaggtgattgccaagtcttgcttggagaaagggatcaacaaggttgtcttcgaccgaggtggtttcctctaccatggccgcataaaggctctcgctgattctgccagggagcacgggcttgaattctgagtcgtccaggcgtttgttcatatctccaggatcacctgtaatcttctttttttttttctctccatatgccgaacagattgtagtcactcgccttgttctgcatggtgcaaagccatggccactcgttgaccatgtcacgttt

SEQ ID NO: 14500 - DNA, 467 bp, Zea mays
  Clone ID: LIB36-016-Q2-E2-D11
tcgtggtacgacgcaagactctacagtgagtacttatatagatggctgtctcaatctccccaaaccatgaggttgcatccatcttcgcagcagctttcttttctctcttcaatctcttctcgggcttcttcattccgagaccgagaattcccggatggtggatctggtactactggatttgcccactggcatggacagtgtatgggctcatcgtgacacaatatggagacctagaagacctcatctcagtccctggagaaagtgagcagacgataagctactatgtaatacatcattttggataccacaaggattttctgccagtcattgcgccggttctggtactctttgcagcattcttcgcgttcttgtacgcggtctgcatcaagaagctgaactttcagcaacgataagaaaaagatatagcaacaaaagctcttgagatttttttggaaacacttcctttt

SEQ ID NO: 14501 - DNA, 464 bp, Zea mays
  unsure (1)..(464): unsure at all n locations; Clone ID: LIB36-016-Q2-E2-D2
gtaaggtttcagcaattcagctccctcgcctccgccgcggcaccggcactacgagtgcttcgctaccagccagccagcacactctacgagtcgccatcttccactccaccgaggcagctccaagccatggccatggagaaggccgcctccttcctctcctccctcttaggcggcggcggcggggagccggcggcgactgtgaaatctatcttcatataccctatcaagtcctgcaggggtcttgccgtgtcacaggcgcccatcacctccactgggttccggtgggatcggcagtgggtggtggtgaacgccaaagggcgagcatacacccagagggtggagcccaagcttgctctggtccangtggagttgccgccggaggccttcgctgagaactggcagcccacgcccgacgaccacctggttatcagagcacccggaatggacacactgaagatacctct

SEQ ID NO: 14502 - DNA, 439 bp, Zea mays
  Clone ID: LIB36-016-Q2-E2-D3
ggcaaactccataaagcatcaccgccgcgacgacgatcgcagcctcgctcaaagccgcggccaccctgatgcagccggccaagatcggcggccgggcgccctttgcctcgctgccgtctcgcccgtcgtcgcaactcgcctgcagggcgttcggcgtcgacgccggcgccgccaggatcacgtgctccctgcacgacgtcgccagcaagtgcgtcgacgccgcgaagctcgccggcttcgcgctcgccagctcggcgctcctcgtctcgggcgcgagcgcagagggcacgcccaagaggttgacctacgacgagatccagagcaaagcgtacatggaggtgaacggcacgggcacagcgaaccagtgcccgaccatcgacgggcgcgtggagtcgttcccgttcaatgccggcaagtacaacatgaagaacctgtgcct

SEQ ID NO: 14503 - DNA, 320 bp, Zea mays
  Clone ID: LIB36-016-Q2-E2-D4
acgtcgtaggatcaggcttaggattacagcatgtcggcgtccccggagttgtacaggcccgcggaagcgccggccttctcgccgtcctgcgccacgcagccgctcgtgttcgccggcgacgactactgctgcaggacgccgactggcagcgggatctgctacgtgagggagcccaccacgtgcccgcccgcgccccggaagccgccgccgccgccgcccatgtgcacgaagcgcctcctccaggcggcggatcagcccgttgctggaggccgggcccgtccctgttactagcagccgcctcgacgagctggagcggctct

SEQ ID NO: 14504 - DNA, 354 bp, Zea mays
  Clone ID: LIB36-016-Q2-E2-D5
tcaatactgggactcgtgggacgacgcaagcctctagactgagtcatgctagacacgagctcagccggcggcggcagagcgggaggagggagaacgcttcggtcccccccaacccaacctcctccccttcccgacaaggcgacgcgaagcgagatgccgctgtacgactgcatgctgctgctgaagacgacggtgaccacggaggtcctagcggaactggtgacgcgggtggcgcgccgcgcatgccagcgcaacggggtcgtcaccgacgtcaagtcattcggcaaggtcagcctcgcctacggtatcaggaagctcgaccgccgccacttccagggccatcttatgcacgtg

SEQ ID NO: 14505 - DNA, 446 bp, Zea mays
  unsure (1)..(446): unsure at all n locations; Clone ID: LIB36-016-Q2-E2-D6
ataaacaagacggcctgctccacacgacttgtggcacgcctgcttatgttgccccagaggtgattaacagaaagggttatgatggtgcaaaggctgacatatggtcttgtggggtcatcctgtttgtgctattggctggttatcttccgttccatgataagaacttgatggacatgtataagaagattgagaaagctgacttcaaatgtccaagttggttttctaccgatgttcggaggcttttgcaaaggattcttgatcctaaccctagtagaaggatttcggtggaaaaaatcatggagaatccatggtttangaanggtttaagtgcanagctacttaagtacgatttacagaataagaatgcccctcatgtggacaagaaggcagattttgattcactgagcaccaacgtaacaactgagagcaagcaacatgaagaaaag

SEQ ID NO: 14506 - DNA, 462 bp, Zea mays
  Clone ID: LIB36-016-Q2-E2-D7
actagttctagatcctgttggacggcgagcacggcatcgagcgcacgttcgaggtggcgcagaaggtgtgggccgaaaccttctacgccatggcggagaacaacgtcatgttcgagggcatcctgctgaagccgtccatggtgacgcccggcgcggaggccaaggacagggccaccccggagcaggtggccgcgtacaccctcaagctcctccaccgccggatccccccctccgtgcccgggatcatgttcctctccggcgggcagtcggaggtggaggcgacgcagaacctcaacgccatgaaccaggggcccaacccgtggcacgtgtccttctcctacgcgcgggcgctgcagaacacctgcctcaagacctggggcggccagccggacaaggtcaaggcggcgcaggacgcgctgctgctgcgcgccaaggccaactccctggcgcagctcggcaagt

SEQ ID NO: 14507 - DNA, 454 bp, Zea mays
  unsure (1)..(454): unsure at all n locations; Clone ID: LIB36-016-Q2-E2-D8
cccacgcgtccggagatatcacagggacctcttcaggcttcaaggcagatccgcagcagatggaggcgaagagcaggctgccggaggtgaccatcgtcccggcggcacggccgttggctggcgacggcacagtcgacgcggcaaaggcggcggcaggcaaggagcccgtaagcccgggcactccgtcctcggtggccgccggccgcagcagctgtgaggagaggcgcgcggtggacggcgtcgccctgcctgggtggaagctcgacgccctctgccaggagtcctgcccgtcgccggccatgagggcgcgcttcccctactacttctgaagcttcncgttgcagtcctgcgtgatcgagttcttgagcggcgacatctggtgcatgctcttgacgactgaatgcgttcctggggtgtttcccttcccagggtttccctttcgtgcacgttcatg

SEQ ID NO: 14508 - DNA, 447 bp, Zea mays
  Clone ID: LIB36-016-Q2-E2-E1
caacgacgacggaggcggcaaagagcggctcagccgcaccggtgcggtgccagcggatcggctgcgacgccgtattcaccgacgatgacaaccgcgagggctcctgccaataccacccctccgcacctatgtttcatgacggcatgaaagaatggagctgctgcaagcaaagaagccatgatttcagcttatttttgcagatacctggatgcacaacaggaaagcatacaaccgaaaaaccaatcacaaaagctgtttcatctaaccgtacaaaggcaacaccgatccagtcctctaagcagggtgtgggagttgatgtgtgtgcaaggtgtcgtcaaggtttcttttgctccgatcatggatcacagcccaagccacaaaagccagctgctaccgacgatacaaacaaggaacctgttgagaaatcagctgttccaccgcccaagg

SEQ ID NO: 14509 - DNA, 460 bp, Zea mays
  unsure (1)..(460): unsure at all n locations; Clone ID: LIB36-016-Q2-E2-E2
gcttctggcgaccaaattctgccgtctccaccgccgccgcagccagcgtcaccggagggatctgccgtctcccttgctccacgcgatgaacaccgacatcaccgcctcgactaagccggagtacccggtggtggatcggaacccggccttcaccaaggtggtcggcaacttctctgcgctcgactacatgcgcctctccaccatctccgccgtctccgtcaccgttggctacctctccgggatcaagccggggatccggggcccgtcgatggtcacgggcggcctcatcggggtcatgggagggttcatgtacgcctaccagaactccgccgggcgcctaatgggattctttcncaacgacgccgaggttgcgcgctacaagcacaagcttcattgaggatccagctccattccgtctctcttttcgcaaccgtttcgcctgttcccttcctgattccgt

SEQ ID NO: 14510 - DNA, 454 bp, Zea mays
  Clone ID: LIB36-016-Q2-E2-E4
ctcgaatggtcgaacagtagtttgctcgctattatccatggcgacttctacggctgctgccactgcactgctccgccccaggccggcagttccagccaagttggcgcagaggaggtgcctccatgcggttgctgggtggacgacgatgaggaggaggggagctgcaggggtcgtgcgagctttcttcaaccctctcggggatgagcgcatcctccgagaagccatcaaggagccagtagcattcatgggtggtgtgtttgctggcctcttgaggcttgacctgaatgaggatcctctcaaggaatggataagtcggacagtggaggcttctggaatagctgaggaaaacagctctgaagaatcaagtgaggcagatcaaaatgatgcacctcagcagattgagattgagtgagaagaactgcacatgagaacaggggaaaggtcctcaaaatac

SEQ ID NO: 14511 - DNA, 459 bp, Zea mays
  Clone ID: LIB36-016-Q2-E2-E5
caactccactcctgagtcctcacctcgtgctgcccgcgccatttccacctcccactgtcctttcgtccagtccccagccctgcagcccaaccgtggaggttctggaaggcggtgtatcccttctagaaccttctcgagatgcagagcgccgcggctttccggccatgccccactcggctgctggtgagcagcccttgtcgccccctcctctcggcccgcccgcttcgtgcctccgccgctggcgccgtcgctaccagaagcagcgccgtgggccctcgcggtctggggctcgggctgctgccagcctcgcccgatcgggatggcaagtgccgccagcgacaggtgtcatgcagcgcggccggggatgctgtggcggccccgaaggcggaagaacgaggcgggctcatgaagacgctgtggctcggctcgctcttcggcctctggtacctgttcaacatc

SEQ ID NO: 14512 - DNA, 101 bp, Zea mays
  Clone ID: LIB36-016-Q2-E2-E6
acccaagacgtccgcgagattgtttttcatcttgacgcgtggagctcatgtttgataactacgtctagtaccatgtatgaacataataatcttggtctaat

SEQ ID NO: 14513 - DNA, 448 bp, Zea mays
  Clone ID: LIB36-016-Q2-E2-E7
ggtgcatcttcctcctcgcctcccatctcaggatcaggctgctcggccacgcccagcagctccttgaacgcgcgcccctccgagcatctcgtccctttgttggtcgccatctttcctatctccccagcgtaggtggctggctgtgcctccccttgccggtgtcctcgttctccctgctcgttgacccctagggaaaaaacatctccctcacggctgctcccatggctgcctgcagccctagccgagctcgctctccccgcccagcagcaagcagctcctttcccctcgccatgaacgtcgtcgatctcctactgcagttcctccacgtggtctggtcgtcgaccgcgcgcatcacctactcgtggttatggaaaaccagcaagcctctcctcacggtgtagtttcctcacgtcatcgttcagcccgatgaggacctactgtctccttg

SEQ ID NO: 14514 - DNA, 429 bp, Zea mays
  Clone ID: LIB36-016-Q2-E2-E8
gacgagacgtgcacaacgtgtacgttgaccgccccgaggacgccgaccctgaggagttccacatccgcaccctcacccccgtcctcggcagcgaacagaaggccagggacgcagtgctctaccactacaagaacgccgccagcggcttctccgcgaagctcaccccctagcaggtcaaggatctcaaggagcaaccaggtgttctccaggttgtgccgagccagacttaccagctacatggtcctgggtctggcactcaccagggcacgacacacaccttgggccttatgtgaaggcgtatgagaatcaagaagactgtgtttagtatggctgtatggcacaggtctgacgaatgtgtatagtacagtactatgtaagaataacggacgtatcgtctatatactgctttgcgcatgttcagccctgttc

SEQ ID NO: 14515 - DNA, 312 bp, Zea mays
  Clone ID: LIB36-016-Q2-E2-E9
cccacgcgtccgcccacgcgtccgcccgttccgccttcataccttgctcgtcagcccggataagataacgcccatctgcacgggcaacccaaacctttcaacctcttccaacggaagcaatggcaacggcaacaacttcccggtccttctcctttccttccttcggggcttccttcctttccccaaccgattttaaaagtctctctcggtccgagccctctccccaagtgctcgtctctctggcggcctccctttcggctccccaatcgcttcaagcgggtacgggaactgtgcggcgacttcaatctcgtc

SEQ ID NO: 14516 - DNA, 378 bp, Zea mays
  Clone ID: LIB36-016-Q2-E2-F10
gtcccacgcgtctaggcaggctcgtgctgcccgctcacgtctggcgtctgggagcctccgattctgagagcagcccatggcgctgggcgcccacgtcgtccgagcactctcccagccacctcgttttgtccgagccagcagctgcgccaggccggtgccgggagcctcgctgcggcggcggcggggcctgctcatggtggtgcgggccggtgggccgtccagcaccaacgcgctcatcctcgccttcgtgcttccgctctccctcttcgtcggcacgctcgtcaccgccgcccgcgtcgccgactacctcgacgaccgcttcctgagggagatggagatagaccgttcgatactggatgagaatgaggcgtccgacga

SEQ ID NO: 14517 - DNA, 440 bp, Zea mays
  Clone ID: LIB36-016-Q2-E2-F2
cccacgcgtccgcacacgcgtccgggaagaacttctcaggttgttggatggcaaggaagagcacacagctgtccttttctatgcatcatggtgccctttctcagaaagaatcagaccagtctttgatgatctgagctcaatgtttccacgggttaagcacttggctatcgaagagtccaatgtcacgaaagccattttgtcgagatatcatgtccgtgcactaccttccataataatagctcgcagctcatacatattctgggcgctcagttcgaaagatctcgactctctagtcaacctttacactgctgctacgggtcaagaaccagtcgcatatattggtactcgcaagtggagggccacgcaaagcacagactatgctaagatttggaacagctcgattagtgaaacagtgaagcaagaaccctgcctagcattca

SEQ ID NO: 14518 - DNA, 427 bp, Zea mays
  unsure (1)..(427): unsure at all n locations; Clone ID: LIB36-016-Q2-E2-F3
cacacacgggtaaagctatctcgagctagctagctgctgtaagccgttgccatggccaaaatggtgttgctctgcgtgctcgtctccttcctcctgatgcccttggcctccctagccctgacgcaggacttctgcgtcgccgacctgacctgcagcgacacgccggcggggtacccgtgcaagtccagcgtcaccgccaacgacttctacttccacggcctggccggccagggcaaaataaacccactcatcaaggccgccgtgaccccggccttcgtgggccagttcccgggcgtcaacgggcttggcatctctgcggccaggctcgacatcgaggtgggcggcgtcgtgccgctgcacacccacccggcgggctcagagctcctcttcgtgacncaaggcaacgtcgccgccggcttcatcagct

SEQ ID NO: 14519 - DNA, 461 bp, Zea mays
  Clone ID: LIB36-016-Q2-E2-F4
cccaaccatctctctctagccgccagccatctcctatcccaacgctagcttcttttcccagccacaacatgtgagctcctcctcttaagccgttgccatctccctcctcggccacctttaccggccccctctacttcctggctcccaagcttcagccatggagcacgacccctccttgcctctctgtagcgtcaggacctcctccgagctcgacaaggatgtgctgtgtctcccccagtaccgaccatgtcgagctccggtgaccccttcccacagcacagcacgccgacgcccctgcatatgctcctccaccggggttctcctccagcagcacttccccgtagcgtgagcttcgtcgagccgttgctcccttcgtccccagcttcggcagccgagctccaaccagggacgtctagcgcccaggacgtacggccccctgctcctctatccacgacgcagag

SEQ ID NO: 14520 - DNA, 439 bp, Zea mays
  Clone ID: LIB36-016-Q2-E2-F5
cacgcacgcatacacagcacagagtgaggtaagcatccgaaaaaagctgtgatctgatcgacatggccgccgccaccatggctctcacctcccgcgcgctcgtcggcaagccggcgaccagcaccagggacgtcttcggcgaggggcgcatcaccatgcgcaagactgctggcaagcccaagccagcggcgtccggcagcccctggtacggggccgaccgcgtcctgtacctgggcccgctgtccggccagcccccaagctacctgaccggcgagttccccggcgactacggctgggacaccgcggggctgtccgccgacccggagactttcgccaagaaccgcgagctggaggtgatccactgccgctgggccatgctgggcgcgctcgggtgcgtgttcccggagctgctcgcccgcaacggcgtcaagttcggcga

SEQ ID NO: 14521 - DNA, 424 bp, Zea mays
  Clone ID: LIB36-016-Q2-E2-F6
gataaatgtcatggtatgattcaattgatgcgacctgttgtatcggtctctgtgatggacaagctgaaaattttcgtaacgaccgctgctggtgtctctacaggcattgaagttactcctagatggaatggtggacacgaatttgtactcactttaggtgacgctacgatttgtgtgaaggttacttggtcgatggtagatccacggctttaaatgggttcgcctgttcgttgttaagcatcatcggtggaagtgtagtagtgctcttgctctggtttgttgtctgaggctgttggagtctagataagtataacagtgttcacactatcatgcccgtcctgttatttagtgaaccttaatttgtctaatgttgctactcttgttatttattgaaccttagtttattctagttgcattggaaaaa

SEQ ID NO: 14522 - DNA, 454 bp, Zea mays
  Clone ID: LIB36-016-Q2-E2-F9
attcatcacagtgtgactcattgctgatcggggataatgcggctgcgaacacctatcccaccattcaggtgggttgcactagtggccgtgttgagcacgaggcaagcacttccaaaatcggagaggatcagctattttatttccagcaaagaggggtagatcatgaaaaggctgttgccgccatgattggtggattctgcagatcggttttcgagcaccttccctatgaattcgcacaggaggtggacgcactcatgaaccttaaacttgaggggtcagttggctaatttgttggctcagcgactgcgtgcaaaactccatgacagccagttacctagaaaatccatgtgtacagcagtacgagaagaatgaagtgcacgatagatatacatatacatttcctggcttgtaatactgaatgttcacattatgcctatggcaattggcaacgaag

SEQ ID NO: 14523 - DNA, 347 bp, Zea mays
  Clone ID: LIB36-016-Q2-E2-G11
atcgagcgcacgttcgaggtggcgcagaaggtgtgggccgaaaccttctacgccatggcggagaacaacgtcatgttcgagggcatcctgctgaagccgtccatggtgacgcccggcgcggaggccaaggacagggccaccccggagcaggtggccgcgtacaccctcaagctcctccaccgccggatccccccctccgtgcccgggatcatgttcctctccggcgggcagtcgtaggtggaggcgacgcagaacctcaacgccatgaaccaggggcccaacccgtggcacgtgtccttctcctacgcgcggccgctgcagaacacctgcctcaaaacctggggcgg

SEQ ID NO: 14524 - DNA, 454 bp, Zea mays
  unsure (1)..(454): unsure at all n locations; Clone ID: LIB36-016-Q2-E2-G2
cggacgcgtgggaggacgcgtgggcggacggtgggtccaaagataactgaacggtgttgtggcgcatgtgttcctgctagtattaatcttctccccagtccctagatcgatttgcttaagctggtatgtgccaccccctgtgctggtgaccacgcgtgcagttctcccacctcgccatggctcggacgtccttaggagttgctggcccgtatgaagcttgttccgtaatcatctcagagctcccaaaataaagagcgaagattcaagatgaaatggttgctaaagaggactctactccaatgcctgctcatcaagtggatggagccatctaactggggtttaatacagggatttagacctccgtctccgcaacaaaggtgttgaggagtactcanagtgattcggacgctggacggcatttccagtactgggggacgattagttacgcttgtgt

SEQ ID NO: 14525 - DNA, 438 bp, Zea mays
  Clone ID: LIB36-016-Q2-E2-G4
gcaaaccgtccccgatcttcggcggcagcacgggcgggctgctccgcaaggcgcaggtggaggagttctacgtcatcacgtggacgtcccccaaggagcaggtgttcgagatgcccaccggcggcgccgccatcatgcgggagggccccaacctcttgaagctggcgcgcaaggagcagtgcctggcgctcggcaccaggttgcgctccaagtacaagatcacctaccagttctaccgcgtcttccccaacggcgaggtgcagtacctccaccccaaggacggcgtctacccggagaaggtcaaccccggcagggagggcgtcggccagaacttccgcagcatcggcaagaacgtcaaccccatcgacgtcaagttcaccggcaaggccaccttcgactaatcacacttcacgtacgccgcaagccccagccgggatt

SEQ ID NO: 14526 - DNA, 459 bp, Zea mays
  Clone ID: LIB36-016-Q2-E2-G6
cacacatacatagtttcttctactacacgacgacaaacatggggaagcctgcgaagatcggagagtggggtggatacgccggcgatcgtcgggatctgagggctactccggaccggctgatcgaggtgaaggtcacggcggacaacagcagctgcatccgctccatctccttcatctacatcggagccgatggcaaaccgtacgaggaggggccatggggtttcggccatgctggcacggagtacaagattgatctgtgcaggttcgacgagagcttgacggagatctccgggaccacgggcccagcctacaacattgacaatctggtcaagtctctcaaattcgtcaccaacaaacgcgcttacggaccgtacggcagggacgagggcaccccgttccgtgtcaaggtgatgaacaacggccacgtcgctggcttctttggccgctctggagattgcc

SEQ ID NO: 14527 - DNA, 448 bp, Zea mays
  Clone ID: LIB36-016-Q2-E2-G8
cttgaacaattattggatgacgacgacgacatggctgatctttatttgtctcgaaagttggctggggcatcttcccctgtcagtggttctggtggaccaaattggttccctgcctccccaactattggttcaaaaatatcaagagcaagtagagccagtgcagctactgtgcatggaaatgagaatgatgttgaagagctagagatgttgctggaggcatatttcatgcaagttgatggcacattaaacaaattgacaacgttaagagagtacatcgatgacacggaagattacatcaatatccagcttgataaccaccgtaatcagttgatccagctagagttattcttgagttctggtaccgtctgtctgtcgctgtactcattagttgctggagtctttggtatgaatattccgtatacctggaatgacggccacggatacatct

SEQ ID NO: 14528 - DNA, 450 bp, Zea mays
  unsure (1)..(450): unsure at all n locations; Clone ID: LIB36-016-Q2-E2-G9
aggcgtggcgaccgggtcaccaccaccagccttccagttccagtgcagggcgtcgactttcgcggcggacaccagcctccggctcgagctggacgagaaccccgaggcgatcatctcgggggtgtggcccgggaactgctccctcctcagctacgacgacctccgcgcctacctcgagtcgcaggagacggcggcccaggcagacgatcagcgcggcgtggcgctcctgagcgagaccatgtccacacccgtgctggtggccacagcagaccagaccctggaggacgtcgagtgccacttcgaggccgtgtcggggcttccggtcgtcgacagcggcctcagatgcgtcggggtgatcgtcaagaacgaccgggcaagagcctctcatgggtccangacgangatatcggaagtgatgacatctccagctatcacactatcctctgacaa

SEQ ID NO: 14529 - DNA, 459 bp, Zea mays
  Clone ID: LIB36-016-Q2-E2-H12
ggcttctcctccccctcttaccaagtcctcctcgggttagggttccttagggttttgtggaggggcgatggcggcggctgatgtggagtaccgttgcttcgtcggcgggcttgcctgggccaccagcaacgagtcgctggagaatgccttcgcctcctacggcgagatcctcgactccaaggtcatcaccgaccgggagacggggaggtctcgcggcttcggcttcgttaccttctcctccgagaactccatgctcgacgctatcgagaacatgaacggcaaggagctcgacggccgtaacatcaccgttaaccaggcccagtcccgtggcggtggcggtggcggcggtggctacggcggcggtcgcggcggcggcggctatggtggcgggcgccgtgacggcggttatggcggcggtggcggctacggcggtcggcgcgagggtggtggcggcggcta

SEQ ID NO: 14530 - DNA, 458 bp, Zea mays
  Clone ID: LIB36-016-Q2-E2-H2
cccacgcgtccgcggacgcgtgggggccgagaagcgctttatccggccgtacgtagcgataagagtggtgcacccgtagcggcacggcatggcggccacggcgtactccgtggcgctcctcggcggcgcacgcctgccggccgccttcctccctcgacgcagcagcgtgtgccaccaccagcttcgcctccaagacgcaccgaggctgatctccctgcaccgtgccagggccgcttccgaggacacgtcggcctccggcggcgacgagctcatcgaagacctcaaggcaaagtgggacgccgttgaggacaagcccaccgtcctcctgtacggcggcggcgccgtcgtcgcgctatggttgacgtccgttgtcgtcggcgccatcaacgccgtgccgctgctccccaagatcctggagctcgttggcctcggctacaccggctggttcgtctaccgct

SEQ ID NO: 14531 - DNA, 464 bp, Zea mays
  unsure (1)..(464): unsure at all n locations; Clone ID: LIB36-016-Q2-E2-H4
cgtccgcaagaagcgcagagcccatggccatggccacgcaagcctccgccgccacgcgccacctgctggccgccgcctgggcgccggcggcgaagccgcggcagctgagctcgcagctcgcgctgccgtcgtcgtcctcccgcgggccggccccgctccgcgcgtccaccgaggaggcggtggaggcgcccaaggggttcgtggccccgcagctggaccccagcacgccgtccccgatcttcggcggcagcacgggcgggctgctccgcaaggcgcaggtggaggagttctacgtcatcacgtggacgtcccccaaggagcacgtgttcgagatgcccaccggcggcgccgccatcatgcgggaggggcccaacctcttgaagctggcgcgcaaggagcagtgcctggcgctcggcaccaggttgcgctccaagtacangatcacctaccagttctaccgcgtc

SEQ ID NO: 14532 - DNA, 443 bp, Zea mays
  Clone ID: LIB36-016-Q2-E2-H6
cacacatactgcatacacaacgcagagcatcagaagcagctgcgatctgatcgacatggctgccgccaccatggctatcacctcccgcgcgctcgtcggcaagccggcggctggcacgagggacgtcttcggcgagggccgcatcaccatgcgcaagaccgccgccaagcccaagccggcggcgtccggcagcccatggtacggtgccgaccgcgtcctgtacctgggcccgctgtccggctcgcccccgagctacctgaccggcgagttccccggcgactacgggtgggacaccgcggggctgtcggcggacccggagaccttcgccaagaaccgcgagctggaggtgatccactgccgctgggccatgctcggcgcgctcgggtgcgtgttcccggagctgctcgcccgcaacggcgtcaagttcggcgaggcggtgtggt

SEQ ID NO: 14533 - DNA, 455 bp, Zea mays
  Clone ID: LIB36-016-Q2-E2-H7
accaaaccagaccagaccagaccaatggccctgcgcctaccaatctcatcgtcccacgggctggcctccacgccggcgccaatctccacgacgacgtgccggccggccgtcttggcgacggccgcggcccagaagaggagcctgctgctggcgacggcctccgagacgaggggagtcgcgccggtgaggtccagcgggatcgagacgagcacggtgggtctgggatgtgaggccgtcaccgggcaggtcacggaggtcaacaaggacaccttctggcccatcgtcgaggccgccggcgacaaggtcgtcgtcctcgacatgtacaccgaatggtgcgggccttgcaaagtgatggctccgaaattccaggagatgtctgagaagaacctggatgttgtgttcctgaagctcgactgcaaccaggacaacaagccgcttgcgaaggagctgggcat

SEQ ID NO: 14534 - DNA, 456 bp, Zea mays
  Clone ID: LIB36-016-Q2-E2-H8
cccacgcgtccgagcgagcatgtatcccgcaccgaaacacacacgcaaacggcaccaccaccaccaccaccaccgtccggcgaggtagggaggcagcggcgccatgggttgttatcctcccctggccaagatcgtgtctagagcgctcggaaaatgcaacggcgggcgcgagagatggcgggaagggaggctggagctggactttgatcacgccttgggctgtcagcccacggagacccactacatgcggccggtggcgcgcacggtgaccttcgccagcaacaactccatctacgtgatcccgccgtcgccgtcgccacaaccgcagcagcagaacgcaccagcagagccacagcgaccccaaacgccgccccggcacgagcccgagcagcacgacggtgcacccgaatcccaaccccaagccgagcaacccgaggcacccgcgcagacggaaga

SEQ ID NO: 14535 - DNA, 446 bp, Zea mays
  unsure (1)..(446): unsure at all n locations; Clone ID: LIB36-016-Q2-E2-H9
ccctgctttgttcagacttcagagcccttcctcttgtgtccgtgcaaattggtgatacttgaacagggatctcctccatattagtgagcaggatgtataatcctcccagtgggcaggacatgtcctactacgatcatgtgcagaagcgccatgaggagaagggctgcctatatgcatgcctgttcactgcgtgctgctgcttctgctgcttcgagacctgtgagtgctgcctcgaggccatctgctgctgctgctagttctgcttggagggcatgggcgtccatcatcgtggagatgtggccatgcgggacnaccaccgccgaataaaatgctgtacttatatgcacgcacgttagaaatgcattagtgtctgtttgatgtgatcttgtgtgtgtgtgaaatgcattagtgtctgtttgatgtgatcttgtgtgtgtgcgcgcgca

SEQ ID NO: 14536 - DNA, 341 bp, Zea mays
  Clone ID: LIB36-017-Q1-E1-A10
actcgtgggtcgacgcaagcctctaaagtgacgtcgtattaaagcgtgggcggccgcgtgggccggtatctggatcaaggaccatgtccgggacttcctcgtgaaggactcgagcaggccagtgaacatcaggtgcgcgatgattcagatagactgcacgcacacgaaaggcggcctctgcgtggattcggtcgtggtgaaaccgcagcagctctcgcagaacagagcgccctggacttacgtgtagactcgtcgaacaagttgctgctgctgtctacggacgatggatatgatgcacagtttccttttggcttgttctactaccagagtgtcgttttgtt

SEQ ID NO: 14537 - DNA, 423 bp, Zea mays
  Clone ID: LIB36-017-Q1-E1-A12
ggcaaatgcaagtttgacaagtccaagattgttgcttcagttcagaacttcagtgttgtgtctgtggacggggctcaaatttctgctaacctcatcaaacatgggccattggcaatcggcatcaatgctgcctacatgcagacatacatcggaggcgtgtcatgcccatacatctgtggcaggcaccttgaccatggtgttctccttgttggatatggtgcttctggtttcgcccccattcgcctgaaggacaagccttactggatcatcaagaactcgtggggcgagaactggggggagaacggatactacaagatatgcaggggttccaacgttcgcaacaagtgcggcgtcgattccatggtctctaccgtgtccgcagtccacgcctcgaaggagtagactctggtcagcggtgataat

SEQ ID NO: 14538 - DNA, 388 bp, Zea mays
  Clone ID: LIB36-017-Q1-E1-A2
cgatatgtgcaagaacgtcaggtacgctaacgtctatgaccccgacgacgactggccggagcccgccgaatacacgcacatgctcggcgtcctaaagaataggtactatgatctgatcatctccacgaggctggcggggatcgggcacgctctcttccttttcatgtcgtcggcgcgcgacaaggtcggctacgtttaccccaacgtcaacagcgtcggcgcgggcctcttcctcaacgagatgttcaaggcgccgactaacaacctcgccgacggcgggtaccacatgtataaagacatgctggagtggatcggccggccggcgaaaaacgttccccagcagccgacacagccgctgcgggtgtccatctccaagaagctacgggcg

SEQ ID NO: 14539 - DNA, 432 bp, Zea mays
  Clone ID: LIB36-017-Q1-E1-A6
cccacgcgtccgggcaacccgagcctgatccacgcgcagagcatcctggccatctgggcgtgccaggtggtgctcatgggcgccgtcgaggggtaccgcatcgccggtggcccgctcggggaggtggtcgacccgctgtaccccggcggcagcttcgacccgctcgggctcgccgacgacccggaggcgttcgcggagctcaaggtcaaggagatcaagaacggccgcctcgccatgttctccatgttcggcttcttcgtgcaggccatcgtcaccggcaagggtcccgttgagaacctcgccgaccacctcgctgaccctgtcaacaacaacgcctgagcctacgctaccaacttccgtccccggcaagtgagccagggcatatacatacttgtatgcgtgttccgtagacatacgtattcgtatatgtac

SEQ ID NO: 14540 - DNA, 358 bp, Zea mays
  Clone ID: LIB36-017-Q1-E1-A8
accacgcgtccgcccacgcgtccggtccacagcggcgaggcgaccttgcgacctccgttcctctgcgctccggctgagttgctgatttgggataatcatgttctctctgagtgaatgaacatgtctgggaatgatgataagccacatgctgctgcaaacagaataaaggcagccacgttatcagtgactaagggattgagcagggctcaagctgaatgggctgcgactgctgctacccgcaatgtgaatgcctatgggcagaaggaagacggacgaagccgctggcaggagacgaagaaagccaagagtcagatgtatctgatgagtacagacaaggttgcgatgctgggcactgtga

SEQ ID NO: 14541 - DNA, 426 bp, Zea mays
  Clone ID: LIB36-017-Q1-E1-B10
ctcgcgggtcgacgcaagcctctagtgtgattcatggcaaccgcattgccggcgggccgctcggcgaggtcgtcgacccgctgtaccctggcggcagcttcgaccccctcggcctggccgacgaccccgaggccttcgccgagctcaaggtgaaggagctcaagaacggccgcctcgccatgttttccatgttcggcttcttcgtccaggccatcgtcaccggcaagggcccgctcgagaacctcgctgaccacatcgctgacccagtcaacaacaacgcatgggcctacgccaccaacttcgtccccggcaactaagctcaacggctatgctatgcaacttcattgtctttcggatcggagagggtgtacgtacgtggattgattgatgctgcgagatgcatgtgtgtcttttgtgtcacgttgc

SEQ ID NO: 14542 - DNA, 420 bp, Zea mays
  Clone ID: LIB36-017-Q1-E1-B11
acaggactaggactcgcgggtcgacgcaagcctctacacacacgttctggcaggacgaggggcgcagccgtgtggaggccgagctcgtagaggcgctcgccaacctcgaggcgcagaaggaggaggctgttaaggcgctcgacgcccagatcgcctcgctcagtgatgagatcgtcaagaaggtgctcccatccgcgtgatgaaaccaaaccggccctgccttatcctacgactatagttatatgaacatcataaattaatgataattttgaagaaattggccgatgactccgacactgtactcatgaaagattattggatgggttgtgtccaccgcctgtgttgggtgtggattgttgtagactcgcagtgatctttctcgataagcttgtacagttcagtacatacagacacacattg

SEQ ID NO: 14543 - DNA, 337 bp, Zea mays
  Clone ID: LIB36-017-Q1-E1-B2
cgggtcgacgcaagcctctagactcagtcgcagtatggttcaagaccggcgcgctgctcctggacggcaacaccctcaactacttcggcaacagcatccccatcaacctggtggtggccgtgatcgcggaggtcatcctcgtcggcggcgccgagtactaccggatcaccaacggactggacctagaggacaagctgcaccccggtgggcccttcgaccccctgggcctggccagcgaccccgaccaggccgccatcctcaaggtgaaggagatcaagaacggccggctggccatgttctccatgttcgccttcttcatccaggcctacgttaccgg

SEQ ID NO: 14544 - DNA, 454 bp, Zea mays
  Clone ID: LIB36-017-Q1-E1-B3
tcgcgggtcgacacaagcctctaatctgacttctcatagaaatctgccaatttgaacacaggtcttttccaatctgagaaggccgctactttgtcaaggcttcataaacttctatcagtctgctgaggatttcggtgcttcattaaggttctgggagtgagaagatgaggatcaactgctgcagcatctggcgcaacaaggcactgaggaggatgtgtttcagtgaaaggggtgctgtgagcagcacccagtgtgtgctcacatcagatgctggcccagacactcttatcgtccgaacatcctttcggaggaattatgctgatcctaacgaagtcactgctgtcattttgggtggtggtaccgagactcagcttctccctctcacaagcacaaaggctacccatgcctgtggaggctactggttggttctacggcacagcaagacgtcgttaaa

SEQ ID NO: 14545 - DNA, 165 bp, Zea mays
  Clone ID: LIB36-017-Q1-E1-B4
gtagaaaaatcagaacattgtccggatgattataatttggaaatgaagaggaaaagaaacgatgggacaaaagggacaattgttccaaataacgggtccaaagtagaaggaatgttaagtcctttgggacaagccaatcacagtggcaaggcacctgttccgaat

SEQ ID NO: 14546 - DNA, 95 bp, Zea mays
  Clone ID: LIB36-017-Q1-E1-B6
cacaggaccaggactcgcggttcgacacaagcctctaaacagacgccgcccacgcgtccggcaccatcctcaatggagaaggacgatgttttttt

SEQ ID NO: 14547 - DNA, 453 bp, Zea mays
  unsure (1)..(453): unsure at all n locations; Clone ID: LIB36-017-Q1-E1-B7
ctcgcgggtcgacgcaagcctctagactgatgtcggaataccgctccactacaagggctccaccttccaccgcgtcatccccgagttcatgtgccagggcggcgacttcacccgcggcaacggcaccggcggcgagtccatctacggcgagaagttccccgacgagaagttcgtgcgcaagcacaccgcccccggtgtgctctccatggccaacgccgggcccaacaccaacggctcccagttcttcatctgcaccgtcgcgaccccttggctcgacggcaagcacgtcgtcttcggccaggtcgtcgagggcatggacgtcgtcaaggccatcgagataggtgggcaccgcaacggctccacctccaaggtggtcaaggtcgctgactgccgacagctctcctagatctctctgatctggtctgttcngccgcccctcctccgtcatcgtcg

SEQ ID NO: 14548 - DNA, 436 bp, Zea mays
  Clone ID: LIB36-017-Q1-E1-B9
actcgcgggtcgacgcaagcctctacagtcactcgtgggacggcgcgcccgacaacttccacttcgtggaggactgggtcaggatcggcagccctgccaagaacaaggtgaagaaagagcacgcatcggtgccgttcgatgaccagtgctccatcctggagaaggaggccgtgaacgtgtcgctccagaacctcaagagctaccccttcgtcaaggaagggctggccggcgggacgctcaagctggttggcgcccactacgacttcgtcaaagggcagttcgtcacatgggagcctccccaggacgccatcgagcgcttgacgagcgggttccagcagttcaaggtcaatgtctatgacaagaagccggagcttttcgggcctctcaagtccggccaggcccccaagtacatggtgttcgcttgcttcgactcccg

SEQ ID NO: 14549 - DNA, 399 bp, Zea mays
  Clone ID: LIB36-017-Q1-E1-C1
cgggtcgacgcaagactctatcaagtcgtacgtattcagctcatcttgctccgccttctgcttctgcgcatcctccaaggatcgtgatggccatggccacgcaagcctccgcggccacgcgccacctggtggccgccgccgcttccgcctgggcgccgtcggcgaagccgcggcagctaagctcacagctcgcgctgccgccgtcgtcctcccgcgcgccggccccgctccgcgcgaccgccggggaggcggtgaccgatgaggcggcccaacgggttcgtgggcccgcaggctggaccgcagtaggccgtctccgatcgtctgcggcagcacaggcgggctgctccgcaaggcgcaggtggaaggagttctacgtcatcacgttgggtgtcccccgaa

SEQ ID NO: 14550 - DNA, 445 bp, Zea mays
  Clone ID: LIB36-017-Q1-E1-C11
ctcgcgggtcgacacaagcctctagatcgactcgtgtgagcaccttgtctcttgggagaaggagaatgtctccagtgaggctcttgaggctgcccgtattccctgcaacaagtacatgaccaagtctgcaggaaaggatgccttccaccttcgggtccgggttcaccccttccatgtccttcgtatcaacaagatgctttcgtgtgctggggctgataggctccagactggaatgaggggtgcctttggcaagcctcagggcacctgtgctagggtggacattggtcaggtactcctttctgttcgatgcaaggacaacaatgctgcacatgccagtgaagctctgcgacgcgccaagttcaagttccctggccgccaaaagattattgagagcagaaagtggggcttcaccaagttcagccgtgccgactacctgaagtacaag

SEQ ID NO: 14551 - DNA, 418 bp, Zea mays
  Clone ID: LIB36-017-Q1-E1-C3
caccaaggcgagtaagtggaggagcagccatggcttcatcggtggccgccgcggcgagcacattcctgggcacccgcctggcggacccggcgccacagaacgggcgcatcgtggcccggttcgggttcgggttgggcggcaaggcgaagcctgctccgaagaaggtggcgaagacatcgacctcctctgaccggccgctgtggttccccggcgccgtggcgcccgactacctggacggctcgctggtcggcgactacgggttcgacccgttcggtctcgggaagcccgtggagtacctgcagttcgagttggactcgctggaccagaacctggccaagaatgaggcggcggcatcaaccggacccggtttgagtcctccgaagtcaagttcaccccgttgcagccctacaccgaggtg

SEQ ID NO: 14552 - DNA, 424 bp, Zea mays
  Clone ID: LIB36-017-Q1-E1-C4
acttcctcggcctcgagaagttcctcgccggctccggcgacccgtcctaccccggcgggcccctcttcaacccgctcggcttcggcaagaccgagaaggagatgaatgagctcaagctcaaggagatcaagaacggcaggctcgccatgctcgccatcctcggttacttcatccaggggctcgtcaccggcgttggcccgttccagaacctgctcgaccacctcgccgaccccgtcaacaacaacgtgctcaccagcctcaagttccactagaacgttggtgcatcagcatacctgctgccgccgccgccagttgtttgctgtggaaagctagatgcatgcgtgttgtaaagggaactgaagcgttgcatcggtcatgattcatgcatggccagcctgctgccggtaaaacaaactagtattga

SEQ ID NO: 14553 - DNA, 344 bp, Zea mays
  Clone ID: LIB36-017-Q1-E1-C6
ctcgtgggtcgacgcaagcctctaaaatgagtcctataatgagtgcgaggggaaggagaagttcaagtgcggctccaacgttttctggaagtggtgaagcagctagcagcagcgtctgatgggaatggaggagatcatcacctgtcttgtcgaccctagagatgtccaaactgcagggaaattaaatcttcatgtgtaattgtgctcattctgtttcaatcatctcaacatccgatcatgaatctcttgcattattaactggctcgatcgtcttctcagtttaagacattggaggctgctttgtttgtttcagacgtccttcttaagatgatgctatattttgt

SEQ ID NO: 14554 - DNA, 420 bp, Zea mays
  Clone ID: LIB36-017-Q1-E1-C9
atcagccatggcgcacgcctccgccacgtcccgccccctcctgggtcgccccgccggcaccgcgcggccccacctcgccgtttcctcatcctcccccgcctcctcgatccgcttcccccgcggcgccggcggcggcgccagcagaacggccgtctctctccgcgcccccacgcctccagcggcggcaacagcagcagcaacatctggtagcattgctccagcaatttcattgactgaaaaggccttgaaacatctgaaccaaatgagagctgaacggaatgaagttttgtgcttgagaattggagtgaaacagggtggatgctcaggcatgtcttacaccatggaatttgaaaatcgagagaatgccagccctgatgattctgttgtagagtatgatggttttgcaatagtctgtgaccc

SEQ ID NO: 14555 - DNA, 446 bp, Zea mays
  Clone ID: LIB36-017-Q1-E1-D1
tcgcgggtcgacgcaagcctctacagatgagtcctaatacaagtcgaggagctcgagagggcaccaataatggccggcgtgaactccagcgtcgtcgggctcaagcccgccgcggcagtgccgcatgccgccgccgcctcatcgccggcgaagcgggtgcagctggccgcgcccgagggccgccgcgccgctctgctcggcctggcggccgtcttcgccgtcacggccaccaccgggtcggccaaggccacgatcttcgatgagtacctcgagaagagcaaggccaacaaggagctgaacgacaagaagaggctggccaccagtggagccaactttgcgcgcgcctacaccgtggagttcggcaactgccagttcccctacaacttcactggggtgccagggacctcgccaagccagaagaaagtccccttcaatcaagcgatgac

SEQ ID NO: 14556 - DNA, 419 bp, Zea mays
  Clone ID: LIB36-017-Q1-E1-D12
aaaagaacagttgatccatcacctcgctcctaatattaccaccaaccaagccaagaacaagtgtttgagttcgcagttgaccccccacctgcagctgcaatgcaaactctctaacaaagagaggtcgagatgctgctctctttcccttcctcactactacaatatgtactaacaccaatttgccctgttctacaacctcaaatcttcctaagtagtaggcaggaggctagcagtagtacggtaaatacaacatgaatgaaacaaagcagcaatctttttcggcagcgttactgtaactgtactacaagcagttccacacagtatacggcggtcatctctgcaccatggcgtcggcacgcccgtcctcgagcctccagctggtgctccggctcctggacccacggctgaaggcggcgctg

SEQ ID NO: 14557 - DNA, 359 bp, Zea mays
  Clone ID: LIB36-017-Q1-E1-D4
aggataaggcgaatgtctccagtgaggcgctcgaggctgcccgcattgcctgcaacaagtacatgaccaagtctgcaggaaaggatgccttccaccttagggtccgggttcacccgttccatgtcctccgtatcaacaagatgctttcctgtgccggggctgataggctccagactggaatgaggggtgcctttggcaagcctcatggcacctgtgctagggtggacattggtcaggtcctcctttccgtgcgatgcaaggacaacaatgctgcccatgccagcgaagctctgcgtcgcgctaagttcaagtttccttggccgccaaaagatcattgagagcacaaagtggggcttcac

SEQ ID NO: 14558 - DNA, 162 bp, Zea mays
  Clone ID: LIB36-017-Q1-E1-D6
aagactctaaatcgagtcgtattatacaaggatattgcttggtcttgattgatgatgtcgactgaaatcagacctgctcactcaggaccagccaggacccgtctaatccagtcagagagacgtacgcgatgatcgcctcggaatttctggggcggctcctgc

SEQ ID NO: 14559 - DNA, 450 bp, Zea mays
  Clone ID: LIB36-017-Q1-E1-D9
ctcgtgggtcgacgcaagcctctagactgcgtcctcctatgccgccgtcaccgccccttccttcgccgcaccagcgccagcccgcgccgtggtcagaaggaggtccttcaccgtgcgcgcctctctccgcaaggccaccggcaccgccgccgtggcaatggctgccagcgccctgcttgccggcggtgccatggcccaggaggtgctgctgggcgcaggcgacggcgggctcgtcttcgagcccagccagttcaccgtcaaggccggcgacaccatcacattcaagaacaacgccggcttcccgcacaacgtcgtcttcgacgaagacgaggtgccgagcggcgtcgacgccaccaagatctcgcaggaggagtacctcaacgcgccaggcgagacctactccgtcagcctcaccgtgccgggaacctaccggttctactgcgagccgca

SEQ ID NO: 14560 - DNA, 388 bp, Zea mays
  Clone ID: LIB36-017-Q1-E1-E10
tcgtgggtcgacgcaagactctaaagtgagtcgtaagattcttggcagccataccaatccgggaactacaggcggacatcaagaaaggactgatggcatcaaccccattgcaccaccgcctccagattgagttccagtacacccagtcgtccccaaaagagactgcatcagccactcagcttcttaccatggaggccccctttgagttctcatggcctgagccaccgccaacaatggaagtcacactaacacctgccgtctctgttgtgtagcttgtcaccctggtggccaagaagccaaagacatgagacaacggcctgccctgatgttcggcatggagaacccttttttccttggttccctgcgtgaagggggagcctagatgaag

SEQ ID NO: 14561 - DNA, 439 bp, Zea mays
  Clone ID: LIB36-017-Q1-E1-E11
ctcgtgggtcgacgcaagcctctacagtgacgtcgctgacctacgcgtccgcggacgcgtgggcaacgccacagcttgcgcccgcaatggcactcgtctccgcctcctcgtcctccaccaccgccgtcacggcgctccccaggaatgggcagcgggcgtcgtcctccttcctcggcggcaagacgctgctgagacaggccgaggcggcccggccgtcgttcgccgtgcgcgccgcggcggaccccaacaggccgatctggttccccggcagcacccctccgccgtggctcgacggcagccttcccggcgacttcggctttgatgcctggggcctcggatctgacccggagagcctgcggtggaacgtgcaggcggagctggtgcactgccggtgggcgatgctcggcgcggcgggcatcttcatccccgagttcctgac

SEQ ID NO: 14562 - DNA, 417 bp, Zea mays
  Clone ID: LIB36-017-Q1-E1-E3
gggtcgacgcaagcgtctagtaaagatcatataaatgctgtcactctcttacttgaagatgctttaatggatagagatctggttcaccggcagactgctgcatctgctgttaagcacatggctctaggtgttgctggcttgggttgtgaggatgctcttgttcatctgcttaactatgtttggcccaacatatttgagacatctccccacgttataaatgctgtcatggaggcaattgagggtatgagggttgcgctaggtgcagctgtgattttgaattattgcctgcaaggtctcttccatccagcaaggaaagtacgtgaagtttattggaagatatacaactctctgtacattggtgcacaggattcacttgttgcgtcttatcctgccctggaagacaatggggataacata

SEQ ID NO: 14563 - DNA, 366 bp, Zea mays
  Clone ID: LIB36-017-Q1-E1-E4
tcgtgggtcgacgcaagcctctacacagacgtcgtactaagcacttcgacgtcgcacgggcgctgcacacagacacaccaagcgtcggcaccaatggcttactaccaggaggtggactactgctcggaggaggtgaggtcggtggccccggccggcttcggccgccacggaggcggcgtccagcagcacgtcgtcaaggagaagttcgaggaggtcgacacggtctcacgcgccggcgccaaccaccaccaccaccaccatggtcaccacggcggccacggcttcgtggtgcgcgagaccagggtcgaggaggacatcaacacctgcaccggcgaagtccacgagcgcagggagagcttcctcgcc

SEQ ID NO: 14564 - DNA, 466 bp, Zea mays
  unsure (1)..(466): unsure at all n locations; Clone ID: LIB36-017-Q1-E1-E5
acaggactaggactcgcgggtcgacgcaagcgtctaggcgtagtgatagaaaggtgtctgtcgacgttcctgatgtacgtggaaggacagagattctaaaagtgcatggtagcaacaagaaatttgattctgatgtttctcttgatgtcatagcaatgagaacacctgggttcagcggagcagacttggcaaaccttctgaatgaagcagccattctggctggaagacggggaaggacagcaatttcttcaaaagagattgatgattctattgacagaattgtagctggtatggaagggaccgtgatgacagacgggaagagcaaaagtcttgttgcttaccatgaagttgggcatgcaatttgcggaactttgacgcctggccatgatcctgtccanaaggttaccttagttccaaggggtcaagctcgtggtcttacatggtttatcncgatggatgacccaac

SEQ ID NO: 14565 - DNA, 445 bp, Zea mays
  Clone ID: LIB36-017-Q1-E1-F1
tcgcgggtcgacgcaagcctctacaatcagtcatctgagattggcccgtcggcagaacaagtgcacgcgggaccgggcaacatttcccgctgcagccaacaagcagagggggcgacgatatatagccacgggcggccgttgctggatccggcatcttcctcgatcggcaagacgataggatggggttccacctgctggcgttcgtggcggcgaggggcctcatgcaggcgttcaacctgtcggcgccgctcagcctccggctgccgctcgcgcgccacctgccggaggccctcgccgtcctgtacggcgtgctcgctgcgcaagccgcgtggctcaacggcgccctggcgcgcggcgccgcctggagccacagccggagccggggcggcgtcgacgagtacgtccgccacgccatgctcagcgtctacgactgagaccacggcgg

SEQ ID NO: 14566 - DNA, 383 bp, Zea mays
  Clone ID: LIB36-017-Q1-E1-F10
gtcgacacaagcctctacacagacttctgagtacagcctaaagcagtctgaggaatccttcaacgacctctgtccagcaagcgctacatgggcttgcatactgtgtgtatggcaaacctgacgtgcggcgtttgatgttcgacgtgtttgacttcgaacaggtccagcctaaagcagtctgaggatcttcgccattggtaccgatgctagagttgctgaatgctgaccaacacgaccccaatggcagtggtacaaatgctgtagattcttgaagtcgtccattcgacaggagatctttcgattctcaagcctgaagccctgaaccctgagctgggacagctgattagccactgggtcctgtctctcctgaaaccgtcactgtt

SEQ ID NO: 14567 - DNA, 384 bp, Zea mays
  Clone ID: LIB36-017-Q1-E1-F11
gacgacactggatcttttatttatgtttttattcggtagcgaaatacagtatatatatatataacatagtggtacacactgctgatgcatgggagcagcaggggcgttattttatgcattcatattcgttacaggcaggcaagcagcatgcatactgcatatgcatgcatgcagatgatccgatccatcgttttagttattagttggggttcacgtagagcccgatcgcgtccaggcaatctccagagcggccaaagaagccagcgacgtggccgttgttcatcaccttgacacggaacggggtgccctcgtccctgccgtacggtccgtaagcgcgtttgttggtgacgaatttgagagacttgaccagattgtcaatgttgt

SEQ ID NO: 14568 - DNA, 379 bp, Zea mays
  Clone ID: LIB36-017-Q1-E1-F3
accacgcgtccgcgatcttattcgtgggctttatccagaagctgtatccattggcgaagatgtcagcggaatgcctacattttgtatccctgtccaagatggtggtgttggttttgattatcgtcttcatatggctgtcccagacaaatggattgaacttctgaagcaaagtgacgaatattgggaaatgggtgacatcgtgcacaccttaacaaatagaaggtggcttgaaaagtgtgtcacttattgtgaaagtcatgatcaagctcttgttggtgacaagacaattgcattctggttgatggataaggatatgtatgatttcatggctctggacaggccttcaacgcctcgcatcgatcgtgggatagcattacat

SEQ ID NO: 14569 - DNA, 459 bp, Zea mays
  Clone ID: LIB36-017-Q1-E1-F5
ctcgcgggtcgacgcaagcctctacacatgacgttctgctcactcttgcgattcgctcgctcgatcctagcttcccttccaagaagcgcagcgcccatggccatgtccacgcaagcctccgccgccacgcgccacctgctggccgccgcctgggcgccggcggcgaagccgcggcagctgagctcgcagctcgcgctgccgtcgtcgtcctcccgcgggccggccccgctccgcgcgtccaccgaggaggcggtggaggcgcccaaggggttcgtggccccgcagctggaccccagcacgccgtccccgatcttcggcggcagcacgggcgggctgctccgcaaggcgcatgtggaggagttctacgtcatcacgtggacgtcccccaaggagcacgtgttcgagatgcccaccggcggcgccgccatcatgcgggaggggcccaacctcttgaagctg

SEQ ID NO: 14570 - DNA, 434 bp, Zea mays
  Clone ID: LIB36-017-Q1-E1-F6
aacggacgcgtgggcggacgcgtgggtgacatcggagctgcttgagtggctattctcggggaagaccggggaagaagtgaaaaccaaagatggcacaaacggagcagcggttcctgctgtaacagggatcgcggaggtacgcaaaactgcggttgcagaaaacggtgtctcgggagttggggtctccgagcacagagtgtttcttctcggtgaaaacaggtgggaagacccaaccagactgacgcagaacaaaaagacagccagcaccggcactagtgcatctactaagacatgcatctcctgtcgaggcgaaggccgcctcatgtgcttagaatgtgatggaacaggtgagccgaacattgaaccgcagttcttggagtgggtcggtgaagatacgaagtgcccatactgtgaaggaattgggtccattttgt

SEQ ID NO: 14571 - DNA, 429 bp, Zea mays
  Clone ID: LIB36-017-Q1-E1-F7
ctcgcgggtcgacgcaagcctctagactgactcgtactatacctgggcccgctgtccggctcgcccccgagctacctgaccggcgagttccccggcgactacgggtgggacaccgcggggctgtcggcggacccggagaccttcgccaagaaccgcgagctggaggtgatccactgccgctgggccatgctcggcgcgctcgggtgcgtgttcccggagctgctcgcccgcaacggcgtcaagttcggcgaggcggtgtggttcaaggcgggctcccagatcttcagcgatggcgggctggactacctcggcaacccgagcctggtccacgcgcagagcatcctggccatctgggcgtgccaggtggtgctcatgggcgccgtcgacgggtaccgcgtcgccggcggcccgctcggagacgtgggcgac

SEQ ID NO: 14572 - DNA, 423 bp, Zea mays
  Clone ID: LIB36-017-Q1-E1-F8
agggatgctaatatacttattgtgtgacatagatcccctcacaaaaagagcagctgcctgcctgtgtagggacaacagatcacggttctgagatatgaactgtgtggtctgcaacggcctgctcgtcctgcagaagaaacaaaaccgatcattgccttgatacttgactgataatccagtttcgattcgtgtggctaagacttcctctgtggtgtggacgcacgtacgcaggtgggtggctgcgcagagcgtgttctaccacctgtacaaccaggtgtcgtacatgtcgctggacgagatctcgccgctcacgttctccatcggcaacaccatgaagaggatctccgtcatcgtcgcctccatcatcatcttccagacgcccgtccagcccatcaacgcgctcggagccgccatcgccatcct

SEQ ID NO: 14573 - DNA, 423 bp, Zea mays
  Clone ID: LIB36-017-Q1-E1-F9
aggacgcgtgggcggacgcgtgggtgctttctttgagataaccctgcttgcattctgaagagatgttgagcaaacttctacagcttcctgggctaatccagtgaagacagaaggctctaagcagcgatatagctttgaaagcaaccccaataaatgggagaaatccaactccttatgtgtgacagagaactcaatatcaaatggatcacctaagaaggattctcaggggtcaggtctcattatttgattggtccaggtcaacatcactagctaggaccttttctcctcgtgttttggagaaccaaattgatgccagaaaagagttggagaaaagccttaaagctacctgtgaagagtttataatgtccataactaaattagtagttgacccaatgctttcgtttgttactaaggtaactggcg

SEQ ID NO: 14574 - DNA, 433 bp, Zea mays
  Clone ID: LIB36-017-Q1-E1-G12
cccacgcgtccgtttttttttttttttcagcgaatagtttaaattcaaacaacatttattcatgattaagccatatgcggtcgcacgatagttttgggtaacgagaacacaactggtccatgaaaccagctcagtcacgactcacgacacaaaccatacaaatactttgaaagacagcaccatccatgggcaatggcagagacactagataacccagatacagcagcagcttcaacgactgatggcttaataaccaccgcgaagacggagcaccaggtggagggtgctctccttctggatattgtagtctgcaagggtgcgaccatcctccagctgcttgccggcgaagatcagacgctgctggtctgggggaatcccctccttgtcctggatcttagccttcacgttgtcgatggtgtcagagctctcaaac

SEQ ID NO: 14575 - DNA, 290 bp, Zea mays
  Clone ID: LIB36-017-Q1-E1-G2
tcgtgggtcgtcgcaagcctctacagtgactcgtagaaaaactgaggagcatcatcaccgatgtacaggagaacaacgggggtgactctgagctgcaatgcgggcgcatgacagcctgcgtggaacgcccatatgggcatgaatcaccctaccacttgatgtacgacaatctcgtcttggtcgcaggaggcattggaatatcgccattcttggcgatcttgagcgacctaatccacaggatcgaggagggcaagtaatgcatgcgcaacaacgtgctggtcctttggtca

SEQ ID NO: 14576 - DNA, 402 bp, Zea mays
  unsure (1)..(402): unsure at all n locations; Clone ID: LIB36-017-Q1-E1-G3
ctcgcgggtcgacgcaagcctctaaaatgagtacgctgcatggcgagcagcaccatggccctctcctccacggccttcgccggcaaggccgtgaacgtgccgtcgtcgtccgccttcggcgaggcccgcgtgacgatgcgcaagacggcggcgaaggccaagccagcggcggcgtccgggagcccgtggtacggccccgaccgcgtgctgtacctgggcccactgtccggcgagccaccgagctacctgacgggcgagttcccgggcgactacggctgggacaccgcggggctgtcggcggacccggagacgttcgccaagaaccgggagctggaggtgatccactcncgctgggccatgctgggcgcgttcggctgcgtcttccccgagctgctcgcccgc

SEQ ID NO: 14577 - DNA, 408 bp, Zea mays
  Clone ID: LIB36-017-Q1-E1-H10
acccacgcgtccggcaaccggtccaacactttcacgctcaggcgctcagctctagcaatggctgcctccaccatggcgatctcctccacggcgatggccggtacccccatcaaggtgggctccttcggcgagggccgcatcaccatgcgcaagaccgtgggcaagcccaaggtggcggcgtccggcagcccctggtacggccccgaccgcgtcaagtacctcggccccttctccggcgagcccccgagctacctcaccggcgagttccccggcgactacggctgggacaccgccgggctgtccgccgaccccgagaccttcgccaagaaccgcgagctggaggtgatccactcgcgctgggccatgctcggcgcgctcggctgcgtccttcccgagctgctctcccgc

SEQ ID NO: 14578 - DNA, 418 bp, Zea mays
  Clone ID: LIB36-017-Q1-E1-H11
gaatgagtcgcttgacattaggtgcctccaaggtatggcttcagatgagaaaaggaacctatattttgtgtcaacaaatgcaacgtccacatttcgttccatagtttcaagttatcctggacggttgactcttgtcacaatacagtgcccaaatcctgacttcaacaaagagcaaaataggtggagaatggtgcgaagaatgctcattgaagctatcgtcgaccttcttcataccaatggacaggtttatctgcagtcagatgtggagtccgttctgctcgtgatgaaagagcagttcctctcctacagcaagggtcagcttgtcacggacggcgatggtggcaactgcatcgataacccgttcggcgtggtatccgactgggagcgccatgtcctcgctcgcggagctcccatgtac

SEQ ID NO: 14579 - DNA, 134 bp, Zea mays
  Clone ID: LIB36-017-Q1-E1-H12
actcgtgggacaacacaagactctaaaatgagtcgtacgacgtcaggccggtttgctgtattctgctacctggtagcgtttgcgtgctatatatgctacggtgaaagtgaaataaatctgtggttccttgtgtg

SEQ ID NO: 14580 - DNA, 426 bp, Zea mays
  Clone ID: LIB36-017-Q1-E1-H2
tcgcgggtcgacgcaagcgtctagatgggctcgcagcagctgctgatggggtgggtggagtcgaagcggtgggtggacttcttcaacccggactcccaggccgtggagtgggccacgccctggtcccgcactgccgagaacttcgctaacttcaccggcgagcagggctacccgggcggcaagttcttcgacccgctcggcctcgccggcaccgtcaaggacggcgtctacatccccgacgtcgacaagctcgagcggctcaagctggccgagatcaagcacgcccgcatcgccatgcttgccatgctcgccttctacttcgaggccgggcatggcaagacgccgctcggcgcgctcggcctatgatttgcatgctgccaatgtgaaccagatggggtggttcctctctgtttttccttccttcct

SEQ ID NO: 14581 - DNA, 402 bp, Zea mays
  Clone ID: LIB36-017-Q1-E1-H4
gggtcgacgcaagcgtctacgcagttcctcagaatattgaaagagatgactaacaccatcaataattagtacagttccatcatgggctatatgttcttcttcttccacaaaattgggcatctgtatggttcaaattttaagaacctggttatcctagagatgagaatctcttgatacttcatccttgatatcatgagaaaggagacatcatgttgcaataactgatgcaattcttctgaatattggaagaaatgactagcaccatcaataactagtacagttttaccatgggttatatgttcttccacaaattggcatctatatcattcagatctgaagaacttggtcatccctagagatacgaattcactttcattttttttggtcggttataaaaaaata

SEQ ID NO: 14582 - DNA, 390 bp, Zea mays
  Clone ID: LIB36-017-Q1-E1-H6
cccacgcgtccgcccacgcgtccgccgtgctccacttggcgagaacacagtcctcttgaggggccccaagaatgcccgtgaggcggtgaggcacttcggcaaggctcctggagtgccgcacagccacaccaagccatatgtgcgctccaagggaaggaagttcgagaaggctcgtggcaggaggaacagccgtgggttcaaggtttaagaaagttgtgggccatcagcatagtaatcacttcctaccgagtagtagcacattttgttgccttggcttggattttgaaagatatttgaaggattttcgtgccttgtctactggttactggttgaacaagaagacaatgttcttttgcaaaagaaaatgggtggggataaaaaaaagggggg

SEQ ID NO: 14583 - DNA, 341 bp, Zea mays
  Clone ID: LIB36-017-Q1-E1-H8
cgacgcaagcctctagcatgcgtcgtgatacgatggccgcgctccgcctcgcctccttcaccctccgccccgccgccgcctcttccggcgcgacctcatcggctccccggtccgcctccttctccagcgcggcgcgggggctcccctctctctgcctggccccgccccgccgccgccgcggggacctcgccaagccccgcgccgcggtcgaggccgcggcggagagctacgcatccgcgctggcggaggttgccgtcgagaacggcacgcctcgagcagacggtctctgacctccagaagctggtgaagatgttcgtcgaacgaggccgtcgccgagttct

SEQ ID NO: 14584 - DNA, 444 bp, Zea mays
  Clone ID: LIB36-018-Q1-E1-A1
cgatctacacacatacatagtttcttctactacacgacgacaaacatggggaagcctgcgaagatcggagagtggggtggatacgccggcgatcgtcgggatctgagggctactccggaccggctgatcgaggtgaaggtcacggcggacaacagcagctgcatccgctccatctccttcatctacatcggagccgatggcaaaccgtacgatgaggggccatggggtttcggccatgctggcacggagtacaagattgatctgtgcaggttcgacgagagcttgacggagatctccgggaccacgggcccagcctacaacattgacaatctggtcaagtctctcaaattcgtcaccaacaaacgcgcgtacggaccgtacggcaaggaccagggcaccccgttccgtgtcaaagtgatgaacaacgggcacgtcgctggcttc

SEQ ID NO: 14585 - DNA, 440 bp, Zea mays
  Clone ID: LIB36-018-Q1-E1-A11
cgctgccgaaccccgcgatgtgcccgagctggccgtggcagtgcccgcctcagcagcagtgccagtgctgccagaagcctccgcctccgccgcccaagtcgccgccgaagccgccgccgtgcacctgttcgagccacgccgcctgtgtctgcggcaagacaccgccggcggtctggccaccgatgccgccgccggtctggccgcccccgtggggcacctgcaacgtcgtcaccgaggagagcccgtgctccgtcatgtgacgctacgcgcttgctttgtcatgtactcgtcgctgttggcctgttgctgtgctgccatcggtactggacctcggtgctacttgggccggtgccattctgtgtagtgaaggtacagtgcatcgtctgcagatgtgcttgcctcctacagtctcttatacgaacgtgtcacgccttgtttta

SEQ ID NO: 14586 - DNA, 409 bp, Zea mays
  Clone ID: LIB36-018-Q1-E1-A12
gccgggcgggaatccaaggaggagctcatgcgggtgcgcaaggagatcgtcgacttccacggcgagatggtgctgctcgagaactacagcgccctcaactacacaggattggttaagattctcaagaaatatgacaagagaactggagccctgatccggctgcctttcattcagaaagttcttcagcagcctttcttcaccactgatctcctgtataagcttgtgaagcagtgtgaagccatgctggagcagctccttccggttagtgaggcatctgtctcaagtgaagatggaaaaggagactctaatgatgaagagaagctggcgaagccaagttcttccttggtaaatggtggtggcatgccagagttagatgagatcgagtacatggagagtatgtacatgaaga

SEQ ID NO: 14587 - DNA, 353 bp, Zea mays
  Clone ID: LIB36-018-Q1-E1-A3
ggaccgacgagcgacgaagcgcgcacaaagagaagaacctcggagctgagatggcacaagccatggcgtcgatgacaggcctctcgcagggcgtcctgcccagcaggcgcgccgacagcagaaccaggacggccgtcgtcgtcgtcagggcgtccgcggagggcgacgccgttgcgcaggcgggccgccgcgccgtgatcgggcttgtggccactggcatcgtcggcggcgccttgtcgcaggcggcgcgcgccgagaccgtcaagaccatcaagattggagccccgccgccgccctccggtggactcgccgggactctcaactctgaccaggcgaggggactcgaactcccc

SEQ ID NO: 14588 - DNA, 311 bp, Zea mays
  Clone ID: LIB36-018-Q1-E1-A6
agagaggagaggcgcagagcatcgacgatggcgagcggcagcatgaagagggagatcagcgagacccacgacaccctccgcttcggcctcaatgccggcgtcaaagccgacctcgcgccggggcatgcgcgccagtccagcgtccaatccgaggccaagttctgggcggacaacaagaagtttgggacataggccaacgacggatccgccttgaacatccgcaaggatctcgatgcccagatcctctcaaggttccaaaggccccctggtgcgttgcgatcaactctgcttggatatgaggcactgacagg

SEQ ID NO: 14589 - DNA, 439 bp, Zea mays
  Clone ID: LIB36-018-Q1-E1-A8
cacaaacccctcgcttactgcacatttgcagccccgctctctcgatcgaatcccaaggaacgaagacgacgacgatggcgtcgtctgcctggttgctccaagcttccacggccttcgctccacgcttctccctcccgtcccgaccccagcccccgctacacctgcgtctccgcggcccccccaaccgtcgccgtggcgtctcactcactgcttcctccgccgcgtccccagaagtcgagaaggagtcctcgccctcgccctcgccctccccgcaggaatctctgtctgctgtcgcggacagtgtgaaggtgctcaaggtggcagccaagacgaggaaagtacctgctccggaaattctctcggcgctgtccaagatcaagaaggcaaaactcgacacgtcggcgttctttgagacactcggtggtaccgagtctcaggc

SEQ ID NO: 14590 - DNA, 373 bp, Zea mays
  Clone ID: LIB36-018-Q1-E1-B1
gtcgacccgtccgtccggcactaccaacaacgccaaggcgctcagcgtcagcctcgtgctccccgtcgccatctcggtgctcgttaacgagtgcggcaagcatgtgccctccagcttccagtgcccgtaatcacatcagctgcggatatgtgctactatgatgtatcaccaccacgaatctatatccgcatgcatgcatcaatgcatgggtgattaagggtttatacgcggtcaaagttatacacgcatatatatgtagcttcatacatggagctgtgggttgtgcattcattttcaaatcatgtaccagtattatattgtagtatcatagaccagtgtgagagttgtggcccttggtgggggtgcttgtaag

SEQ ID NO: 14591 - DNA, 459 bp, Zea mays
  unsure (1)..(459): unsure at all n locations; Clone ID: LIB36-018-Q1-E1-B11
cgccacaccgccgcttttctctcaaatgcagcgcctccaacggtgacaactccaaccccaactccatctccatctctcccacctcgccgcctcggctaacggtgtcggacggcgtcgagtctgtggacgttaacgggttgcgtcgcccgccagcgcccgcctccgtccccgccgcccgcgatccccactggctgcctcgtccgctcacaagtgcggacgtcatggaggtggacgggaaggggctcaaggttgcttaccagggttgtgctggagcgtacagcgaagcagcagcaaagaaggcgtacccgaattgtgagactgtgccctgtgagcacttcgacactgcatttcaggctgttcaaaactgggtagctgatanggccgtactgccacttgagaattcattgggaggtagcatacataggaattatgatcttttgcttcggcatagtttgcaca

SEQ ID NO: 14592 - DNA, 413 bp, Zea mays
  Clone ID: LIB36-018-Q1-E1-B12
cggacacgtgggcagagagctagcatacatcgctagctcactttagcatatatattacataaatattggcatatataaactaaactgaattgaggacgatatggcccgcttggtctcttccggaatcattggtaaggggcacaacatctttgacgatggcggattcggtgaagtccatgctgacccaattaaagtcgagcgtccgcacaagcgtccgccgcagaagcagaatgcggagaatggaacgacgacgaaggttgatgagccaaaggaattgcctaagcacgtgtgcttcaagggagacaacgggctgtacctgagcgctcggatggtggaaggctacccctacctgcagtttgcgtcggacgacataggcgatccaagtgtgaggttcaccacgtacaactacatga

SEQ ID NO: 14593 - DNA, 393 bp, Zea mays
  Clone ID: LIB36-018-Q1-E1-B2
cggacacgtgggtgctccgaggtcgcagacgaccaagaggagaagatggtggccgttctcgcagcaccaccaccattgatggcgggttcagctctcttggggctggatggatgttcaggatcaggtggtggtcccggtcccggccatcgtccagatgatactacaagggacgtacgacattatgattaatatatatatacccagagcggagcagaaagacctgataagggaattagttgggatgaatgaaatggaataaacatgggatgggatgggaatcgtcgtcccgtatatagtttagagtggaggccggtgagtgccaactcaaactctttgtattgttgtttatatctacaaattttgccggaatgaggctacaattattggggaaaa

SEQ ID NO: 14594 - DNA, 395 bp, Zea mays
  Clone ID: LIB36-018-Q1-E1-B3
cccacacgtccgctttgctcttgatccattcgtattcattctaactcaattaatcaaaagctccccctgagttcatgtccaattttctcttgtgcatatttccatatctttgttccaacttgcacatttacatatctttgttccaacctctccccctttgtcattaattgccataaaagggttgttctaaggctctgggaaaatgtacttgtgaatattataccaacttgaaagtactcaataagtttttgatggacaccatatgcatgataaaatccttgacatcacttgcatgaacttattttacgagagagttgctctcttgaattgatgatcacttaaggttgtggatcacttgaagtcttgtatcactcaaaggatatcaattgtatgat

SEQ ID NO: 14595 - DNA, 359 bp, Zea mays
  Clone ID: LIB36-018-Q1-E1-B5
cggacgcgtggggcgttctggagcgcaggcaagctcaatgcgacagcaaccgtcgcgcagctcgatacccttggtgccagggtcatcgccacgtcatccttgaactagcaaaagattcggaaagtggtactgcaattgtatcaccaaacaaggaagaatgaaggggaaccccatggatttgtatgttttctcttctttcttgcatctttaggtggttaattggctttggaataagtgagatggaggacatcgctagaacaattctgttccctgggctgtaatttcaatttgggctggtttcttcatcatgccatggatattatgaataaatttgaggtactttgttaaaaaagagagca

SEQ ID NO: 14596 - DNA, 374 bp, Zea mays
  Clone ID: LIB36-018-Q1-E1-B6
cggacgcgtgggcggaagctcaagttagaagaagcaccagtgcctgatcgatggcggcccaggctctcctctccggccggcagctgctgggccgccccgtgcagtcggccgtctctaggtcgtcggcgaggaaggcgcccttcgtcgtcagggccagctccagccctccagccaagcaaggtgccgacaggcagctgtggttcgcgtccaagcagtcgctctcctaccttgatggcacgctgcccggcgactatggcttcgacccgctgggcctctcggacccggagggcaccgggggcttcatcgagcccacgtggctggcctacggccaggtgatcagcggccgcgacgccatgctgggcgcggtgggcgcg

SEQ ID NO: 14597 - DNA, 336 bp, Zea mays
  Clone ID: LIB36-018-Q1-E1-B7
gcgatggcgagtgcctcgtcaaatctagtctcctcgaaggaactttcgttgggatagtgcttctcatcatcctgatatcaggactcatgtgcatgatggggatcgatactccctcgaggtttgaagctccccaggagtcttgatctctcccttggactgcataatccgcgggggggttgtgacgagggcacgcggcggcgttgaggggggccggtgttctgttggtctgcactgtggatatatatcgtttagcttgccatttggtagggagtacgccttgtgtattttgttttaacgagccgagtgtcgctcacagtgtgctagagttttttggtg

SEQ ID NO: 14598 - DNA, 444 bp, Zea mays
  Clone ID: LIB36-018-Q1-E1-B8
caacaagcaaagcatatacccccaaatccccaatccccaaaccctaggttatctcggcgcggcggcgatggcggcggcgggcctgaggaaggggaatgcgcgcctcccgccggaggtgaaccgggtgctctacgtgcggaacctgccgttcaacatctcgagcgaggagatgtacgacatcttcggcaagtacggcgcgatccggcagatccgtttgggcaacgccaaggacacgcgcgggaccgcttacgttgtctacgaggacatctacgacgccaagaacgccgtcgaccatctctccggcttcaacgtcgccaaccgctacctcatcgtgctctactaccagcccgccaagatgtccaagaagtcggatgtcaagaagaaggaggacgagatcaccaggctccaggagaagtacggaatcgggtccaagacgcccggccc

SEQ ID NO: 14599 - DNA, 411 bp, Zea mays
  Clone ID: LIB36-018-Q1-E1-C10
cccacgcgtccgtgtctacaagaatgatccaaggatgccaggatgcttctcttggggtggaagagggcaatgctttttcagaagaaaaggctgtggcagctcgtgggcatcaactgaagatcatagttgagccgggcacaaccaacatcggtggaggcaacgttgtagtttcgtcaaggcattccttgggaagcagtgaagcctcaagtaagcggaagctccacatccctgatgggcaagaaaagacagaagaatcggcaagcacttcaaagcgactgcatagaacatcaagcatcccattcgacttgaacctcccaggcgacgatgaggaagcccatgatgatggtgatgatgacaagagcagtggcaaccacgaaaactatctagaaggatttgtccgaaaactcctgc

SEQ ID NO: 14600 - DNA, 459 bp, Zea mays
  Clone ID: LIB36-018-Q1-E1-C11
ggcgcctcccacgtctccagtccgacactccgactcactccccctcccccgccccaacccgtcgcaatggccgccgtctccgcagccccgaggccctcgatgcctccccgactcgccctccgtgcccacctcttctcctccgcctctccgctcccaatgcgcgcgctccccttactccgcagccgcttccgctccttgaccacggcctacgctgtcaagcaggacacggccctctggacccctgcacccgtctccgccatcagtgctgccaccgacgacggctccgtctccctcatcgccgtcgacctatctgacgccacggacctcgtggactcgtacacgaacccgggccaatacctcctgatccgcgtacccggcgaggagctcaagccggcgtacatggtcatctcttcgccgcctaaagcggggccccggttcgaattccttgtcaaaagcgtg

SEQ ID NO: 14601 - DNA, 443 bp, Zea mays
  unsure (1)..(443): unsure at all n locations; Clone ID: LIB36-018-Q1-E1-C12
agacatatcacagggacctcttcaggcttcaaggcagatccgcagcagatggaggcgaagagcaggctgccggaggtgaccatcgtcccggcggcacggccgttggctggcgacggcacagtcgacgcggcaaaggcggcggcaggcaaggagcccgtaagcccgggcactccgtcctcggtggccgccggccgcagcagctgtgaggagaggcgcgcggtggacggcgtcgccctgcctgggtggaagctcgacgccctctgccaggagtcctgcccgtcgccggccatgagggcgcgcttcccctactacttctgaagctttcctgttgcagtcctgcgtgagttcttgagcggcgacatctggtgcatgctcttgacgactgatggcgttctcttgggtngtttccttgctcaggattttcctttcgtgcacgttcatgt

SEQ ID NO: 14602 - DNA, 93 bp, Zea mays
  Clone ID: LIB36-018-Q1-E1-C2
ctgacacgtgtgccgacgcatggggggaagtacacttctagagtcagatcgcaatcgcgactcgatgatagttgaagccgaaccgtgaagtag

SEQ ID NO: 14603 - DNA, 405 bp, Zea mays
  Clone ID: LIB36-018-Q1-E1-C4
gcaacagcaagctaaggagagtgtgatcaccaacagctagtgctagtcccccttccttccatccatccatggcatgcgtcagcaccttccacagctgccccattgccagaagagcaaagatcaacaccaggtccaggggcagcagcagtagcgtggcgaaggggtcaccaccaccagccttccagttccagtgcagggcgtcgactttcgcggcggacaccagcctccggctcgagctggacgagaaccccgaggcgatcatctcgggggcgtggcccgggaactgctccctcctcagctacgacgacctccgcgcctacctcgagtcgcaggagacggcggcccaggcacacgatcagcgcggcgtggcgctcctgagcgagaccatgtccaacaccgtggtgg

SEQ ID NO: 14604 - DNA, 405 bp, Zea mays
  Clone ID: LIB36-018-Q1-E1-C5
cccacgcgtccggaaaccctgtagtatcctgccatgattacgcgctgctgcctggtcgtcgccaatctcctcgcggcgctgctctcggtcagtgcgaccctggagttcggtttctacaggaagacgtgccccagcgccgaaagcatcgtgcagcagagcgtaggcgacgcgttcaccaagaattccggcgtcgctcgggggctcgtccgcatgcacttacatgactgcttcgtcagacgatgcgacggatcggtgctgatggactccacggtgaacatcaaagcggagaaggagtcgatcacgaacatccagaacctgaggttcttcgaggtggtagacagcgcgaaggcgtcgctgaaggctaagtgcccaggcgtagtgtcctgcgctgacatggtcgccttc

SEQ ID NO: 14605 - DNA, 441 bp, Zea mays
  Clone ID: LIB36-018-Q1-E1-C6
gagaattcttaattcatgagttgtagggagggacttatgtcaccacaaacagaaactaaagcaagtgttggatttaaagctggtgttaaggattataaattgacttactacaccccggagtacgaaaccaaggatactgatatcttggcagcattccgagtaactcctcagctcggggttccgcctgaagaagcaggagctgcagtagctgcggaatcttctactggtacatggacaactgtttggactgatggacttaccagtcttgatcgttacaaaggacgatgctatcacatcgagcccgttcctggggacccagatcaatatatctgtgatgtagcttatccattagacctatttgaagagggttctgtaactaacatgtttacgtccattgtgggtaacgtatttggtttcaaagccttacgcgctctacgtttg

SEQ ID NO: 14606 - DNA, 410 bp, Zea mays
  Clone ID: LIB36-018-Q1-E1-C7
agaacgctatcccatcttctcacacaaaaatatccgcgcgaccccgacctccccctcccactccgggcagcaagcagcagccagcaggcatggggatacctgtggtggttcccgtcgcggcggcctactcgtgctcctcctccctcgccgcgccaccgagggccgccgccgccgcggcgagggcgccgagccgcgcgcacgtcgcggcggccgggatgtcctccagggcgtcctccttcgccgggggcagcggaggcgacctcgcggcggtggccgcgtcggtagccgcgcggcccaggagagcgggctccgggggaggcggcacgctcgggtgcaagtgcctcttcgggctcggcgtgccggagctcgccgtcatcgccggcgtcgccgcgctcgtgttcgggcccaag

SEQ ID NO: 14607 - DNA, 416 bp, Zea mays
  Clone ID: LIB36-018-Q1-E1-C8
aaccgcagcagatggcgtcgacgatcatggccgccacctcccgcatcgtcgcggccaagacgccgtttcttggccagggtcgcgccgccgccgccgccgccaatgccagccccctccgcgacgtcgccgccgccgctgctggcggccggatcaccatgggcgaggacgtgtggtacggcccggaccgcgtcaagtacctgggccccgtcgccggccagacgccctcgtaccggaccggcgagttccccggcgactacggctgggacagcgccgggctgtccgcggacccggaggcgttcgcgcggaacagggcgctggacgtgatgcacgggcggtgggcgagcctgggtgcgcggggctgcatggccccggaggtgcgggagaaaggggtcgccgtggacgttcggggaccccgt

SEQ ID NO: 14608 - DNA, 268 bp, Zea mays
  Clone ID: LIB36-018-Q1-E1-C9
cccaaacgtccgcccacgcgtccgcggacgcgtggggcacaagggcagctttgagaccatccacgtgctgcttggagctttttgctatgtctagttttctcctagttgttgtacaggaaaagatagaatagaattcaaatttggtggtcgcaaaagtgtggagactttaattcatataaagttaggcttaagattagtgcaaacagttgtagtttagtttagatttagagtacacttatgtatgcattgtttgacagtgtttagttat

SEQ ID NO: 14609 - DNA, 469 bp, Zea mays
  Clone ID: LIB36-018-Q1-E1-D1
cccacgcgtccgctccggttcaccattttttgatgagtagagggggctccccgtctcggccctcctgccggttgaggccagcagagtgatgagtgaacggagtcatgcttgtgagattaggctttgtcgttgtagcctccgtcgcagctttaactcttcagagagctaacagtggggccaggcacagcaaagactatgtccaagcaaggaaaaggaaggataaggctaacaattctgaacatggggagaaagaagaagagaaggaagaggttaaaacaatcagcggcataatcaactcagcccgctcgctagacgatgacgacgatgatatgctttccgagatcgaaagcctcctatcaggagacattgacatccctataccaagcgatcgcttcgacgttaatggacggtcacggtacaacaacgcttacatggctaacgaggcctctgagatagagaagctgcgcag

SEQ ID NO: 14610 - DNA, 450 bp, Zea mays
  Clone ID: LIB36-018-Q1-E1-D11
cccacgcgtccgcccacgcgtccgcggacgcgtgggttgcgctgctccataattacttgtgctctaagccttgatccaaatccacacacattgatctaaaggccaggttgcagaatggagagaacactgatcacctctaacctctgcttgagtgcacacgcttcaagatcgtcccggagggttcactacatccctccttccgcctctgctgctgcacacaactccagctacaggaagaagagtgccccgtctctgccgccgtcggccgccgcatctgccactgttgtcaccgcccctccgtccactgacaatgtccagtccactgctccgaaacagaccgggcgacaggagctggaagatctcgtgtccgccaagaccagcacttcaagaaccgcacgtgcgccgagccaggctcgggctcgggctgaacctcgccgccggcctgccccg

SEQ ID NO: 14611 - DNA, 298 bp, Zea mays
  Clone ID: LIB36-018-Q1-E1-D3
gaaagaggttatggatttagatggctcaattgaagacaaccgatatagagatcagaaattaaggatgaagaaatgtgggctgaggaagttgatatatcttgttgaaggtgatctcaaccgtgcaccaaagagggttaaaacagcctgtttcaccactgagattctcgatggatttgatgttcagagaactactgggtttgccgatacccagaagaaatatgttgatcttacacgttcggtaaaaccatactatgatgcaagtttctcgatcgttggtaaagcttcccctgtttgccca

SEQ ID NO: 14612 - DNA, 382 bp, Zea mays
  Clone ID: LIB36-018-Q1-E1-E10
cctcactgcctgaccagctaggatcagcggaagcagcaatggtgatggcgtcgtcgagcgggctgaggagctgcagcgccgtgggcgtgcccagcctgctggctccgtcgtcccggtccggccgcctggcgccgttctgcgccaacgccaccacctctggccgcgtcaccatgtccgcggagtggatgcccggccagccacgccctgcccacctcgacggctcctctcccggggacttcggcttcgattcgctgggcctcgcgaccgtgccggagaacttcgagcggttcaaggagtcagaggtgtaccactgccgctgggccatgcttgccgtccccgggatcctggtgccggaagctctgggcctgggcaactgggtgaa

SEQ ID NO: 14613 - DNA, 450 bp, Zea mays
  Clone ID: LIB36-018-Q1-E1-E11
actgtactcagtttagcttccctcccctgccctcatgctctagccaaagttgcagctggtacgtgtagttcatgtatccatgctggtagtagctcttctcctcagccaccagtgcagtttacccttgttcatcacagccaactcctgtgtttggtgaccacaacagcaatccttcaacctcaccatggccagggttcgtggagattgtctcggtattgttgtgcccgttccttgttcctcacagaacacctagaagaagtggtgtttgaaggaggagtctactccagtggctactgatcagttggaggagccatctaaccgggtattgggtggaaaggtctttagcctcttctctacaacaaagagcacctagaagaagtggtgtttgaaggaggagtctactcgagtggctactgatcaattggaggagccatcgaaccgggtattggg

SEQ ID NO: 14614 - DNA, 432 bp, Zea mays
  Clone ID: LIB36-018-Q1-E1-E12
gagatgtcgccgcagtctcagcagcagacggcgatagtcggggaggagtactgcgagggcgaggacagggagctgacggtgcgcaagacgacgctcttcaccccgggggacgggctggaggcgtacgaccaccgcacgggcgcgctggcgttccgcgtcgagacgtacggccgcggcggggcgtgcgggggcggggccgccaggggggacctcgcgctgctgggcgcccagggggagcccgtcctcacggtgcgccgccgccgccccagcctgcacaaccgctgggacggcttcctcggcgacggggccgcgcacgggcagaagaagcccgtcttctccgcgcgccgctcctccatcctcggcgccggcacgggcgccgccgccgtcctcgtcgacctcctcgcccccggcgccgacgggggagttccgcgt

SEQ ID NO: 14615 - DNA, 282 bp, Zea mays
  Clone ID: LIB36-018-Q1-E1-E3
cggacgcgtgggttcggagcagtcttcatcgagctcttcttcatcctgacgtcgatctggcttcatcagttctactacatctttggcttcctgttcctggtgttcattatcctcatcgtcacctgtgcggagatcacaatcgtgctgtgctagttccaactgtgcagtgaggactacctgtggtggtggaggtcctttctgacctcaggatcatcagcaatccacctcgtcctggatgccgggttctacgtcttcacgaagctgcagatcactaatgtggtg

SEQ ID NO: 14616 - DNA, 445 bp, Zea mays
  Clone ID: LIB36-018-Q1-E1-E4
aagaaaagcaagcggctttggaagttggaatccatggcgtccacctcgtgcttcctccaccagtccaccgcccgcgtggccgcgccgtcgccgcgcctcgccgccccgccgcgcagcgcgcaactgttcgtctgcaaggcccagaagcagcaggccgccgcggcggagagcgacgtgtcgcgccgcgccgcgctcgcgctcctcgccggcgtcgcggccgtcggcgccaaggcgagccccgccgccgccgcctacggggaagcagccaacgtgttcggcaagaccaagaagaacacggacttcatctcctacgtcggcgacggcttcaagctgctgatcccgtccaagtggaaccccagcaaggagcgggagttccccgggcaggtgctccgctacgaggacaacttcgacgccaacagcaacgtgtccgtcatcatccagccca

SEQ ID NO: 14617 - DNA, 459 bp, Zea mays
  Clone ID: LIB36-018-Q1-E1-E5
ggtgcacgtcgcctccatccgtcattgtcatcggcggtggcatctcgggcgttgcagctgcccgtgccctctccaattcttcatttaaggtgactgttttggaatcgagagatcgtattggcgggcgcattcatactgataactcgtttggatgcccaattgatatgggagcctcatggctacacggcgtgtgcaatgagaatccactggcaccattgataagctatcttgggctgaggttataccgcacaagcgatgataactcagttctgtatgatcatgatttagaaagctatgctctctttgataaggatggtaatcaggtcgcaaaagagacagtcgataaagttggagaaacattcgacagaattcttgaagagacggtgaaagtgcgcgatgagcaggaaaacgacatgccactgctacaggcaatttccattgtgtttgataggcacccca

SEQ ID NO: 14618 - DNA, 365 bp, Zea mays
  Clone ID: LIB36-018-Q1-E1-E6
cccacgcgtccgcgaaatatcactggaaaccctgaaatcacggggtctgatcaatccatcaggcagggaaaggaagctgccgctgaagatcttaggagatggggatgtatcggttaagttgaatatcaaggctggagcgttttcagcttcagctaaagagaagcttgaggcagctggttgttccctaactctgttacctaaacgaaagaaatggctttcacaaaattatctaaagaaccaagcccgagcagaagagtactttgccaagaaaaaagctggtgctggtgaatctgatagcggctctgcatagacgttctatgtgatgtactcctcgtctcgtgcttttagcgtatgcgtagtgctga

SEQ ID NO: 14619 - DNA, 411 bp, Zea mays
  Clone ID: LIB36-018-Q1-E1-F11
cccgtgcagttcgagcaggaccccgtgcagatcctggacgcgctgctcccgctctacctcaacagccagatcctccgtgccctgcaggagtcgctcgccagcgagctcgccgcccggatgagcgccatgagcagcgccaccgacaacgccatcgagctccgcaagaacctctccatcgcctacaaccgacagcgccaggccaagatcaccggggagatcctcgagatcgtcgccggtgccgacgccctcgctggctgagcctgagtccccttggtggtgccgtgctcctgctatatataattctttttcctcattttctccactctgcctgtaattcctgataatagcacaaacgcaacggagttctgtgttccttgcgacacacaagaatttcaatcgagagatgccagg

SEQ ID NO: 14620 - DNA, 434 bp, Zea mays
  Clone ID: LIB36-018-Q1-E1-F12
ctgaaccaagctgtcacttcactgagtagaacacttgatcactcacagaaagttcagatcagaaaatgcaggttgccgctactgccgtcaggttctcggccgtgctgcctgtcaagggccggccggcggcgaagagtacggtggtggtccgtgtccctgcctcaaggaggagcgtccgtgcagctgctgttgtcgcggccgaggctgcggagatcgactacaactcgagcttctcggtgtttccgatggaggcctgcgacctgctcggcggcgatgcgtgcagcgcgcagatgtacccagagaccaagctcgcctcggcggcggcggcggcgagcaggaaggtggaggaggtggagagggactacctgtcgtacgacgagccaagaacggtgttcccgggcgaagcgtgcgacgacctcggcggcgagttctgc

SEQ ID NO: 14621 - DNA, 414 bp, Zea mays
  Clone ID: LIB36-018-Q1-E1-F4
cccacgcgtccggcatacacaacacagagcatcagaaggagctgcgatctgatcgacatggctgccgccaccatggctatcacctcccgcgcgctcatcggcaagccggcggctggcacgagggacgtcttcggcgagggccgcatcaccatgcgcaagaccgccgccaagcccaagccggcggcgtccggcagcccctggtacggtgccgaccgcgtcctgtacctgggcccgctgtccggctcgcccccgagctacctgaccggcgagttccccggcgactacgggtgggacaccgcggggctgtcggcggacccggagaccttcgccaagaaccgcgagctggaggtgatccactgccgctgggccatgctcggcgcgctcgggtgcgtgttcccggagctgctcgcccgc

SEQ ID NO: 14622 - DNA, 340 bp, Zea mays
  Clone ID: LIB36-018-Q1-E1-F5
cccacgcgtccgctgtaatagcagcgacttcaatattttactttgttttagttgttggtgatactgtttcatctgccggtttaatcatcaattcgtctactgtaatagcagcgacttcaatattttattttgttttagttgtcaaatgcacctgtttttgaacaatatttgtgatgtagtgccctgccgcgcttagagtctgagactattttgttatctgctgtgatgtttcagatgaaccagagttgatgtctggtttagtaaatggttatattcttagtgcattgcacttttgtatggtcttgtcgtatctagacctgttcgtggataatgaagtgtc

SEQ ID NO: 14623 - DNA, 403 bp, Zea mays
  Clone ID: LIB36-018-Q1-E1-F6
gaagctacaatcctaaaaccatctgcttcagctagccccaagtttagtcggccgatcattcactgaagtagtaatggcctccgtcaacagctggaccctcgagatcgcgtcgccggtggctccgcagcgcctgttccgcgccgccgtgatggactggcacaccctggcgcccaaggtcgcctcccacgtcgtcgccagcgcgcagcccgtggagggcgacggcggcgttggcagcgtcaggcagttcaacttcacctcaggtaagtgcccactgcccagcgcagaccagcatgccctccctcgctctctctctctcgctctcgcctgatcgatcaaacagctaggcgcacgacgtcgtgcggtcgctcttgcagtcaggccgtgcagcctcatgaaggagcgt

SEQ ID NO: 14624 - DNA, 459 bp, Zea mays
  Clone ID: LIB36-018-Q1-E1-F7
cggacgcgtgggacaagaccgacttcttctcggacaaattcggtgtgaggtcgatcagggacagcgagcatgagatgatgtccgccctgtacctccaagtgagtatcgtgagccaggctctgatcttcgtcacccgttcccgtagctggtccttcgtggagcgccctggtctgctcctggtcaccgcgttcctgctcgctcaacttgttgccaccttcctcgctgtctacgccaactggggcttcgccaggatcaagggtatcggctggggctgggcaggtgtggtctggctctacagcatcgtcttctacttccccctggacctgctcaagttcttcatccgcttcgtgctcagcggcagggcatgggacaacctcctcgagaacaagaccgccttcagcaccaagaaggactaagggcgggaagagagggagcgcaatgggcaacgcgcagaggaca

SEQ ID NO: 14625 - DNA, 418 bp, Zea mays
  Clone ID: LIB36-018-Q1-E1-F8
gggatgaccgaggcggggcccgtgctggccatgtgcctggccttcgccaaggagccgttcgaggtcaagtccggctcctgtggcaccgtcgtcaggaacgcggagctgaagatcgtcgacccagacaccagcgcgtcgctgggacggaaccagccaggcgagatatgcatccgcggcgaacaaatcatgaaaggttatctgaatgatccagaggcgacaaagaacaccattgataaggacggatggctgcacaccggggacattggttatgtggacgatgacgacgagatcttcatcgttgacaggctgacagagataatcagatacaagggcttccaagtacctcctgcggagcttgaagcccttctcatcacacatcctgaaatcagagatgccgctgttgtctcgatgaaagatg

SEQ ID NO: 14626 - DNA, 353 bp, Zea mays
  Clone ID: LIB36-018-Q1-E1-F9
ctgaatcctccgaggttttgaggccttacttttggctccaccccaacaaaggtggattgagatggatttgggtgtagccaaacaagaactgagacggatagtggattgcaaccaaacaagttcttggcatttttcggactaattttctttactccatgaggagttgtggttctcctgtcaatctgctcactgctcacggacccaaaccctgatgatcctcttgtccctgagattgctcacatgtacaagaccgacagggccaagtatgagtccaccgcacgctcctggacacagaagtatgccatgggctagaagcaaggctaaaagctggccaaactggtgaatgtgccgga

SEQ ID NO: 14627 - DNA, 411 bp, Zea mays
  Clone ID: LIB36-018-Q1-E1-G1
cctaaacgtccgccggcgactacggctgggacaccgccgggctgtccgcggacccggaggcgttcgcgcggaacagggcgctggaggtgatccacgggcggtgggcgatgctgggtgcgctgggctgcatcaccccggaggtgctggagaagtgggtgcgcgtggacttcaatgagcccgtgtggttcaaggccggcgcgcagatcttctcggagggcgggctggactacctgggcaaccccaacctggtgcacgcgcatagcatcctgaccgtgctccgcttccaggtcatcctcatgggcctcgtcgagggcttccgcatcaactgcctcgacggcgtcggcgagggcaacaacctctacaccggcgggcagtacttccaaccgccgggcctcgccgacgaccccgtca

SEQ ID NO: 14628 - DNA, 154 bp, Zea mays
  Clone ID: LIB36-018-Q1-E1-G10
ctgacacgtgggtgttcccggaggccaagcccgcctcggcggcggcggcggcgagcaggagtgtggtccgggtggacagggactacctgtcctacgacgagccaaagaccgtgttcccgggcgacgcgtgcgatgaccttggcggcgagttctg

SEQ ID NO: 14629 - DNA, 271 bp, Zea mays
  Clone ID: LIB36-018-Q1-E1-G11
ccggaacgtgttcttggattaattaactacgatctctatgagcctggggatggatcaacccgtcgtgcgtggtctcgttttgtgatgagtgggagagagaggatgacaagatcgatcctttgttaatggagatctcgttaattaggagagctaccgctgggacttggtggtttgtaatatatgatccaaccagtgatgaatcaatgcattcacttgtgtacacaagaaagaaggagaaggagagggaggaggggggacggggggaaggaag

SEQ ID NO: 14630 - DNA, 459 bp, Zea mays
  Clone ID: LIB36-018-Q1-E1-G12
aaccactccatcgccgaccccatctggtcctccaccacactggatcctccctcctccttcagcgacgccccgggcctcataggatccgccaagctcgcctttggcaacgccaccacggccaacgccgaccgctacaacgccaacgccgccggtgtcgccagcaagagcatgagcgtgggcatgatcgaccattacctcaacaagaacactaacaacgacgtcgtcaagagctacttcaacaagtccgtcggcagcaggccggccaacaacaacaccaccacaaccgtcaagaagaactccgccgcccaccacgacaagaagcacaagaactccggcaacggcgccggcgtcgacaagaggttcaagagcctgccggcggcggaggcgctgcccaggggcgaggccatcggcggctacatcttcgtctgcaacaacgacaccatggaggagaacctcaag

SEQ ID NO: 14631 - DNA, 456 bp, Zea mays
  Clone ID: LIB36-018-Q1-E1-G5
cccacgcgtccgcccacgcgtccgcagaactaacagttctgagatcgagctgcacaaggaaggaaagaaggagacacacaatcgtcgcctgcttaaccagagcgacaatgcccaagctcaggctcatcttcaccgttattcttgtggtgtctctactgttcagtggtgtgtcttcaggacaaactgcagctacacaagccagcgatgcagatctttctgaagcggttgaggttgagagacgcagtgggaaggttctgacgtacgttcaggactacgactacggcgggtccaaccccaaacatgacccacgcaggaagccagggagcggacaccctccataggtagccaaggataaacgtccggtgacgctccagccactggactctgctggtacctagctagtcttgctgagttgttcctgtaatgagtaaaaagaatcagaacggtttggtcccg

SEQ ID NO: 14632 - DNA, 318 bp, Zea mays
  Clone ID: LIB36-018-Q1-E1-G6
gctcgccatggcctccctctcctctgccgccgtcaccgccccttccttcgccgcaccagcgccagcccgcgccgtggtcagaaggaggtccttcaccgtgcgcgcctctctccgcaaggccaccggcaccgccgccgtggcaatggctgccagcgccctgcttgccggcggtgccatggcccaggaggtgctgctgggcgcatgcgacggcgggctcgtcttcgagcccagccagttcaccgtcaaggccggcgacaccatcagattcaggaagatcgccggcttcacgcacaacgtcggcttcgacgaagacgaggt

SEQ ID NO: 14633 - DNA, 343 bp, Zea mays
  Clone ID: LIB36-018-Q1-E1-G7
cagacacaacatgcagcgagtgaagacgcatccgtttgatcaaagcagagttcaattctctgctgtctttatattaagtcttgctgccatgatgctgagacttgttacttccgagagcagtctttgtgtttgatatccttcctgttgggtctgcaaaagtccagcctttgggtgatgctagtttcagagagtacagcaattccttcatcgttgtcatgctcacttgagttggatccactactgagggatcttgttgagaagaaactaagcctgaagaggaatgtgactgcaatggctaccgagctcagggatgccaggaacaggcttgcttcacaggaactgt

SEQ ID NO: 14634 - DNA, 327 bp, Zea mays
  Clone ID: LIB36-018-Q1-E1-G8
cccacgcgtccgcggacgcgtgggccagaaggagaacatcaagaacgccgcctcctccaccggcaacatcacgttgagcgtcaccaagagcaacccggagaccggcgaggtcatcggcgtcttcgagagcgtgcagccgtccgacagcgagctcggggccaacgcgcccaaggatgtcaggatccaacgggtctggtacgctcagctcgagtgagtcgagtgtcgaactggtatgtgtccgaccgccgtcatggatcgtgggaacgtgtaggtataccacgggaaggtttggggagcagaggaggaatcgggtaggtgctgtagggg

SEQ ID NO: 14635 - DNA, 179 bp, Zea mays
  Clone ID: LIB36-018-Q1-E1-H10
aacgttacacgtctgcctcagcccgccgcaaggagaggtaagttcaggagacatcttcgagaagctgaaatggctcataaagctgctcctgccaagaagggtgatgcgaatatccagtccgtgaaggttgccaaggcgtgtgaagtctgggacatccaagaacatgaccatcaagatgc

SEQ ID NO: 14636 - DNA, 104 bp, Zea mays
  Clone ID: LIB36-018-Q1-E1-H11
gctgaccggcttgggcgcccgtgacagtctccgactggaggcaggcctgtgcctgtacggcaacgacatggagcagcacatcacgccggtggaagccggcctct

SEQ ID NO: 14637 - DNA, 458 bp, Zea mays
  Clone ID: LIB36-018-Q1-E1-H12
ctgagagattcatggagtactcagaccttgacaaggttctgaacaatgaggctgctcagcctggacaaggtaggaaaagaaagaataaaagaacctcacagcctaatttgtccgacataatggatggcggtctagcgttggcccatcgatgcttaactggcaatgaggttctcaggctggcaaccggagccattcctggtacccgggactacgataagcagcactgtgtggatatgggtctcttgcctcctcaagtacagcaccctgtatatggctggtgatgactgatgagcacccaaagctaatcgtaggtatatatgtacataatacaccatgtcgctcttatgtcgactaatgtttggagtattgtaattgtagcatgcatgacgacctttgcccattgttttgtactctgtaataaggttctttctccttaaattggagttttatcgcagaaa

SEQ ID NO: 14638 - DNA, 450 bp, Zea mays
  Clone ID: LIB36-018-Q1-E1-H2
cactcatcgatctacacacatacatagtttcttctactacacgacgacaaacatggggaagcctgcgaagatcggagagtggggtggatacgccggcgatcgtcgggatctgagggctactccggaccggctgatcgaggtgaaggtcacggcggacaacagcagctgcatccgctccatctccttcatctacatcggagccgatggcaaaccgtacgaggaggggccatggggtttcggccatgctggcacggagtacaagattgatctgtgcaggttcgacgagagcttgacggagatctccgggaccacgggcccagcctacaacattgacaatctggtcaagtctctcaaattcgtcaccaacatacgcgcttacggaccgtacggcaaggacaagggcacccgttcggtgtcacggtgatgaacaacgggcacgtcgctggcttc

SEQ ID NO: 14639 - DNA, 424 bp, Zea mays
  Clone ID: LIB36-018-Q1-E1-H3
ctggcaggacgctggcaaggtggagctggtggatgggtcctcctacctgggccagccgctgccgttcaccatctcgacgctcatctggatcgaagtgcttgtgatcggctacatcgagttccagcgcaacgccgagctcgacccggagaagaggctgtaccccggcggctcctactttgacccgctcgccctggcggccgacccggagaagaaggagcggctgcagctggcggagatcaagcacgcgcgcctcgccatggtcgccttcctcggcttcgccgtgcaggccgccgccaccggcaaggggccactcaacaactgggccacccaccttagcgacccactccataccaccatcttcgacacgttcggaggatcctcttaagcccgccattgctccgctccgtccatcgatcgaaacgtg

SEQ ID NO: 14640 - DNA, 451 bp, Zea mays
  unsure (1)..(451): unsure at all n locations; Clone ID: LIB36-018-Q1-E1-H4
cgaaaatcgacgcggcgacgacgaaccggggcggcggcaaggccgggcaggcggaccggctggggcaggacaagggcgggcacgcgaagctggcgtgccccctctgccgcaccccggcgcccgacatcaagtccatgcagatccaccacgaggcgcgccaccccaagctccccttcgagccggagaagctcctcaacctgcactcctccgcccccgctgctgctgccgccgccgccgccactgccgacgccaccacctccaagcccaagcccggcgtccgcggcagcctcaagaagtaagcttgctggcttggttggctcgcccgcctgcatggggcacaattcccttcggtttcaatcccatccgccgnaccgatctataatcaatcaaatcgccgctctccggcctggcggctgccgcagtcggcctgcggtgtactgttagtctgctg

SEQ ID NO: 14641 - DNA, 300 bp, Zea mays
  Clone ID: LIB36-018-Q1-E1-H6
accacgcgtccgcccacgcgtccggtggtaacaaggttgatgtcaagaacaggcaagtcaaggccaagcaagttacattccaccggaagaagaacttgcagtactatgagatttctgccaggagcaattacaactttgagaagcccttcctttacctcgctaggaagctggcaggggatcagaaccttcactttgttgaagctgttgctcggaagccaccacaagtgcagattgatatggccctgcatcatcagcatgaagctgagcttgcagctgccgctgcacagcccctccccgatg

SEQ ID NO: 14642 - DNA, 465 bp, Zea mays
  Clone ID: LIB36-018-Q1-E1-H7
ctctctcgtggagacgactgggccgccgtcgttgctgccctacgcggctacacccacgtcttcttcgggcccttagccgcgacgagcgccaccagggagtagaagaggttaaccttctggttggaaacgatgtacttcgaaggctatggcttccgtggaagtactttcgagcagacatatcgctgctatcctgcgtctttcatcgacaagccacaacttgaggccggtgacaaaattataatgccaccatcagctcttgatcgtcttgcatctctgcatattgaataccctatgctatttgaagtccacaatgcagcagcagaacggacttcgcattgtggtgttctggagttcagtgcagaagaaggcatgatctacatgccatattggatggatgcaaaatcttcttttgcaagagggagatatggtgttcataaaaaatgccaacctccccaacggcacata

SEQ ID NO: 14643 - DNA, 377 bp, Zea mays
  Clone ID: LIB36-018-Q1-E1-H8
cccacgcgtccgcggacgcgtgggggcgaccataagcatggccgcgatcaggcaggccaactgcctccgacgggacggcgccggcgccggcgcgcgctgcgacgcgccagggaccgtgctcatgctggcgttcagcgtggtccaggtggtgctgtcccagttccctggcctggagcacatcacctggctgtccgtcgtcgcggcggccatgtcgttcgcctactccttcgccggcctcggcctctccgtagggcactgggtgtctcgtggcggcggcggcctcgggggcagtgttgcatgtgccgccgcgggatcctccaccaggaggctctggaacgtgcttctcgcgctggggagcattgccttcggcctagacg

SEQ ID NO: 14644 - DNA, 308 bp, Zea mays
  Clone ID: LIB36-018-Q1-E1-H9
cgtttcgcgtctgcctcagcccgccgcaaggagaggtaagttcaggagacatcttcgagaagctgaaatggctcctaaagctgctcctgccaagaagggtgatgccaagacccaggccttgaacgttgccaaggctgtgaagtctggggcagccaagaagaagaccaagaagatccgcacgtctgtgacatttcaccgccccacgaccctgaagaaggctagggaccccaagtacccacgaatcagcactaccggaaggaacaagcttgatcagtaccaaattctcaagtacccccttaccacaggaa

SEQ ID NO: 14645 - DNA, 429 bp, Zea mays
  Clone ID: LIB36-019-Q1-E1-A10
gcaacccctcaacagcagccactgtccagtgcgcgcgtcaagcttgcttagctagccgccatggcctccctcgccgccgtctccgtgaagcccgtggccatcaagggtctcgccggcagctccatctccggaaggaagctcgccgtcgccaggccgtcggcccgctctatccgcaggccccgcgcagccgccgtggtggccaagtacggcgacaagagcgtctactttgacctcgacgacatcggcaacaccaccggacagtgggacctctacggctctgacgcgccctcgccctacaacccgctacagagcaagttcttcgagacgttcgcggctccgttcaccaagagaggtctgctgctcaagttcctgctgctgggcggcggctcacttctggcctacgtcagcgcgtctgcgtcaccggacctc

SEQ ID NO: 14646 - DNA, 385 bp, Zea mays
  Clone ID: LIB36-019-Q1-E1-A6
caggtctaggactcgcgggtcgacgcacgcctctgcacagacgttctgctacgcgtccgcggacgcgtgggcggacgcggggcggctcctagctgccttggggctataaaagggacccctaggcgcatggaggaagagaccaagcattctctaagcattcctaagcaccaagactccaattccgcgcattcgattctttgtgatagcaactagagctccatttgagtagagaactctttgggttgtgttgtgagctcgagttgcgacttgtgtgcgtgtttgtgctctgattttgtgtcttgtgtgcgttgctcatcgcagccgtacttatgtgcttctttgtgagcatcaaattgtaagggcgagaggctcgaagttgtggaga

SEQ ID NO: 14647 - DNA, 281 bp, Zea mays
  Clone ID: LIB36-019-Q1-E1-A8
acaggactaggactcgcgggtcgacgcaagcctctacacacgacgtcgtaatagcacgggcacggagaaccagtgcccgaccatccacggcagcgtggactcgttcccgttcaaggccggcaagtgccagaataagaaccatgtgccgggagccgacgtccttcaccgtcaacggggacggcagcaccaagaacgcaccgcccgagttccagaacaccaagctcatgaggcgccgcatttagacgctggactagatcgagggcccgctcgacgtcagctcc

SEQ ID NO: 14648 - DNA, 420 bp, Zea mays
  Clone ID: LIB36-019-Q1-E1-A9
atggaccacgcgccagcgccccctttcgccgtgcacctcgtcaccggcggcggatcctcgtcggggatcgccctcctactgcgctccctcgccgccgcccgtgtcgtcgctcttgacgcagagtggaagccgcgccgccgcggtagccctgccgctgccgaccctgcggccctgggcgacgacacgacgccggcgtccgagacatctccagcgccgccgaagttcccgacggtgacgctgctccaggtggcctgccgcttcagcgatggtggtggaggtgagggcgagcgcagcgaggtgtttgtcgtcgatctgctttccgtgccgctcgccgacctgtgggcaccgctgcgagagctgttcgagcggcctgagacgctcaagctggggttcaggtttaagcaggacctggtgtacctc

SEQ ID NO: 14649 - DNA, 380 bp, Zea mays
  Clone ID: LIB36-019-Q1-E1-B1
aaccccctacattgattcacaatatcagttccgcctattccacattaatgggagtacatttatgtttctgctttacgaatatgatattttttggacatttctaataatagcaagccttattcctattttggtattttggatttcaggacttttagccccggttagtgaacgaccagagaagctttctagttatgaatcgggtatagaacccatggggggggcttggttacaattccgaatacgctattacatgtttgcgcaagtttttgttgtttttgatgtggaaacagtctttctctaaccttgggcaatgaatttccacctattgggtgtatccctttttatccaagctttcatttatgtgcttatccaagttgttg

SEQ ID NO: 14650 - DNA, 435 bp, Zea mays
  Clone ID: LIB36-019-Q1-E1-B10
tcgcgggtcgacccaagcctctaaagacactcgtgcgacagcggaggcgtcaggaacgcgtcccacctcctcaagtacgactcgatgctcggcaccttcaaggccgacgtcaagatcgtggacgacacgaccatcagcgtcgacggcaagcccatcacggtcgtctccagcaggcacccgctcaagctcccatggggtgagctcggcattgacatcgtcatcgagggcaccggagtcttcgtcgacggccccggcgccggcaagcacatccaggccggcgcgaagaaggtgatcatcacggctcccgccaagggcgccgacatcccgacctatgtcgtcggcgtcaacgagggcgactacgaccacagcgtcgccgacatcatcagcaacgcgtcctgcacgatcaactgcctcgcgccattcgtcaagatcttg

SEQ ID NO: 14651 - DNA, 441 bp, Zea mays
  Clone ID: LIB36-019-Q1-E1-B11
cgttggtcgtcccaagactctaaactgagtcgtattactccaaattgttgcatgaggctggactacctgagggtgttgtgaatgtcgtttctggttttggccctactgctggtgctgctcttgctagtcacatggatgttgataagatcgcatttactggatctaccgatactggaaaaattattctcgagttggctgcaaagagcaaccttaagacagtgacactggagttaggaggcaagtcccctttcatcataatggacgatgctgatgttgaccatgctgttgagcttgcgcactttgccctgttctttagccagggacaatgctgctgcgctggatctcgcacgtttgtacatgagcgtgtttatgatgagtttgtggagaaggccaaggctcgtgcattgaagcgcgtcgttggtgatccgttcacgaaaggtg

SEQ ID NO: 14652 - DNA, 287 bp, Zea mays
  Clone ID: LIB36-019-Q1-E1-B3
gcaagcctctacacagactcctgctcgccaccctcggcgccctcaccgtcgagtggctcaccggcgtcacctggcacgacgctggcaaggtggagctggtggatgggtcctcctacctgggcgagccgctgccgttcaccatctcgacgctcatctggatcgaagtgcttgtgatcggctacatcgagttccagcgcaacgccgagctcgacccggagaagaggctgtaccccggcggctcctactttgacccgctcgccctggcggccgacccggagaacaaggag

SEQ ID NO: 14653 - DNA, 437 bp, Zea mays
  Clone ID: LIB36-019-Q1-E1-B4
tcgcgggtcgacgcaagcctctacacatgacgttctgataagctagcgttcaacagaggaagaagcgagagagctgacaagaatcgactgccatcaatggctctggcgccggcgcctctccagtgcttcctcacgagcagcagaccggccgtatgcacggcgacgccgcccaataagcgcgcgaggaggccgtcgaggatctcgtgcagggcgtccggcgatgacaaggacaaggtcccgtcgtcgggagggagcgatcttggggtcaagcaactcgggaagctggccatggtcgcgctggccgccggcgtgctggtgctcgggcccgtcgacagtgccgtggcggccaagtccggcggcatggtcggcgggcacgcgttccggtcccaccccggtcgtccggcctcggatcaacaactccaggaccaacatctaca

SEQ ID NO: 14654 - DNA, 453 bp, Zea mays
  unsure (1)..(453): unsure at all n locations; Clone ID: LIB36-019-Q1-E1-B7
ctcgcgggtcgacgcaagcctctacactcagtcgtcttatgcggttctgccgtctacgcctccaatttggcctctctcccttgcaagtttaagcttcatcttcagccatgggtaaggagaagtcccacatcaacattgtggtcattggccacgtcgactctggcaagtcgaccaccaccggccacctgatctacaagcttggaggcattgacaagcgtgtaatagagaggtttgagaaggaggctgctgagatgaacaagcggtccttcaagtatgcttgggtgctcgacaagctcaaggctgagcgtgagaggggtatcaccattgatattgctctgtggaagtttgagaccaccaagtattactgcaccgtcattgatgcccctggacaccgtgacttcatcaagaacatgatcactggtacctcncaggctgactgtgctgtccttatca

SEQ ID NO: 14655 - DNA, 242 bp, Zea mays
  Clone ID: LIB36-019-Q1-E1-B8
tcgtgggtccacacaagcctctaaactgcgtcttatcaagcgagagcacacacacggcagcacctacctaggaccaccagcaccggcggcaatggcggcctccataatcccctcgtcagccctggcgttggcccctcagggcctgccgcccctcggccgccgcccttcttccttccccttcttcggctccaaaagaagattcagaaccaacaaccctaacggaattggggttgccctaacct

SEQ ID NO: 14656 - DNA, 418 bp, Zea mays
  Clone ID: LIB36-019-Q1-E1-B9
cgtgggtcgacccaagcctctacagtgactcgtgctaacgcgtgggcggacgcgtggggcaaaagccaaaaggcatcaccgccgcgacgacgatggcagcctcgctccaagccgcggccaccctgatgcagccggccaagatcggcggccgggcgccctttgcctcgctgccgtcccgcccgtcgtcgcaactcgcctgcagggcgttcggcgtcgacgccggcgccgccaggatcacgtgctccctgcaggacgtcgccagcaggtgcgtcgacgccgcgaagctcgccggcttcgcgctcgccacctcggcgctcctcgtctcgggcgcgagcgcggagggcacgcccaagaggctgacctacgacgagatccagagcaaaacgtacatggaggtgaacggcacgggcacggggaa

SEQ ID NO: 14657 - DNA, 364 bp, Zea mays
  Clone ID: LIB36-019-Q1-E1-C1
agtgcccgaccatcgacggcggcgtggactcgttcccgttcaagcccggcaagtaccagatgaagaagctgtgcctggagccgacgtccttcaccgtcaaggcggagggcatcgccaagaacgcgccgcccgagttccagaagaccaagctcatgacccgcctcacctacacgctggacgagatcgagggcccgctcgaggtcgcctccgacggcaccctcaagttcgaggagaaggacggcatcgactacgccgccgtcaccgtgcagctcccgggcggcgagcgcgtgcccttcctcttcaacgtcaagcagctcgtcgccaccggcaagccggacagcttccgcgggcccttcctcgtgcc

SEQ ID NO: 14658 - DNA, 378 bp, Zea mays
  Clone ID: LIB36-019-Q1-E1-C11
cgtgggacgacccacgcctctacatggcgtcggattacagccaccgccgctagaagaagagctcggcgattcccaggtcccgcgagaatatgccgaagcagatccatgagattaaggacttcctcctcaccgcgaggaggaaggatgcccgctcagtgaagatcaagaggagtaaggatgttgtcaagttcaaggtgcgctgctccaagtacttgtagacgctctgcgtcttcgatgctgagaaggcaaacaagttgaagcaatctcgtcccccaggtttgaccgtcgaggaggtctgattggatacatggcaacgccgagttgaactacccaagcttctttatcagtagcagagcatgctactctatgtacttttgg

SEQ ID NO: 14659 - DNA, 273 bp, Zea mays
  Clone ID: LIB36-019-Q1-E1-C2
tctagactaagtccgagtatctacgcccggccaagctgccgctgcaggggcgtcggttcgctatccccaaaaccgcgggacgtatcagtgtcaggggtcccccgggcccaaccgcagcagaaccacaaggtaaaggaggagaaggccaaggcggcaaccttcccccggccgcaggccccggaaaaggagccaaggaaggggaacccccattccctgcgccggaaccctttggcgagaaccagaaacttgacccgcaattacggcggccattgc

SEQ ID NO: 14660 - DNA, 428 bp, Zea mays
  Clone ID: LIB36-019-Q1-E1-C3
ctcgctcgtccgcgttcagctcagctactccaatttcgcaacaagttgcaagcaataaccgaccaaggacgacgaacgggtcgatggccacgctctcctcctgcagccgcctgagtagcggcaccggcgccgcggccatccaccggcagccggcccgtgctggagccgtcctcgtcgtcacctgcaggcggagctcctccgcgaccgtccgcgccgcagccgctgccacggcggcggcgccggctgccgtagagctgcagaacaagggggtgtcgctgccgacgtgggcggagttcgagctcgggcgggcgccggtctactggaagaccagcagcgggctcgcgccctcgccgggcgaggggctgaccctgttctacaacccggcggcgacgaggatggcccgaacgaagtgttcggcgtggcgttca

SEQ ID NO: 14661 - DNA, 397 bp, Zea mays
  Clone ID: LIB36-019-Q1-E1-C4
tcgtaggtcgtcgcaagtctctatagtgacgtcgtattatacgtccgttcctcttcctctcccaccggcagggcaatagtcagcgatgggcggcggctcgggcaatcctctacctcccccaccggcggcggcagcggccttccgcgtggaccggccgctgcaggcgctgggcttcgagttcactcgtgtcaccgccgaagaggtggtcggtcgcctccccgtcaccgagacctgctgccaggtaggtacgattagaataggatacgcaggccccgcgcgccgccgccgcctcgagtagtattttatttgtttttgttttcatctcattatcgtctctatcggcgccgcgcgtgatgacggagaccggatgtgggtcatgcagcccttcgactggctc

SEQ ID NO: 14662 - DNA, 421 bp, Zea mays
  Clone ID: LIB36-019-Q1-E1-C6
ggcagtggctgttggaggaggttatatcggcctcgaactgagtgcagccctgaagatcaatgactttgatgtcactatggtgtttcctgaaccttggtgcatgcctcgcctcttcactgccgatattgctgctttctatgaggcttactatactaacaaaggtgtaaagatcttgaagggcacgctagctgttggttttgatgctgatgccaatggtgatgtcactgcagttaagctaaaggatggcacagtacttgaagccgatattgttgttgtcggtgttggaggcagaccattgactactctcttcaagggtcaagttgctgaggagaagggtggaatcaagactgacgcttcctttgaaacaagcgttcctggagtatatgccattggttatgtggctaccttccctttgaagatg

SEQ ID NO: 14663 - DNA, 442 bp, Zea mays
  Clone ID: LIB36-019-Q1-E1-C8
ctcgtgggacgacgcaagactctaaactgagtcgtaatacccttcctcagtccggaaccccattccccgccgcctcgcgcccccgctcgcttcacttctctagagatggcggtgccgctgctgacgaagaagatcgtgaagaagcgggtcaagcagttcaagaggccccacctcgaccgctacaagtgccttaagccaagctggcgcaggccaaagggtattgactcccgtgtcaggaggaagttcaagggatgcaccttgatgcccaacattggttatggttctgacaagtcgaccaggcactacctccccaacaagttcaagaagtttgtggtccacaacgtttctgagctggagttgctcatgatgcacaacaggacctactgcgctgaaattgctcacaacgtgtccactaagaagcgcaaggagatcgtggagcgtg

SEQ ID NO: 14664 - DNA, 430 bp, Zea mays
  Clone ID: LIB36-019-Q1-E1-C9
cgtgggtcgacccaagcctctaaaattagtcatattatgcccctgactgttgactggctagctgcgggttaccgcttcatctgaacctgtaagctctacgcatatctcgtgttctagacacaaaaactggtcacgttgggtcaataatggactatacatgcatatttggatatatattctagctgcatatacaaagtaagttttgatctgtgctatatatatacctgaaataaatggagatttagcgtcgtcactcttgtctacacccgaaggaaaaggcggtgaatgtggtagagttcagcgcgagagcactgaagatactgacggggaagctcaccatcgaggcttcgtacagagttaccagccaaacaagagtggacatcaagctcgagagctcaaccatcacccctgagcagctgatgaacatatt

SEQ ID NO: 14665 - DNA, 447 bp, Zea mays
  unsure (1)..(447): unsure at all n locations; Clone ID: LIB36-019-Q1-E1-D1
gggtcgacgcaagcctctaaaatgcgtacgtattaaaaaggagcagcttcgattcgagatcgcggcgccatcgaccatgcagctcaagaatcgccgcgaagccgtgacggcgacagtgctcgtggccgtatcagtcctggcgaccctggcgcgcaccgacggcgccctctgcgacaagtccgacaaggcagccttgcttgccgtgaagtcggcgctgggcaacccactggcgctctccggctggaactccaccgtggcctgctgctcctgggagggcatctcctgcaacgccaccaccggccgcgtcaccgacctgaccgtcttcgcgctcaacatctcggcgccggtcncggccgccatcgccaacctcaacgcgctgcagagcgtcaacctgggctacaaacagctgtaccggagcatcccggcgttcctgggccgcgcgcgctg

SEQ ID NO: 14666 - DNA, 373 bp, Zea mays
  Clone ID: LIB36-019-Q1-E1-D10
ctcgtgggtcgacgcaagcctctaaactgacgtcgtgttacgcgtccggcatcgcacgtccgccgagagttagctcactcgtctgcgtccagctcagctacaccacattcgcaccaagttgccagcaagttgcgagcaaggacgacgaacgggtcaatagcgagtctctcgtcatgcagtcgtctgagtagcggcagaggcgccgcagcgatccagcggcaaccggccggtactggagccgtcctcgacctctcctgcacgtggagcgccggcggaactgttcgcgcagcatccgctgcgaaggcggtggcaccggcggcggtagagctgcagtacaacggggtgtcactggggacttgcgcggaatttgagc

SEQ ID NO: 14667 - DNA, 306 bp, Zea mays
  Clone ID: LIB36-019-Q1-E1-D2
cgggtgcgcgcacgcctccaacaagctacatatcaatggagtttgttggatcaactgtataaagtctaaccatggaagaacgtatgacactatgcaacatggttgttgaagctggtggaaacaacggtgtcgtgcctgctgatgaaactacatttaaatagcttgagggtacgacatcacttgattatcaacctgtctatagtgatgctgatgccagattttttagtgactatcggtttgatgtagcgaaactggagccagtagtctccaagccacattcgcctgacaaccgtgccctaccaagag

SEQ ID NO: 14668 - DNA, 398 bp, Zea mays
  Clone ID: LIB36-019-Q1-E1-D3
tcgtgggtcgccgcaagcctctataaagacgtcgtggtaccccactgtgaaggaccctgagagctgcctttactcgtgtctcgagaggctactaaagcagctcacagtatgtagctttgagcgacgtgcattcaacagctaccaaggagatgcattcttagtccacaaagaagtgcagaattatgaaaggtctatgcgctcataggcatcgggtttgatgcgcatctcagaagtaaactcagatgctagactcccaagtctcaactgctcgttgaagggacgaaggttcagaaccaagtggtcgagcatgctaagcacaaatccttccccttgatgcaggcaccctactttcggaagggtgggatacagatttcacagacagaggtcaggctttcgga

SEQ ID NO: 14669 - DNA, 421 bp, Zea mays
  Clone ID: LIB36-019-Q1-E1-D5
ctcgtgggacgacgcaagcctctacactgagtcttacaatgcaataaaaaaagcagccgcaatggcgagcagcaccatggccctctcctccacggccttcgccggcaaggccgtgaacgtgccgtcgtcgtccgccttcggcgaggcccgcgtgacgatgcgcaagacggcggcgaaggccaagccagcggcggcgtccgggagcccgtggtacggccccgaccgcgtgctgtacctgggcccactgtcgggcgagccagcgagctacgtgacgggcgagttcccgggcgactacggctgggacaccgcggggctgtcggcggacccggagacgttcggcaagaaccggggagctggaggggatccagtccggctgggccatgctggggccgctcgggggcgtcctcccgagctgctcgcc

SEQ ID NO: 14670 - DNA, 453 bp, Zea mays
  Clone ID: LIB36-019-Q1-E1-D7
ctcgtgggtcgtcgcaagcctctacagtgactcgtgctgacgcgtgggcgtgcttatgggcgccgtcgagggctaccgcatcgccggcggcccgctcggcgaggtcgtcgacccgctctatcccggcggcagcttcgacccgctcggcctcgccgacgaccccgaggccttcgctgagctcaaggtgaaggagctcaagaacggccgcctcgccatgttctccatgttcggattcttcgtccaggccatcgtcaccgggaagggcccgctcgagaacctcgctgaccacattgccgaccccgtcaacagcaacgcttgggcctacgccaccaacttcgtctccggcaagtgagggaggcgccgccggtgacctttaggtgtccggatgcatgtgagcgcacgctggttttcggtttgtaccatgatgttaactattgttcaatcaacaaggaa

SEQ ID NO: 14671 - DNA, 373 bp, Zea mays
  Clone ID: LIB36-019-Q1-E1-D9
accatggcctccctctcctctgccgccgtcaccgccccttccttcgccgcaccagcgccagcccgcgccgtggtcagaaggaggtccttcaccgtgcgcgcctctctccgcaaggccaccggcaccgccgccgtggcaatggctgccagcgccctgcttgccggcggtgccatggcccaggaggtgctgctgggcgcaggcgacggcgggctcgtcttcgagcccagccagttcaccgtcaaggccggcgacaccatcacattcaagaacaacgccggcttcccgcacaacgtcgtcttcgacgaagacgaggtgccgagcggcgtcgacgccaccaagatctcgcaggacgagtacctcaacgcgccaggcg

SEQ ID NO: 14672 - DNA, 441 bp, Zea mays
  Clone ID: LIB36-019-Q1-E1-E10
tcgtgggtcgacccaagactctagattgagtgctaccactacgacttcgtcaaagggcagttcgtcacatgggagcctccccaggacgccatcgagcgcttgacgagcgggttccagcagttcaaggtcaatgtctatgacaagaagccggagcttttcgggcctctcaagtccggccaggcccccaagtacatggtgttcgcttgctccgactcccgtgtgtgcccatcggtgaccctgggcctgcagcccggcgaggccttcaccgttcgcaacatagccgccatggtcccaggctacgacaagaccaagtacaccggcatcgggtccgccatcgagtacgctgtgtgcgctctcaaggtggaggtcctcgtggtcattggccatagctgctgcggtggcatcagggcgctcctctcgctccaggacggcgcacctgac

SEQ ID NO: 14673 - DNA, 394 bp, Zea mays
  Clone ID: LIB36-019-Q1-E1-E11
tgctatcgcttatagcatgtcagccatggccaccgccgccgcgtctagcctcctcaagtcctccttcgcgggctcccggctcccggccgccacgcggaccacaccggcgtccctcgtggtggccaccggcccgcgcggcgccggcgcggggcccatctgcgcgtccatgtccatgtcctcctccaacccgccctacgacctgacgtccttccggttcagccccatcaaggagtccatcgtgtcccgcgagatgacccgtcgctacatgacggacatgatcacctacgccgacaccgacgtcgtcatcgtgggcgccggctccgcggggctgtcctgcgcgtacgagctctccaaggaccccgccgtgagcatcgccatcgtggagcagtcggtg

SEQ ID NO: 14674 - DNA, 353 bp, Zea mays
  Clone ID: LIB36-019-Q1-E1-E12
gtatcgcgggtcgacgcaagactctagagtgattcttatgaaccacgccctcagcagcggcgacgcggagcgcgagccctccgtcttctccaggatcaccaagttcgaggaggagctccgcgcggtgctgccccacgaggtggaggccgcccgcgtcgccgtcgccgagggcaccgcccccgtggccaaccggatcgcggacagccgctcgttcccgctgtaccgcttcgtgcgccaggagctcggctgcgtgttcctcaccggcgagaagctcaagtcccccggcgaggagtgcaacaaggtgttcctccggcatcagccagggcaagctcgtcgacgccatgctcgagtgc

SEQ ID NO: 14675 - DNA, 449 bp, Zea mays
  Clone ID: LIB36-019-Q1-E1-E3
ctcgtaggacgacgcaagactctaaagagacgtcgtattaagcgtccgctcacacagtgcagtcagtcacacagagcctactagccagcactacctaccagcagttcctcccgtgtgcaaactgcaaagcaagcaatggacatgggcttctacaagcgcgccagcaggggcggcggcatcaagcacaaggcggcggcgatgcccttctaccccaggaaaccggcgcaggtggcgcccgccgcgccggcggcgcagcaagccgtcagcaatgcgaaacagccctcagcgaccaccatgtggtcgattccggcaccgccatcgtcaaccgtggtcgccatggaggttgctggaaacggcatggtgctcgacggcgactccgacgtcgacagccgggcggcctcgtacatatccagggtgcaggagcggctccggcgcaagcgcatggccga

SEQ ID NO: 14676 - DNA, 333 bp, Zea mays
  Clone ID: LIB36-019-Q1-E1-E5
caggtcagagaactcgcgggatggttacagcagtgaattaggctttggatttgattgacagatcgaagaaattacaagtgtaaatacggtagacaaagttgtttgggtagtagaacagacgtgtactgttcagttaatgtttgtctcggtcaacctgtaactaatacgtcatcttttttttcttgtcggtgaggatgtaaacagatcatgtgaaagatgtacaacgaacaatctatggaaccagagttagacgggcatgtatcctatgcaaaagaggaaaggagaacaggggaggcggagcgggggggtagcggcgggctggcatcgccggcg

SEQ ID NO: 14677 - DNA, 416 bp, Zea mays
  Clone ID: LIB36-019-Q1-E1-E9
cccacgcgtccgcgcttcccgagcacgcaaccatggctcgactgtcagccaccgccgcgctcctccttctcgtcctctccctcctcgccgtcgcgcactgcggtgccctcgcagtcgcagcagagcacgacaccgagcccgaatcaaccgccgccgtggccgtcagcgacgacaacgtgctatccgaccccacggtccacgctgaggcgggcaccgccagcgccactgaagaggaggccatcccggcggagcagcagcagcatgggttcgaactcctccgcctgccgtctcaccggctccaccaccaccaccacctctggtggaagcgccaccacgggatctaccgtgacgcgtcgcacaagttcccgtgttctggccacggcgcgaggcgccagcaggcagtgagccaccgtgcc

SEQ ID NO: 14678 - DNA, 415 bp, Zea mays
  Clone ID: LIB36-019-Q1-E1-F1
caactctctaaagtgactcgtgctaacgcgtgggcaacgccacagcttgcgcccgcaatggcactcgtctccgcctcctcgtcctccaccaccgccgtcacggcgctccccaggaatgggcagcgggcgtcgtcctccttcctcggcggcaagacgctgctgagacaggccgaggcggcccggccgtcgttcgccgtgcgcgccgcggcggaccccaacaggccgatctggttccccggcagcacccctccgccgtggctcgacggcagccttcccggcgacttcggctttgatccctggggcctcggatctgacgcggagagcctgcggtggaacgtgcaggcggagctggtgcactgccggtgggccatgctcggcgcggcgggcatcttcatcccggaggttcctgaccaag

SEQ ID NO: 14679 - DNA, 332 bp, Zea mays
  Clone ID: LIB36-019-Q1-E1-F10
cgtgggacgacccaagcctctaaagagactcgtagaagaagacgagtgtcaagtgaacctgaaacttgcggtgtcactggctggtagcctgagtgtgagtgagtgatcgagctagctgagctccgatgcgcgctagctaggataccgccataccacaagtcttcttcacaagtttaggagtgacaggaacaagagatcgatggcctctggcagcgtgctcaagtcctccgtcctgcgcaagacctcccgaagggggcgccacgaggcaagccggcgcgcgcaggccgcgcagcgtctccagggtcgtccgcgcctgccgctacgcggacgag

SEQ ID NO: 14680 - DNA, 364 bp, Zea mays
  Clone ID: LIB36-019-Q1-E1-F2
ctcgtaggacgtcgcaagactctaaactgagtcatattattccgcgtgcctttccccacctactctcgcggctctcgccagccagtctagggtttcggtcccggcgtgcttatccgcccccgccggccatgtcgaagcaaggagggaatgccaagccgctgaaggcgcccaaggcctacaagaaggagtacgacgagacggatcttgcatatctgcagaagaagaaagatgaggaaaaagcactgaaggagcttaaggccaaggcacagaagggcgcgattgggggctcgggtctgaagaaaagtggaaagaagatagactggtcaccgcgtctccaatacctagaggatgatgaggcagctgt

SEQ ID NO: 14681 - DNA, 454 bp, Zea mays
  Clone ID: LIB36-019-Q1-E1-F3
tccgggtcaccacgccgtccaacatacccggcagacgagagaggggacgaggtgacagacaatgtggcggtcatcgagggagaaagcatgatggataaggatgaggatctgagcagcgacagcgaggacgaagaggtggaagatggacccaaaaagaaaggatggttctcatcaatgttccagagtatttctggtaacaatgtattggagaagtctgatctgcagcctgcgctcaaagctctcaaagataggctgatggcaaagaacgtgccttgtgcaggcagaggaaattgcagagaagctttgtgaatctgtcgcagctagccttgagggcaagaagctaggatctttcactagaatatcatcaacagttcagacagctatggaggatgcgcttcttcgtatcttgacccaaggcgctctattgacatactgagggatgtgcacgctgcca

SEQ ID NO: 14682 - DNA, 439 bp, Zea mays
  Clone ID: LIB36-019-Q1-E1-F4
tcgcgggtcgacgcaagcgtctaaacagacgcgtggtacgagttcgtcaccgtctagtacgactgtgcgagggaggaagaggcgaggagaagatgcagatcttcgtgaagaccctgacggggaagaccatcaccctcgaggtggagagcagcgacaccgtcgacaacgtcaaagccaaaatccaggacaaggaagggattcccccagatcaacagcgactgatattcgctggcaagcagctggaggatggacgcacgctggctgactacaacatccaaaaggagtcaactcttcatttggtcctcaggcttaggggtggaaccatgatcaaggtcaaaactctcactgggaaagagatcgagatcgacattgaacccactgactcgattgacaggatcaaggagcgtgttgaagagaaagaaggcattcctcccgtgca

SEQ ID NO: 14683 - DNA, 454 bp, Zea mays
  Clone ID: LIB36-019-Q1-E1-F5
caggttttggactcgtgggtcgacgcaagcctctagggagactcctcacatcgcctccagatacgtgcctccggcggaaaatcggtatcgagctcgctttgttcgagtgagtaacgcgcagcgactcctctcccaaccagattttgatggattttgggcacgcgtggcacagatcttctgtatagccagcaaggaggcctctccatctcctccgggaaggctgtgcagcaatggagaagtataacagcaagactcagttagcacccttgagagataccccatttgctctccgtggtgctcttggtagttcaagctcataccttgagcaagccaggggctacacgtcttcccctctagcagctctgcgaccaaagatgtcttctactactggaaatcgactcctgcactcgagttgccccctgtcatctcctgtagcaaagcgcgcgctgtcgcc

SEQ ID NO: 14684 - DNA, 268 bp, Zea mays
  Clone ID: LIB36-019-Q1-E1-F8
gcaacactatagagtgagtcgtattaaacctcccagaacctcctcctccgcttgtctccaccctccacgccgccaccgatttatacacgcttcgtcccgccccgccgcgaccttctgttccataccatgccataccatttctcctgataaaccatccaatccagagttccattccagtctgaattgctcctcctaccttctgataagcaatcacgattgtgccatcaacactacagcgccccacgaaggccgcccgcgccccctctgt

SEQ ID NO: 14685 - DNA, 350 bp, Zea mays
  Clone ID: LIB36-019-Q1-E1-F9
aacaacctctaccccggcggccagtacttcgacccgctgggcctcgccgacgaccccgtcaccttcgccgagctcaaggtcaaggagatcaagaacggccgcctcgccatgttctccatgttcggcttcttcgtccaggccatcgtcaccggcaaggggcccctcgagaacctgctcgaccacctcgacgaccccgtcgccaacaacgcctgggtctacgccaccaagttcgcaccagggtcttaagctagctaccgggccgcggcgtgccaggacattgtgttgtacactactcgtttctgtcgtgatctgtaccatgaacgaatgcaaatattcttgtgctctcccag

SEQ ID NO: 14686 - DNA, 304 bp, Zea mays
  Clone ID: LIB36-019-Q1-E1-G10
gtaggacgacgcaagactctatagagagtcgtagtattgcgttgcgccgttgcctgggtcgcggatgcgtcggagccccgagtcgaataaaagaggcagcatcctgtcttgcatttgctgctgcgccatgtgtgaacagcctgtgtaataaacactgttgctttcgtgtgtgttcattgccttttggttggtctttgcatatcctactactgctgatctttttgtgaagcttggattggatggacgcgttttcttcaccgtaattcccttcttcctgagcgacgtgactgttgattcgaacaac

SEQ ID NO: 14687 - DNA, 234 bp, Zea mays
  Clone ID: LIB36-019-Q1-E1-G2
actacgcgtccgataacgcgtgtccagccaaatgctgaaatcacatccgacaccgacatccagcaaccaggcctctcagccaggacgtctatggcctagatccgcgctccagcagccgacgacgcagatacagatgccagtcgctccaggcatcagcacacgtcgaacgcgcaggcaaaccgacatgccgtgcccatgctcgaggccaatgcaatccttggccgtccatacatc

SEQ ID NO: 14688 - DNA, 283 bp, Zea mays
  Clone ID: LIB36-019-Q1-E1-G3
cgacgcaagactctaaactgaggccaacaacagctccggcggcgacctgttctccagcggcaagctggtggcgggggccgccgtgtcggtgttccagcagaagagcgtggagaacgtcgacaagcaggaggtcgccggcgcggcggccgagctcctgcacgcggcgtccgcgtacggtaagctcgacgacaagccggccgggcagtacgtcgagaaggccgaggggtacctgaaagagttcagcgcgggacacgccaaccgagcaagagcagcctgcggcggc

SEQ ID NO: 14689 - DNA, 432 bp, Zea mays
  Clone ID: LIB36-019-Q1-E1-G4
tcgtgggtcgacgcaagcgtctacacagattgcgtcataaaagctatatttttcatcagctgctgcctttctggggtactctctcattttggcgatactgcggacttcaagtttaagagacgaagcttctagagtcatggttgccgctcctattctggcatttgtgacaacccacattctgtacctcaacttctatgagcttgacaaaggcctaaacatgaaggtttgtactgtgataagcattgctcagtgtctcctgtgggcactgtgggctgtcatgagtgggcatcgttcgcggctcaagatcatatctgtcgccgtcggaggtgcggttgcagtacttgtggaagcctacgacattccaccgcgatggggatacgcagatggccgtgctatctgcctcgctgtggctatccccctgtcgtacctttg

SEQ ID NO: 14690 - DNA, 419 bp, Zea mays
  Clone ID: LIB36-019-Q1-E1-G9
cgtcaacaagaatgtatcctactctacttactctacaccacatgagccgttgcgccatacccacatcccggataagtattcaggttgtgcattcagccttgggtttgactctttcactacgatgtcccttggaccaaatatttgtgccaacatgacgcccatggaaagatctatatctgccaaagaacctgagaattcagaggatttgcctacagtagttagaagcagtgatgaaatggacactagaaacagtggcgacgttcgtcgtgacacagttgacactcttcctgagtcgaagcagagccatgaaagttgcgcttctgttagtaacaagttcgactctggagagtaccaagtcattttgcgcacggagttcactaagactgacgttgccaattccgggcgaattgtgcttccca

SEQ ID NO: 14691 - DNA, 256 bp, Zea mays
  Clone ID: LIB36-019-Q1-E1-H1
ccatgaccaaaaggagcatgcatggagggcgaacgaagtcacgggggtttgattgcccgtctatgtatatcatgtgtagttactgatgatgtgtgtgcatggtacttcgtacgcgtgtttggagatcgatgtgtggtgtgtgtgtctctgcatggacattttcctactctgcgttttttctctctctactgatagagtatatatgtggtgtgtcaatatatgtgtgcacgtggttttcgctcggctttttatcaat

SEQ ID NO: 14692 - DNA, 360 bp, Zea mays
  Clone ID: LIB36-019-Q1-E1-H11
cattcgacggtccaaccacgcgatagacaatccgtccacccacgcgtccgcgcacgcgtccgcccacgcgtccgcagatcgagaggtacatcacgacaaagagaggcaagagagataggggaccggagggcggcgggccggggcccaagaccgaggggctcgtgcgcaggaagctgatgaggctcctgtcgctcgtccccttcggctgccgtgctggacgcatcgacgacgcgccgccgcccgtggaccacgctgccgccgccgccgccaggaggcgcccgaggaggaggggcaacagagccggccagctgctgggggctgctgcgggtgcgccgcaacagtggggcccctcgctcgggg

SEQ ID NO: 14693 - DNA, 391 bp, Zea mays
  Clone ID: LIB36-019-Q1-E1-H12
cgcgggtcgacccaagcctctagtctcaggcctcatatctcaactcttgagcaggggaaacgagagatccttggagtcagcaatggagtctaccgcgctaatgaccgcgagactaccactgctgacctctggctcccgttccaaacccctcccctttgcttccttcaccacggcggcttgccgtctcgcctccgccccctgctccggcagcggcagcgtcgtcctgctgtcgcgccggagccgcgattatgctggcgttggttccttggtctccgccgcggcggctcctggggatacggcggacgccggatccgagtccatcctgctcagcgtccaagggatgatgtgcgacgggtgcgccgcgagcgtgaagcggatcctggagagccaa

SEQ ID NO: 14694 - DNA, 295 bp, Zea mays
  Clone ID: LIB36-019-Q1-E1-H2
tcgcaacactctagaatgagtcgtatcatccatgctctccgctaccaccgtgccactccagcaggggggcggcctgtccgagttctccgggctcaggagctccgcgtcgctgcccatgcgccggagtgccgcgtctgacgacgtcatgtccgccgtctccttcaggacgcacgcggtcggcaccagctgtaggtcgcggcgggcgcccacggaggccaagctgaaggtggccatcatcgggttcggccgcagctggcgcaagttcctgcggtgctggcacgggcgcggcgacgcc

SEQ ID NO: 14695 - DNA, 406 bp, Zea mays
  Clone ID: LIB36-019-Q1-E1-H4
caaactggttctgcaccggttccagaattttctcccatttccagggtctccccgtttctgtccggcggttctgccgttccactgcttttgatttcggagtgtgagcttacatcttgctggacaataaagattggattttaagcgatttggggggtgcttgcctgatctccccctgcgaggtactgccgggggattggatttcggggaagttttggtggtttgatattcggcttggccggagcaggaatgacgatcgacatgtccattcccgggagctccgggctgctgaacgctgcggggaagagggacatgaagttcttcagcaacccctacgtgcttgcgctcacgggcgctgcaagaatcggtggattcctctttggctacgatacaggtgtcatatctggag

SEQ ID NO: 14696 - DNA, 430 bp, Zea mays
  Clone ID: LIB36-019-Q1-E1-H5
attcaatatcatcagattcatattattaatgacatcatcaaagtacacattaataaggaggagccgtcagccgtgtaatatataacagaggagccgtagcatgaactccaagaccaattgagtactattagaacatcaccgtataccgtcaccgggcagccaacagatagacccagatagatgagaacaattgccaaaggatacaagttgccctaccttagtagagaggtaaaactcggcgccgccgccaccgacgccgagtggccatggccaccatcagtcgtcctcaacagcaaggtgagcggcaggaggcagctctatggcacgccgccctacagctacgcgccgtccggccgagaggcgcatgcagcttcccattgccaagacacacacgctcccagataagatgacgaccgccgtcgtccatgca

SEQ ID NO: 14697 - DNA, 416 bp, Zea mays
  unsure (1)..(416): unsure at all n locations; Clone ID: LIB36-019-Q1-E1-H6
tcgtgggtcgacgcaagcctctagagtgagtcgtactgaattgtcccgactcctgacccctaccgatcctcgcctgctgcagccatggcgacctccgcggcgctctccaccgccgccaatcccacccagctctaccggtcccgcgcttcgctgggcaagccggtgaaggggcttggcctgagcatgggccgcgagcgcgcccagcggagcattgtgtgccaggcggcgagcagcatctccgccgaccgcgtccccgacatggagaagcggaagctgatgaacctcctcctcctcggcgccatctcgttgcccaccgtcggcatggtcgtcncctacggcgccttcttcgtccctgccggctccgggaacgccggcggcgggaactacccgaaggacaagctgggcaaccacatcac

SEQ ID NO: 14698 - DNA, 428 bp, Zea mays
  Clone ID: LIB36-019-Q1-E1-H7
aagacgacttgtttcattgattcttgaagagatcgagcttcttttgcaccacaaggtcgaggatgtcttgcaactgcggatcaagctgcggctgcggctcaagctgcaagtgcggcaagaagtaccctgacctggaggagacgagcaccgccgcgcaggccaccgtcgtcctcggcgtggccccggagaagaaggccgcgcccgagttcgtcgaggccgcggcggagtccggcgaggccgcccacggctgcagctgcggtggcaactgcaagtgcgacccctgcaactgctgatcacatcgatcgacgaccatggatatgattattatctatctagcttgtggtggtggttgaacaataataagcgaggccgagctggctgccatacataggtaatgtgtggtgtgtgtgagacagagagaaacagag

SEQ ID NO: 14699 - DNA, 439 bp, Zea mays
  Clone ID: LIB36-019-Q1-E1-H8
tcgcgggtcgacgcaagcctctgaaaactgagtcgttgtctacaagttccccaaggacacccagcctgggctggtgagacaggaggtggggtccaagaagctcatcgcgctggggcttcagatcacccccatggagaagatcatcagggatgccgtcgagagcctcaagagccgaggccacatctcctgaatcctgatggatggcaggatgggcagtgcttgtgatgcgtgaggccgtacgtcatggaccttgctaagttgctagcgtggcttgtgtaactagttgtaataaataatgatgtcaccagacgacgacgacgaacctgagaaggaaaattgagctaatagctcgattttcagttcttaatcacgaagtttcaggtaccgaactggattggattctttgtcgcagatgaggcctagagacacacgctgaacg

SEQ ID NO: 14700 - DNA, 450 bp, Zea mays
  Clone ID: LIB36-019-Q1-E1-H9
tcgtgggtcgtcgcaagcctctataatgagtcctactagcgagagcagcacacacgcagctagctaggagcagcagcatagcagcggcgatggcggcctccatgatctcctcgtcagctctggcggtggcgcctcagggcctgccgcccctcggccgccgcgcctcctccttcgccgtcgtctgctccaagaagaagatcaagaccgacaagccctacgggattgggggtggcctgaccgtcgacgtcgacgccaacgggagaaagggcaagggcaagggcgtgtaccagttcgtcgacaagtacggcgcgaacgtcgacggatacagcccaatctacaacgaggatgactggtctcccaccggcgacgtctacgtcggtggaaccactgggcttctgatctgggccgtcaccctcgctgggatcctcggcggcggcgccctcctcgtct

SEQ ID NO: 14701 - DNA, 444 bp, Zea mays
  Clone ID: LIB36-020-Q1-E1-A11
gtcgtcggaccactctaaactgacgtcgtgactatgtcgcttccaggggtttctcttctactgaaacagttgtcccaaggaaccaagacgccggcctagctgacctcccagcaactgtggctgctgtgaagaatcctaaccctaaggtggtttatgatgagtacaaccatgaaagatatcctcctggagatcccagcaagcgtgcctttgcatactttgtcctgagtggtgggaggttcatatatgcatcactgctgcgtcttctcgtactgaagtttgtcctgagcatgtcagcaagcaaggatgtgcttgcccttgcttcacttgaggtggacctctccagcatcgagccagggaacacagtgaccgtgaagtggcgtggaaagccagtcttcatcaggcgtcggacagacgatgacatcaagcttgccaacagtgtggatg

SEQ ID NO: 14702 - DNA, 435 bp, Zea mays
  Clone ID: LIB36-020-Q1-E1-A3
ggtccgggcaagcctctaaactgagtcgtgttaggtttttcgatgacaagctgggggcgctctgcatgcaatggttggaagacaaggtcttttcaatcagagatgctgccgctaacaacttgaagcgccttgcagaagagtttggtccagagtgggcaatgcagcatataatccctcaggtgctggagaagatcaacaacccacactatttataccgcatgacgattctgcaggcaatctccttgctagctcctgtcatgggtgcagagatcacctgtcaaaagctgcttccagtcgtcattaattcttcgaaggacaaggttcccaacatcaagttcaatgttgcgaaagtactacagtcacttgtaccgatcctcgaccaatctaccgtgaaaccgtgcctcgttgagctcagcgaggaccctgacgtcgacg

SEQ ID NO: 14703 - DNA, 443 bp, Zea mays
  Clone ID: LIB36-020-Q1-E1-A4
gggtcgacgcaagcgtctaaactgagtcattatatcggcgtcaccgtcaccgccgctttccgagctctcatggcggcgtccgcgtcctccctccttgccgcccccgcatcctcatcctgtggggccatctccccccagctccctcgtggagctccggccgctgcctccgtcgcttcgccgtcgcgtcactcctgctacctcctccgcgcttccccttcgaggcgccatcggagtcgcttcgtagccaacgccgctcccaccatgcagcctccggcggagtccaaggtctccacggtagtcgatgtcgacctcgggcgacgtagctatccgatctacatcggcgcaagcctcctcgacgagcccggacctgctgcagaggcatgttcatggtaagagggttctggtggtgaccaacacgaccgtcgcgccgctttacctggaca

SEQ ID NO: 14704 - DNA, 337 bp, Zea mays
  Clone ID: LIB36-020-Q1-E1-A8
gacgcaacactctagactgagtcgtagtacgcgttcgggattctctaatgccacatggtggatccgcggatggtgaagctcagtcaaaagttcgataccctccacatccttcgcgcgatactggactcttccacgggaacgttcatcattgccggccgcgacggcacggaggatgggaatcgcgcgatctccactgggtatacggatttggtcccgttcgggcgcgtgttcatggctaaccctgacctgccacggacgttccagctagacgctcaccttaacacgtactacagagacacgttttacatccctgatccggttattggatccctgacga

SEQ ID NO: 14705 - DNA, 446 bp, Zea mays
  unsure (1)..(446): unsure at all n locations; Clone ID: LIB36-020-Q1-E1-B10
gggtcgacgcacgcctctaatctgagtcgtactaagcgagcgagagcagcacacacgcagctagctaggagcagcagcagagcagcggcgatggcggcctccatgatctcctcgtcagctctggcggtggcgcctcagggcctgccgcccctcggccgccgcgcctcctccttcgccgtcgtctgctccaagaagaagatcaagaccgacaagccctacgggattgggggtggcctgaccgtcgacgtcgacgccaacgggagaaagggcaagggcaagggcgtgtaccagttcgtcgacaagtacggcgcgaacgtcgacggatacagcccaatctacaacgaggatgactggtctcccaccggcgacgtctacgtcggtggaaccactgggcttctgatctgggccgtcnacctcgctgggattctcggcggcggcgccctcct

SEQ ID NO: 14706 - DNA, 175 bp, Zea mays
  Clone ID: LIB36-020-Q1-E1-B11
cggaccactctaaagtgaatcgtatgacatcaaggcgttggcaatcgcactcgattcctcggagcactcgcagtttcgcgtcacagctggccaccgtgatagcctcgtcgtctcaggtcgtcgcgctacaggcactcgcccacctaggcatacggaccgcgcgctgcgccatcct

SEQ ID NO: 14707 - DNA, 387 bp, Zea mays
  Clone ID: LIB36-020-Q1-E1-B2
gtccacgcaagactctaaactgacgtcctgactacgcgtccgttttttttgacacgaggaactcatcatgaatccactaattgctgctgcttccgttattgctgctggattggccgtagggcttgcttctattgggcccggagttggtcaaggtactgctgcaggacaagctgtagaaggtattgcgagacagccagaagcacaaggtaaaataagaggtactttattgcttagtctagcttttatggaagctttaacaatttatggactggttgtggcactagcgcttttatttgcgaaaccttttgtttaatcctaaaaaacaacaattagtcctttaaaattagatacttttttctttttttagtacattggcatttgcctatg

SEQ ID NO: 14708 - DNA, 449 bp, Zea mays
  Clone ID: LIB36-020-Q1-E1-B3
cgggtcgacgcaagcctctacactgacgtcgtgagtagcttcgaccccctcggcctggccgacgaccccgaggccttcgccgagctcaaggtgaaggagctcaagaacggccgcctcgccatgttttccatgttcggcttcttcgtccaggccatcgtcaccggtaagggcccgctcgagaacctcgctgaccacatcgctgacccagtcaacaacaacgcatgggcctacgccaccaacttcgtccccggcaactaagctcaacggctatgctatgcaacttcattgtctttcggatcggagaaggtgtacgtacgtggattgattgatgctgcgatatgcatgtgtgtcatttgtttcacgttgcattgcataagcaagtcgacatgattagttggcgttgtacactaagatgaaccatgtttgtgcaatagtggtggtttttgttt

SEQ ID NO: 14709 - DNA, 419 bp, Zea mays
  Clone ID: LIB36-020-Q1-E1-B4
gcgggtccacgcaagcgtctacactgacgtcgtgactacctttcctttcctttcctatcctcgtgccctcgaatcggaaacccagccagccatgtcgtactacggcgaccggcgcgcggagtcgtcgatcgtggaggcgttcacgctgtcgccgctgccgtacccggtgatcctggtgctgctgatggtgacgctgctgctgggcgcctcgtggttcttcacgtacgacgacttcatcgaggaggcgtcgcagcagctgagctgggcgctgctgggcgtgcccatcgcgctcgtcctcctcatctgctggatctcctccgtcgactccttcgagggctacctgcgcttctactcgacggagagccgctggaagggccgctacgagcggggcaccgccgatggcagctcgcactggggcg

SEQ ID NO: 14710 - DNA, 387 bp, Zea mays
  Clone ID: LIB36-020-Q1-E1-B6
tcgtgggtcgacgcaagactctacagtgacgtcgtgactaacgcgtggccaagtccgtctccgtgaagacgctcgccctgttcggcaaatccaaggtcaagaccgcgccggcgaagaaggctgctgcgcccaagcccaagccgaaggttgaggatggtatcttcggcacgtccggcgggatcggtttcaccaaggagaacgagctgttcgtcggccgcgttgccatgcttggctttgccgcatcgctacttggagaggccattaccgggaagggcatccttgcgcagctgaacctggagacgggcatccccatctacgatgcggagcccctcctcctgttcttcatcctcttcaccctccttggcgccatcagcgctctcggagacc

SEQ ID NO: 14711 - DNA, 456 bp, Zea mays
  Clone ID: LIB36-020-Q1-E1-B8
tcgtgggtcgtcgcaatcctctaaagtgacgtcgtgacttatcgcgtccgcccacgcgtccgggagaaccaagagcagatagacatggcgccccaccagcagcagcgggcgctgctcctgttcccactcgtcttcctcctcctcctccttgccccgcccctcgccggcgcgtggggaaaggagggccacatcatggtctgcaagatcgccgagaagtacctgtcgggagaatgcggcggcggcggtgcatgcgctgctgccggagtccgcgggcggggatctgtcgacggtgtgcccgtgggcggaccaggtgcgctggcactaccactgggccagcccgctccactacgccaacaccccccaagtctgcaacttcaagtattctcgggactgccacaattctcgtggccagcaagggatgtgcgtcgtcggggctatcaacaactacacggacca

SEQ ID NO: 14712 - DNA, 429 bp, Zea mays
  unsure (1)..(429): unsure at all n locations; Clone ID: LIB36-020-Q1-E1-B9
actctagggtccacgcacccctctaaagtcactcgtgctaacgcgtgggcgccgcaccagcgccagcccgcgccgtggtcagaaggaggtccttcaccgtgcgcgcctctctccgcaaggccaccggcaccgccgccgtggcaatggctgccagcgccctgcttgccggcggtgccatggcccaggaggtgctgctgggcgcaggcgacggcgggctcgtcttcgagcccagccagttcaccgtcaaggccggcgacaccatcacattcaagaacaacgccggcttcncgcacaacgtcgtcttcgacgaagacgaagtgccgagcggcgtcgacgccaccaagatctcgcaggangagtacctcaacgcgccaggcgagacctactccgttcacctcaccgtgccgggaacctacggcttccactgcg

SEQ ID NO: 14713 - DNA, 325 bp, Zea mays
  Clone ID: LIB36-020-Q1-E1-C1
ctctagattaaatgatattagagatacaaggcgatacagagaaagttctaaaagcactgcaagcagtttcaaatcatcttcggaagtttttggctgatcatagtgtacttccattatttgacaagactaatactacagtgagccaaattcgcaatggtgatggttggagcgatatgtcacgtccttcaactggttctgcacaagtgaatcaactaccttcagtagtagatgactatattcttcaagtgaagagggatcctccgataattgagcgagaacctttggtagatcagagcattcatcgctcacgcctatcacgttatgg

SEQ ID NO: 14714 - DNA, 433 bp, Zea mays
  Clone ID: LIB36-020-Q1-E1-C10
cgcacgactctagactaattccatgagactacggctgggacaccgccgggctgtccgccgaccccgagaccttcgccaagaaccgcgagctggaggtgatccactcccgctgggccatgctcggcgcgctcggctgcgtcttccccgagctgctctcccgcaacggcgtcaagttcggcgaggccgtctggttcaaggccggctcccagatcttcagcgagggcgggctggactacctcggcaaccccagcctgatccacgcgcagagcatcctcgccatctgggcctgccaggtcgtgctcatgggtgccgtcgagggctaccgcattgccggcgggccgctcggcgaggtcgtcgacccgctgtaccctggcggcagcttcgaccccctcggcctggccgacgaccccgaggccttcgccgagctcaaggt

SEQ ID NO: 14715 - DNA, 436 bp, Zea mays
  Clone ID: LIB36-020-Q1-E1-C11
gcacgactctaaagacacatcgtggaaccaagtactgcctttggatccttggaaatggaaccactttactggctagcaattcaatatgggctgatttagtccgtgattcaaaaaggcgcagatgtttctttgatgcttttaaggataaggacttagcagaagtagtcatgtttgcaactaagcctgagcaatggaatcgaagagaacaggtccgtcctggtggtgccatcaggagccttctaatctcgttcgagtgctgctgccctgaaaccggtttctaaaagatcctggagtgagcaatataggatgagtgaagtaataccatagtgtgctgccctgaaaccggtttctaaaagatcctggagtgagcaatataggatgagtgaagtaataccatagtgtgcttgaaagatatacttgtttggattttctggct

SEQ ID NO: 14716 - DNA, 382 bp, Zea mays
  Clone ID: LIB36-020-Q1-E1-C3
ggtcgaggcaagcctctagatgcagtcgcatcagtccagcgtttcctgctcgtcaacagcgcagcagttgcatgcgggcgtcggcaagttcgccgccgccgcatgctggagctggaagaagaagcgcgaggagctcccctgcttcagggccagactggccgccaagccgccgcgcgcctcaccggcgaagggcggcattgttccggccagctacgatgacgacggcgttagcctcggcaccgtgaagctgccgggcaacatcgacaccgctcggttggagtccttgctcttccagtgggggaacagcctctgccaaggcgtcaacctgccacttccggtgcctctcaaggtcgacaaggttgagggcgggatcacgctacgg

SEQ ID NO: 14717 - DNA, 222 bp, Zea mays
  unsure (1)..(222): unsure at all n locations; Clone ID: LIB36-020-Q1-E1-C4
gtcgacgcaagcctctatagtgacgtcgtgctgaagcgtgggcggacgcgtggggtgctctggtcgatgccgtacgtgtgtcnctgatacaatactattttagtactgatgctagtcatcatatatatcgatcgagctcgccactgcgaagtctgagataatgcatgtatgcttgacggcgagatctgaggaaaaataatttctatatatgcatgtttcgag

SEQ ID NO: 14718 - DNA, 446 bp, Zea mays
  Clone ID: LIB36-020-Q1-E1-C6
ctcgtgggtcgacgcaagcctctacacacacttctgctacgcgtccgggaaaactccaactaaacaacggactttctggtttggcagcacaaaagaccagcgggaagcctgatttgtttgcatattataaggaaaaggaattatcatttgcaggtagtgacaaagttgcaaattcagaagaaaacaaaccaaatggtgctgttaaacatatgcaaaatctggacttgccagcacaacagaaaaacgacaaaaatgattgtgatcgcaaggcagaggagttttcctctgcattagaggatgaatcatcaaaatcaccaactcatacagtgccaaaaccacctagataccctctacttcctgttacttctcatgacagaagcatgctaagaaaggtaccaactttggttcagccttcgagtaagcttgcagatgagaagaacacacta

SEQ ID NO: 14719 - DNA, 400 bp, Zea mays
  Clone ID: LIB36-020-Q1-E1-C7
gcaaccggtccagcactttcacgctcagctccagcaatggctgcctccaccatggcgatctcctccacggcgatggccggcacccccatcaaggtgggctccttcggcgagggccgcatcaccatgcgcaagaccgtgggcaagcccaaggtggcggcgtccggcagcccctggtacggccccgaccgcgtcaagtacctcggccccttctccggcgagcccccgagctacctcaccggcgagttccccggcgactacggctgggacaccgccgggctgtccgccgaccccgagaccttcgccaagaaccgcgagctggaggtgatccactcccgctgggccatgctcggcgcgctcggctgcgtcttccccgagctgctctcccgcaacggcgtcaagt

SEQ ID NO: 14720 - DNA, 416 bp, Zea mays
  Clone ID: LIB36-020-Q1-E1-C8
agacctcctcagacccgaagaagcgcactctgcggcacatgagacgcacaccggacacggaactcgagggaaagcgaaaaaaggagaggcccgtctcaaagcccgcgggcccaggaaaaaatctgtgacaaggtccctgaaagccgggctccagttccccgtctgccgcatcgggcgctacctcaagaaaggccgctacgcgcagcgcgtcggcagcggtgcccccgtctacctcgcggccgtcctggagtacctcgccgctgaggtcctggagctcgccggcaacgctgccaaggacaacaagaagacgcgcatcgtcccgcgccacgtgctgctggcgatccgcaacgacgaggagctcgggaagctgctgaccggcgtgaccatcgcccacggcggcctgttgcccaacatca

SEQ ID NO: 14721 - DNA, 447 bp, Zea mays
  Clone ID: LIB36-020-Q1-E1-D1
gggtcgaggcacgcgtccgcccacacgtccgataagacaaacgccggcacgcgcacgcagacacgatggcgatctgcagcgcgcacactaccacctccctgcgctccccatgcacgaccgtctcgaacgcaggtctgaggcagaagcaagtcatcttcgtcaccagcaacaggaggagcggcggcggcaggaggcacggaggggcaaggagcttccaggtctcgtgctccgtcgacaagccggtggtgattggcctggcggcagactcagggtgcggcaagagcaccttcatgcgccggctcaccagcgtcttcggtggcgccgcggagccgcccaagggcgggaacccggactccaacacgctcatcagtgacaccacgacagtgatatgcctcgacgactaccattcgctggacaggaactgcaggaaggagaaaggtgtgaccg

SEQ ID NO: 14722 - DNA, 415 bp, Zea mays
  Clone ID: LIB36-020-Q1-E1-D12
gcaagactctaaactgagtcgtaatatcggctccgtctccgccaagttccccgcgcgggacttcaacgccagcctcgactgccccgcccaggcggcgtcctaagtcaaggaggtatcctgtcgcatgttccatgacatgtgacattctaaaggggcagttggaagccaagcacatcaatgtttttaatttcatctgtctttactgtaattgtataagtttacaatagatgcatagaacagactggatcgataaaagcgccttcacagaccaaaaacccggtatcacggtactggttcgtgcatttcgttagaaatgccctacgtcttattttgaaaagttgtgcttgtatatcttacttattgacaatagctgtacttataagactacttgcatacagaagatcagtgaggtgca

SEQ ID NO: 14723 - DNA, 410 bp, Zea mays
  Clone ID: LIB36-020-Q1-E1-D4
tgcacacacgttctgcccacgcgtccgcccacgcgtccgcccacgcgtccgaatccacactccacaagcagccatggcgccacccatcacgtccctgtcgtctctcatggcgtccagcccaatcccgacgccgccaccgccgctcccgaagaccagcggcagagcgctctccgtcgcgccctgcggctccgcgtcgtcctcgtcgccgtccacttcctcgactcctcatccggtggcggcgtcggcgggcaggagggggctgctggcgctgggcgccgggttcctggcctcggccgcgctgctgtccccggcgggcgacgccggcgccacgcgcatcgagtactacgcgacggtcggggacaagatgtgcgacctgagcctcgtcaagtccggcctcgcgtactgcgacg

SEQ ID NO: 14724 - DNA, 179 bp, Zea mays
  Clone ID: LIB36-020-Q1-E1-D6
taccaatcctcatgctaatgcaagagatcctgatcacagcaaacccgtcccggtggagatagattacaacacctgtacgatacctcagccactagtcacaatttgacgagggttcggtaacgatatagggaacattccatagagggtacgttatttggttccaagcctttagcccccca

SEQ ID NO: 14725 - DNA, 91 bp, Zea mays
  Clone ID: LIB36-020-Q1-E1-D7
aggagaagctcgtgcccctgtacggccgcggcaaggaccgcgtctaccccaggtccaagaacgtcccccgggcggccgacatccccagccg

SEQ ID NO: 14726 - DNA, 438 bp, Zea mays
  Clone ID: LIB36-020-Q1-E1-E1
gctcgagacaagactctacactaacttgtgtcatgctagtcgccaactataggacaaccatgccgaatctgtccgttgtggctcctgaactgaagacagactccttcgactgggcctgatcttaccacggtccgggaaggcacatcctcattgtgacgggtgtcatcccaatgctgagtgccgcaactgccaaagtctttgacatccaagccactgaccaagctattgattttgccattgaaaatgcgaagacgatggggctatgtaaaaccgatgaatccgttgtggccctgcaccgcatacggatttcatctgtcatcaagcttcttactgtgaagtatgggtccaaaggtgacggacaccattttgcttggtgaatttttgtgaggctacttactcacataagcgtatccacagcttttctattgccaaagatac

SEQ ID NO: 14727 - DNA, 400 bp, Zea mays
  Clone ID: LIB36-020-Q1-E1-E2
aacactctatagtgacgtcgtattacacgtccggcggcgccctcggcctcagcgagggagggccgctgttcgggttcaccaagtcgaacgagctgttcgtggggcggatggcgcagctgggcgtggccttctccatcatcggcgagatcatcacggggaagggcgcgctggcgcagctcaacatcgagacgggggtgcccatcaacgagatagagccgctcgtcatcttcaacgtcgtcttcttcgtcatcgccgccatcaaccccggcaatggcaggttcatcatcggcgaggaagacgaatatgctgctggctgctgctggctggcctcggacatgagtcgtgtgcgtttacttttacctgtgactgtgcgtctcggtgcgcgcgcgtaagtgctttg

SEQ ID NO: 14728 - DNA, 439 bp, Zea mays
  Clone ID: LIB36-020-Q1-E1-E3
gggtccacacaagcctctacacagacttcctgcactggaacactctcggcgagtgcaagtacaccatcggcggcgacctcggcggcggcgagggccacaacgggtgggtctcctgcgttaggttctccccaaacaccttccagcccaccattgtctccggatcctgggaccgcaccgtcaaggtctggaaccttaccaactgcaagctgcgctgcactctggatgggcacggtggctatgttaacgccgtcgctgtgagccccgacgggtcgctgtgcgcctccggcgggaaggacggtgttactctgctgtgggatttggctgaggggaagaggctgtactcgctggacgcgggctccatcatccactctctctgcttctcacccaaccgctactggctctgcgctgcgacgcacgactctgtcaagatctgggacct

SEQ ID NO: 14729 - DNA, 116 bp, Zea mays
  Clone ID: LIB36-020-Q1-E1-E4
gtgggtctcccgcgtcatgttctacccggagggcttccagcccatcattgactccaaatggcgggactacaccgtcgtggtctagagccttaacacctggcagctggccgtcatcc

SEQ ID NO: 14730 - DNA, 405 bp, Zea mays
  unsure (1)..(405): unsure at all n locations; Clone ID: LIB36-020-Q1-E1-E6
atggaagcacagaacaaattttattttcttcagccggagatgttgatgtatatgatctccaagccttatgcaataaggtaggatggccacgcaggcctctttcaaagatagcagcctcattaagaaatagctacttggttgctacactatattcaataattagatcttcagaaacagagggagaagagaagaaacagctcattgggatggcacgagcaacctcagaccatgccttcaatgcaacgatttgggatgtccttgttgatccttcataccagggtcagggtcttggtagagcactcatggagaaagtaattcgtactttgctccagcgagacatcaacaacattacactgtttgcggataacaaagttatagatttctacaagaacctgnggttcgaag

SEQ ID NO: 14731 - DNA, 411 bp, Zea mays
  Clone ID: LIB36-020-Q1-E1-E7
cccacgcgtccgcaacgtgttcggcaagaccaagaagaacacggacttcatctcctacgtcggcgacggcttcaagctgctgatcccgtccaagtggaaccccagcaaggagcgggagttccccgggcaggtgctccgctacgaggacaacttcgacgccaacagcaacgtgtccgtcatcatccagcccacctccaagaaggccatcaccgagtacggctcccccgaggagttcctctcgcaggtcgactacctgctcggcaagcatgcctacggcggcaagaccgactccgagggcgggttcgagaccgacgccgtggccaccgccaacgtgctggagagctccacccccgtggtggacggcaagcagtactacagcatcaccgtgctgaccaggacggcggacggcga

SEQ ID NO: 14732 - DNA, 446 bp, Zea mays
  Clone ID: LIB36-020-Q1-E1-E8
tcgcgggtcgacgcacgcctctacagtcacttgtgctgacgcgtgggttcgcgtccaagcagtccctctcctacctcgatggcacgctgcccggcgactatggcttcgacccgctgggcctctcggacccggagggcaccgggggcttcatcgagcccaagtggctggcctatggcgaggtgatcaacggccgctacgccatgctgggcgcggtgggcgccatcgccccggagatcttcggcaagatgggcatcatccccccggagaccgcgctgccgtggttcaagacgggcgtcatcccgcccgcgggcacctacaactactgggccgactcctacacgctcttcgtcttcaacatggcgctcatgggcttcgccgagcaccgccgcctccaggactggtacaacccgggctccatgggcaagcagtacttcctcggcctcgag

SEQ ID NO: 14733 - DNA, 442 bp, Zea mays
  Clone ID: LIB36-020-Q1-E1-F4
gtcggacaagcctctaaactgagtcatcatatttggaggctacaaatgacaatggtcgccaaaagcctcaagatattgacccgatccaagttgacctgcttttagggaaggcttattccgattggggtcatatcagtgatgctatttctgtctacgataagctaataactgatcatcctgaagacttccgtggttatttagcaaagggaatcatattaaaggaaaatggtaaagcaggtgatgcagaaagaatgtttattcaggcaaaattcttcgccccggaggcagcgaaggcactagttgatcgctatgcgcaaagatagtcgataagagattgaatggtgttgttttaaaccaatgagatcattcggattccagaaaaacgatcaacatgtttggaacgtcttgtatgatagcaacattatgggatctgggacatttt

SEQ ID NO: 14734 - DNA, 405 bp, Zea mays
  Clone ID: LIB36-020-Q1-E1-F5
gcgcgacctcagggtgcctgtgcctgctcccgctgttccttcctcatggccaccgcctgccacctcgccgcgccgctcggcctcgccccgttgccccgcggctgcgcctctgctggcgtcgtggccgtcgtccggtgcgctcggtcgtcaggctccaagattccgagaggcgttgctgtcagggcgacgtccggcggcgagggcgccacggaggaggtgccggagattgtgaaggctgcgcaggacgcgtgggacaaagttgaggacaagtacgccgtggccaccatcggtgtcgctgccatcgtcgcgctctggacggtagtaggtgccatcaaggccatcgacaagcttcctcttctgcctggtgtccttgagattgttggaattgggtatacaaggtggttc

SEQ ID NO: 14735 - DNA, 419 bp, Zea mays
  Clone ID: LIB36-020-Q1-E1-F6
gtcgcagctgacggacgactgaaccaccgacagacaacatggccgcctccgcctccaccgtctccggcctcgccggcgcctccctggccagccgcccggcgttctccaccagcttcacgcggggcagccgggtgtcggcgaggaaccccctgatgagcaggaacctggagaggaatggcaggatcacctgcatgacgtttccccgggactggctgcggagggacctgagcgtcatcggcttcgggctcatcggctggatggggccgtccagcgtcccggccatcaacggcaacagcctcacggggctcttcttctccagcatcggccaggagctggcccacttccccacgcccccgcccgtcacctcccagttctggctgtggctagtgacgtggcacctgggcctgttcatcgtgctc

SEQ ID NO: 14736 - DNA, 415 bp, Zea mays
  Clone ID: LIB36-020-Q1-E1-F7
ctcgcgggtcgacgcaagcctctagaatcagtcgtattaggtccagcactttcacgctcagctccagcaatggctgcctccaccatggcgatctcctccacggcgatggccggcacccccatcaaggtgggctccttcggcgagggccgcatcaccatgcgcaagaccgtgggcaagcccaaggtggcggcgtccggcagcccctggtacggccccgaccgcgtcaagtacctcggccccttctccggcgagcccccgagctacctcaccggcgagttccccggcgactactgctgggacaccgccgggctgtccgccgaccccgagaccttcgccaagaaccgcgagctggaggtgatccactcccgctgggccatgctcggcgcgctcggctgcgtcttccccgagctgctct

SEQ ID NO: 14737 - DNA, 435 bp, Zea mays
  Clone ID: LIB36-020-Q1-E1-F8
aggacgcgtgggttgcgattcgctcgctcgatcctagcttcccttccaagaagcgcagcgcccatggccatggccacgcaagcctccgccgccacgcgccacctgctggccgccgcctgggcgccggcggcgaagccgcggcagctgagctcgcagctcgcgctgccgtcgtcgtcctcccgcgggccggccccgctccgcgcgtccaccgaggaggcggtggaggcgcccaaggggttcgtggccccgcagctggaccccagcacgccgtccccgatcttcggcggcagcacgggcgggctgctccgcaaggcgcaggtggaggagttctacgtcatcacgtggacgtcccccaaggagcaggtgttcgagatgcccaccggcggcgccgccatcatgcgagagggccccaacctcttgaagctggcgcgcaag

SEQ ID NO: 14738 - DNA, 413 bp, Zea mays
  unsure (1)..(413): unsure at all n locations; Clone ID: LIB36-020-Q1-E1-G1
gtcggaagctctgggcctgggcaactgggtgaaggcgcaggagtgggcggccgtccccggcgggcaggccacgtacctgggcgccccggtgccgtggggcacgctgccgaccatcctggtgatcgagttcgtggccatcgccttcgccgagcaccagcgcaccatggagaatgaccccgagaagaagaagtaccccggcggcgccttcgacccgctcggcttctccaaggaccccgccaagttcgaggagtacaagctcaaggagatcaagaacggccgcctcgccatgctggccttcgtcggcttctgcgtccagcagtcggcgtaccccggcaccggcccgctggagaacctcgcctcncacctcgccgacccgtggcacaacaacatcggcgacatcaacatcccccaga

SEQ ID NO: 14739 - DNA, 438 bp, Zea mays
  unsure (1)..(438): unsure at all n locations; Clone ID: LIB36-020-Q1-E1-G3
gggtcgagacacgcgtctgcacacacgtctggaaggttcctgaaatttactgggcacacactactcctcaggttttaacaatggagtatgtcncaggaattaaaattaacagaataaagcagttagataagttaggagtcgatagaaaaagattaggtcgttatgctgttgagtcctaccttgagcagatcttatcccatgggtttttccatgctgacccgcatccaggaaacattgctgttgatgatgtcaatggagggagacttatcttctatgacttcgggatgatgggaagtatcagtcaaaatattcgggaaggattgcttgaagtattctatggagtttatgaaaaggatcctgacaaagtgcttcaagcaatggttcaaatgggtgtccttgttcctactggagatatgactgctgtcagaagaaacgctc

SEQ ID NO: 14740 - DNA, 442 bp, Zea mays
  Clone ID: LIB36-020-Q1-E1-G4
gtccacgcaagcctctacagtaagtcgtataaggcagtttttcttcaacaacgaggggcagatctggcgcagtgttgagttgtgggttttcaaaccagcctcttcgcatttagggaggaagatttgcatctgtttatctctttctcatacctcatttacgtgggagcctcgatctgcctttttaacgtgagcccgcgttgctcacctttggcgccgccactcccgttcttaaagatcaatcagctgtaattttttctctgatggccactggccacggtagcgttcatattcttccgattagcaattgtatgtagaggagagttgtgatggaaagcatgtgtgtgtttgccatgacgacgctgtaaaaacctgaaacacttatttctaggggggtttccactccaaaatggaagtggagagatgtgtcctgataattggtgcc

SEQ ID NO: 14741 - DNA, 426 bp, Zea mays
  Clone ID: LIB36-020-Q1-E1-G5
cggagacgttcgccaagaaccgggagctggaggtgatccactcccgctgggccatgctgggcgcgctcggctgcgtcttccccgagctgctcgcccgcaacggcgtcaagttcggcgaggccgtgtggttcaaggccggctcccagatcttcagcgagggcgggctggactacctcgggaacccgagcctcatccacgcgcagagcatccttgctatctgggcctgccaggtcgtgctcatgggcgccgtcgagggctaccgcatcgccggcggcccgctcggcgaggtcgtcgacccgctctaccccggcggcagcttcgacccgctcggcctcgccgacgaccccgaggccttcgccgagctcaaggtcaaggagctcaagaacggccgcctcgccatgttctccatgttcggattcttcgtcc

SEQ ID NO: 14742 - DNA, 451 bp, Zea mays
  unsure (1)..(451): unsure at all n locations; Clone ID: LIB36-020-Q1-E1-G7
ctcgtgggtcgacgcaagcctctagaatgtgtcttagtagatcgatccatcgatcgctagctagctgacgaccatggcgtccctctcctctgccgccatcaccgccccttccttcacggccgcgcccgctcgcgcagtggtcagcaggaggtccttcaccgtgcgtgcctctctccgcaaggccactgccaccgccgccgtggccgttgccgccagcgtcctgcttgccggcggcggcgccatggcccatgaggtgctgctgggcgcacgcgacggcgggctcgtcttcgagcccagccagttcaccgtcaaggccggcgacaccatcaccttcaagaacaacgccggcttcccgcacaacgtcgtgttcgacgaagacgaggtgccgagcggcgtcgacgcctccaagatctcgcaggangagtacctcaacgcgccaggcgagacctac

SEQ ID NO: 14743 - DNA, 432 bp, Zea mays
  Clone ID: LIB36-020-Q1-E1-G9
gggtcgacgcacgcctctacagtgacgatcatcatgacgcccgcaatggcactcgtctccgcctcctcgtcctccaccaccgccgtcacggcgctccccaggaatgggcagcgggcgtcgtcctccttcctcggcggcaagacgctgctgagacaggccgaggcggcccggccgtcgttcgccgtgcgcgccgcggcggaccccaacaggccgatctggttccccggcagcacccctccgccgtggctcgacggcagccttcccggcgacttcggctttgatccctggggcctcggatctgacccggagagcctgcggtggaacgtgcaggcggagctggtgcactgccggtgggcgatgctcggcgcggcgggcatcttcatcccggagttcctgaccaagatcggcgtcctcaacacgcccttctggtac

SEQ ID NO: 14744 - DNA, 428 bp, Zea mays
  Clone ID: LIB36-020-Q1-E1-H1
ctccacccaggaccgccgccctcatccgtctcccccgtcttcctcgccctcgtctacctcgcgctcgtcggaaaaaacagctcaggtgagtcatctacctcgctctcatccatctcgtgtcttcctcaccctcttcctctgctcatctcgacgatctggaggtcgcgatctggaggtgtgtctatcaaggggattcccaggatcgcgtaggatctgcagctctggagcgcgcgggcgtcggggaagtagcggtaggatctgcagccggacgggacggggcctgaaggtccagcgccgctctggacctcgcgtgggtgaagtccgaagcacagtggcctctccttggtttcactctcctcctcgtcgttgtccaatctggcgccagcaatgcccgagaagcgagcgctgctaccaggaacgcccgtgaa

SEQ ID NO: 14745 - DNA, 423 bp, Zea mays
  Clone ID: LIB36-020-Q1-E1-H10
cgacttcatcttcgacttcttcaaagccgaggtgctgtcggcgctcatctacagagtgaggaactcgccgcctgacagatacgcttgtttggtggctgaagaagctgaggcaggcgaccagccgtcaaaggcaccatatgagaagatcgtcggggttgtggattgcacggtgcaggacgaagacggcatcctaaagcaccttcgaggaggcgcggattaatacctctacgtgtcaggaattgcagtcttgccatcattcaggaggaggaaggtacggaccgcactgctgaaggcctgcgaggcactggggctccaatggaagcacgtgttcatggttctgaaggcgtacgaggatgacgacggcgctcgaggcctctactccaaggcagggtacagggtcgtgtcaagggattcagactgggt

SEQ ID NO: 14746 - DNA, 313 bp, Zea mays
  Clone ID: LIB36-020-Q1-E1-H11
cacactcatcagccacagcccacgtcacgctatctctctagcggtccagccagtccacacagcacagggatgacatagttcgccgtgaccacggcgcagatcatcacagcgcacgcagcaagtatgacgcgaacgctggcataacatacgctcgagaccaggattgccaagagcaggacaaacggggccagcactggcaccatactcggagtgcgcatgagtacctattcctctctcgctgagctcctgttctctcaggtacaattcagcaagtaaggactccactgcgcataccgcgccaagcttagaggca

SEQ ID NO: 14747 - DNA, 421 bp, Zea mays
  Clone ID: LIB36-020-Q1-E1-H2
gtcgacgcccgcctctacagtgagtcgtactaggtccacgcgcagagcatcctggccatctgggcgtgccaggtggtgctcatgggcgccgtcgaggggtaccgcgtcgccggcggcccgctcggggaggtggtcgacccgctgtaccctggcggcagcttcgacccgctcgggctcgccgacgacccggaggcgttcgccgagctcaaggtgaaggagatcaagaacggccgcctcgccatgttctccatgttcggcttcttcgtgcaggctatcgtcaccggcaagggccccctcgagaacctcgccgaccacatcgccgaccccgtcaacaacaacgcctgggcttacgccaccaacttcgtcgccggcaagtgagcgagggcatgatgcttgcatgcgtgtaccgtagacgtaccgt

SEQ ID NO: 14748 - DNA, 89 bp, Zea mays
  Clone ID: LIB36-020-Q1-E1-H4
aacaccctaaagtgagtcatatgatatgcgttggtgcataaaagtgctgtaaccacgaataaaaaaccatactaataacatgtgttttt

SEQ ID NO: 14749 - DNA, 427 bp, Zea mays
  Clone ID: LIB36-020-Q1-E1-H6
cacgcgtccgaaacacttcgacgtcgcacgggcgctgcacacagacacaccaagcgtcggcaccaatggcttactaccaggaggtggactactgctcggaggaggtgaggtcggtggccccggccggcttcggccgccacggaggcggcgtccagcagcacgtcgtcaaggagaagttcgaggaggtcgacacggtctcacgcgccggcgccaaccaccaccaccaccaccatggtcaccacggcggccacggcttcgtggtgcgcgagaccatggtcgaggaggacatcaacacctgcaccggcgaggtccacgagcgcagggagagcttcctcgccagggctaactgagccgcccggcggccggcatccacgcccgttcgtgcctgcctgcgtgccttatgtatgtctgtggttgactggttgtg

SEQ ID NO: 14750 - DNA, 420 bp, Zea mays
  Clone ID: LIB36-020-Q1-E1-H7
cggacgcgtgggaaaccttgaggttgtacccagcaggtgcctttgtttcaaggcaggccctccaggaactgaagctcggtggcgtacatataccaaaaggtgtcaacatctacatccctgtctccacaatgcatcttgacccagagctatgggggcctgatgtgaaagagttcaacccagagcgcttctctgatgttcgaccccagctacattcatacttgccatttggtgctggggcccgaacctgcctagggcagggatttgctatggctgagctcaagatcctcatctctctcatcgtctccaagtttgttttgaagctctcaccacactaccagcattctccaacactgaaactcattgtggagccagaacttggtgtagacctcaccttaacgaaagtgcaaagtgtctgtacta

SEQ ID NO: 14751 - DNA, 349 bp, Zea mays
  Clone ID: LIB36-020-Q1-E1-H9
gacgcagatccatatagctgttacggttgcttatccattacacctagttcaatatggttcggttccgatcatgtctacttccattgcaggtaacgtaattggtttcaaagccttacgcgctctacgtttcggcgatctactaattccccctgcttagtcaaaaactttccaaggtccgcctcacagtaaccaagttgaaatggataagttgaacaagtacggtcgtcctttactgggatgtactattcaaccaaaattgggattatccgcaccaaattactgtacagcgtgttatgagtgtctactcagtgggcttgattttacaatagatgatgagaacgtaaactca

SEQ ID NO: 14752 - DNA, 409 bp, Zea mays
  Clone ID: LIB36-021-Q1-E1-A10
acgtcaagcagctcgtcgccaccggcaagccggacagcttcggcgggcccttcctcgtgcccagctaccgcggctcctccttcctcgaccccaagggccgcggcggctccaccggatacgacaacgccgtcgcgctccccgccggaggcagaggcgacgaggaggagctccagaaggagaacatcaagaacgccgcctcgtccacgggcaacatcacgctgagcgtcaccaagagcaacccggacaccggcgaggtcattggcgtattcgagagcgtgcagccgtcggacaccgacctcggggctaaggcgcccaaggatgtcaagattcagggggtctggtacgcgcagctcgagtgattcgttttaactgttagaggcgtcggaccgtcatggagaccttttgagag

SEQ ID NO: 14753 - DNA, 259 bp, Zea mays
  Clone ID: LIB36-021-Q1-E1-A12
cgcccgggtcgacgcaagactctaaactgacgtcgctgggaaagaggcccctcaccctcaggtgatcaggtcgctagctcccggcttaactagtacgcagccatgaatttcggtgggaatggcaacgcgacgatccggtgcaagtactgcagggcgagcctgagcgtgatccccggcgagcgcgccatccagtgcgcgcaatgcaactgcgtgacccgcatccggcgggccgaccgcatcccgctggcgcggccggcgt

SEQ ID NO: 14754 - DNA, 423 bp, Zea mays
  Clone ID: LIB36-021-Q1-E1-A2
actagtgggtcgacgcaagactctacactgagtcgtagcagtcaccgccccttccttcgccgcaccagcgccagcccgcgccgtggtcagaaggaggtccttcaccgtgcgcgcctctctccgcaaggccaccggcaccgccgccgtggcaatggctgccagcgccctgcttgccggcggtgccatggcccacgaggtgctgctgggcgcaggcgacggcgggctcctcttcgagcccagccagttcaccgtcaaggccggggacaccatcacattcaagaacaacgccggcttcccgcacaacgtcgtcttcgacgaagacgaggtgcccagcggcgtcgacgccactaagatttcgcacgaggagtacctcaacgccccaggccagacctactccgtcaccctcaccgtgcccgggaaacc

SEQ ID NO: 14755 - DNA, 331 bp, Zea mays
  Clone ID: LIB36-021-Q1-E1-A3
ttcaccctcgcgcgcattctctcgatgatctccaagtcgcgcggcgggcctaccagcgtcgtcatctacgacatccacgcgctccaggagaggttctacttcggggacgacgtcctgccatgcttcgagacagggatcccgctcctgctgcagcgcctccgctagctcccggacgcagaaaatatcaccattgcctttccagatgacggtgcgtggaagcggttccacaagctgttacagcactttccaatgatagtctgtaacaacgttcgggaatgtgacaagagaatagttcgtctaaaggaaggactacctgaaggccgtcaagttg

SEQ ID NO: 14756 - DNA, 379 bp, Zea mays
  unsure (1)..(379): unsure at all n locations; Clone ID: LIB36-021-Q1-E1-A4
caaacttctctgtgtcgtgctctctcccggagcttcttcctccacgcgctcttctacatccctgtgccctaccgctcctgctcgttcttcaggcagtcgcggcagccgagctcccatggcgcgcgcgaccccctgcttcctctctctctcggctctgctcatcctggcgcccgcgcgtggagctgcttctcccctgctcgtcggcctgcagcgtccccagctgccctccctgcttctctcttccccgcggcttccatcctctactcgccattgcaagccgtggctcctcgccgtgggatttcnctctgcccggccgagctcgccccggccccttcctgctgcagctcaggaccccagctcctctgctcgcctggagctc

SEQ ID NO: 14757 - DNA, 372 bp, Zea mays
  Clone ID: LIB36-021-Q1-E1-A7
gtcacttccattttctcaataccttaagcaaggaccaatgtctcaagcccagccccctcgttcccaagcccagtggaaacacgttaaatttcaggataaccaagctaatgccatgaaggaaccaggaaccggtgggtatggctatgggacgaaaaatgacaagaataaggatgtggatacaatagcttcggacttcatcaagctgaagcacaaagcttgggcactcaagaagagcacaacaatgtaccaaccttctacctaaagccttggatatttgcggatccggagtgaagttaccatggcatcgttgctaagaataggaaagtaatgtggttatgaggagatgtgtaatttggtggcgatattatttgc

SEQ ID NO: 14758 - DNA, 433 bp, Zea mays
  Clone ID: LIB36-021-Q1-E1-A8
gaacgaactgaggtcgacgacgactgatcgagcagcgacgatggcggctgtgctgaacagcaggaagacgccgcaggtggttgccgtgctggtggcggcggcgctgctggcgtcgtccgcttcggcggcgatcatctgcgggcaggtggggtcgtcgctggctccgtgcatcccgtacgcgacggggagggccagcgcgctccccgcgtcgtgctgcagcggcgtcaagagcctcaacagcgcggcgcggaccagcgcggaccgccaggcggcgtgccgctgcctcaagagcctcgccaacagcgtcaagagcgtcaacatgggcaccgtcggccacatccccggcaagtgcggcgtctccgtcggattcgccatcagcatgtccaccgactgcaacaagatcagctaagttatacgacgaccaagctaatag

SEQ ID NO: 14759 - DNA, 421 bp, Zea mays
  unsure (1)..(421): unsure at all n locations; Clone ID: LIB36-021-Q1-E1-B10
agtggggaaaggagggccacatcatggtctgcaagatcgccgagaagtacctgtcggagaaggcggcggcggcggtgaaggcgttgctgccggagtcggcgggcggggagctgtcggcggtgtgcccgtgggcggaccaggtgcgctggcactaccactgggccagcccgctccactacgccaacaccccccaagtctgcaacttcaagttttctcgggactgccacaattctcgtggccagcaagggatgtgcgtcgtcggggctatcaacaactacacggaccagctctacagctacggccagaagacttcgtataacctgacggagagcctgatgtccctggcacacttcgtcggcgacgtccacagccgctgcacgtatgcttcgaagatgactaaggcggtaacnacatcaccgtc

SEQ ID NO: 14760 - DNA, 422 bp, Zea mays
  Clone ID: LIB36-021-Q1-E1-B12
cccacgcgtccgatgacagcacgctagtccctggtgtcgccgtggaatcatctcgcgccaagcctctggccgcgtggatgaacggtctggagatctgcgcgatggaggcggacaccggcagggcgagcctgatcctgtcggcgggggtgtcgacgcggtacgtctactctgggtaccagaaaaccgccgcgtcgacgcaggaggccgaggcctgggaggcggcgaagaaggcctgcggcgggctccacttcctggccatccaggagaacctcaactccgacggctgcgtcggcttctggctcctgctggacctgcccccgccgcctgtatgatggatggtctattctacccggacgctacttcttctctgtcgtgcatttcgtcttgatagccactgtagcatcatcgacgtctagtgctag

SEQ ID NO: 14761 - DNA, 450 bp, Zea mays
  Clone ID: LIB36-021-Q1-E1-B2
gggtcgtcgcaagactctatagtgacgtcgtattacgcgtccgccccctcggcctggccgacgaccccgaggccttcgccgagctcaaggtgaaggagctcaagaacggccgcctcgccatgttttccatgttcggcttcttcgtccaggccatcgtcaccggcaagggcccgctcgagaacctcgctgaccacatcgctgacccagtcaacaacaacgcatgggcctacgccaccaacttcgtccccggcaactaagctcaacggctatgctatgcaacttcattgtcttcggatcggagagggtgtacgtacgtggattgattgatgctgcgagatgcatgtgtgtcctttgtttcacgttgcattgcataggcaagtccagatgatgagtttgcgttgtacactaagatgaaccatgtttgtgcaatagtgggggtttttgtttccc

SEQ ID NO: 14762 - DNA, 451 bp, Zea mays
  Clone ID: LIB36-021-Q1-E1-B5
ctcgcgggtcgacgcaagcctctagattaactcgcagcaccctctaaaattgccatcattgatcatgagaagaaaagaacatttgtcgtgacaaaagaagggcttcctgatgctgttgtttggaacccttgggacaagaaggcaaaagcaatgcaagattttggggatgcagaatacaagagcatgctgtgtgtggagcctgcagctgttgagaggcctattactctgaaacctggggaagagtggaaaggaaggcttgtgctttcagctgttccttcgagttactgtagcggacagttagatccatcgaaggtccttcagggttgaaaatcctcactttctgcatcttgtacagaagttcattgcccttgatatttgatgctgggctggcgtcaacgccgcatgttccttttgccatttccaacccctatatctctggtcccttttgtat

SEQ ID NO: 14763 - DNA, 425 bp, Zea mays
  unsure (1)..(425): unsure at all n locations; Clone ID: LIB36-021-Q1-E1-B9
gccaccatcgaccttcaagtctcgctacgtagcagtgcaataaaaaaagcagccgcaatggcgagcagcaccatggccctctcctccacggccttcgccggcaaggccgtgaacgtgccgtcgtcgtccgccttcggcgaggcccgcgtgacgatgcgcaagacggcggggaaggccaagccggcggcggcgtccgggagcccgtggtacggccccgaccgcgtgctgtacctgggcccactgtccggcgagccgccgagctacctgacgggcgagttcccgggcgactacggctgggacaccgcggggctgtcggcggacccggagacgttcgccaagaaccgggagctggaggtgattcactcncgctgggccatgctgggcgcgctcggctgcgtcttcncggagctgctcgcccgcaacgg

SEQ ID NO: 14764 - DNA, 430 bp, Zea mays
  Clone ID: LIB36-021-Q1-E1-C1
gggtccgagcccgcgtccgcacacacgtccgcccacgcgtccgcacagtttaaagagttaatagaaagctaggaataaaaatagatgttcgagtgttattatatcaatttggttaatagatgtagtcgatgccctgatgtgatatccataataattaatgcttggtttttagtgtttcatccttcttagtacagattatctatattatattcgtgctcatacatgtgcatcatgcatctcatgaggtaggatagataatcgcgtgaagcggaacatgatccaagtcgaccgcaagcgtgggccaatccacaggatgatgctgatggacgaacaggaagatggatcatttgaacgagtgccgagccaaaggatgctcgccaagttggtcgccagttaacaattcgaagccaggtgtctattccagggtcat

SEQ ID NO: 14765 - DNA, 442 bp, Zea mays
  Clone ID: LIB36-021-Q1-E1-C11
cccgggtcgacgcaagactctacagtcactcgtgttatgatttgtgacactacaaaggacatcctcttttctaggttcctcttcacaaactaatttaagggtgtcatctgaatttctcttcctttgccttttgatgtcatttttgtagtgttctgcctgaacactttccatgttttaaacatctgatacattcatacatccaagtgttactttttgtggactgctaagtttgtacgcttgcctgttaaagtaaaatgttaatatgccatagtctgacacttggttagagacatttaacgatcttaaatggttcatttcgtttcgcctgttatttataggttgtctgcacttctagtttttatttgatagaatcatatgatttttttcaggaggttttgtttttcgaggaaggagagcctaagattgatggtgaacctggcga

SEQ ID NO: 14766 - DNA, 425 bp, Zea mays
  Clone ID: LIB36-021-Q1-E1-C12
accacgcgtccggccatgtccatgttcaataggatcttcgggaagcccaaggagcaggccaactccaatgccttggccactctggacaagttaaatgagactcttgatatgctggagaagaaagaaaaggtgctggagaaaaaagcagccgctgagcttgagagagccaaggagttctcaaaagctaagaataaaagagcggctatccaatccttgaagaggaaaaaactttatgagcaacaaattgagcagcttggaaattttcagttgagaatccatgatcagatgatcatgttagaagcagctaaagctacaacagagactgttgatgcattgagaactggagctgcagctatgaaagcaatgcaaaaagcaacaaacattgatgatgtagacaagaccatggatgaaattaatgaacagac

SEQ ID NO: 14767 - DNA, 412 bp, Zea mays
  Clone ID: LIB36-021-Q1-E1-C6
gttgttcggagcgggcagcagcacacagccccatcccaatcctagtcgatcttcttcccctcctcaaggaagaaaagaagctgaaccatggggaagagaaagtcagctgctaagccacctcctaagaagcggatggacaagcttgacactgtcttttcctgcccattctgcaaccacgggagtagtgttgagtgccgaattgacatgaagaatctgattggcgaagcatcttgtagaatctgtcaggaaaacttcagcacaactgttaatgcactcactgagcctattgatatatatagtgaatggattgatgagtgtgagcgtgtcaacactgttgaaggcgacgatgatgcgtgagcttgcccatgcgatgaaactgttacctacatcgtaatgtaatgttgctggtatc

SEQ ID NO: 14768 - DNA, 355 bp, Zea mays
  Clone ID: LIB36-021-Q1-E1-C7
gagaggcgttcgccgagctcaaggtgaaggagatcaagaacggccgcctcgccatgttctccatgttcggcttcttcgtgcaggctatcgtcaccggcaagggccccctcgagaacctcgccgaccacatcgccgaccccgtcaacaacaacgcctgggcttacgccaccaacttcgtccccggcaagtgagcgagggcatgatgcttgcatgcgtgtaccgtagacgtaccgtattcctacgtactgcaggttgcaccagtatttgtgaagggagctgtgcgtgggagccagagattgtaccgctagtgtatttctgtatgcacgccgtggagctgatcaatgaaatatgctgt

SEQ ID NO: 14769 - DNA, 431 bp, Zea mays
  unsure (1)..(431): unsure at all n locations; Clone ID: LIB36-021-Q1-E1-C8
cacgccatcacataaaaccagtgcaagcagaagcagcgcaatggcgagcagcaccatggccctctcctccacagccttcgccggcaaggcagtgaacgtgccgtcgtctctcttcggcgaggcccgcgtgacgatgcgcaagacggcggcgaaggcaaagccggcggcgagctccggcagcccgtggtacggccccgaccgcgtgctctacctgggcccgctgtccggcgcgcccccgagctacctgacgggcgagttcccgggcgactacggctgggataccgcggggctgtcggcggacccggagacgttcgccaagaaccgggagctggaggtcatccactcncgctgggccatgctgggcgcgttgggctgcgtgttcncggagctgctcgcccgcaacggcgtcaagttcggccaggccgtgtggt

SEQ ID NO: 14770 - DNA, 347 bp, Zea mays
  Clone ID: LIB36-021-Q1-E1-D1
gggtcgaggcccgcgtctacagcgactcgcagcagatcccgtccaagtggaaccccagcaaggagcgggagttccccgggcaggtgctccgctacgaggacaacttcgacgccaacagcaatgtgtccgtcatcatccagcccacgtccaagaagaccatcgccgactacggctctcccgaggagttcctctcccaggtcgactacctgctcggcaggcaggcctacggcggcaagaccgactccgagggcgggttcgagaccggcgccgtggccaccgccaacgtcctggagagctccacccccgtgatcgacgggaagcagtactacgccgtgtcggtgctcacc

SEQ ID NO: 14771 - DNA, 265 bp, Zea mays
  Clone ID: LIB36-021-Q1-E1-D10
gtcgacgcaagactctagattgagtcctaatatggaactttttctttttgttgggggcggactactgggtagactgtcaacgatgatgatgatgatgatgaaatgttcgtggtgcgatgcatggtgtacttgtactatgttgtaactaatgtaaaaatgcgatggtcgttagatgctatgtcctcttaattaaggcggacctacatgcaagtaaggatgcaaataagggtattcagtatttaattgaatactcattattttttgc

SEQ ID NO: 14772 - DNA, 425 bp, Zea mays
  unsure (1)..(425): unsure at all n locations; Clone ID: LIB36-021-Q1-E1-D11
gaaacaagccacgctaagcaagatgcaccgaaaccctcgcgccgtcatccgcgccgccgtctccctcacccgccggccccccgccgttcctgccgcggaggctctccaaaccctgcctaaagcgacgccctcgcctgcgcttggggcgtggcggccagaccaggcggtggggcctttgggtagcgtcagccgccgccgcgccttctcctcctccgcggcagagtatggcaaggatgtggacgaggtgaaccgcaagttcgcggaggcgcgggaggagatcgaggcggccatggagagcaaggagacggtctacttcaacgaggaggcctccatcgcgcgtgacgccngcaacgaggcgctcgctgctttcgacgcgcttttagcgcgcctcncgcccaccgacgccgacgcgctccgccgctcca

SEQ ID NO: 14773 - DNA, 391 bp, Zea mays
  Clone ID: LIB36-021-Q1-E1-D2
cgggtcgacgcaagcgtctagactgaatccatagaacgaactgaggtcgacgacgactgatcgagcagcgacgatggcggctgtgctgaacagcaggaagacgccgcatgtggttgccgtgctggtggcggcggcgctgctggcgtcgtccgcttcggcggcgatcacctgcgggcaggtggggtcgtcgctggctccgtgcatcccgtacgcgacggggagggccagcgcgctccccgcgtcgtgctgcagcggcgtcaagagcctcaacagcgcggcgcggaccagcgcggaccgccaggcggcgtgccgctgcctcaagagcctcgccaacagcgtcaagagcgtcaacatgggcaccgtcgccaccatccccggcaagtgcggcgtc

SEQ ID NO: 14774 - DNA, 418 bp, Zea mays
  unsure (1)..(418): unsure at all n locations; Clone ID: LIB36-021-Q1-E1-D4
gtcgcagctgacggacgactgaaccaccgacagacaacatggccgcctccgcctccacggtctccggcctcgccggcgcctccctggccagccgcccggcgttctccaccagcttcacgcggggcagccgggtgtcggcgaggaaccccctgatgagcaggaacctggagaggaatggcaggatcacctgcatgacgtttccccgggactggctgcggagggacctgagcgtcatcggcttcgggctcatcggctggatggggccgtccagcgtcncggccatcaacggcaacagcctcacggggctcttcttctccagcatcgggcaggagctggcccacttccccacgcccccgcccgtcacctcccagttctggctgtggctagtgacgtggcacctgggcctgttcatcgtgct

SEQ ID NO: 14775 - DNA, 393 bp, Zea mays
  Clone ID: LIB36-021-Q1-E1-D6
cccacgcgtccgcgagtgatgggcacatatctctcgccagatgctcaagaaaaggtttgaaccgtagatcatcgtcgtctctcatctgttaagtcgattcagttatggtaagctgatttgtttttacggttagttggattggttagttatattgtggcgatgctttgggaagaatacctttcttattttttttgtgtgttatatgttgccataaggtgtttgcagtaatatttcctatgcaatagttgtgtcatgtgttgttagacttgtatgcaaggcacgattaaattaataatgtaagaagtgggattagcatttttgaaattgtctagccggtagtacttttagtgttacttgagagaatccttattacaggatgatgatgatcccttg

SEQ ID NO: 14776 - DNA, 313 bp, Zea mays
  Clone ID: LIB36-021-Q1-E1-D8
gcgcctttgtgctgttctcctaatccaaaagtcgcgtgctgtgctctgctctcgcctcgcacggactcgtggtaaaggatggagaccatgtcggctctcgcgaggacggcgccgccccttgctgggaccattcgccggccgtcctgcgcgctgcggccgacggcgtccctctccttcgccgccgcttcaacgacgccccgcggccggctcgggctggggctgaccacggtgccggcggggagcgggagggcggccagggctcgcgccgtcccgcagcgcatcgtcgcctcctcggaggttgagcgaagctaca

SEQ ID NO: 14777 - DNA, 446 bp, Zea mays
  Clone ID: LIB36-021-Q1-E1-E1
cgggtcgaggcacgcgtccggaagtatcctgacgctaacgctgacatctcaaagagcaggctaaatctcttccctggatacatggcacgctacaatgactctttggctaaagaagcgacattagagtacgttaagcttgccaagaagcacgggctaactccagtccagcttgcccttggcttcgtgcgtgatcgtccattcaccgctagctccatcattggagcgaccaccatggagcaggtgaaggagaacatcgacgcgtttaccagcactccacggcctctaccacaggaagttcttgacggcattgaggatcttttcaagagatacacagatccagcaatcctctagtttttcattcaccttttttggcgaaaagtagcaatcctcggacaatacaaagcccagaaaacataatacaacctaggattgttaggtccatacat

SEQ ID NO: 14778 - DNA, 441 bp, Zea mays
  Clone ID: LIB36-021-Q1-E1-E12
cctgggtcgacgcaatactctatactgacgtcctgattattttttttttttatcgagaaagatcactgcgagtctacaacaatccacacccaacacaggcggtggacacaacccatccaataatctttcatgagtacagtgtcggagtcatcggccaatttcttcaaaattatcattaatttatgatgttcatgtaactatagtcgtaagataaggcagggccggtttggtttcatcacgcggatgggagcaccttcttgacgatctcatcactgagcgaggcgatctgggcgtcgagcgccttaacagcctcctccttctgcgcctcgaggttggcgagcgcctctacgagctcggcctccacacggctgcgcccctcgtccagcttggcctccagctccgcggtggtctcattcttcatcttgttaagcgccgccgcca

SEQ ID NO: 14779 - DNA, 378 bp, Zea mays
  Clone ID: LIB36-021-Q1-E1-E4
ggtcgagcaagcgtccgcacagacgtctgctgacgcgtgggctgttctgagtggcaatgtagagacagaacaggaatcgcgttacaacgtgtgtacttctcctggtaacgcgattcctgttctgagtggcaatgtacagacagatcgcagattcctaaggtcaatcaggattaagggttgcggatagggcataggggtggtaatggatgacgatctaaatgttttttcataaaatggtacagtaggacatacattataaattttagtgtacaatgaatatccataagatttgtttctaagccgatctttatatctgatagtgtaaacttatatcttaaaatgtagaagaaggaagctgccagagactcaagcaggggg

SEQ ID NO: 14780 - DNA, 389 bp, Zea mays
  Clone ID: LIB36-021-Q1-E1-E5
gacacacacaaacaccgcaagctaagaagatcccttgctgaattcagagagcacaaacacaaaagcgagtgcaaaaccaaatggctgcctcggcctacttccttcttgttgcctttctagcgttggtcacatctcaggccattgcctctgaccctagcccgctccaagacttctgtgttgccgacaaatactctccggtgaaggtaaatggatttgtttgcaaagaccccatggctatgaacgcagatgacttcttcaaggcagcaaaacttgaccaaccaagggacaccaagaacaaggtgggatccaacgttactttgatcaatgccatgcagttacaaggactcaacacattgggcatctcgttggctcgcattgactacgcaccc

SEQ ID NO: 14781 - DNA, 423 bp, Zea mays
  Clone ID: LIB36-021-Q1-E1-E6
cccacgcgtccgctctccccgcgtgctctccctctctctcgcgcgcgcggcgacgactcggctagtcggctaccgccgccgccccctacgccagcttcccagctcttcgtcaggcccttctccgtcaacgagcacccagcacatatcctgagcccctccacacctcaacgatggcgggattcagaagccttgcacccaagaccaggaacctggtggtggctgggggcctgtcggccttcgtgctcggggtctactactacaccatgagagccgtgggaggcacggacgagctgcaggtggcgatcgacaagtttgaggagatgaagaagaaggacgctgccagaaactccagcacaggaggatcgtaaacgcggcgcccttctcgtctctgtactgaacctggatctgcaggctgacatgata

SEQ ID NO: 14782 - DNA, 381 bp, Zea mays
  unsure (1)..(381): unsure at all n locations; Clone ID: LIB36-021-Q1-E1-E8
cggacgcgtgggcagcttgcgcccgcaatggcactcgtctccgcctcctcgtcctccaccaccgccgtcacggcgctccccaggaatgggcagcgggcgtcgtcctccttcctcggcggcaagacgctgctgagacaggccgaggcggcccggccgtcgttcgccgtgcgcgccgcggcggaccccaacaggccgatctggttccccggcagcacccctccgccgtggctcgacggcagccttcccggcgacttcggctttgatccctgnggcctcggatctgacccggagagcctgcggtggaacgtgcaggcggagctggtgcactgccggtgggcgatgctcggcgcggcgggcatcttcatcccggatttcctgacc

SEQ ID NO: 14783 - DNA, 169 bp, Zea mays
  Clone ID: LIB36-021-Q1-E1-E9
ctcgtgggacgacgcaagactctacagtgatgcgtgaaacggcaatgggatgcttgctgtaaggtaatatgtttggcttgctaggcatgctacacgctatttggatgtagcaacgttatcaccagctgtatacgctttttaatcgacaacatttgaataatatgtacat

SEQ ID NO: 14784 - DNA, 449 bp, Zea mays
  Clone ID: LIB36-021-Q1-E1-F10
ctcgcgggtcgacgcaagcctctaaacacgacgttctgaccaacgcgtccgcatcttttctcgtttagaacctctaaaatttcccccactcgccagtcgcagcagcacctgtagcagccatggacgccagcggagccggtagcaaggggaagaagggggcggccgggcgcaaggcaggcggccccaggaagaagtcggtgacgcggtccgtcaaggccgggctgcagttccccgtcggccggatcgggcgctacctcaagaagggccggtacgcgcagcgcgtgggcactggcgcccccgtctacctcgccgccgtcctggagtacctcgccgccgaggttctggagttggcatggaacgcggcgaaagacaacaagaagacgcgcatcatcccgcgccacgtgctcctggcgatccgcaacgacgaggagctcgggaagctgctggcc

SEQ ID NO: 14785 - DNA, 439 bp, Zea mays
  Clone ID: LIB36-021-Q1-E1-F11
ctcgtgggtcgacgcaagactctagaatgagtcgtcataccatggcgggcttctgcactcctgctgccactgcagctgcccatgccgccctaacccctctgacgagctcaaggaagcacatcgccatgtgcctgtcccccaggccaagcggcggcggcggcatcggcggcggccagagggcgcggcttgcgagtacaggcgcagctcctcaggttcgcgcgctggcgccgacgaccgcggcagaagaagcagcgggtccctcccccgcccctctcaacgtggagtacctggccgccgagttcgccggccacggcgtcagcttcgagcccgtgggcgtcagctgcgccgtcaagatgtcgctgcgcaacggcagcgtggcgcacgtgctgctccccagcgggctcgtcacgtcctacaagcccgccatgtggcacggcac

SEQ ID NO: 14786 - DNA, 407 bp, Zea mays
  Clone ID: LIB36-021-Q1-E1-F12
caccgtttcagtgcaataggataggattttcttttgacggccatgaaaccccctcagctgccggccggggagcgctcctgggctcacgaggtcaagcaggccctccgtgagaaactccggcgctcctacggcgccgcctccgccacaccggcggccggtgaaccgagccgtggcgccgactgccgtggctcggccgccgaggaccccataaggagagtcatgttcttggctccctggggccacacataaaacacagacccagatctgggcttgcaagagcatggccggatctgcagagaactgctcaaccatacttaaaaggaactggagcttgtcttgtaaactatggagcatgctgcttgcaccacgaacatgaacgcatggctggttaactacgtagatatatg

SEQ ID NO: 14787 - DNA, 429 bp, Zea mays
  Clone ID: LIB36-021-Q1-E1-F2
gtcgacgcaacactctaaactgagtcgtattaaacaataagataacggtgtacagattcttctgtgatcatcccatgcttgcctgatgcctgtccccgtcccgtccgatggcgaccgccgcaacgccaaatcccggaagcggttttcgcggctcctatagtagtactagctagcatataccgccataccatatccatccgcctgtttgttgttggctttggtttggttccgtcggcctgccgtggttttggtgtggctccgtccacgatccacacatctgtcggcggctcctcatggtgaagcttattgaggtctatgaaaatgatcctgagaacatgactaagatttttgacatcatgcaaaacatgcaagaatgtggtcagccccccagtgattttgtccaaagatactgttactgatcgggatctg

SEQ ID NO: 14788 - DNA, 366 bp, Zea mays
  Clone ID: LIB36-021-Q1-E1-F3
gcgggtccacgcaagcctctagagcgaatcgtggaactggaggtgatccactcccggtgggcgatgctgggcgcgctgggctgcgtgtttccggagatcctggctaagaacggcgtcaagttcggcgaggcggtgtggttcaaggccggcgcgcagatcttctcggagggcgggctggactacctggggaaccccaacctggtgcacgcacagagcatcctggccatctgggcgtgccaggtggtgctcatgggcttcgtcgagggctaccgcgtcggcggcggcccgctcggggaagggctcgacaaggtgtaccccggcggcgccttcgaaccgctgggcctcgccgacgaccgggaaacgccg

SEQ ID NO: 14789 - DNA, 459 bp, Zea mays
  unsure (1)..(459): unsure at all n locations; Clone ID: LIB36-021-Q1-E1-F6
ctcgcgggtcgacgcaagcgtctagagtcatcctgccaaccatggcaaacgcttctctgcagtccttccttctcccgcacgaccattctttcgccggctccggcggcagccgtgacggctccgcgtccgccgtgcacaagctctccaccaacaccagcggcagcatttccttcaggctctacaccaaaacctccccctcggtgacagcagcctcagccaccaattcgtcagctccgactccagttgccccggcatctgcaccagcggcaggggacgaagaagaagaagaaggcccctctctcgacctcctccgccgccagctcgccgcgggcgactaccggcaggcggacgagaccacgcgggcgctgatcatcgacctcgccggcgagcccgcgaagcgccgagggtacgtcttcttctccgaggtcnagttcatcccggccgaggacctcgccgcca

SEQ ID NO: 14790 - DNA, 192 bp, Zea mays
  Clone ID: LIB36-021-Q1-E1-F9
ctcgcgggtcgacgcaagcctctacactgactcgcgataaacaaaatatatgagcttatgtgtaaaaaggaattgccatgctgttttatgtccgcagcaggttcatgccctgtgatatgtgtaatcatgaattgtacagtttatctgtaccgcagcagtttacgagaggtctagtaaaagcacattttaccc

SEQ ID NO: 14791 - DNA, 413 bp, Zea mays
  Clone ID: LIB36-021-Q1-E1-G1
gggtcgacgcccgcgtccgcggacacgtgggcgccgccgccgctgccaccgccgcttgctgccgcagccgccatgggggcgtacaagtacgtgtcggaactatggaggaggaagcagtcggacgtgatgcgcttcgtgcagcgcgtgcgctgctgggagtacaggcagcagccgtccatcgtccgcctcaccaggcccacccgccccgacaaggcccgtcgtctcggctacaaggccaagcagggatatgttgtctaccgtgtccgtgtgaagcgtggtggcaggaagaggcctgtgcccaagggtattgtctatggcaagcccaagcagcagggtatcacgcagctcaagttccagaggaacaagaggtctgtcgctgaggagagagctggacgtaagcttggtgggactga

SEQ ID NO: 14792 - DNA, 120 bp, Zea mays
  Clone ID: LIB36-021-Q1-E1-G10
aaattttcagcaaaaatgtgacgatatatataactgtgcaaatctagtacccttaatagtagtagatctcttaaatggttcttagtgttaccataagatacataatatatttatcatgag

SEQ ID NO: 14793 - DNA, 392 bp, Zea mays
  Clone ID: LIB36-021-Q1-E1-G11
ctcgtgggtcgacgcaagcctctaaactggacgttctgggaggttgtccattatctgttagctatctaaggctatattggaacctctacagctattagctagctaataaattatttgcagggttgcttaatttgtcctccgccactgctcgagtcattgctccctccctccctgtttccctggcggactctgatgctgctgctctcctggaggctagcgctactcttcggctggatccccacagctggtcccctccggcagcgccccgtctcctcggctccggccgtgcctctcctcgtctgagaagcggacgaagaagaagcgagagatggcgcggcgcgggagccacaagcgcgggtgcgcttcgcggacgacgtcgtggacaaagacaa

SEQ ID NO: 14794 - DNA, 426 bp, Zea mays
  Clone ID: LIB36-021-Q1-E1-G12
cccaacagcgccactgtccagtgcgcgcgtcaagcttgcttagctagccgccatggcctccctcgccgccgtctccgtgaagcccgtggccatcaagggtctcgccggcagctccatctccggaaggaagctcgccgtcgccaggccgtcggcccgctccatccgcaggccccgcgcagccgccgtggtggccaagtacggcgacaagagcgtctactttgacctcgacgacatcggcaacaccaccggacagtgggacctctacggctctgacgcgccctcgccctacaacccgctacagagcaagttcttcgagacgttcgcggctccgttcaccaagagaggtctgctgctcaagttcctgctgctgggcggcggctcacttctggcctacgtcagcgcgtcggcgtcaccggacctcctgcc

SEQ ID NO: 14795 - DNA, 390 bp, Zea mays
  Clone ID: LIB36-021-Q1-E1-G3
ggtccacgcaagcctctagaatgagtcgtatcaagttcagcaaggtcggcttcgtgtaccgcgagaactccacctccccgtgctactacgacggccgctactggaccatgtggaagctgcccatgttcggctgcaacgacgccacccaggtgtacaaggagctgcaggaggccatcaaatcctacccggacgccttccaccgcgtcatcggcttcgacaacatcaagcagacgcagtgcgtcagcttcatcgcctacaagcccccgggcagcgactagaccgcgcccgccggccgccccccgccggctagctagctagctagctcctgcgtgagctagtagctagtgccatgcgtcgtctctgtcgttcggttttgcttcgggtcaccgt

SEQ ID NO: 14796 - DNA, 398 bp, Zea mays
  Clone ID: LIB36-021-Q1-E1-G4
ggtcgaggcagagtctagaatgagtcatagtacatactttgggacaacgttccctcatctgttcctgatgacatacgagcacctcaagccacagaagctctcgcagcgctatgttcctcgtgtctttggcttcaagctccacaagccatgaacctcatgtatttgtcgtttaaactcctcaagacgtggcactgggggcatgcgggagttttgcaatctttgacgacttgcatataagagcgccattggcaggtcagtggattggtaaaattctatcatgctgcagcgtgcttgtaccttagctggctggcacctatccaacatttgaatgtagctctaatgatatcaatgttgtaacctaagtgctatggttcgttgattagttaaccaggaccccc

SEQ ID NO: 14797 - DNA, 447 bp, Zea mays
  Clone ID: LIB36-021-Q1-E1-G5
ctcgcgggtcgacacaagcctctagaatgactcttcctactgctgaagaaatgcctgtgactgaatttgttgatgctgacccccatgggtgtacccaatccgctgctgatcccaatgtgggtgctccatctgttgctgatcccaatgggggtgctgcttgtgttgccaatgtagacgaggaggaggaggaagatgaagttcctttgactcggaaaaacagtcggcagttcatcgccagcggtgaaagtagtggagttccctctcctgctttgtctgctctcattggtctgcaagaactgtccctggccaactttgatcagactcttgaggacatggttccagaggacttgttacctgagccagtggatgatggtgtgatggacgtttgcgctgatgtgcttgatgctgggttgatgtcatcacgtccctcgtcgaccttagaacgcg

SEQ ID NO: 14798 - DNA, 390 bp, Zea mays
  Clone ID: LIB36-021-Q1-E1-G6
cggacgcgtgggcggacgcgtgggcggacgcgtgggcggacgcgtgggtgtgaggcaggagctggtccatgcgaatcaaatctttgctcagaatccatcgtggccagtcattgcggtcactggaaaagctatcgaggaaacagctgctgtcatcttggggatcctccatgacaggaagcagaagtgctccatgccacgcatatcaaaacgatactagtactgtgttctatcccttctctactacaccttgtaatctgtgcatgttttgaataagctttgtgtcaagcaccatagccttcatgtaatttttttttgttggaccaccttctaggtggtgccgtgtgtatcataaacataacttgaagtttagtgcaccagagacacatgtat

SEQ ID NO: 14799 - DNA, 423 bp, Zea mays
  unsure (1)..(423): unsure at all n locations; Clone ID: LIB36-021-Q1-E1-G8
accacgcgtccgagcaactccactcctgagtcctcacctcgtgctgcccgcgccatttccacctcccactgtcctttcgtccagtccccagccctgcagcccaaccgtggaggttctggaaggcggtgtatcccttctagaaccttctcgagatgcagagcgccgcggctttccggccgtgccccactcggctgctggtgagcagcccttgtcgccccctcctctcggcccgcccgcttcgtgtctccgccgctggcgccgtcgctaccagaagcagcgccgtgggccctcgcggtctggggctcgggctgctgccagcctcgcccgatcgggatggcaagtgccgccagcgacaggtgtcatgcagcgcggccggggatgctgtggcggccccgaaagcggaagaaagangcgggctcatga

SEQ ID NO: 14800 - DNA, 363 bp, Zea mays
  Clone ID: LIB36-021-Q1-E1-G9
acgcaacactctgaactgacgtcgtattacgcgtccgggcttctcctccccctcttatcaagtcctcctcgggttagggttccttagggttttgtggaggggcgatggcggcggctgatgtggagtaccgttgcttcgtcggcggacttgcctgggccaccagcaacgagtcgctggagaatgccttcgcctcctacggcgagatcctcgactccaaggtcatcaccgaccgggagacggggaggtcccgcggcttcggcttcgttaccttctcctccgagaactccatgctcgacgctatcgagaacatgaacggcaaggagctcgactgccgtaacatcaccgttaaccaggcccagtccc

SEQ ID NO: 14801 - DNA, 357 bp, Zea mays
  Clone ID: LIB36-021-Q1-E1-H1
cggacgcgtgggcgcgagtgagtgaacaccagccgtattgtcccgactcctgacccctaccgatcctcgcctgctgcagccatggcgacctccgcggcgctctccaccgccgccaatcccacccagctctaccggtcccgcgcttcgctgggcaagccggtgaaggggcttggcctgagcatgggccgcgagcgcgcccagcggagcattgtgtgccaggcggcgagcagcatctccgccgaccgcgtccccgacatggagaagcggaagctgatgaacctcctcctcctcggcgccatctcgttgcccaccgtcggcatggtcgtcccctacggcgccttcttcgtccctgccggc

SEQ ID NO: 14802 - DNA, 414 bp, Zea mays
  unsure (1)..(414): unsure at all n locations; Clone ID: LIB36-021-Q1-E1-H10
gacttgtttcattgattcttgaagagatcgagcttcttttgcaccacaaggtcgaggatgtcttgcaactgcggatcaagctgcggctgcggctcaagctgcaagtgcggcaagaagtaccctgacctggaggagacgagcaccgccgcgcaggccaccgtcgtcctcggcgtggccccggagaagaaggccgcgcccgagttcgtcgaggccgcggcggagtccggcgaggccgcccacggctgcagctgcggtggcaactgcaagtgcgacccctgcaactgctgatcacatcgatcgacgaccatggatatgattattatctatctagcttgtggtggtggttgaacaataataagcgaggccgagctggctgccatacatangtattgtgtggtgtgtgtgagagagaga

SEQ ID NO: 14803 - DNA, 418 bp, Zea mays
  unsure (1)..(418): unsure at all n locations; Clone ID: LIB36-021-Q1-E1-H12
agtaggcttgacccagagttgataaatctgaaagcaaaactccaagatgtaaatcatggaaatggaagtctacaagacatagaagggattcggaagagtatagaagcacgtacgaaacagttgctgcctttatatacccagattgcaatacggtttgctgaattgcatgatacttccctaagaatggcagctaaaggtgtgattaagaaagttgtagactgggaagaatcacgctcgttcttctataaaaggctacggangaagatcgcagaagatgttcttgcaaaagaaataaggcagatagtcggtgataaatttacgcaccaattagcaatggagctcatcaaggaattgtaccttgcttctcaagccacaacangaagcactggatgggatgacgatgatgcttttgttgcct

SEQ ID NO: 14804 - DNA, 440 bp, Zea mays
  Clone ID: LIB36-021-Q1-E1-H4
acgtccgacaacctcagcacatcgaggagaagaggagtggccaatggcttcgtcggtggccgccgcggcgagcacattcctgggcacccgcctggcggacccggtgccgcagaacgggcgcatcgtggcccggttcgggttcggcggcggaaagcccaaggctgccgtcccgaagaaggtggcgaagacgtcgatctcctctgaccggccgctgtggttccccggcgccgtggcgcccgactacctcgacggctcgctggtcggcgactacgggttcgacccgttcgggctcgggaagcccgtggagtacctgcagttcgaactggactcgctggaccagaacctggccaagaacgaggccggcggcatcatcggcacccggttcgagtcctccgacgtcaagtccaccccgctccagccctacagcgaggtgttccggc

SEQ ID NO: 14805 - DNA, 108 bp, Zea mays
  Clone ID: LIB36-021-Q1-E1-H5
ctcacgggttgacacaagcgtccacacacacgttctggtaataataagcatcgtacaatctgcatgctgttttgtaataattaattaatatcccagcccattggatgg

SEQ ID NO: 14806 - DNA, 269 bp, Zea mays
  unsure (1)..(269): unsure at all n locations; Clone ID: LIB36-021-Q1-E1-H6
cccacgcgtccgcgcccgcaacggcgtcaagttcggcgaggccgtgtggttcaaggccgggtcccagatcttcagcgagggcgggcttgactacctcggcaacccgagcctgatccacgcgcagagcatcctggccatctgggcgtgccaggtggtgctcatgggcgccgtcgaggggtaccgcatcgccggtggcccgctcggggaggtggtcgacncgctggtacccggcggcagcttcgacncgctcgggctcgccgacgacccgg

SEQ ID NO: 14807 - DNA, 398 bp, Zea mays
  Clone ID: LIB36-021-Q1-E1-H7
cacacgcgtccgcggacgcgtgggcggacgcgtgggggtatccagaccaggatcagtgaaggtggagaacttgatgaacattgagagatactcccatgttatgcacatcagctcaacggttagtggacagttggatgatcatctccagagttgggatgccttgagagctgccttgcccgttgggacagtcagtggtgcaccagaggtgaacgccatggagttgattgataagttggaagttacgaggcgatgaccatatagtggtggtctaggaggaatatcgtttgatggtgacatgcaaattgcactttctctccgcaccatcgggttctcaagagcgccgagccacaggacgatgtactcatacagatgcgcagagtaggctccggagtgggtcg

SEQ ID NO: 14808 - DNA, 455 bp, Zea mays
  unsure (1)..(455): unsure at all n locations; Clone ID: LIB36-022-Q1-E1-A10
cgcgggtcgacgcaagcgtctgcacagacgtcctgataagaagagcggcggcgcgggcggacaaggagcaggcggaggaggagttgtgccaagccacaatgggtatctcgcgtgactcgatgcacaagcgccgagccaccggtggaaagcagaaggcctggaggaagaagcgaaagtatgagcttggtcgccagccagccaacaccaagttgtcaagcaataagacagtgaggagggtccgtgttcgtggaggtaatgtgaaatggagggctcttcgccttgatactggtaactactcatggggaagtgaagctgttacccgcaagacccgtatcctcgacgtggtctacaatgcatcaaacaatgagcttgtgaggacacaaacccttggtaagagtgccattgggcacgttgatgctgccccattcaagcagtggtanctcactcactatgga

SEQ ID NO: 14809 - DNA, 476 bp, Zea mays
  unsure (1)..(476): unsure at all n locations; Clone ID: LIB36-022-Q1-E1-A11
cgggtccacgcacgcgtctgcaacacgcgtccggtgtttggtgaaatctaccctgatccagtaagagttgtatcagttggtcgcaaagttgaagatctgcttgcagatcccgatagcaaagagtggctatccatatcgactgaactatgtggaggtacacatatcacaaacacaagagatgctaaagcatttgcactcttatctgaggagggtattgcaaaaggagttaggaggataacagccgtgactgctggatgtgccacccaggctatggagttggcgtcatctatcgattctgatatcaataaagcatctcagttggagggagctttgttggaaaagaaaattgcttccatcaagagtgggctggatgcagctgctatccctgctgcgagaaaagctgatttgagaggcaaggtttcaaagttagaggacgaacttatgaaggcaaanaagaaaatgggggagcaaaatat

SEQ ID NO: 14810 - DNA, 187 bp, Zea mays
  Clone ID: LIB36-022-Q1-E1-A2
gtgggtcgacgcaagactctacagtgacgtcgtattaacgcgtgggctcggctctcgcatcgatgaagaacgtagcaaaatgcgatacctggtgtgaattgcagaatcccgcgaaccatcgagtttttgaacgcaagttgcgcccgaagccttctggcggagggcacgtctgcctgggcgtcacgcc

SEQ ID NO: 14811 - DNA, 360 bp, Zea mays
  Clone ID: LIB36-022-Q1-E1-A5
ctcgcgggtcgacgcaagcctctagactgagtcgtgtataagcccaaggagccgtacgtcgggaggtgcctgctcaacaccaggatcaccggcgaccaagcgcccggggagacgtggcacatggtcttcagcacagaaggcgaggtcccctacagagagggccagtccatcggcgtcatcgcggatggcgaggacaagaacggcaagccgcacaagctcaggctctactccatcgccagcagcgccctcggagatttcggcgactccaagacggtgtcgctgtgcgtgaagaggctggtctacaccaacgatcagggggaggtcgtcaaaggagtctgctcgaacttcctctgtgacttg

SEQ ID NO: 14812 - DNA, 370 bp, Zea mays
  Clone ID: LIB36-022-Q1-E1-A7
ctcgtgggtcgacgcaagcctctacagtgactcgtgggagactatgagggccaagtggaagaagaagcgcatgaggaggctgaagaggaagcgccgaaagatgaggcagagatccaagtaggctgatggggattgtggatggtggtgtcggcatagttgtgttacgtttcttcgatgcgtgagttcatggagagatgtcacatcctagttcgtcgtcaccgtttgccatgggtccaatggctcgtcttggaaacctgcacttcagtaggccatctatcgtggtttctagctatatccagagttgtgctaagacaaatcagtcagtcgttttgtgaacctattatgatggagctttatttgctgctaatat

SEQ ID NO: 14813 - DNA, 384 bp, Zea mays
  Clone ID: LIB36-022-Q1-E1-A9
tcgcgggtccacgcaagcctctacagagactcgtgcaagagccacagcccacaggctagctctctagcggtctagccagtccacgcagcgcagggatggcgtcgttcgccgtggcaacggccccgtcgctagcggccccggcagccaagaggaggcccgccgccggcgtcacgtacgtggagggcatgaacgcctacagcggcctcaaggggctcaacaaggtgaccatgctcggggtgcgcaagaccgccgactactccttcgccaaggtcgtggcgtcgctcagccccgcgggcaggaagcggcacggcggggcgttcggcgcccagatgaacgccgccgccgagatcttcaggatcgccgccaccatgagcggcctcgtgc

SEQ ID NO: 14814 - DNA, 417 bp, Zea mays
  Clone ID: LIB36-022-Q1-E1-B10
tcgcggggtcacgcaagcgtctgcatggactcgcaccatctctgcctgaccagctaggatcagcggaagcagcaatggtgatggcgtcgtcgagcgggctgaggagctgcagcgccgtgggcgtgcccagcctgctggctccgtcgtcccggtccggccgcctggcgccgttctgcgccaacgccaccacctctggccgcgtcaccatgtccgcggagtggatgcccggccagccacgccctgcccacctcgacggctcctctcccggggacttcggcttcgatccgctgggcctcgcgaccgtgccggagaacttcgagcggttcaaggagtcagaggtgtaccactgccgctgggccatgcttgccgtccccgggatcctggtgccggaagctctgggcctgggcaactgggtga

SEQ ID NO: 14815 - DNA, 423 bp, Zea mays
  Clone ID: LIB36-022-Q1-E1-B12
tacaatgcggcatcgaagaggaagcaaaggaaaggggatatgtcgaggccgcccaacaggagcgacgcgcacctctccgccgaggacgaggcggcgctggaggccgaggtgcgggagtactacgacgacgcggcgccaaagcgccacaccaagccctcccgcagcgagcactccgccgtgtacgtcgacgcgctcgtcccggacgtcggcggcaactcccacccggagctggacaagttccaagagctggaagcacacaccgagaggttggtgtacgagggcgccaatgtgggaaatgagttcgtggacacggagtactacaaggacctcggcggcgtcggcgagcagcaccacacgaccggaacgggcttcatcaagatggacaaagctaaaggcgcccccttcaaactgtctgaagatccc

SEQ ID NO: 14816 - DNA, 402 bp, Zea mays
  Clone ID: LIB36-022-Q1-E1-B2
gtaggtcgacgcaacactctatagtgacgtcgtattaagcaaccagcacacatttccctttggcggatcgaaggaaggaaggaggagatgggtggcggcatggaggtgcacaaaaaccggtggatcgaagagtggaacgccggccgcgagaacctcgagttcaatttccgctggacccgccgcagcctcgccgtcgtcggcctcttcggcctcgctgtccccatcctcgtctacaagggcatcgtccgcgaattccatatgcaggacgaggatgcaggccggccatacaggaagttcctgtaagcggcgtccagggctgcaggagacgtcgatccctcgaccggggctgcgaggaggggagtttccattcagtttgtgtccgtattgttttagtctgaatct

SEQ ID NO: 14817 - DNA, 406 bp, Zea mays
  Clone ID: LIB36-022-Q1-E1-B4
gggtcgtcgcaacactctacactgagtcgtattaggccggtacagcggcacagaggtgcgacgtacgacgacgacgacgcaggcgccacacatggcatcccagctctccgccgccgtgccccggttccacggcctccggggctacgccgcgcccaggtccgcggtggcagcgctgccgtccgtgagggtgggcaggaagaggtcgtcgtcgcagggcatccgctgcgactacatcggctccgccaccaacctgatcatggtgacgacgacgacgctgatgctgttcgcggggcggttcgggctggcgccgtccgcgaaccgcaaggcgacggcggggctgaagctggaggcgcgcgactccggcctgcagacgggtgaccccgccgggttcaccctcgccgacacg

SEQ ID NO: 14818 - DNA, 412 bp, Zea mays
  Clone ID: LIB36-022-Q1-E1-B5
ctcgtgggtcgacgcaagcctctacaatgagtcgtagaatggccatggcttcgtcggtggccaccgcggcgagcacattcctgggcacccgcctggcggacccggcgccgcagaacgggcgcatcgtggcccggttcgggttcggcggcggaaagcccaaggctgccgtcccgaagaaggtggcgaagacgtcgatctcctctgaccggccgctgtggttccccggcgccgtggcgcccgactacctcgacggctcgctggtcggcgactacgggttcgacccgttcgggctcgggaagcccgtggagtacctgcagttcgaactggactcgctggaccagaacctggccaagaacgaggccggcggcatcatcggcacccggttcgagtcctccgaagttaattccacccg

SEQ ID NO: 14819 - DNA, 391 bp, Zea mays
  Clone ID: LIB36-022-Q1-E1-B7
ctcgcgggtcgacgcaagcctctaggataaatggcataaggcaacaccgcccgcgacgaccacgatggcagcctcgctccaagtccaagccgcggccaccttgatgcaaccggccaagatcggcggccgggcgccgtccgcctcgctgccgtcgtcccgcccgtcgtcgcaactcgccagggcgttcggcgtcgacgccggcgccgccaggatcacgtgctccctccagtccgacgtcagggacgtcgccagcaagtgcgtcgacgccgccaagctcgccggcttcgcgctcgccacctcggcgctcctcgtctcgggcgcgagcgcggacggcacgcccaagaggctgacctacgacgagatccacagcaggacgtacctgaaagtgaag

SEQ ID NO: 14820 - DNA, 271 bp, Zea mays
  Clone ID: LIB36-022-Q1-E1-B9
cgcgggtccacgcaagcgtctagactcagtcgtaactaaagccatcggacgagcagctggacgaccatggcctcgccgctgctcaagtcacactctcagctagccgccgtcaccgccctgcactccgtgaggagagccgaccgctgctgcggcgacaatacacctggcgcaagttccatgaacacgggctcaggtccggccgttctaagagattcggttcagcgaacgtgggcgccttcccgtctctggacgtcgtgccgctgatggtgac

SEQ ID NO: 14821 - DNA, 379 bp, Zea mays
  Clone ID: LIB36-022-Q1-E1-C1
gggtcgacccaagcctctacagacactcgtgcaaaacaatcaccagttcttcggtccgcgtcagagaggccgcggcgatgtctgggcgcggcaagggcggcaagggtctgggaaagggcggcgcgaagcgccaccggaaggtgctccgcgacaacatccagggcatcaccaagccggcgatccggaggctggctaggaggggtggcgtgaagcgcatctcggggctcatctacgaggagacccgcggcgtgctcaagatctttctcgagaacgtcatccgcgacgccgtcacctacaccgagcacgcgcgccgcaagaccgtgaccgccatggacgtcgtctacgcgctcaagcgccagggccgcaccctctaagggct

SEQ ID NO: 14822 - DNA, 444 bp, Zea mays
  Clone ID: LIB36-022-Q1-E1-C10
tcgcgggtcgacgcaagcctctacagagactcgtgctaacgcgtgggtgcaaatctagaagatgaacaaccttgatggggccctcaaggttggacagaaacgtggaagattgcatgcaaatctagaagatgaacaacctaaaaagaaggttagattagggagcccagcggctcaatggatttcagtttataatgctaggcgacccatgaagcagaggtaccattacaatgtggctgactcaaggctaagtcaacatatagaaaagggtaatgatgacgggctttacgttagttgtgtggcttcctcggcaaacctttgggcactcatcatggacgcaggaactggtttctgttctcaagtttacgagctctcaccagtttttctccacaacgactggataatggagcagtgggagaaaagttactacataacagcaattgctgg

SEQ ID NO: 14823 - DNA, 394 bp, Zea mays
  Clone ID: LIB36-022-Q1-E1-C11
tcgtgggtccacgcaagcctctagactgagtcgcaatgatcagcggaagcagcaatggtgatggcgtcgtcgagcgggctgaggagctgcagcgccgtgggcgtgcccagcctgctggctccgtcgtcccggtccggccgcctggcgccgttctgcgccaacgccaccacctctggccgcgtcaccatgtccgcggagtggatgcccggccagccacgccctgcccacctcgacggctcctctcccggggacttcggcttcgatccgctgggcctcgcgaccgtgccggagaacttcgagcggttcaaggagtcagaggtgtaccactgccgctgggccatgcttgccgtccccgggatcctggtgccggaagctctgggcctgggcaactggg

SEQ ID NO: 14824 - DNA, 334 bp, Zea mays
  Clone ID: LIB36-022-Q1-E1-C3
gtaggacgacccaagactctagactaagtcgtatgaaacggtggccgctcccgtggcttcggtctcccgcgcggcagctgcgctcgcccccgccggcgccgtccgctccgccagggtagcctccctgcaccctttccactcttccaccaaaatcgtgctgctgccaccacagaccggcctgctcacatccgccaggcacaggcggcgcttggcggcacggagcagcacctcggagagcagcacggatgactcccaatccccgaaacacgagaacgcgccgttcgggtacaccaggaaagacctgctgctgatcggccccggagtcaccgccttc

SEQ ID NO: 14825 - DNA, 292 bp, Zea mays
  Clone ID: LIB36-022-Q1-E1-C4
gcaacactctatagtgacgtcgtagtacacagcagctggtgggagggaagcagcagggcggcggggaggagagcgccggcggcggtgggttgtttaagatggcccagggcttcctcaagtagatattgtctggccaacgtatatacgagtacgtaattagcttcaaaataatgttcccctcgcctttatttgctgttcaagtccctgtaataaccgagaacgttaattgtagcagtgtgttttttatatgactacataactactatgttgtagaatgctagtgcagctgtgc

SEQ ID NO: 14826 - DNA, 385 bp, Zea mays
  Clone ID: LIB36-022-Q1-E1-C5
ctcgtaggacgtcacaagactctacagtgagtcctagtgatctatcacaccgcacaccaagtttgaggctgttgtgtatgtgcttaagaaggaagagggtggccggcactcacctttcttccctggttaccgcccgcagttctacatgaggacaaccgatgtgacagggaatgtgactgtgattatgaatgacaaagatgaggaggcgaagatgtgcatgcctggtgaccgtatcaagatggttgttcagctcatccagcctgttgcttgtgagcacggtatgaggtttgctatccgtaagggtggtaagactgttggtgctggtgtcatcaacaaaatcattgagtaaactggatatatcatacccaccacgagaattttcctt

SEQ ID NO: 14827 - DNA, 399 bp, Zea mays
  Clone ID: LIB36-022-Q1-E1-C6
ctcgtaggacgacgcaagcctctacactgacgtcctgctcatccatctagctccctaactgcaccggccgccacaccaccccgaccggaccctccacaacaatggccaccgtcctgggcagcccccgcgcgccggccttcttcttttcgtcgtcctccctccgcgccgcgccggcgcctaccgccgtggcgctgcctgcggccaaggtgggcatcatgggccgtagcgccagcagcaggcgcaggctgcgcgcgcaggccacctacaacgtgaagctgatcacgccggagggggaggtggagctgcaggtgcccgacgacgtgtacatcctggaccaggccgaggaggacggcatcgacctgccctactcctgccgcgcggggtcctgctcctcctgcg

SEQ ID NO: 14828 - DNA, 401 bp, Zea mays
  Clone ID: LIB36-022-Q1-E1-D1
cgggtcgacgcaagcctctaggggaaggcctacgacaccagcaaccccggggagacgcccaccatgagcgtgccccggagcaagcgccaggacctcgacctcaccgtcgacgacttcgaggaggacgagatcgaccccgagctgcgctactccttccagcggaacagcaggtttctgaagagagtttttagcgtggacacacttgtcaagcctcttcctcctgtaatggcatacagtgtatcccgcaatataaacttcttcttccggatcttcacacagttttgggatgaagaaggaattgccaatgcccagaagtcccttggactggggaacgaggacggctcccgccgaatgcgctgatcatggtcaaaccaagttttctgtaccgggttcagaactct

SEQ ID NO: 14829 - DNA, 452 bp, Zea mays
  Clone ID: LIB36-022-Q1-E1-D10
ctcgcgggtcgacgcaagcctctaaactgaggcgtctgagagcccgtggtacggccccgaccgcgtgctgtacctgggcccactgtccggcgagccaccgagctacctgacgggcgagttcccgggcgactacggctgggacaccgcggggctgtcggcggacccggagacgttcgccaagaaccgggagctggaggtgatccactcccgctgggccatgctgggcgcgctcggctgcgtcttccccgagctgctcgcccgcaacggggtccagttcggcgaggccgtgtggttcaaggccggctcccagatcttcagcgagggcgggctggactacctccggaacccgagcctcatccatgcgcagagcatccttgcgatctgggcctggcagggtcgtggcccatcgggcggccgtcgaagggctaccgccctcggccggcgggcccgct

SEQ ID NO: 14830 - DNA, 420 bp, Zea mays
  Clone ID: LIB36-022-Q1-E1-D11
tcgcgggtccacgcaagcctctacactaagtcgtcacactcctctgccgccgtcaccgccccttccttcgccgcaccagcgccagcccgcgccgtggtcagaaggaggtccttcaccgtgcgcgcctctctccgcaaggccaccggcaccgccgccgtggcaatggctgccagcgccctgcttgccggcggtgccatggcccaggaggtgctgctgggcgcaggcgacggcgggctcgtcttcgagcccagccagttcaccgtcaaggccggcgacaccatcacattcaagaacaacgccggcttcccgcacaacgtcgtcttcgacgaagacgaggtgccgagcggcgtcgacgccaccaagatctcgcaagaggagtacctcaacgcgccaggcgagacctactccgttcacctcaac

SEQ ID NO: 14831 - DNA, 434 bp, Zea mays
  Clone ID: LIB36-022-Q1-E1-D12
tcgtgggtccacgcaagcctctaaattcatgcatactaggctcgcgccggaggaatacctgatatcatacctgaggatcaggaggggaggaccagctttttgtacacaccaggggatgtggatgactgtgttggcaagatcaagcagctcctgtcgagcgaggagctgagggaggccatggggagagctgccaggaaggagatggagaagtttgactggcgagcggcgacgaggaagatccgcaacgagcagtacagtgctgcaatctggttctggcgcaagaagagggcacaggtgctgcggcccctccaatgggtgctgcggctgctgaggcggacaacgccaggagctgccgaatgcgatgccgcagcgaagcaatcctaggagagggcggctactatggttgatggtcctccttttttcccattccttgt

SEQ ID NO: 14832 - DNA, 356 bp, Zea mays
  Clone ID: LIB36-022-Q1-E1-D2
cgggtcgacgcaagcctctacactgacgtcctgttacgcgtccgcaccgacataaccgttacgaattcgaatggttgctagatcagctaaataccacatgtttgtggacttcagttacatgtaatattttttttgtgattccacagatgagaactcttcaaagtttaaaccgtcgatttagccttcattctgcctcagcattttatcgccttgtttctgtagtagcaaccagtaacaacaaggttgcctgtagtctgtacaagatagtagaggtttttttttctgtgctggttgtacgacacaactgtgaatgacttgccgtagacggatactatactgtacgctcgatgcgccaa

SEQ ID NO: 14833 - DNA, 385 bp, Zea mays
  Clone ID: LIB36-022-Q1-E1-D3
tgggacgacccaagactctacagtgactcgtaccatcgcggggatctcggcctcgttcccggccaagggcggcgtcggcatggtgcacgcgcccaacccgaccaacaggtacttccgccacgtcgtgcactgcaagggttgcagggcaaccgtcaaaaagtacacctcgttgaacaccgtgttcgcggccctcgcggcggcggccctatcggccgccatcctggcggcgaccaggcactggaaggccgtcttggtggctgcgtcggccgtgctagcccgccgcatcctacgcgtgtgacgcggtgctttcgttgatcaccaccaacttcatcagaacacacaggagactgtacttaatgtgttccgggccaatgacacgggagcg

SEQ ID NO: 14834 - DNA, 382 bp, Zea mays
  Clone ID: LIB36-022-Q1-E1-D4
tgggtcgacgcaagactctacactgagtcatatgaggacggtacagcggcacagaggtgcgacgtacgacgacgacgacgcaggcgccacacatggcatcccagctctccgccgccgtgccccggttccacggcctccggggctacgccgcgcccaggtccgcggtggcagcgctgccgtccgtgagggtgggcaggaagaggtcgtcgtcgcagggcatccgctgcgactacatcggctccgccaccaagctgatcatggtgacgacgacgacgctgatgccgttcgcggggcggttcgggctggcgccgtccgcgaatcgcaaggcgacggcggggctgaagccggaggcgcgcgactcgggcctgcacacggggtgacc

SEQ ID NO: 14835 - DNA, 365 bp, Zea mays
  Clone ID: LIB36-022-Q1-E1-D5
ctcgtgggtcgacgcaagcctctagactgagtcgtagcaatccacagccacggtggcaacgccaccctgccccagatagtttccagggccgcgctccacccgtccaagatcccctgcctgcgtcgcctcatgcgggtgctcacagccgccggcatcttcagcgccgcccaccgctcgccggacgacggcggcggcgagctcgtctatggactcacaccggcgtctcagctcttggttggcggctcttcaagcctggctcccttcatgtccctggtgttacaccaggtctacgtgtcgcctttccttggcctcggcacatggttacagcacgagcgctcagacccgagcctgtttgagatgacgca

SEQ ID NO: 14836 - DNA, 162 bp, Zea mays
  Clone ID: LIB36-022-Q1-E1-D8
ctcgtcggtcgtcgcaacacactatactgactcgtattagacaagctctcgatctcaccgacaccgaggaagaacagatcaatagccctcgagcacggattcgcgactacatgccacagctatgactagtttggggcccacaggaccacagcccaggaagcc

SEQ ID NO: 14837 - DNA, 428 bp, Zea mays
  Clone ID: LIB36-022-Q1-E1-D9
cacacgcgtccgcaaggagcagctggacgagctcggcaacggactgtgcgattccggcaagcctttcgtttgggtgctgaggtccaacgaggcagagaagctgtctcgacagctcggtggcaggtgcaaggagaggggcctcattgtccccttctgtcctcagctcgaggtgctggcacacaaggccacaggttgcttcctgacgcactgcgggtggaactcgacgattgaatccatcgctagtggtgttccaatggtggcgatgccgcagtgggcggaccagccgacgacggccaagtatgtggagagcgcgtgggggattggggtgcgcatgcggaagggttccttggtgaggaacgacgttgagaggtgcataagggaggtaatgggcggggagaggaagcatgtgtactggaggaatccgctcg

SEQ ID NO: 14838 - DNA, 391 bp, Zea mays
  Clone ID: LIB36-022-Q1-E1-E1
cgatccgcaacctctactccaccggcaccaacgacgtgtaccacccggtttccatggtcatcttcttcgtggcgtcctacgcgctcggcgtgctcagttacggcgttgtggcgccgtccgggcttttcgtccccatcatcctcacgggcgccacctacggccgcctcgtggcaatgctgctcgggggccgctccggcctcgaccacggcctcgtcgccatcctcggctccgcgtcattcctcggcgggacgctccggatgacggtgtccgtgtgcgtcatcatcctcgagctcaccaacaacctgctactgctgccgctcgtcatgctcgtgctgctcatctccaagacggtcgccgactccttcaactccagcatctacgatctcatcct

SEQ ID NO: 14839 - DNA, 391 bp, Zea mays
  Clone ID: LIB36-022-Q1-E1-E12
cgtgggtcgacacaagactctagagagattcgtattacattggatgaatccttaaggaagacatatcacaaaagaaataaaggctaaagtaagcgctccttgcctttggtttgagcaaaacagattcttgtttcaccgaggaaaagagagaagttctggataaattgacaatgtcaacttgaattgactaattcagttccgcctattccacattaatgggagtacatttatgtttctgctttacgaatatgatattttttggacatttctaataatagcaagccttattcctattttggtactttggatttcaggacttttagcccctgttagtgaacgaccagaaaagctttctagttaagaatcgggtatagaatccaagggggggggc

SEQ ID NO: 14840 - DNA, 363 bp, Zea mays
  Clone ID: LIB36-022-Q1-E1-E2
tgggtcgacgcaagcctctagagtaagtcgtattaatacgcagccgaagcgactgtcgcgaggcaaggccatcgtccgccatgacgctctccctctccacctctttcctccccatccccgccgccgctatgacgacctcccgcaccctacgctccgtcatcccctcccacgggatgcgctgctcgatgctcaagatggggttgcacccggacatctacgacgacgcgaaggtgtactgcaacggcgagctggtgctggtgaccgggggcaccaagccggagtacacggtggacgtgtggtccggaaaccacccctactatgtcggcgacacctcggcgctcgtggtcatggacagccagatcg

SEQ ID NO: 14841 - DNA, 248 bp, Zea mays
  Clone ID: LIB36-022-Q1-E1-E3
gtgggtcgacccaagactctacagctaagtcgtatcacctgcatgcaatggttccttttgcttccaacaattctcctgctgatgtatccagcatggcatcatccatctacaattacgtacgtagtgcaacgactgtcgattcgttgggtgaggaacatatatgtgaatgcaagctccggctaccatacatgtgtaatgtgtaatagatatatatacaaaactgccgaggcgccgacaatactttaaaa

SEQ ID NO: 14842 - DNA, 441 bp, Zea mays
  Clone ID: LIB36-022-Q1-E1-E5
ctcgtaggtcgtcgcaaccctctagactgagtcctattactaccggacggcgcgcggcgggcagaagctcagggacatcatgctcgacggctacatcgacctatacgggccctacgataaggtggcggcttgggtcgacgatggcggctctgggactgcacggggaatgacggttgagcgtgggtagacaaaaccagaacgagaaatgggaattaggggcgagtcccgactcccgagcggctggcaccgaggcgaagctcaatgtgacaaggtcgacgacaggagatcaacagcgatggcgaccgtggcggccctactgcgtgctgggtggggaaaccgacaacgagagtgcaaatgacgagtggggttcgctggagttccgggtcatcaccctaaatcccatgaaggctttgttcaattctaccccaaatccataatgga

SEQ ID NO: 14843 - DNA, 384 bp, Zea mays
  Clone ID: LIB36-022-Q1-E1-E6
ctcgtgggtcgtcgcaagcctctagagtgagtcttcttaagctacggcctagctacctaacctactacggcgcagctagcagcggcggccatgaccgacgggcgcgaggagagcaccagcagcaggtggccagagctggccgccctgcgcgcgctggcgcgcgacgcggcggcccgggccgggagggagacggcggggtggcgcgggcgggagcgggaggatcaccgccacggccacggcaagacggccaaggtcatgcacctgctgctctggggacccaaatgaggtgaagtgaagcgctgctgctgcagcatagcacctgcctctgcctcgtggcccgcgcgcggcgtcctcgcttccttctccgcccgctgcccgcacggg

SEQ ID NO: 14844 - DNA, 448 bp, Zea mays
  Clone ID: LIB36-022-Q1-E1-E7
ctcgtgggtcgacgcaagcctctacactgactcttaggaaagcagctcagggacaaatacgtggagacacagcagcttctcctccagatcgctgggcacaaggatattcttgaaggcgatccattcctgaagcaggggctggtgctgcgcaacccctacatcaccaccctgaacgtgttccaggcctacacgctgaagcggataagggaccccaacttcaaggtgacgccccagccgccgctgtccaaggagttcgccgacgagaacaagcccgccggactggtcaagctgaacccggcgagcgagtacccgcccggcctggaagacacgctcatcctcaccatgaagggcatcgccgccggcatgcagaacactggctaggcggcttctcttcactcacctgcaaagtgcaccccataatcagcttccggaatgttgccttttgtca

SEQ ID NO: 14845 - DNA, 406 bp, Zea mays
  Clone ID: LIB36-022-Q1-E1-E8
ctcgtgggacgtcgcaagactctagattgagtcatattaggttccatgatgcatgcaaccttcgtcaacactgctgctctttcaaagcagtcaaattcaagaaatggaaacacaaattctccaacgagtcatgcgcaactacagaaacttagcgcgatgactcctacatcatgggcacagatggttgtggatctttatcctccagggtcaaacagcagggattggacttgcactcactgcagggttgttcagccacctcgtactcggcactgccatgactgtgataaatgcgtccttcaatttgatcatcactgcatatggcttggaacatgcattggcaaaaagaagcattgtcgtttttggtggtacatatctgaagaaacaatcttgtgtatctggactgctg

SEQ ID NO: 14846 - DNA, 398 bp, Zea mays
  Clone ID: LIB36-022-Q1-E1-F1
tgggtcgtcgcaagcctctatagtgactcgtactaacgcgtgggcggacgcgtgggggacgcgagtgagtgaacaccagccgtattgtcccgactcctgacccctaccgatcctcgcctgctgcagccatggcgacctccgcggcgctctccaccgccgccaatcccacccagctctaccggtcccgcgcttcgctgggcaagccggtgaaggggcttggcctgagcatgggccgcgagcgcgcccagcggagcattgtgtgccaggcggcgagcagcatctccgccgaccgcgtccccgacatggagaagcggaagctgatgaacctcctcctcctcggcgccatctcgttgcccaccgtcggcatggtcgtcccctacggcgccctcttcgtccct

SEQ ID NO: 14847 - DNA, 388 bp, Zea mays
  Clone ID: LIB36-022-Q1-E1-F10
cgcgggtcgacgcaagcctctacagtgactcgggcggacgcgtgggcgccggtctcttgctctgatagcttgctccaggacgtacgtacgtacgtagatcgatccatcgatcgctagctagctgacgaccatggcgtccctctcctctgccgccatcaccgccccttccttcacggccgcgcccgctcgcgcagtggtcagcaggaggtccttcaccgtgcgtgcctctctccgcaaggccactgccaccgccgccgtggccgttgccgccagcgtcctgcttgccggcggcggcgccatggcccaggaggtgctgctgggcgcacgcgacggcgggctcgtcttcgagcccagcgagttcaccgtcgaggccggcgacaggatcacc

SEQ ID NO: 14848 - DNA, 421 bp, Zea mays
  Clone ID: LIB36-022-Q1-E1-F12
tcgcgggtcgacgcaagcgtctggaaacagtcgaatgatccaattgaagagtgccgcaagaaggtttggctggtggactcaaagggtttgattgttgactctcgtaaaggctcccttcagccattcaagaaaccttgggcgcatgagcacgagcccttgaaaaccttgtatgatgctgttcagtccatcaaacctacagttctgatcgggacatctggagttggaagaacattcacaaaagaaatcattgaggccatgtcttccttcaacgagaggcctatcatcttttcattgtcaaacccaacctcgcattctgaatgcactgctgaacaagcatatacctggagtcagggccgttcgatcgttgccagttgcagttcattttccccccttggagttacgaaaggaaagactttttgtg

SEQ ID NO: 14849 - DNA, 334 bp, Zea mays
  Clone ID: LIB36-022-Q1-E1-F3
gtcgacccaagcctctagattaattcgaagaacacaagagtttgtgcagcaagtatggagtttccgggtatccaacaatccaatggttcccgaaaggatccttggagcccaaaaagtatgaaggacaacgcactgcagaagcccttgctgaatttctcaatactgaaggaggcacaaatgtaaagctggcaaccattccttcaagtgttgtggttctcaccccagagacctttgactcaattgtccttgatgaaaccaaagatgtccttgttgagttctatgccccatggtgtggtcactgcaagagtcttgcaccgacgtatgataaggtggc

SEQ ID NO: 14850 - DNA, 404 bp, Zea mays
  Clone ID: LIB36-022-Q1-E1-F6
ctatatcgcgagcggtgagcatggacggcgcgccgtacctcaggaaggtggacctccggatgtacaaggggtacagggagctcagggaggctctggacgcgctcttcaccaactccttctccgcggcggcagagggcggcggcgaccaccaccagcacgccatcgcctacgaagacaaggacggcgacctcatgctcgccggagacgtgccctgggatatgttcatctcttcgtgcaagaagctcaggataatgaagggctctgcctctgaggccaggtgatcgctgatccatacataaacagaggctacagacacgccacctgggaacgcggatccaagagcacacacggatcgtacttgacgaggaaggagggacgagcactgtggcttgagctctccagtg

SEQ ID NO: 14851 - DNA, 416 bp, Zea mays
  Clone ID: LIB36-022-Q1-E1-F9
gcaagactctagagtgagtcgtactaagccgttatcgccgcgccccgcgctcccggtccgccaccctccgacctcgctgacaggctccaggtttatcctcgacttctcgcttccaccacatccaggccccggcgcggcccggcgcgagtaccccaggatcgaggcgacggcgaggcgaggcgcgcgaactgagagcgccaaggtcaggaaccgtcggctgcagaagaagttcaacggcacggcgacgaagcccagactctcggtgttctgctccaaccggcagctcgacgctgtgctcgccgacgaccacaacaagaagatcctcttctatggcagcacgctgcagaagtccatctgcggcgaatcgccctgtagcaccgtggacgctgccaggaacgtcggggaggagctcctca

SEQ ID NO: 14852 - DNA, 216 bp, Zea mays
  Clone ID: LIB36-022-Q1-E1-G2
gggggggaggggggggggggggggggggggggggggggggtggggggggggggggggggggaagggaggggggggggggggtggggggagagggggtggggagggggggggggaggggggggggagggggggagggggggggggggggggggagggggggggggaggggggaggaggggggcggggggaagggggggggggggggcggggggaggg

SEQ ID NO: 14853 - DNA, 435 bp, Zea mays
  unsure (1)..(435): unsure at all n locations; Clone ID: LIB36-022-Q1-E1-G5
actgggactcgtgggtcgacgcaagcctctagactgagtcctattaaaccctaaaccaaagaaaaagtctgcatccactggtcaagtggagacacatgctcctgcgggtggcccgacttcatatcaacaatacctctcttcgatgagcatgccagggccatcaccatcaggtggaactgattctgtagggtatggcgtcgaccaaagcgcaacacatccatctcagctgcagagttcatccaccaatgtccaggcaccatatgatgacacattttcgttcttaccacctaacatgctgacagggtctgcaaatgatgccatgggtctggaactgggccagttgcagcaagtaacttctcaaggccagacaattcagccagcanacgtgggatatggtgatttggccagaaaccgtgacagtcagtatcccgatga

SEQ ID NO: 14854 - DNA, 301 bp, Zea mays
  Clone ID: LIB36-022-Q1-E1-G7
ctcgtcggtcgtcgcaagtctctagactgagtcgtatgactgctcctcttcgctgtgtggcactgctcccctcgcgagctccctcagcgcgcttccatgtccacgctccgtcgacctagcgctcggtctcgctacaccatcggtgaccgagctcatctacttcaacgccaaccatgcctcttgttggagcgaaggtagaaacgccacccttcgctcgaagtctccgctgcttagccgctgctctgagagacagagcagatagggacacccttcgcgtgatcggcaccagacgaagaccggc

SEQ ID NO: 14855 - DNA, 450 bp, Zea mays
  Clone ID: LIB36-022-Q1-E1-G9
gcaagactctagattgagtcgtgctacctgcctacagcgtcgtgcgtatgatacttcttcctaatcattcgcgtgcaccgacaaacaagagagcaggtctccaaaactattgcccccagagatcttgtatcaggagagggtaaataaagtttttgggaagcactctacatggatgctcgatcacttcattgccgtcttcaatctcattgccatggctcatctgtcgccttgtcacgtggacgtttcatgtcgtcggtaacaatgagatggtgttaggcgtcaagttgtcttctctacccgatcgtcggcaaggaacaaacgtataactatctcgctttcatcatgtattaaatattgtttaatttaatttgtttagatcagtgcaagttttaatcttagttatctttgtaaagacaattcattatgtaataaatttgtgccattggattc

SEQ ID NO: 14856 - DNA, 460 bp, Zea mays
  Clone ID: LIB36-022-Q1-E1-H11
gcaagactctaaaatgagtcatatctagacaaggcagagcgccatcgttcggtttccttgctgaattcccgatcgctcgctcgctcgaaaagaaagaagctagcttttagcatggcgtctctggcgttcggcagcaccgtagcggcggccgtggcggcgacatcggggaggacgcggccggcgcgccggtccgtgctggtcgtgccgcccgctgccagcaggggcggcccggcgccggccaaggaggagaagggcctcggcgagaccatcttcggcttcatcttcaagaaggaccagctggtggagacggacccgctcctcaacaatgtctgcgccgcgccggccgccgcctcgcgcgccaagacgaccgccggcaagaacgctgccggcggcgacgacagcggcagcggccgggggttcaacctccggcggctcgggcggctcttcgccaagaaaagca

SEQ ID NO: 14857 - DNA, 467 bp, Zea mays
  Clone ID: LIB36-022-Q1-E1-H12
cgcgggtccacgcaagcctctagagtcactcatatgaagaatgaagcaacatgagaaggttcttgaggaaggtgtcctcaacccagaatcaactgttgttgcgatcttcctctctcctatgcattatgctgggccaactgaggttcaatggcatgctaaggctcgtattaatgctggtgcaaatttctatatcgttggaagggatcctgctggtatgagccaccccacagagaaaagggacctctatgatgctgatcacggaaagaaggttttgagcatggctcctggccttgagaggctcaacatccttcctttcaaggtggctgcgtatgacacaaagcagaagaaaatgggtttcctttgattcatcaaggaaagatgacttcctcttcatctctggcacagagatgcccactcttgccaagagacgagagagtctcccaaatggttttagttcccgggtggct

SEQ ID NO: 14858 - DNA, 409 bp, Zea mays
  Clone ID: LIB36-022-Q1-E1-H3
tcgtgggtcgacgcaagcctctacagtgagtcagtacatacgagtacatacatactaggcagccaggcagccatggcgcccaccgtgatgatggcctcgtcggccaccgccgtcgctccgttccaggggctcaagtccaccgccagcctccccgtcgcccgccgctcctccagaagcctcggcaacgtcagcaacggcggaaggatccggtgcatgcaggtgtggccggcctacggcaacaagaagttcgagacgctgtcgtacctgccgccgctgtcgacggacgacctgctgaagcaggtggactacctgctgcgcaacggctggataccctgcctcgagttcagcaaggtcggcttcgtgtaccgcgagaactccacctccccgtgctactacgacgggcgctact

SEQ ID NO: 14859 - DNA, 415 bp, Zea mays
  Clone ID: LIB36-022-Q1-E1-H5
gatgggagtaccggagacctgaaagagtcccacctgcatgtccatacaagcctgcagctcagaagaacgatgagggtgcgagtgaatcaaaacccctggccgaaccgcacggtgctggtgctgcggcggcagaagataagaaagtggaatgatgcagcaggcgcttaaaatggtggccacggctctgtgtggttagctaagaaacaataattgttgtggatggttatgtacttggttgatgggttgaacttgttatgacactccggatccttaccagttgcattactaatcactgctgctggtctggtctgtctgaatagaagggagttgaacttgcagtcgcaaatgtaatagcgagagtgaatcttgttgtcaaaggctttcgtatagaatataatgcctgaataatgaactc

SEQ ID NO: 14860 - DNA, 436 bp, Zea mays
  Clone ID: LIB36-022-Q1-E1-H6
ctcgcgggtcgacgcacgcctctacagtcactcgggcgcgagcacccatggcgaagggaggaggtggaggccagcgcgagggtagcgccctgaagagggcggcgatcgtcgcaggggggctcgcgctggcctgggtcaccgtggagaccgctttcaggcccttaatgggccgcctccgcgctgccatctccagctccaccgacaccgcccgcgaccccgaccaggaggagcctcccgcgcctgcctctgcggcggaggcggagaaggcgtccgcaccagaggagcctgccgcggtggaggagaaagtcgaggagaaggtggtcgagttggaggagaaggtggaggaggccgccgccgacaatgccgagtgaacgcgacggccacatggcgccctgtctggctgctcctctgaacgggttcttgaggttagccggga

SEQ ID NO: 14861 - DNA, 434 bp, Zea mays
  Clone ID: LIB36-022-Q1-E1-H9
aggagagtacgtggaggagcagccatggcttcatcggtggccgccgcggcgagcacattcctgggcacccgcctggcggacccggcgccacagaacgggcgcatcgtggcccggttcgggttcgggttgggcggcaaggcgaagcctgctccgaagaaggtggcgaagacatcgacctcctctgaccggccgctgtggttccccggcgccgtggcgcccgactacctggacggctcgttggtcggcgactacgggttcgacccgttcggtctcgggaagcccgtggagtacctgcagttcgagttggactcgctggaccagaacctggccaagaatgaggccggcggcatcatcggcacccggttcgagtcctccgaagtcaagtcgaccccgttgcagccctacagcgaggtgttcggcctccagcggttccg

SEQ ID NO: 14862 - DNA, 475 bp, Zea mays
  unsure (1)..(475): unsure at all n locations; Clone ID: LIB36-001-Q1-E1-A10
ggtccggaaataccgggtcgaccncgcgtccgcaacaatcagagcttgcaacgccttacgcctccacactcaacagtcatggtcgtcatgggcaaggagcagcaacaacacgaggaggaggaggtgcaagggaaggtcgtccaagaagaagtgcaagtcgttcaagagacggtggtgccggtgccgtcggaggaggacaaggaggccgaggcggcgctggtgcacaagatctccagcctggccgccgccatcgcgaagctgccatccctgagcccgtcgccggaggtgaacgcgctcttcaccgagctcgtgacggcgtgcatcccgcgcagcagcgtggacgtggagcggctgggcccggagctgcaggagatgcgcggcgggctgattcgcctctgcgccgacgcggaggcgctgctggaggcgcactactccgacctgctggcctccttcgacaacccgctggagcacctgt

SEQ ID NO: 14863 - DNA, 470 bp, Zea mays
  unsure (1)..(470): unsure at all n locations; Clone ID: LIB36-001-Q1-E1-A12
ggtccggttntatcgggtcgacgcacgcgtccgcccaagcatccgcccacgcgtccgaaggaattcagaaaacaatatgaaagttacgtaccgatggaatataaggtgtacttgaagaaaatgaaaagatctggggaatggggagatcatctgaccttacaagcagctgcagatcggtttggtgccaaaatttgtttgctgacatcatttaaagacacctgtttaattgagatagtccctagggatctaactcccacaaaagagctttggctaagcttctggtgtgaagtacactacaattccttgtatggaatcgacgatctcctgacccgcaagacgaagaagaagcactggctgttctaagaaggttctgaaggatccaaattctttcagcagctcctgctctgtccagccagcgcagcctctgtcttagtacttactagttggccaacactgtatcatatcctaag

SEQ ID NO: 14864 - DNA, 211 bp, Zea mays
  Clone ID: LIB36-001-Q1-E1-A8
acggtcggatatccgggtcgaccacgcgtccgtgataattaggttgcaataacaccataatggtttatttatgctggattctgaaatctaatctgccggattctagattaaaggattcgattgtcagggatttctcgaacttggatttgattagtgagctggaatgactaaattatagttgatgcagtacataccattatttttttttgtt

SEQ ID NO: 14865 - DNA, 438 bp, Zea mays
  Clone ID: LIB36-001-Q1-E1-B10
gggtcgaccacgcgtccgcgcaacaaacgcacctagccatgacgatcaactccaacagcagcggcagccatgtcatccaggtcacggtcatctccaaagcgcacaggatacatgaagtgtccatggatccgtccttcggcaagggctcccgggatcaccccgccgtctcgttgacgcaccgcaccccttacgcgtcgttcggcgacaagcacagcaacggttgccagctgacccactgggtgaacaagctgtgcacaacggcgcatggcttcatacagcatgtgaccttgcggccgaatctgtcacgtactgtgaacgggaagctgagccttagcgctctgatcctgcaggccggcagtgtggatctcgtgttccgccatgccttctccgccgccgacaaaggcgatcggctgctcaatgcgctgcagtgctacatct

SEQ ID NO: 14866 - DNA, 411 bp, Zea mays
  unsure (1)..(411): unsure at all n locations; Clone ID: LIB36-001-Q1-E1-B11
gggtcgacgcacgcgtccggcgtattagtgcgcgccgacctcaacgtgccgctcgacgagaaccagaacatcaccgacgacacccgcatccgggccgccatccccaccatccagtacatcctcagcaagggcgccaaggtcatcctctcaagccacttgggtcgccctaagggttttacacccaagtttagcttagctccccttgtaggacggttgtctgagcttcttggcattcaggtgcaaaaagccgacgatgttattggccctgaagttgagaggctggtggcggccttgcccaacggtggggttctgctgcttgagaacgtaagattctacaaggaanaggagaagaatgacccagagtttgcacagaagcttgcctccctagcagatctttatgttaacgatgca

SEQ ID NO: 14867 - DNA, 470 bp, Zea mays
  unsure (1)..(470): unsure at all n locations; Clone ID: LIB36-001-Q1-E1-B2
ggtccggttagccgggtcgagccacgcgtccgctcaacagccgcagccaaaccctctccagcagccgtcgtcgccaccgctgcagcgcggaggcgacccccatcgccgccaagatgcagatcttcgtgaagaccctgacggggaaaaccatcacgttggaggtggagtcctcggacaccatcgacaacgtgaaggccaagatacaggacaaggagggcatcccgccggaccagcagcggctcatcttcgccggcaagcagctcgaggacggccgcaccctcgccgactacaacatccagaaggagtccaccctccacctggtgctccgcctccgaggtggcgccaagaagcgcaagaagaagacgtacaccaagcccaagaagatcaagcacaagcacaagaaggtgaagctcgcagtgctgcagttctacaaggtggacgacgccaccggcaaggtgacncgcctccgc

SEQ ID NO: 14868 - DNA, 382 bp, Zea mays
  unsure (1)..(382): unsure at all n locations; Clone ID: LIB36-001-Q1-E1-B3
cggtcggngagccgggtcgaccacgcgtccgagcaacacctcctttcctctccctcgaggtgtctctcccagaacgcacagcacagtcgcagaacaggaaggcagagagcagcgccgcgatgagaggaggaggagcggggcccactgcggcgttcatgtccgacgagccgcctccagccgacgcggaagaggtggaggagaactccggcgccgaggaggaggacgaggagacggtggtggagcaggacgacgacgagctggagctggggctctgcctcggctccaagcaacagcagcagcagcatccgccgccgtgccggatcctcacggcccgggacctgcagccgaggtccctgtcaccggattcctccgtgtcctcttc

SEQ ID NO: 14869 - DNA, 440 bp, Zea mays
  Clone ID: LIB36-001-Q1-E1-B7
taccggtcctgatttcgcgggtccacccacgcgtccgaagcatactgcatacacaacacagagcatcagaaggagctgcgatctgatcgacatggctgccgccaccatggctatcacctcccgcgcgctcatcggcaagccggcggctggcacgagggacgtcttcggcgagggccgcatcaccatgcgcaagaccgccgccaagcccaagccggcggcgtccggcagcccctggtacggtgccgaccgcgtcctgtacctgggcccgctgtccggctcgcccccgagctacctgaccggcgagttccccggcgactacgggtgggacaccgcggggctgtctgcggacccggagaccttcgccaagaaccgcgagctggaggtgattcactgccgctgggccatgctcggcgccctccggtgcgtgttcccggggctgc

SEQ ID NO: 14870 - DNA, 438 bp, Zea mays
  Clone ID: LIB36-001-Q1-E1-B8
acggtcggattccgggtcgaccacgcgtccgaatagccatggcgctcgcctccgccacgtcccgcgccctcctctgtcgccccgccggcaccgcgcggcaccacctcgccgtttcctcatcctcccccgcctcctcgatccgcttcccccgcggtgccgacggaggcgccagcaaagcggccgtctctctccgcgcccccacgcctcgagcggtggcaacagcaacatctggtagcattgctccatcagtttcattgactgaaaacgccttgaaacatctgaaccatgtgagagctgaacggaatgaagttttgtgcttgagaattggagtcatacagggtggatgctcacgcatgtcttacaccatggcatttgagaatcgagagaatgcaagccctgatgattctgttgtagagtatgatggttttgcaatactct

SEQ ID NO: 14871 - DNA, 260 bp, Zea mays
  Clone ID: LIB36-001-Q1-E1-C1
accgagtagaatattagtaggccaatattttaatcccttgtaaagatgtagtataatttataaagcaagagataaggttagcatttaattaattagctggtgagttgtgtaggttaattgtatttcatgtgtatagtttgttgttcgtgatgtttgtgttagattcgagaagcgtaattattgcgcttagtcgtacgtctgtaactagtgtttccgtataaaattatacaacgcctcgccgataggtgtttaaattaaaa

SEQ ID NO: 14872 - DNA, 461 bp, Zea mays
  Clone ID: LIB36-001-Q1-E1-C10
gggtcgacgcacgcgtccgaattaaacaaagcgtacacgaacaaggggaacaaagtgctctggtgcaagtagttgtcggcacatcacatgaagagtatattattgattgggagctgaggtgtccagtcaggttattgtcttggttccagcctgtacctttttgttgccattttgtagacagggaaagaaaaaaaaatcttccgtctcaattacggtgaagttgtgacagcgtttgttgcctagcgatatcagggtgtgaccattcgtttgaaacagtgctccctctctttttggactacaaaattttggcacaaagcaggtgtacaaggttaaaccttttaaaactttcatctatttgtttcgggatagtttggtgtgtggggggtttgtcttgatcctttgtgctactgcaacatttggtcctcgacattgtaaattagttaatcttaaacatagaaact

SEQ ID NO: 14873 - DNA, 410 bp, Zea mays
  Clone ID: LIB36-001-Q1-E1-C12
ggtccggcccaaacgggtcgacgcacgcgtccgggcaatcactccccctccggttcgggttcgggttcgtgaggttctccggggttcggtttcgtgggtgggcggatcgagatggcggcgtcggatgttgagtaccgctgcttcgtcggcggcctcgcctgggccacggacgaccactccctccacaacgccttcagcacctacggcgaggtcctcgagtccaagatcatcctcgatcgggagacgcagaggtcccgcggcttcggcttcgtcaccttctccacggaggaggcgatgcggaacgccatcgagggcatgaacggcaaggagctggacggccgcaacatcaccgtcaacgaggcccagtctcgcggcggccgtggaggcggcggcggcggctacggtggtgg

SEQ ID NO: 14874 - DNA, 417 bp, Zea mays
  unsure (1)..(417): unsure at all n locations; Clone ID: LIB36-001-Q1-E1-C2
ggtcggttatncgggtcgagccacgcgtccgcacgacagcaagagcagcccgctccgctcctcctcccctgccgaagcaccacacagcagaagcgaaaacggcaggaaggccaatcgggcctgccaggcatgcttgcccgctgccgcaggtgaggcgacccgcagccgtccgagacgcaccccggcgcaagcgcgcatccgccatggatccggcgtccgaggagctcgagcgccgcagccgctatctcaactcgctcatccgccgtactaagctcagcgccaccccggctccccctcctcagccggagccggagcacgaggtagcgccaccgaatccggagccggagccggagaccgcggttgggaagcgcgaggaggccaaggcggatccagtggtcgttgaggaggagaagcggg

SEQ ID NO: 14875 - DNA, 409 bp, Zea mays
  unsure (1)..(409): unsure at all n locations; Clone ID: LIB36-001-Q1-E1-C9
tggaactgttgcactccgtgagatccgcaagtaccagaagagcactgagctgctgatcaggaagctgcccttccagaggctcgttagggaaattgcacaggacttcaagactgatttgcgtttccagagccatgcggtgcttgctctccaggaggctgctgaggcataccttgttggcctgtttgaggacaccaacctgtgcgccatccatgctaagcgtgtgaccatcatgcccaaggacattcagctggcaaggaggatccgcggcgagagggcctaatcgccacctcaaacatcgtgacaaaaaaatgaagtcctggggttattgttaatctggtgccattgtaaggacatatgagtanggtttgttttgtggatcgcaagtttctcctctgctactgttgctgct

SEQ ID NO: 14876 - DNA, 395 bp, Zea mays
  unsure (1)..(395): unsure at all n locations; Clone ID: LIB36-001-Q1-E1-D1
cggtccggcagnccgggtcgaccacgcgtccgggagtaggggcttgcgatctccgctgcgggcgcggaagatggctgacccagagttggaagctatcaggcagagacggatgcgagaactacaacacggtgcggcaaatcagcaaaatgcgggccaacaaaaggctcaggaagacgcgaaacaggaagctgaggaacgccggcagatgatgcttgctcagatattatcttctgaagcaagagaaaggctttcccgcatagctttggtcaaacctgacaaagcaagaggggtggaggatgttttgctgagagctgctcaaactggtggaatatctgagaaggtgtctgaagaaagactcatctcncttctagagcanattaacagccacacaagca

SEQ ID NO: 14877 - DNA, 433 bp, Zea mays
  Clone ID: LIB36-001-Q1-E1-D10
cgggtcgacgcacgcgtccgcggaagaatgggcggacgcgtgggccgcgcccgagttcgtcgaggccgcggcggagtccggcgaggccgcccacggctgcagctgcggtggcaactgcaagtgcgacccctgcaactgctgatcacatcgatcgacgaccatggatatgattattatctatctagcttgtggtggtggttgaacaataataagcgaggccgagctggctgccatacataggtattgtgtggtgtgtgtgagagagagagaaacagagttcttcagtttgctatctctctctgcatgtttggcgtcagtctttgtgctcatgtacgtacgtgtgtctacctgcatgttggttgatccgattgcatctgctgtaaccatatattaattggtccacgatgatatgatttgatactatatatatact

SEQ ID NO: 14878 - DNA, 382 bp, Zea mays
  Clone ID: LIB36-001-Q1-E1-D5
acggtcggagtccgggtcgaccacgcgtccgcccaagcgtccggcgcggggctcacagccgccgccatccgcaagaaggcggccgaggtcgtcgcccgcgtcgacgcgctccactgcggcggcggcggcggcggcggcggcacctctccgcagccgctgtcgttccatcgccgccgccccaagaaccccgacctcaaccgggagccaaccccggaaacctcagacgacgagtaaagcgcgctgattagggtagctagctagctaggcaggcaggcaggcagcagtagcaagtaaagcaagcaaccaggtggcggcggcgggccaccaaacggatgagcgtgggcgggtgcagcggcaagtgttccgtggaatgccggatggg

SEQ ID NO: 14879 - DNA, 382 bp, Zea mays
  Clone ID: LIB36-001-Q1-E1-D8
acggtcggtagtccgggtcgaccacgcgtccggaaaaacctagtacccgcgatctgaagcgactagtctaaagctgcggcggtggagatggggagcgacctgaagacggcgaataagaacaccccggtggcgctgatgcccatcgcgaagcctctcgctggaaagaagctctgcaagcggaccctcaagctcgtgcgacgagcctctgaggccatgtgcctcaagcgcggagtcaatgaggtagtcaagagcattcggcgcgggaacaaagggttgtgtgtgattgctgcgaatatttctcctattgatgtgattacacacgttccagtactatgtgaggaatctaatgttccttacatatatgtgtcatcactggaggatc

SEQ ID NO: 14880 - DNA, 421 bp, Zea mays
  Clone ID: LIB36-001-Q1-E1-E12
gggtcgacgcacgcgtccgcccaagaatccgcccacgcgtccgaagagttgcaacggatagactcggagctattgaggagcattcagagcttggccaaggtttccatgttgcagagaaggatatgggtatcaggggatttggaagcttgtttggtgagcaacagtctggagatgttgcaaatgttggcatcgatttattctttgatatgctttttgatagcttgtcaaaggttgaccagttttgcctagtcccagtaccatacaaagatgttcagctggatataaacatttctccacgtctctcttctgaatacataagttatctggaaaatcctgttgagttgctcaatgaagcggcaaaagctgcagagaaagatctatggaccttgatacagtttacagaagacctccgtcgacgata

SEQ ID NO: 14881 - DNA, 423 bp, Zea mays
  Clone ID: LIB36-001-Q1-E1-E3
ggtcggtgatccgggtcgacgcacgcgtccgcccaagagtccgcccacgcgtccgcaagaagaggctggccaccagtggcgccaactttgcgcgcgcctacaccgtggagttcggcagctgccagttcccctacaacttcactgggtgccaggacctcgccaagcagaagaaagtccccttcatcagcgacgacctcgagattgagtgcgaggggaaggagaagttcaagtgcggctccaacgttttctggaagtggtgaagcagctagcagcagcgtctgatgggaatggaggagatcatcacctgtcttgtcgaccctagatatgtccaaactgcagggaaattaaatcttcatgtgtaattgtgctcattctgtttcaatcatctcaacatccgatcatgaacctcttgcattattaact

SEQ ID NO: 14882 - DNA, 232 bp, Zea mays
  Clone ID: LIB36-001-Q1-E1-E6
tacggtcggatgtccgggtcgaccacgcgtccggataagttcgttcccgtctgtgttttgttttggaaaggaagcttctatggctcatacatagacaaggactaaacggtaagacgagtcttctaagtctaattagtccttacctagtttagtgattaactaagtttgtaggaactatgtgtggcgcaatatgtagcctacgcaatcaaagtaaaaaagttatagctctaaa

SEQ ID NO: 14883 - DNA, 454 bp, Zea mays
  Clone ID: LIB36-001-Q1-E1-E9
ggtcgacgcacgcgtccgcggagtaattgtgctcatccatgggaccttctatcaagctaaacataaaagaaatgcttgactatggtttggaatcatctgactagatgtgaccacaggcaccagttaagtcagctggcatcgttatcaccttcacagattaactatttgccccttgcgacaaatgagcagaaacatggttggtgtatggcaagcaggtgcttaggtacagttttctcagtttttatggcacatcatcagagcagctaaagtcacccagattgacaaagagatggtttgttggtcatgtatttatgagaaaattatgcacggtttcatagatgtctgtctctgagacgtttgttgtaatgtttcatattttgtcaatagtcatccttgagcttaagccaacaatttgttttcacctgtcattaaattaattacctttcatatctac

SEQ ID NO: 14884 - DNA, 292 bp, Zea mays
  Clone ID: LIB36-001-Q1-E1-F11
gggtcgacgcacgcgtccgattgaatataggttcccatgttacataaataggattccaccttgtgtagttggcattgattctctgtgtttttaatccgatcacctgcacccatttggcatgttcgacttgtgagaaatggtctataagttccttaaatcaatgtcgtggcaaaatttgatatgttttaggcccctttggcagggcaacttttgctctaactttgttattgtttacataagccgtactaaacagtatttttaaaataacttttcattaattatattttttgtt

SEQ ID NO: 14885 - DNA, 402 bp, Zea mays
  Clone ID: LIB36-001-Q1-E1-F12
gggtcgacgcacgcgtccgctaaaaatgtcacttccattttctcaataccttaagcaaggaccaatgtctcaagcccagccccctcgttcccaagcccagtggaaacacgttaaatttcaggataaccaagctaatgccatgaaggaaccaggaaccggtgggtatggctatgggacgaaaaatgacaagaataaggatgtggatacaatagcttcggacttcatcaagctgaagcacaaggcttgggcactccagaagagcacaaccatgtaccaaccttctatctaaaggtgtcaatagttcaagaagttgatactatatacttatgcttgtctctgtatagtctataagtcctaattcaaataacaggtgctgcttgcagccttggatatttgcggaaa

SEQ ID NO: 14886 - DNA, 388 bp, Zea mays
  Clone ID: LIB36-001-Q1-E1-F3
ttttatatttttttgaatatgaacggtcattttttttcaggcataaatataaatccgttctcttgccatggtatttagcacgcacaagcaacgcttgaataagtcttgcaaattcaacacaggttctacgaaagtggctttggctaaggaacgactgcaatgtcgagaaacgacactaagttctttcagcgcttcccaccaccgccgcccaacttggggcccttggaacccttctggaccgcaccctttgtctgcgtcttctgggacttgctcacctccgccttcttcgctttcttctcatccttggtcttcttgatgcgctccttgatctcacgaagagcagcttctctagcagcatcgcggacctctggcttctcagctctcttct

SEQ ID NO: 14887 - DNA, 429 bp, Zea mays
  unsure (1)..(429): unsure at all n locations; Clone ID: LIB36-001-Q1-E1-F5
ccgggtcgaccacgcgtccgcggaagcgtgggagttcgtgcacgtacgcacgcaccgggacaccagcaacccccaacagcgccactgtccagtgcgcgcgtcaagcttgcttagctagccgccatggcctccctcgccgccgtctccgtgaagcccgtggccatcaagggtctcgccggcagctccatctccggaaggaagctcgccgtcgccaggccgtcggcccgctccatccgcaggccccgcgcagccgccgtggtggccaagtacggcgacaagagcgtctactttgacctcgacgacatcggcaacaccaccggacagtgggacctctacggctctgacgcgccctcgccctacaacccgctacagagcaagttcttcgagacgttcgcggctccgttcaccangagaggtctgctgctcaag

SEQ ID NO: 14888 - DNA, 460 bp, Zea mays
  Clone ID: LIB36-001-Q1-E1-G11
gggtcgaccgcacgcgtccggcatagaacttcttcgcaagcgagacaattctgagtacaagtatacgattgcgatgatgggatatggtccagaagacaaaaatgctgtattggagttgacctacaactatggggtgaaggaatatgataagggaaatgcttatgcacagattgctattagtactgatgatgtctacaaaactgcggaagcaattagagtaaatggtggacaaattactcgtgaacctggcccattacctggcatcaccaccaagataactgcatgcacagatccagatggctggaaaacagtgtttgtcgataacatagattttctgaaggagttggaagaatgagctttgctagagatctcaacttggtacatcaagctccatacggttgcaccccgtgagttccatgcatgacctgcaaaatctttgtaaagccacagcctcaaactg

SEQ ID NO: 14889 - DNA, 444 bp, Zea mays
  Clone ID: LIB36-001-Q1-E1-G2
ggtcggttatgcgggtcgaccacgcgtccgatctagatccctaactgcaccggccgccacaccaccccgaccggaccctccacaacaatggccaccgtcctgggcagcccccgcgcgccggccttcttcttttcgtcgtcctccctccgcgccgcgccggcgcctaccgccgtggcgctgcctgcggccaaggtgggcatcatgggccgtatcgccagcagcaggcgcaggctgcgcgcgcaggccacctacaacgtgaagctgatcacgccggagggggaggtggagctgcaggtgcccgacgacgtgtacatcctggaccaggccgaggaggacggcatcgacctgccctactcctgccgcgcggggtcctgctcctcctgcgccggcaaggtcgtctccggctccgtggaccagtccgaccagagctacctcgacgacggg

SEQ ID NO: 14890 - DNA, 441 bp, Zea mays
  Clone ID: LIB36-001-Q1-E1-G5
ggtccggagctccgggtcgaccacgcgtccggctcagccttctgcttctgcgcatcctccaaggatcgtgatggccatggccacgcaagcctccgcggccacgcgccacctggtggccgccgccgcttccgcctgggcgccgtcggcgaagccgcggcagctaagctcacagctcgcgctgccgccgtcgtcctcccgcgcgccggccccgctccgcgcgaccgccggggaggcggtgaccgaggaggcgcccaaggggttcgtggccccgcagctggaccccagcacgccgtccccgatcttcggcggcagcacgggcgggctgctccgcaaggcgcaggtggaggagttctacgtcatcacgtgggtgtcccccaaggagcaggtgttcgagatgcccaccggcggcgccgccattatgcgggaggggccaaacctcct

SEQ ID NO: 14891 - DNA, 390 bp, Zea mays
  Clone ID: LIB36-001-Q1-E1-G6
cacacggaacactcagtgcctgcacgcacgagcgaattaccaggcgtttgcgatgggcggagaggccacgaatgccggcggcgggggtatccgcgcgcggatggagcactacctttacagtggcgagaagaagcacgtcgtcgccggcatcgccatcttcgctgccgtcttcggcgtcccatggtacttcatgacgcgaggggcaaagcatcaatctcaccaagattacatggaaaaggctaacaaggcgagatcagagaggctttcttctggacagtcatctgcactaaaagaatgaatgttgtattgcctattctggtccctgaccttcagagcttgtcatagatcatacactgtattgatttgcactcaacggatttgatctgttgt

SEQ ID NO: 14892 - DNA, 438 bp, Zea mays
  unsure (1)..(438): unsure at all n locations; Clone ID: LIB36-001-Q1-E1-H1
cggtccggttagccgggtcgaccacgcgtccgctctacacttgcgattcgctcgctcgatcctagcttcccttccaagaagcgcagcgcccatggccatggccacgcaagcctccgccgccacgcgccacctgctggccgccgcctgggcgccggtggcgaagccgcggcagctgagctcgcagctcgcgctgccgtcgtcgtcctcccgcgggccggccccgctccgcgcgtccaccgaggaggcggtggaggcgcccaaggggttcgtggccccgcagctggaccccagcacgccgtccccgatcttcggcggcagcacgggcgggctgctccgcaaggcgcaggtggangagttctacgtcatcacgtggacgtcccccaaggagcacgtgttcgagatgtcnaccggcggcgccgccatcatgccggaagggcc

SEQ ID NO: 14893 - DNA, 459 bp, Zea mays
  Clone ID: LIB36-001-Q1-E1-H11
ggtccggtatatcgggtcgacgcacgcgtccgcccaagcatccgggaggaggtgagtcaccggaagcggagacgtgagcagtcgaccaaccccgtcgatccggctgcggcccggcgtgctagatcgctaccgatcatggtggtggaggagatcgccgagggggtgaagaacctcaccgttaccggagacgcggcggcttcaggcggagaggggcagaggaggggcggcggcggcagcagcaaccgcatccaggtgtccaacaccaagaaacccctcttcttctacgtcaacctcgccaagaggtatatgcaacagcacgaagatgtagagctatccgctcttggaatggccatagcaacagttgtgaccgtggcagaaattctgaagaacaatggatttgctgttgaaaagaaaattaggacctctactgttgaaataaacgacgaatcaagagggcgt

SEQ ID NO: 14894 - DNA, 205 bp, Zea mays
  Clone ID: LIB36-002-Q1-E1-A12
cccgggtagacccacgcgtccgctaaatgatgagaaagacgatcttcgcgacgataaccagcaactgagtctggcgacagagagtctatagcagcaaatgaagactgatgggatcagttccagactagatgtacgacacgaggcttcagcaggcaggcttctcctatacaactctagcacgattccatggacatggggatactgc

SEQ ID NO: 14895 - DNA, 216 bp, Zea mays
  Clone ID: LIB36-002-Q1-E1-A3
ctgttatgtcgcatgcgttcgtggattggtaagctgatttataaattttgctagttggtttaatgaatggattagctagatagattagtcacaatgatgttgtgattatattaagtgttgttgaagcgtatcgtctcatgcagtaatgtgattgtgaagtggttgcgtcgtgtgaagcttagtgttaagatttacgttttacaatgagtattttga

SEQ ID NO: 14896 - DNA, 432 bp, Zea mays
  Clone ID: LIB36-002-Q1-E1-B8
accggtcaggtactccgggtcgaccacgcgtccgtgatcctctggtccgtggccatggcgtcgtccatgctctccgctaccaccgtgccactccagcaggggggcggcctgtccgagttctccgggctcaggagctccgcgtcgctgcccatgcgccggaatgccacctccgacgacttcatgtccgccgtctccttcaggacccacgcggtcggcacgagcggcgggccgcggcgggcgccgacggaggcgaagctgaaggtggccatcaatgggttcggccgcatcgggcgcaacttcctgcggtgctggcacgggcgcggcgacgcctcgcccctcgacgtcatcgccatcaacgacaccggaagcgtcaagcaagcgtctcacctgctcaagtacgactcgacgctcggcatcttcgatgccgacgtc

SEQ ID NO: 14897 - DNA, 394 bp, Zea mays
  Clone ID: LIB36-002-Q1-E1-C5
ccgggctcgaccacgcgtcagcccaagcgtccggcctgaccagctaggatcagcggaagcagcaatggtgatggcgtcctcgagcgggctgaggagctgcagcgccgtgggcgtgcccagcctgctggcgccgtcgtcccggtccggccgcctggcgccgttctgcgccaacgccaccacctctggccgcgtcaccatgtccgcggattggatgcccggccagccacgccctgcccacctcgacggctcctctcccggggacttcggcatccatcggccgggcctcgcaagcgtgccggagaacttcgatcggttcaatgagtcagcggtgtaccactgccgctgggcccatgtcatgccgtccccgggatcctggagcccggatgcgcctggg

SEQ ID NO: 14898 - DNA, 336 bp, Zea mays
  Clone ID: LIB36-002-Q1-E1-C6
tgaacttggaggaaattgacggtcaagcttcggtgaccaagagatcaaactcttcgagttccacaaagttgaagaccctgagcatctgtttggtggaggagggaggtcacgagaatctgaagatcatcctggtacctggaatctcgagtcctaggtcaaggacaggtaccgtaggatgaggtgcatgaaggatgatgtgatgagttcgtgagtggtctaggtcgttgtctcccagtcaactttgggttgctggattgttgtctccttatgatgtgattatttatttattttgtacagaactcctattatatagtaaagatgtgacattcgtttcta

SEQ ID NO: 14899 - DNA, 358 bp, Zea mays
  Clone ID: LIB36-002-Q1-E1-C8
tccgggtcgaccacgcgtccgcccaagcgtcaggacctggtgatcaacaccgtgaagactggcatcacagccgacgacgtgaacgcggcgttccgcaatgccgccgccggccagatgcatggcatcatggatgtctgcgacatgccgcacgtgtccgtcgacttcaggtgctccgacgtgtcctgcatcatcgacgcatcactcagcatggtcatgggcgacgacatggtcaaagtcgtcgcctgttacgacaacgactggtggtacagccaacacgtggttgatctggcgcatctgatggcggcacaagtggcccggcacgacagcagactgcatcagcgaacctcctggaagactt

SEQ ID NO: 14900 - DNA, 216 bp, Zea mays
  Clone ID: LIB36-002-Q1-E1-C9
tcccgggtacgaccacgcgtccgtacaaatgcgggaacacgagtggatgggagctaggctatgcgtgcatgcgacctcacattgcagcttatactacaacagggtctcggcttaccgatcgtcatttgacgtatcgtgtctgggacatggctgtcgtgggtcgacgtacgtcgcctgggatcacgtgcgccttccccgagatggcgtggtatcgaa

SEQ ID NO: 14901 - DNA, 468 bp, Zea mays
  Clone ID: LIB36-002-Q1-E1-D11
gggtaaacccacgcgtccgcgctggagcacggcatgcacccgccggtctctcccaagcccgagtggcgcaagctcatggacgagatggcggtcgtggccacggaggagtaccgctccgtcgtcgtcaaggagccgcgcttcgtcgagtacttcagatcggctacaccggagaccgagtacgggaggatgaacatcggcagccggccagccaagaggaggcccggcggcggcatcacgaccctgcgcgccatcccctggatcttctcgtggactcagaccaggttccaccttcccgtgtggctgggagttggcgccgcctttaagttcgccatcgacaaggacgtcaggaacttccaggtcctcaaagagatgtacaacgagtggccattcttcagggtcaccctggacctgctggagatggttttcgccaagggagaccccggcattgccggcttgtatgacgagctg

SEQ ID NO: 14902 - DNA, 411 bp, Zea mays
  Clone ID: LIB36-002-Q1-E1-D2
tgttgatataataggtgctacagcatttggagtttcaggaactcctgctgactgtgcttctttaggcatctctggaaaactatttgatggtttggttcctgatctggtacttagtggaatcaacattggaaataattgtgggtaccatgtcatttattctggaacagttgctggtgctagggaggcattcttatatgggattcctgcaatagctatgtcatatgattgggttgcgggtcggagcagtgttaatgacctcaaggtgtctgcagaggtctgcatgcctctgataaatgctatcgtgactgagatcaagaatgggacttaccctcaaggatcattcttgaatgtagatgtacctacagatgctgcgcagcacaagggctacaaaattacaaaacaaggaacata

SEQ ID NO: 14903 - DNA, 383 bp, Zea mays
  Clone ID: LIB36-002-Q1-E1-E3
ccgaattctttgcagttggtgcgaagcaagcggctgcaaaagcctaatttctttggtacctttgcgtgcaactgttgcactgtaagttagaaacttgaaggggtttcaccaagaagctcggagaattactttggatttgtgtaaatgttaagggaacgaacatctgctcatgctcctcaaacggtaaaaaagagtccctcaatggcaaataggagtcgttaagttgtcaatgtcatttaccatatgttttacctatttgtactgtattataagtcaagctattcaacgctggttgctgctagaaatctttagaacaaagatgataatgatctgatctgatgttataatattcaaatctcaaataaagaaaatatcgtttctca

SEQ ID NO: 14904 - DNA, 471 bp, Zea mays
  Clone ID: LIB36-002-Q1-E1-E9
cccgggacagacccacgcgtccgcaagacctttgggaagcagctcagggacaaatacgtggagacacagcagcttctcctccagatcgctgggcacaaggatattcttgaaggcgatccattcctgaagcaggggctggtgctgcgcaacccctacatcaccaccctgaacgtgttccaggcctacacgctgaagcggataagggaccccaacttcaaggtgacgccccagccgccgctgtccaaggagttcgccgacgagaacaagcccgccggactggtcaagctgaacccggcgagcgagtacccgcccggcctggaagacacgctcatcctcaccatgaagggcatcgccgccggcatgcagaacactggctaggcggcttctcttcactcacctgcagagtgcaccgcaataatcagcttccggatggtggcgttttgtcagttttggatgggaatgccgaactgg

SEQ ID NO: 14905 - DNA, 396 bp, Zea mays
  Clone ID: LIB36-002-Q1-E1-F6
ccgggtcgaccacgcgtccgaccaacgtcaccgtgacggccgacaaccccatcctcatcaaggcgatggcgacggggctgcagctggtgagcgcctactggttcctgcggatcctccggatggtcaggtacaagctcgccggcaagaagaagccgacgccggccaagctcgccgccgccgccgccaactgacgtaataagcgccggcgacgaccttcacgagctacgcacatttatgataccgggagttggattcgacagaggccgtgctgtacatataatacaaatacacacacacgcccgcctctgaagcaatgcaattgcaatgcaattgcaaattcctcgactgccaaaggaagtgtccggtcatcccctcaatcaaaccaaagttgtccgt

SEQ ID NO: 14906 - DNA, 446 bp, Zea mays
  Clone ID: LIB36-002-Q1-E1-F8
tccgggtcgaccacgcgtccggtcatgcagcagcggcaagtgcaactgcggctccagctgctcctgcggcagctcatgcaactgcatgtcccctgacgtggagaccgccgccgccagcagcatcaagaccatggtcgtcgctgcgccgaccaccaaggccagcgccggcggcttcgaggcggccaccgagggcggcggctgcgactgcaacacctgcaactgcggcaccagctgcggctgctcctgctgcagctgcaactgagccggaccgcccggcccggtgatggcacacgagagtctataggacgacgtacactaggcgtataaatataatagcagcgtctaaataagatcctgtcaactgcatccgccattatcgatccatggtcgatcctggggttcatgttcatctgtgtagcctgctctgcgtcatgtccgtctcgtcc

SEQ ID NO: 14907 - DNA, 167 bp, Zea mays
  Clone ID: LIB36-002-Q1-E1-F9
gggtacgaccacgcgtccgtacaaacgtcagaaaacattcggggatagctgaaggtcagcaactaacggcaatgatgccagacaaatggtagaccacggatgtcacagctgaatcaaggtagggataatgccacatttcatgcaccacgggatccagtcgactccgg

SEQ ID NO: 14908 - DNA, 152 bp, Zea mays
  Clone ID: LIB36-002-Q1-E1-G9
cgggtacgacccacgcgtccagacaaacatccgaacaccgacgccatagcttgtgcgcgcgcattggaactcgtttccaccactccgttctacatgactgtcgctgcggagctctctaggcattggcagcatttgggttcaaccacggggtt

SEQ ID NO: 14909 - DNA, 209 bp, Zea mays
  Clone ID: LIB36-002-Q1-E1-H8
gacccatcgcgtccgaaccactccgcgctatctgaggacggtacagcggcacagaggtgcgacgtacgacgacgacgacgcaggcgccacacatggcatcccagctctccgccgccgtgccccggttccacgggctccggggctaggccgcgcccaggtccgcggtggcagctctgccgtccgtcatggtgggcaggaataggtcgtcc

SEQ ID NO: 14910 - DNA, 401 bp, Zea mays
  Clone ID: LIB36-003-Q1-E1-A11
tatcggtggacgactcacgcgtccgacgagctcaaggtgaaggagctcaagaacggccgcctcgccatgttttccatgttcggcttcttcgtccaggccatcgtcaccggcaagggcccgctcgagaacctcgctgaccacatcgctgacccagtcaacaacaacgcatgggcctacgccaccaacttcgtccccggcaactaagctcaacggctatgctatgcaacttcattgtctttcggatcggagagggtgtacgtacgtggattgattgatgctgcgagatgcatgtgtgtcttttgtttcacgttgcattgcataggcaagtcgagatgatgagttggcgttgtacactaagatgaaccatgtttgtgcaatagtggtggtttttgtttcctgct

SEQ ID NO: 14911 - DNA, 343 bp, Zea mays
  Clone ID: LIB36-003-Q1-E1-B10
aagcaaacgtcatcacgtgtgtgttgctcgatcactactccatcgatctacttattatcgtctgcaaataacgactaagtgcatgcttctgcagcgtgtaacgatcgagatatgcatgcagaactcgatatatatacggcccctagcgccgtacacgtgcgtgcgtgtaagtaaataagagcaaacgtcgtcacgtgtgtgttgctcgatcactactccatcgatctacttattatcgtctgcaaataacgactaagtgcatgcttctgcagcgtgtaacgatccaaaataaaaaaaaaaaagaagaaaaaaaaaagaaatcaaaacaaaaaaaaaaggaaag

SEQ ID NO: 14912 - DNA, 445 bp, Zea mays
  Clone ID: LIB36-003-Q1-E1-B3
gtcgacccgacccgtccgaccacgcgatccgcccacgcgtccgcccacgcgtccgcaaaacgtgtactgttgaaggcaaagtctgcatgctccatgtcccttggccttggggaggacacaataagcgcttcgtccgtgcttgccatgcctatggtctcatcaagaacaaccggcttcagaggaattgaagatgaccgttcaaagtacgttcctttaagaaccacagattggagtaatctttagcggacggtgatatatagatacacagcaaaggtctttacttttgatgttgcatagcgggtggcagtaaagtattttgttgctccagaggctattgtttgttgtaatcatagttagctgtaacacgagtgtatagttcaacgtttctcccttcaaaacactgtccatagccagctgcatagtacatttgtaagttttagaatac

SEQ ID NO: 14913 - DNA, 432 bp, Zea mays
  Clone ID: LIB36-003-Q1-E1-B4
gtccacccacgcgtccgacaacctcgcattctgaatgcactgctgaacaagcatatacctggagtcagggccgttcaatctttgccagtggcagtccatttgcccccgtggagtacgaaggaaagacttttgtgcctgggcagtcgaacaatgcctacattttccctggactcggcctcggtcttgtgatctctggagccgtccgtgtccacgaggacatgcttctcgccgcctcgaaagcgctagctgatcaggccacacaggacaacttcgagaagggctccatcttcccacccttcaccagcatcagaaagatctctgcgcacatcgctgcagccgtggctgcaaaagcctacgagctcggtctggcgacccgtctgcctccccccagcgacctggtgaaatatgcagagaactgcatgtacactcccg

SEQ ID NO: 14914 - DNA, 302 bp, Zea mays
  unsure (1)..(302): unsure at all n locations; Clone ID: LIB36-003-Q1-E1-C12
ccggtgctaaattcncgggacgacccacgggtccgatcaagctgagacgtgactgggaagctgaaaagaaaggtgacaagaggaggaaggtatgaaggagtattcagatgtccacaggccccaatgaaatttgatgggtgtgtaagggcaaccgagaattttgagcaagcacgagtttgcagccaccgaaaattttgatgtatgaaatagcgattgtagtttattattttttattcagtgtacgtctcaagttttatctttaatgagtgacatatctggcagggaaactgaagcatattatt

SEQ ID NO: 14915 - DNA, 176 bp, Zea mays
  Clone ID: LIB36-003-Q1-E1-C8
ggtcctaaattcccgggtcgacccacgacgtccgaccggttttgagttgtggttgtgcaaaagatcagaagatggctgccccttgttctgctagagctatggctgttgtaaatgcaaaatgtagggtatatataaggtgtgtataatgttgggaaagagaatcacgattttgtttc

SEQ ID NO: 14916 - DNA, 443 bp, Zea mays
  Clone ID: LIB36-003-Q1-E1-C9
accggtgctacattcccgggtaccacccacgcgtccgaccacgcgtccgcccacgcgtccggccaggcgcaggcggtcagggagcgagtaccgagcgccccagttcacacgtgagatgtcagaatacaagaacgtcgttggggggaggctaaagctgaagggtaaggcactggatgtgaaggaaggtggagtcaagaagaaaaaaaagaagcatcagcttgaagagtcgtctcagattgagcacgatgagctccacaaagggggaaactctggcttaccagctgatcacaacaatgagcttattgaagctggcaaggtgggagatgaagaaaggaatctacatccagactacgaccacctcacaccggcggagcgacgctatatagatcagaagcagaagatcgacatgcaaaagctggccaaagttgctaacaagtcacaca

SEQ ID NO: 14917 - DNA, 424 bp, Zea mays
  Clone ID: LIB36-003-Q1-E1-D1
attctagggtcgaccgacccgtccgccggcctacgtctgccgctgcagttgctccccggacgcgtccccggtggccacccggcggttgttcgcctccctcctcgccaccgcagcagcggtgggggttggcgtggccggaggcggaggggaagccggcgcggtgtccacgagcaggagggcgctcagggcgtccaagattcctgagagcgaattcaccaccctgcccaatggcctcaagtactacgacatcaaggtaggaagtggggctgaggctgttaaaggatcccgtgttgcggtacattatgtggccaagtggaagggcatcacattcatgacaagtaggcacggtcttggtgttggtggtgggacgccatatgggtttgacgtaggcaattctgagagaggcaatgttttaaaaggattg

SEQ ID NO: 14918 - DNA, 414 bp, Zea mays
  Clone ID: LIB36-003-Q1-E1-D2
attctcgggtcgacggacgcgtccgaccacgaatccgcacccatccgatcccacccggcagcactcggcagcggcgccgcgcaatggccacccacgcagctctcgccgcctcccgcatccccgccggcgcccggctgcacagcagggcggcggcgtcgtccaggcacggcgtgcagaggctggacttcgccgacttctccgggctcaggccggggtcgtgctccgtgagcgctgccgcgcgggaggcgtccttctccgacgtccttggcgcgcagctcgtcgccaaggccaccggggagaacgccgtgagggcgcccgccgaggcgaagctgaaggtggcgatcaacggcttcggccgcatcggccggaacttcctccggtgctggcacggccgcgaggactcgccgatcgacg

SEQ ID NO: 14919 - DNA, 263 bp, Zea mays
  Clone ID: LIB36-003-Q1-E1-D3
ttctagggtcgaccgacgcgtccgagattgtatggtagaggacccaaatacgtttgaagacgacacgcaggacgattttgtgcaagagggtgatgttggagactttgatggagaatttatcgacgaagaattctaagtctaacgatgcgccggtcaacttcctgtggaagattgcccagttgtttatttccgctctactttgatgtgatacttgtttaagacactatgtctcagatgatgtaataaagttttatactcttttt

SEQ ID NO: 14920 - DNA, 269 bp, Zea mays
  Clone ID: LIB36-003-Q1-E1-D4
attcacgggtcgaccgacgcgtccggcgccgtacccaagtccacgctcaccaccctcatcgacaagtacatcggtagtagctcatgagcgcgcgagagaggcagcccatgtctcgtgatgtgcccccgagctgcatctgcatgcatgggatactgggatcgatgatacatgtgcccagctcgcgcataaacaccatgtatctctagccttgcccttgcatatatatggatggatatatgatatgacgatgatgcgtaatgcgttcattc

SEQ ID NO: 14921 - DNA, 425 bp, Zea mays
  Clone ID: LIB36-003-Q1-E1-E10
cggtgctaaattcccgggtagacccacgcgtccgaccacgcgtccactggaacgggaaggacggcgagttcaagctgcaggtgcaccgcagcgtggctctggtgaacaagtcgtccgcgttcctcactgacgacaacctcgtgccggagtcgtggtgggtggagcggaacaaggggatggtcatcggagaaaccgggctgtggcagctcgaaccgcctggcgaggagcccgtaccgccgttcgtgaccgggaaggtcatcgatgacgacgaccatgtcgctgccaccaccaccactactactaccacggctagtaaggagacgaagacaccggtcaaggataagaatcggttcgggactcagcttttctcggcatgctttagaggggtcaatcagtctgtcgataactgaatggttgaatgtttg

SEQ ID NO: 14922 - DNA, 368 bp, Zea mays
  Clone ID: LIB36-003-Q1-E1-E11
accggtgctagattcccgggtacacccacgcgtccgaccacgcgtccacctcgcctcccgccacccacacgtgctcccatggccgccaccgcgatctcagtccgcctccacccaaccgccgcgcgccatgtggcctccgcccgccgcgcccgcctcggggccgtccgcgcgcagtccgcgccggcggcggcggcggcggcgctgacgcaggacgacctcaagcggctggcggcggtgcgcgccgtcgagcaggtgaagagcgggatggtgctcgggctcgggacgggctccacggccgccttcgccgtcgccgagatcggcgcgctcctggccgcgggcaagcccgagaagatcgtcggcgtgcccac

SEQ ID NO: 14923 - DNA, 395 bp, Zea mays
  Clone ID: LIB36-003-Q1-E1-E12
aggacgcgtggacggacgcgtgggttattttcattctcatttctattattggttgtgacaacgttcgcaataactttcacggcgatggtcaatacatcaaacacagtagacgggttcagtttcgagttacatacagaatgtcttcatactagtgttctattaccgtaacagtcgagacgcactctcggatatccttctgtccatacgaccacgaagccatgtttctacacctacgactacgccgaaatcgccagcagctatgtacaggcacatgtgcaggagataatagtatgccaaagtccttgtcttctacgacgaggtcacagtttctgaactcgccgtaagccgcgagtgatcaaatcaagctcctgcagacgaggcgggtgccgatctct

SEQ ID NO: 14924 - DNA, 422 bp, Zea mays
  Clone ID: LIB36-003-Q1-E1-E2
ttctagggtcgaccgacgcgtccgaccacgcatccgatccgatcgatccactgcacctcgcgagcgatagggcaactcccctgcacgaatccactgctcctcgtccctgcgccgccgccgctcgacggagtcggcctcatcgccgctcggaatcaagtctcccccccaacgcacacacatgctcgccagatcccctccgtctccaccgccgtggtcgagcaagtgggtcaagtcgctggtggccctcaaggtggccgagaaggcggcgggacataagggtggccataggtaccatctcaggtggagctagccggtcgtgtccacggcgagcgctagcgagcgcagtgcgctggcgtccgaggcttctgcggcttcgactgactcgtattcgttgaaacaaactgaagcagcgctattaggga

SEQ ID NO: 14925 - DNA, 231 bp, Zea mays
  Clone ID: LIB36-003-Q1-E1-E3
cgccgcagtagccgtcctaaattctagggtcgaccgacccgtccgatcacgaatcagattaagtcggacgctatcaccacggccacaacagatgccctcgctggcagttctctcctcggaagcacgcatgtcaccgtggaccatgctccaccagtggagtctgacagcaaaacgaaccatcagcaatgtgatctctctgatcgttcttgaggaggtttcccacagaactgg

SEQ ID NO: 14926 - DNA, 426 bp, Zea mays
  Clone ID: LIB36-003-Q1-E1-E4
ggtcgaccgacgcgtccgcacggacacgctgatcgcggacctggacaactacgacatcgtgttccacatcggggacatgccctacgccaacggctacatctcgcagtgggaccagttcacggcgcaggtggcgcccatcaccgcccgcaagccctacatggtgggcagcggcaaccacgagcgggactggcccgacacggcggcgttctgggacgtgatggactcgggcggcgagtgcggcgtccccgccgagacctactactactaccccgccgagaaccgggtcaacttctggtacaaggtggactacggcatgttccgcttctgcgtgggcgactcggagcacgactggcgcgtcggcacgccgcagtacgacttcatcgagcactgcctctccacggtggaccgcaagcaccagccgtgggt

SEQ ID NO: 14927 - DNA, 444 bp, Zea mays
  Clone ID: LIB36-003-Q1-E1-F1
ttctagggtcgaccgacgcgtccgattttttatttaatagtctctgactatcattaaataaagggtagagcaattcttttttctagagattctagagaaagtgagacaaagtgaagcgaaagagttttctttgtataagaattaggtctatatcatatctaaatagaagggaaatcaaaaagaagggaagtggggattacattggatgaatccttaaggaagacatatcacaaaagaaataaaggctaaagtaagcgctccttgcctttggtttgagcaaaacagattcttgtttcaccgaggaaaagagagaagttctggataaattgacaatgtcaacttgaattgactaattcagttccgcctattccacattaatgggagtacatttatgtttctgctttacgaatatgatattttttggacatttctaataatagcaag

SEQ ID NO: 14928 - DNA, 391 bp, Zea mays
  Clone ID: LIB36-003-Q1-E1-F10
cccacgcgtccgaaaaagaggagatcggacaaggcagagcgccatcgttcggtttccttgctgaattcccgatcgatcgctcgctcgaaaagaaagaagctagcttttagcatggcgtctctggcgttcggcagcaccgtagcggcggccgtggcggcgacctcagggaggacgcggccggcgcgccggtccgtgctggtcgtgccgcccgctgccagcaggggcggcccggcgccggccaaggaggagaagggcctcggcgagaccatcttcggcttcatcttcaagaaggaccatctggtggagacggacccgctcctcaacaaggtcggcgccgcgcctgccgccgcctcgcgcgctaatacgaccggcggcaagaaaggtaccgggg

SEQ ID NO: 14929 - DNA, 136 bp, Zea mays
  Clone ID: LIB36-003-Q1-E1-F3
ttctagggtcgaccgacgcgtccgaggacgcatgggtgaattttaatttgaagtaaaaaactggaaaagggatgtttacaagttcctttattggcacccttttcagcactgctagcggcaaaaaacttctctcatc

SEQ ID NO: 14930 - DNA, 374 bp, Zea mays
  Clone ID: LIB36-003-Q1-E1-F4
attcacgggtcgacgcacgcgtccgcggacgcatcggcggactcgtcagttgcctgggaagatcagcggggcgccacgcccgtcccagtgacaaaccacatatcacctgatcacagaaagcgcttccgggaagcgcgcataaacagccgttgtccagcacatcagccgcatacaaagagttagcatcactgtgtggaagggcagggatcttaggtgaccgcgatgacgatgctcgtagtgagcgacagagccacggatagagtggccacgctcactgatccagcggttcgaggatcttgacagcgctgcgttgtgacagattatctggacgttttgtgtctgtctgaccaggtcattagccgcatctaagtcgc

SEQ ID NO: 14931 - DNA, 422 bp, Zea mays
  Clone ID: LIB36-003-Q1-E1-G1
gtcgaccgacgcgtccgacgtggccatcaagggtctcgccggcagctccatctccggaaggaagctcgccgtcgccaggccgtcggcccgctccatccgcaggccccgcgcagccgccgtggtggccaagtacggcgacaagagcgtctactttgacctcgacgacatcggcaacaccaccggacagtgggacctctacggctctgacgcgccctcgccctacaacccgctacagagcaagttcttcgagacgttcgcggctccgttcaccaagagaggtctgctgctcaagttcctgctgctgggcggcggctcacttctggcctacgtcagcgcgtcggcgtcaccggacctcctgccgatcaagaagggacctcaggagccgccgcagccgggcccgcgcggcaagatctaagctcagc

SEQ ID NO: 14932 - DNA, 415 bp, Zea mays
  Clone ID: LIB36-003-Q1-E1-G2
ttctggggtcgaccgacgcgtccgaggacgcgtgggcggatccagccgaaccccctcgcagtcgcagccccctcacgccacgcgacatgggcaagatcaggatgcccgtgccgtccctgttccgccgccgctcctccaagccgccgccgccgcagccgcagcagcaggcgcctgccgcgggcgacggcgacggcagcgggtccccggagcgggcgacggcggaggaggagatggcgcgcgtgttccgcaagttcgacgcgaacggcgacgggcggatctcgcggtcggagctggcggcgctgttcgagagcctgggccacggcgcgtcggacgacgaggtggcgcgcatgatggccgaggcggacgcggacggcgacggcttcatcagcctgcccgagttcgcggccctcaacgc

SEQ ID NO: 14933 - DNA, 81 bp, Zea mays
  Clone ID: LIB36-003-Q1-E1-G6
agatcgcgaccttcaaccggtacattcgcgtgcatgggaggtcatggctcgtggccagtgtgagcgtcattcaagtcaatg

SEQ ID NO: 14934 - DNA, 335 bp, Zea mays
  Clone ID: LIB36-003-Q1-E1-G7
aatgcaatgaaaatcgatccatactatacattacatggtacatacatacacagaaaagaaagaaagaaaaaacagagaggaacaccccatctggttcacgcacgctaaaccaccaacacagacagtagattgctgctacgctcttctttcgcctccaatctgcgaggcaaggcgtctgatccgctgcagccgtacgtccctaggagctcacccaccccgcgcaatcgagaactgactcggtcgccggcagcatgcaaatcataggccgagcgcgccgagcggcgtcttgccctgcccggcctcgaagtagaaggcgagcatggcaagcatggcga

SEQ ID NO: 14935 - DNA, 166 bp, Zea mays
  Clone ID: LIB36-003-Q1-E1-G9
gcacgcgtccgagttgtgtcatacgatcgcgtcatcctagattcgcttcctctcactgcagctccgatgggcgtatgcacgcaagcctgcggcgccatgcgtctcctcctggtcgacgctggggcgcgcgctgctatcggtccgcagctcatcgtcccaatctctc

SEQ ID NO: 14936 - DNA, 425 bp, Zea mays
  Clone ID: LIB36-003-Q1-E1-H10
ttcccgggtagactcacgcgtccgaattaattaagctcaaaattcatgtcatcttcatgcaatttgttaaaactcatgacctgtatactattaactgaatttcgtgtggcactattatatataactcatgacctacatactactaactgaatttggtttggtttttcctcaaaagcaaaaacaaaagatcggtttcagtttcgttttgatgtctgtgtgtttgcaggatgatgttctgggcgccattcgtcaacttcaggaagttcctgagggatcccaccatgaagtacccttggtccaagccgaacgagggcacaccgctgttcaaagacagatacccgcctatagactcctagatacagccttgatgcttgtactcggctcatcgcgcgccacgggcatgcatgcagcagcgaaaaggccgg

SEQ ID NO: 14937 - DNA, 383 bp, Zea mays
  Clone ID: LIB36-003-Q1-E1-H11
aattaagttcgtgcacgtacgcacgcaccgggacaccagcaacccccaacagcgccactgtccagtgcgcgcgtcaagcttgcttagctagccgccatggcctccctcgccgccgtctccgtgaagcccgtggccatcaagggtctcgccggcagctccatctccggaaggaagctcgccgtcgccaggccgtcggcccgctccatccgcaggccccgcgcagccgccgtggtggccaagtacggcgacaagagcgtctactttgacctcgacgacatcggcaacaccaccggacagtgggacctctacggctctgacgcgccctcgccctacaacccgctacagagcaagttcttcgagacgttcgcgggtccgtttaacaa

SEQ ID NO: 14938 - DNA, 402 bp, Zea mays
  Clone ID: LIB36-003-Q1-E1-H5
gggtcgacccacacgtccggccggtgccggtccatctcctccgagagctccaccgaggcatccgctgcggctgacatcgccgacgaagaagtggaggccgagaacaaggtggacccgcaggcggaggtgtgctacctggaccctgacgtggaccctgagtcgatccgggagtgggagctggacttctgctcgcggcccatcctggacgcgcggggcaagaaggtgtgggagctcgtggtgtgcgacgccacgctgtcgctccagttcacgcgctacttccccaacaacgccatcaacagcgtgacgctccgcgacgctctggcctccgtgtccgaagcgctgggcgtgcccatgcccgaccgagtccgcttcttccggtcccagatgcagaccatcatcaac

SEQ ID NO: 14939 - DNA, 400 bp, Zea mays
  Clone ID: LIB36-003-Q1-E1-H7
gggtcgacccacacgtccgaccacgcgtccggcgccggaatgccacctccgacgacttcatgtccgccgtctccttcaggacccacgcggtcggcacgagcggcgggccgcggcgggcgccgacggaggcgaagctgaaggtggccatcaatgggttcggccgcatcgggcgcaacttcctgcggtgctggcacgggcgcggcgacgcctcgcccctcgacgtcatcgccatcaacgacaccggaggcgtcaagcaggcgtcccacctgctcaagtacgactccacgctcggcatcttccatgccgacgtcaaacccgtcggcgacaacgccatctccgtcgacggcaaggtcatcaacgtcgtgtccgaccgcaaccccagcaacctgcccgtggggcg

SEQ ID NO: 14940 - DNA, 220 bp, Zea mays
  Clone ID: LIB36-004-Q1-E1-A2
cgcctgccggttacggtcgcaaattcccgggtagacccacgcgtccggcaccagggcacatggctccagccataagtcaaccagagtagttccacctgaaccttgcgagtatcaattgtgaggcacaacaggacatcctaccaattgtacttctaaatgtacagcatggaacttagagcttgctacatgtattatacagtacctttttatttttcccatc

SEQ ID NO: 14941 - DNA, 437 bp, Zea mays
  unsure (1)..(437): unsure at all n locations; Clone ID: LIB36-004-Q1-E1-A4
acccacgcgcccgatttcccctgcacacctcgccttcgccgccgccttcctcctcgtcgtccggtcgtcggcgcctggcgctgctgccgcccgcccgatcttcgatggcaagccatccccctccgaggccaccgccactgcgaggtggctcgccgcccagaacacgtggggtgtcctcagcacaatatcaagtgacttaagtggagctccatttggcaatgtagtttcatatagtgatggagtaccaggcgagggccgtggaataccctacttttatctgacaactctggatcccagtgcaagagatgcactggaagatgaaaggacctcttttacccttagtgagttccctctgggaacttgtggggaaatagatcctganaaccccacttgtgcaaaacttactcttaatgggaagttgaagatgggtgaccctc

SEQ ID NO: 14942 - DNA, 439 bp, Zea mays
  Clone ID: LIB36-004-Q1-E1-A9
ttcccgggtcgacacacgcgtccgaggacgcgtgggcggacgcgtgggcgcaggcagcacccagcaccacaccacagaccaaaacgaccaccgcacccgcagcagcgaagtgtccaagcggcggcatggcggagagcaaggcgcgtgtcgcgctgttcctggcggcgctcgcggcggcgagcctgctggcgctggccccggccggcgccgcgacgacgtgcgcgccgacgcagctgaccccgtgcgcgcccgccatcgtcgggaacgcggcgcccaccgcggcgtgctgcgccaggctcaaggcgcacccggcgacctgcttctgccagtacaagaggaaccccagcatgcagcgctacgtcaactcccccaacggcaagaaggtcttcgccgcctgtaaggtgtccctgcccaggtgctgatgctgaatgagtcgtct

SEQ ID NO: 14943 - DNA, 310 bp, Zea mays
  unsure (1)..(310): unsure at all n locations; Clone ID: LIB36-004-Q1-E1-B2
cgcctgcangtaccggtcctagattcncgggtagacccacgcgtccgaacaacctcgctagctcatcaaggatatcatcctgttcaaacttcacatatagccaatcctggcgtcgcatacatgctatgaaactcaagtcaaatctgtgctgtgagctcaatacgtataagttgtgctgccagtaatcctgcatcatactcctgctgaatcaacaatggaaagttaagcggcaactgctatcagaataacgggtacgacgtgtcaacatgaatgaagcactgtgccttcaaaaggaaaacaagtttgacat

SEQ ID NO: 14944 - DNA, 341 bp, Zea mays
  Clone ID: LIB36-004-Q1-E1-B5
taccggtctagcaattcacgggtcgacacacgcgtccgcccacgcgtcagcagttcccctctcctgatcgtcctgttccgcacagctgcaacgatggcggccgtaacccgagaatcatgcggctcccgcgggacaggagaacgccgtgcgcatcgtgtacgttgacccccccgaggacaccgacccttacgatgtccgtatcggcaccctcacactcgtgctcagcagggagtaaaatccgctggacacactgctctacctcgaaagaacacggcaccagcagcatcttcgccacactcagcctgagtacgtcaagcatttcaaggatcaaccacctgttc

SEQ ID NO: 14945 - DNA, 377 bp, Zea mays
  Clone ID: LIB36-004-Q1-E1-B6
tgaaattttgaagactttccagaatgtgtcagcctttgggatttggcatttcttcatctatttttttgctgcgaagaattttggggaataagagcacctcaaagtatcagcaggggagatacggcgttaacatttcatcatttccccatcttgctcctgatttcccccccttggtgaatgtactgtcgacttaacgtctttcatagttatttctttgttacaataaatagactttttgaaccatgtataaaatataaagcaagtgattttatctttccacacttgcggttaatccgagcttgtatagcatcgaaaattcgagatcgagctaaagaaagcttcctattgaatttcgcttttaacactaaaagcgaagg

SEQ ID NO: 14946 - DNA, 260 bp, Zea mays
  Clone ID: LIB36-004-Q1-E1-C11
gagctctggctcaacctggggaggggcgtgatagcatagctttggatttccagatagaagagaacagactcaaaacgacaccttatagcgatcgctgcacttaatccttgttccatgcgcagcaagcctcaggcttattacccttgtttgtcagcgttgtgtaaaaactgtaacccggatgctgtttcttcttcttcttcttggttccttcttttttctgagtcgtcctttgtggattcaaataataaataaagtcttgt

SEQ ID NO: 14947 - DNA, 420 bp, Zea mays
  Clone ID: LIB36-004-Q1-E1-D11
gtacggtcgtacattcccgggtcgacacacgcgtccgaggacgcgtgggcggacgcgtgggatctcgaccgtcgctcaccgggaagctacgctacgacgaagcatggcgtccgtcaccgcccgcgccccggtcgcggccctgcgcccgtcggcgtctctcaagtcgtcgtcgtcgtcggcggcggccttccttggccactctagccgcctcggccgcactgctaccgcgtcgccgacgaggcgcagcctaaaggcggaggccaagggcgagtggctcccgggccttccctcccccgcctacctcgacggcagcctgccgggtgacaatggcttcgacccgttgggcctggcggaggacccggagaacctgaggtggtacgtgcaggcggagctggtgaacgggcggtgggcgatgctggg

SEQ ID NO: 14948 - DNA, 464 bp, Zea mays
  Clone ID: LIB36-004-Q1-E1-D9
acgccggctagtaccggtcgtagaattcccgggtcgaaacacgcgtccgacttgttgcaacattcatctcctcaagcctggtgaaaagagttggaattctaaaggcgggagctgctggattgatatttcaagcttcactcttgtcaatcgcgctcacagtgtattgggctggttcaatttcgcaaacgacacctctacttatattcctagcatccattgcattgtcgcggttggggcacatgtcttatgatgttgtggggactcaaattgtccagacaggtgttcctgcttctaaagcaaatctaattggaggaatggaggtttcaattgcaagccttgcggagctagtcatgcttgctatggctataattgcgaatgatgtctcccatttcggcttcctggcgatcctgtctgtgtcatcagttgctggggcagcatggatgttctgtccgtggttaacaaat

SEQ ID NO: 14949 - DNA, 432 bp, Zea mays
  Clone ID: LIB36-004-Q1-E1-E11
tacggtcgtacattcccgggtcgaaacacgcgtccgatgatcaccaacagctagtgctagtcccccttccttccatccatccatggcatgcgtcagcaccttccagagctgccccattgccagaagagcaaagatcaacaccaggtccaggggcagcagcagtagcgtggcgaaggggtcaccaccaccagccttccagttccagtgcagggcgtcgactttcgcggcggacaccagcctccggctcgagctggacgagaaccccgaggcgatcatctcgggggcgtggcccgggaactgctccctcctcagctacgacgacctccgcgcctacctcgagtcgcaggagacggcggcccaggcagacgatcagcgcggcgtggcgctcctgagcgagaccatgtccacacccgtgctggtggccacagcaga

SEQ ID NO: 14950 - DNA, 111 bp, Zea mays
  Clone ID: LIB36-004-Q1-E1-F4
cgcctgcccgttacggtcgcaaattccgggtagacccacgcgtccggcaaaatgatacaaattgagcgtggataggcgtcagattctacgagacgaccttatattgcttcc

SEQ ID NO: 14951 - DNA, 420 bp, Zea mays
  Clone ID: LIB36-004-Q1-E1-F6
tcgagctctagtcccagtccactacaaaggtgctggagtcctggtattcttgctggtgtgcatcctctctttcagccaccaattttgctttactccagagctgaatgccaacctcttgtttgtggtgaccaaacccaaccgttcttcacctccccgtggacaaggcttcccacaagtattcttgaccgtgtactacttgttccatgctcgacaaagaattcctagaagaagaagatgaaattcaagaagtggtttcggaagaggagtctgctttagtgcttgctcatcaagtgatgggagccatctaactgggtatttaatagagggatttggaacctcttcattgcaataaggtgatgaggagtactctaggtgttcctaaggctggagggtgtttccagttctggaggaagattagtt

SEQ ID NO: 14952 - DNA, 424 bp, Zea mays
  Clone ID: LIB36-004-Q1-E1-F7
aacagctgcactagcagaggacgctactgcagaagccaccacggaatcagatcctgcaacgccaacacctctttcaccttatacaaattacccagatctcaagccgccatcaacccctacaccaccgtcagtggagtctgaagtcgagacgaaggctggcagcaccgtgactgaaggaccagcagtggtcaattctgcacctatagcagacgctagcacgggatcatctcctgccactactaggcccagacctcagtcaccataccctaattatccagatttcaagccaccatcctcgccttcgccgtcagcaccttaatttggcaagagtacaagaaaccgggtctagaggatattaaagaagttgagttgttcatatggagccggcatctcaccagaggtgcatgttgtactatgatcgtga

SEQ ID NO: 14953 - DNA, 402 bp, Zea mays
  Clone ID: LIB36-004-Q1-E1-G12
accggtcgtacaattcccgggtcgaaacacgcgtccgacagctaggatcagcggaagcagcaatggtgatggcgtcgtcgagcgggctgaggagctgcagcgccgtgggcgtgcccagcctgctggctccgtcgtcccggtccggccgcctggcgccgttctgcgccaacgccaccacctctggccgcgtcaccatgtccgcggagtggatgcccggccagccacgccctgcccacctcgacggctcctctcccggggacttcggcttcgatccgctgggcctcgcgaccgtgccggagaacttcgagcggttcaaggagtcagaggtgtaccactgccgctgggccatgcttgccgtccccgggatcctggtgccggaagctctgggcctgggcaactggg

SEQ ID NO: 14954 - DNA, 454 bp, Zea mays
  Clone ID: LIB36-004-Q1-E1-G5
cggtccgagattcccggggccacccacgcgtccgcacacgcgtccgcgcgcagagcatcctggccatctgggcgtgccaggtggtgctcatgggcgccgtcgaggggtaccgcgtcgccggcggcccgctcggggaggtggtcgacccgctgtaccctggcggcagcttcgacccgctcgggctcgccgacgacccggaggcgttcgccgagctcaaggtgaaggagatcaagaacggccgcctcgccatgttctccatgttcggcttcttcgtgcaggctatcgtcaccggcaagggccccctcgagaacctcgccgaccacatcgccgaccccgtcaacaacaacgcctgggcttacgccaccaacttcgtccccggcaagtgagcgagggcatgatgcttgcatgcgtgtaccgtagacgtaccgtattcctacgtactgcaggttgcacc

SEQ ID NO: 14955 - DNA, 109 bp, Zea mays
  Clone ID: LIB36-004-Q1-E1-G6
gagcaccaaaaacttctttaggcatacttgaaaatccatacaggtaccacaaaaactgacacaatgtttcaccatagtaccatccatagcgggacacgtcctttttaac

SEQ ID NO: 14956 - DNA, 437 bp, Zea mays
  Clone ID: LIB36-004-Q1-E1-H10
taccggtcgacaattcccgggtcgaaccacgcgtccggtggaaagaggttccatgtctggttcaccaacctccacaactccatcagggatgaccgctatctgattggccgaaggctgcacaactttggtgaggacacacccgagccgagtgaatctggagcaactatagggtcagatgatcaggaccaagctcttgtcctgcgagatcaggaagaggaagtggggttgaggatgaggcgcaataatatgcgtgcaaaccaacaacccaggctggctttttaaggaggagatagttttggatatagagctcataaccatggtataagctttggcctgcagcttctgcttgtgctttgtaatgggagttgtagagggggtttatgtggttgcgataggaaagagtctaaggactgttctacgacaagcctgggagaaag

SEQ ID NO: 14957 - DNA, 325 bp, Zea mays
  Clone ID: LIB36-004-Q1-E1-H8
tatcggtcgtacattcacgggtcgacgcacgcgtccggtcagcttgctaataaagctgagacatccaaatattgtccagttgaggatggatagatgctaacaatactgatttcttgcagaaagtgttcactctgaagacgccccaacttgttcatacagtaatgtactttcagttattttgtttttgttattggtttgtatgaatgctgtagttggtttcatgtttggatatgcttgtatgattattaatctggaaatggtacaaacaattcagatgaacattgttagtgtacgaaaatatggtttaatttgtttatatgcctaa

SEQ ID NO: 14958 - DNA, 213 bp, Zea mays
  Clone ID: LIB36-004-Q1-E1-H9
ttctacgcctgcagtaccggtcgactattcccggtcgacacacgcgtccgacccttcgacccccaaccagtgcaagaacaagatcgagtccatgaagaagcggtaccgggcggaggccgcagcggctgtgctcgctggtcccgccgctgcaggctcgatctgcaggttctttgcccacattgacgggctgctcaaatggcctcacgtctgctc

SEQ ID NO: 14959 - DNA, 417 bp, Zea mays
  Clone ID: LIB36-005-Q1-E1-A1
tgcgtgcttgggttgggttgggtatagacagttcttgcagtccacaccacctcaagtgagggggtgaccccccaccctcctccctagggctcctcaccgccatgctgccaagaaggcagagcatcttccacctcggggaggagggtggcgccgccgccgtgcaccaccgcgtcagcgtcgtcggcgcggcatcgtcgtccatggccatgggcggcggcggcggcggccggcgtgctcgcgagcgtgagcgcctcgtcgtggggctccagatcctggtgcaccaccaccaccacggccggcacgggcacgggcacgcgcacgcggcgaacgtagtcctgaagcagatggtgaggccgcgcgccgccgctggctcgcgccacggccacggcagccacgccttctcgtgcagtttcctca

SEQ ID NO: 14960 - DNA, 394 bp, Zea mays
  Clone ID: LIB36-005-Q1-E1-A10
cccgggtcgacccacacgtccgagcaatcggcatcaatgctgcctacatgcagacatacatcggaggcgtgtcatgcccatacatctgtggcaggcaccttgaccatggtgttctccttgttggatatggtgcttctggtttcgcccccattcgcctgaaggacaagccttactggatcatcaagaactcgtggggcgagaactggggggagaacggatactacaagatatgcaggggttccaacgttcgcaacaagtgcggcgtcgattccatggtctctaccgtgtccgcagtccacgcctcgaaggagtagactctggtcagcggtgataatcgtgattccatatattgtagaactataatccctgctagtaatccatttgtgctgtttat

SEQ ID NO: 14961 - DNA, 394 bp, Zea mays
  unsure (1)..(394): unsure at all n locations; Clone ID: LIB36-005-Q1-E1-A7
ccttactggatcatcaagaactcgtggggcgagaactggggggagaacggatactacaagatatgcaggggttccaacgttcgcaacaagtgcggcgtcgattccatggtctctaccgtgtccgcagtccacgcctcgaaggagtagactctggtcagcggtgataatcgtgattccatatattgtagaactataatccctgctagtaatccatttgtgctgtttatgtatcgaaggcagcaaagatgtgtgaagcggcaatgggatgcttgctgtaaggtaatatgtttggcttgctaggcatgctacacgctatttggatgtagcaacgttatcaccagctgtatacgctttttaatcgacaacatttgaataatatgtacataacattaan

SEQ ID NO: 14962 - DNA, 295 bp, Zea mays
  Clone ID: LIB36-005-Q1-E1-A8
cccacgcgtccgccgccaccgtctccgacggcaagctctacatctgcaaggcgcaggccggcgacaagcggtggttcaagggcgccaggaagggcgtcgagaaggccgccgcctccttcagcgtcgcgtgaccgacgtaaactattgtttctttgatgcttttcatcagggatgcacatgcacgcaccgtgtgtacgtagagagctaggcatggcctggctcgccatgcttgttgtgtgtttctttgattgtacatgagaggacccgtttctgctgccatccaagttgtttgaga

SEQ ID NO: 14963 - DNA, 426 bp, Zea mays
  Clone ID: LIB36-005-Q1-E1-B11
cccgggtcgacccacgacgtccgaccttttgctgcaaatctttctctgaattgtgggtctccgacaatggcggcgctcgctccatccaagattctgggcacccagctcaacttcgcgggctcctcccgctacgccaccgcagcgcccaccgcgggggctcagaagattgtctcccttttcagcaagaagcctgcccagaagcccaagcccgctgcggtatcgtcgtcttctccagacatcagcgacgagctcgccaagtggtatggtcctgacaggaggatctacctgccggatgggctgttggaccggtcggaggtgccggagtacctcaccggagaggtccctggagactatggctacgacccttttggcctgggcaagaagccagaggacttctccaagtttcaggcctacgagctgattcat

SEQ ID NO: 14964 - DNA, 281 bp, Zea mays
  Clone ID: LIB36-005-Q1-E1-B3
gacggcaagctctacatctgcaaggcgcaggccggcgacaagcggtggttcaagggcgccaggaagggcgtcgagaaggccgccgcctccttcagcgtcgcgtgaccgacgtaaactattgtttctttgatgcttttcatcagggatgcacatgcacgcaccgtgtgtacgtagagagctaggcatggcctggctcgccatgcttgttgtgtgtttctttgattgtacatgagaggacccgtttctgctgccatccaagttgtttgagaaatcttggtact

SEQ ID NO: 14965 - DNA, 416 bp, Zea mays
  Clone ID: LIB36-005-Q1-E1-B4
accacgcgtccgcggacgcgtgggtgacccgcaccgtcaccaacgtgggggcgcaagaggcggcctcctacacggtcgccgtcagcgcgccgcccggcctggacgtgaaggtcacgcccagtaagctcgagttcaccagaggcgtcaagaagctggccttccaggtgagcttctcccgtagcgggaacgacgacgacgcggcggcggccaagggcgccctttcgggctccataacatggtcagacgaaaagcacatggtccgcagcccgtttgtggtcaccagctgaaacatcatggcaatacctgacgcgcaggcacgtcaagaaatgctgtgatctcagatataaagtataggatacgatgttgaaagccactgctagtggcaaactcagaatcatcgaagattctgaaactgg

SEQ ID NO: 14966 - DNA, 432 bp, Zea mays
  Clone ID: LIB36-005-Q1-E1-B6
attcccgggtcgacccacagcgtccgaaatatgcaagtgtagcttcgcctgagatcaaagatccagtaaagagtatgctcaaagatgaaagagagtttgatgatgctttactggcagttgtcatccgaaacttgaaattggtgaagggcgattcaaaagtcatagttatggattctaatggagctcgatcaaaagccattgctaggttactgaagaagctcggtgtgcagcgaccttaccttgttaaaggtggtttccaagcatggtcaaagaaccttcgtgtcaaagaactgaaacctgagactgcattaacgtcaataaatgaggatgttgaggaaatcctagaacaaataaagcccactccaactcttgtgtttggatctcttctgggcctctcggcactttcctatgctttacttgaatgggagatga

SEQ ID NO: 14967 - DNA, 411 bp, Zea mays
  Clone ID: LIB36-005-Q1-E1-B9
gtccagaagtcccgggtcgacccacgacgtccgaccaaccaaacccgcacgacacgacaccaagtcgaggagctcgagggcaccaatcatggccggcgtgaactccagcgtcgtcgggctcaagcccgccgcggcagtgccgcaggccgccgccgcctcatcgccggcgaagcgggtgcagctggccgcgcccgagggccgccgcgccgctctgctcggcctggcggccgtcttcgccgtcacggccaccaccgggtcggccaaggccacgatcttcgatgagtacctcgagaagagcaaggccaacaatgagctgaacgacaagaagaggctggccaccagtggcgccaactttgcgcgcgcctacaccgtggagttcggcagctgccagttcccctacaacttcactgg

SEQ ID NO: 14968 - DNA, 453 bp, Zea mays
  Clone ID: LIB36-005-Q1-E1-C1
attccagggtcgacccacccgtccggtagcacagtccattattgccgtctcccttttgcgtgagcaaagaaagagagcgagaagcagtcgccatgtctggcatcatccacaagatcgaggagaagctccacatggggggcgaccacaagaataaggaggaggagcaccacaagaaggccgaggagcaccacaagaaggaggagggggagcaccacaagaaggacggcggggagcacaaggaaggcatcgtggagaagatcaaggacaagatcaccggcgagcacggcgacaagtccggcgaccacaaggagaagaaggacaagaagaagaaggataagaagaagcacggcgagggccacgaccacgacggcggccacagtagcagcagcagcgacagcgactgagatctggtgtcgcaggtaattaattgatctggggctgtaattttttttc

SEQ ID NO: 14969 - DNA, 461 bp, Zea mays
  Clone ID: LIB36-005-Q1-E1-C11
aattcccgggtcgacccacacgtccggcagcgcttgcaagaactagtgttgccagtaccacagtgctgtcttcaacttcaggactcttcactcttttcattggtgttttacttggccaagactccataaatgctgcgaaaattattgctgttttcattagcatggctggcgttgtaatgacaactgtgggccagacttgggcatctgatgaatcagaagcaggcaaatctggttttacacagaggactcttctaggtgatatgtttggtcttatgtcagcaatcgcctatggtctatttactgtgctgcttaaaaaattttgtggagaggaaggagaaaaggttgatgtccaaaaactgtttggttatcttgggctttttacccttgttgctctatggtggattgtctggccattaaccgcactaggcgttgagccaaagttttcaatgccccactcagct

SEQ ID NO: 14970 - DNA, 331 bp, Zea mays
  unsure (1)..(331): unsure at all n locations; Clone ID: LIB36-005-Q1-E1-C2
cgcaaaaggtttgtgcacctcgtttcaattgttgggacaaaattggtacggagtacagggtgaacggattcattacagcagcaggtaacatgacaatgaatgtagcagtagcaatctcatttttacagtggctaaaccaatcaatcaaccgaacggacgaaggagactaggggaggaaggaattgtagcagcgatctcgctcaccattctcaccgggacgcccgcggaatcctcaaatccacccgaaccggtcaccatttttttcctgagatactttggacacctttcctttgaccactcaatcagcgttccttcncctgctccggtccga

SEQ ID NO: 14971 - DNA, 443 bp, Zea mays
  Clone ID: LIB36-005-Q1-E1-D1
attcctaggtcgaccgacccgtccggggccttagcatactgtcaggctaccagcaagcgaagtagctagccatgctcggcctccccgccgcgcccccggccgccgcagcaccgccgaacccgaagggcaaggggcgatgcagcgccgccccgccaccagcgatgacaggccgggtgtctctggctgtccctgcggcggctgtctcgctctcgctcttcctctggtccagtccagtgaacgccggcatcctgtccggtttctcgggactggagtcgactcccggccccgacctcccccggctcgagttcctggagaaatggaatgcggagaaccagaagaagtacaccgagttcgataacaggttcaagaagtccaaggtgctgcaggacctgctcgagaagagcaggaagaacaaagagaagaacgagaggatgatccaggac

SEQ ID NO: 14972 - DNA, 343 bp, Zea mays
  Clone ID: LIB36-005-Q1-E1-D10
atttacagcatattttattgttcagctccacagcatgcatacaaatacactagcggtacaatctctggctcccaaagctcccttcacaaatactggtgcaacctgcagtacgtaggaatacgtacgtctacggtacacgcatgcaagcatcatgccctcgctcacttgccggggacgaagttggtggcgtaagcccaggcgttgttgttgacggggtcggcgatgtggtcggcgaggttctcgagggggcccttgccggtgacgatagcctgcacgaagaagccgaacatggagaacatggcgaggcggccgttcttgatctccttcaccttgagctcggcga

SEQ ID NO: 14973 - DNA, 407 bp, Zea mays
  Clone ID: LIB36-005-Q1-E1-D11
ttcccggggtcgacccacgacgtccgatccacgacgtctgcccagcgcatcggaatgacgtgtgcatatgccaggacagagcagatgttcgcttgcttcagatgagaggataaatgctcttacgcacaacattatggctcttacacattatctgatagcatcaagctctcgagcgttccttgcacgtagtagatgtctgacatcgaactgcattttccgtgctatggatggactcccggtgaccatcttactccagcaggctctactccaagagttccttccacaatggaacatccaagacattgtacatcaagtatgtgcagagacaggagccatgtatcaggatactctcccgcgaagttataatcgttcagaactaacatcagacgcttggcttccatgggtgc

SEQ ID NO: 14974 - DNA, 262 bp, Zea mays
  Clone ID: LIB36-005-Q1-E1-D3
gtccgatctctgactgaccagctaggatcagcggaagcagcaatggtgatggcgtcgtcgagcgggctgaggagctgcagcgccgtgggcgtgcccagcctgctggctccgtcgtcccggtccggccgcctggcgccgttctgcgccaacgccaccacctctggccgcgtcaccatgtccgcggagtggacgcccggccagccacgccctgcccacctcaacggctcctctcccggggacatcggcttcgatccgctgggcc

SEQ ID NO: 14975 - DNA, 428 bp, Zea mays
  Clone ID: LIB36-005-Q1-E1-D9
ttcccgggtcgacccacgacgtccgaccacgcgtccgcccacgcgtccgcggacgcgtgggggagatccgcccggcggggcagagcatcaacgtctccgtcaacatgttcttcaccttctgcatcgcgcaggccttcctcaccatgctctgccacttcaagttcggcctcttctacttcttcgccggctgggtcgtcatcatgaccgtcttcatcgccttcttcctgcccgagaccaagaacgtgcccatcgaggagatggtgcttgtctggaagtcacactggttctggaaaaggttcatcgccgacgaggacgtgcacgtcggcattggcaacaaccacccggccaaaaacggcagcgacaccaagggggccgacgcgtgaacgtgatctcaacatctatattccatctacagtcacaactgaaat

SEQ ID NO: 14976 - DNA, 437 bp, Zea mays
  Clone ID: LIB36-005-Q1-E1-E1
attccagggtcgaccgacccgtccgaccaccaaaccgccggccacactcgtctttctcacgagccacaggcacaggcaggctctcgagctcagtccacccagcgcaggggatggcgtcgtcgttcgccgtggcaacggtcccgtcgctggcggccccggcggccaagaagcggtccggcggcgtcacgtacgtggagggcatgaacgcctacagcggcctcaaggggctcaacaaggtgaacatgctcggggtgcgcaagaccgccgactactccttcgccaaggtcgtggcgtcgctcagccccgcgggcaggaagcggcgcggcggcgcgttcggcgcccagatgaacgccgccgccgagatcttcaggatcgccgccaccatgaacggcctcgtgctcgtcggcgtcgccgtcgggttcgtgctgctccgggtg

SEQ ID NO: 14977 - DNA, 388 bp, Zea mays
  Clone ID: LIB36-005-Q1-E1-E6
gggtcgacccaagcgtccgcggacgcgtgggattcagaaggagtccaccctccacctggtgctccgcctccgcggtggcgccaagaagcgtaagaagaagacgtacaccaagcccaagaagatcaagcacaagcacaagaaggtgaagctctccgtgctgcagttctataaggtggacgacgccacaggcaaggtgacccgcctccgcaaggagtgccccaacacagagtgcggcgcgggcgtcttcatggccaaccacttcgaccgccactactgcggcaagtgcggcctcacctatgtctacaaccagaaggcgtaattgcttgccccgatttgctttatccgccaacctatcaagcattcagatgttggttactcaaattgtatc

SEQ ID NO: 14978 - DNA, 288 bp, Zea mays
  Clone ID: LIB36-005-Q1-E1-E9
ttcccgggtccacccacgcgtccgagtcacttcgcttccccacctctccattccattgcggttctgcgagctcctacctccctgtggtgcttggtcatggtcgactaccacttcgtgtataacgacttggagggggcgagcacatcgtgggacgacatccagcgccgcgtcaggaacttgcctccgaagccggagccctccaagccggcttttctccccccgaaggttgacgccaactaccaacccaagtccaacggatggcctgacgttccccaacccgaacaactc

SEQ ID NO: 14979 - DNA, 417 bp, Zea mays
  Clone ID: LIB36-005-Q1-E1-F1
tctgattccgaggaatgaaggagcttcagttcgatccttttttttgtggggggcaaggaaacgtggtccatacatcttatcagtgcaagtttgtgatcatgtgatacatgaagcatatacgtgtacgtatttcaccagactacctgcaccggtgagcaagatgatctcctacttgcaccaccattagagcagtggatatgatctcatacttgcgcgttgcactagtagagttgtggatacttaggatccatcattgcaaactctgatacaaaccagtgtaagctgagctgcatggattgcagatctgtatacctacggctcatgcagctataccgtcctggattgtaccacacaatcaatattatcaaatgtaagatacgacttggagggaagcttataaagacttccccgtgaatg

SEQ ID NO: 14980 - DNA, 379 bp, Zea mays
  Clone ID: LIB36-005-Q1-E1-F12
tcccgggtccacccacgcgtccgaagacgcgtgggcggacgcgtgggccgcagccggagcacatggctctctactaccgccagcgggcgacgcccggcggcttcctcatcgccgaggcctgcgccgtgtcggagagcgcgcgcgggtacccggacgttccggggctgtggacccaccaacaggtcgaggcctggaagccgatcgtcgacgccgtccacgccagcggtgccgtcttcttcgcccagctctggcacaccggccgggcctccccctcagaattccaaccaaatgggcaagcaccgatctctaacacggacaagcaaatcccaacacaagtgaaccattccggtgacgtcaacacgttcgcggtgcctccgag

SEQ ID NO: 14981 - DNA, 463 bp, Zea mays
  Clone ID: LIB36-005-Q1-E1-F5
cggtcctaggattcccgggtcgacccacagcgtccgcacggccctccttctccgccccgtggtcgctgcggctgccggcgccggcgcggcgccgggtggccacggccgcgcggatcaccatgcgggtcgcgtccaagcaggcctacatctgccgtgactgcgggtacatctacaacgacaggacgccgttcgacaagctggctgacaactacttctgccctgtttgtggagctccgaagagaaggttcagaccctacgagccggcagtctccaagaacgcgaacgccaccgatgccagaaaggcgaggaaggaggagctgaagaaggaggagagcatggggaaagccttgcctattgccatcgtcgtcgggatcattgccttggctggcctgtacttctacctcaacaatgtctacagctaaacgatgaatagacccgtttggtgcggcgaacaggattcatg

SEQ ID NO: 14982 - DNA, 414 bp, Zea mays
  Clone ID: LIB36-005-Q1-E1-F6
gggtcgacccaagcgtccgcttttggatccctgagctttgcagaacctgctgcccctttatgccactctttgtggttgttagtagcatcatgagaggagcagcaccggtgaaccgggaatctcatcccacggtgaataaagctggaaaggttaataactgtggatctggtccttagttctttcagaatgtgcacctggcggtcatcgttagcttctgtccattattgatgcttgaccagtcggaggtgtttaggatctgtttgcagattgatgacttccatggatccttgtatcagtttgaatctagaacactaaggttctaatccattcctttttagtcgattctctgtcgagtttaagcgccatggcccttgtattagtgtggcacacgaatggaatgtgagctggtcctct

SEQ ID NO: 14983 - DNA, 269 bp, Zea mays
  Clone ID: LIB36-005-Q1-E1-F7
aattgggtataatttttaatgtccaaaaaggggaaaaggtcggagggcccgggaagggaaaaggaagaaaaaaggaaaaaaaaaaaaaaaagggggaaaattaaacaggagcaaaagggaaaacccccctaaaagaggaaaaacaaaacacccaaaaaggacaaggggaaaacggaaagcaccaaggccaaggggaaacgggaaatcccgaaaacaaaaaaaaaaggggaagcctggaaaaacaaaaaagaaaaccaggggatcaagaa

SEQ ID NO: 14984 - DNA, 449 bp, Zea mays
  Clone ID: LIB36-005-Q1-E1-G1
attcctaggtcgaccgacccgtccggcagcctatgcatgctgcatgagatcaagcaagccgccgactggcaatgctccacctgccattcagttcgttggtgaggtattaatcaccagccatgttggcgcttggcggcatgcagatggagcagaacatccaggtgaagcggacagatacatgatcgatcatgagttggcacagacacaggccagacagccagaggccatactccaattcatagatttcatgataagcaaaggaagatccaagactacacaaatatacaaatagttagttatacgagcaaaaacttttgggtcttgttgttctgtgcctcccatttttcagaccagaattaatatgacaaattttcactgaaactggttggatcagagaccaggaaaaaagaggaaaggcgagcacgggggaaaaaaaaaaagggcgggcg

SEQ ID NO: 14985 - DNA, 395 bp, Zea mays
  Clone ID: LIB36-005-Q1-E1-G2
gtccgaccacgcatccgctcctacgcgcgcacggctcccacggcgcgtcggttccctgctccgtggtgcttgccgagctcaatcccaagctaccgcggcgtccctgctcggatctcctccctgcagcgcccaaccgaagcttctatcgtggaacgcgcgcctcctctgcttctcctcaagtggagtcttccctgcgcgcgcctacgtcctgcgtcgcgaactcccctgttgttagcaacctccaatcacatgaacacaatagccaccaccaaagcaagggtataaatctgatacatgcatacactagtacagagatggagtttgggaagtagcaagcagggaagggaagaagattaaccgcatcgaaaggttagaagcatcacaagcacatctca

SEQ ID NO: 14986 - DNA, 311 bp, Zea mays
  Clone ID: LIB36-005-Q1-E1-G3
gtcggcgcccgcggatcggaccgtcatgaccatatctacctacgcatgatcactacttgaatgtctactactgctacgtactactactgaataaaaaaacctctccgcgcacatcgtccttgtgtttgtgtgtgtgagagagagaggagacggagagccggccatgtccttttggctgtttgtttggtttatttttgagttcatgcggtctttatttatttccatgtacgctgcttcctcgtacccactttaaatttgtaccatgcatgcatgttccttatgatacactcacctctttttgtttgcaaaaa

SEQ ID NO: 14987 - DNA, 451 bp, Zea mays
  Clone ID: LIB36-005-Q1-E1-H1
attccagggtcgaccgacccgtccggacgacttgtttcattgattcttgaagagatcgagcttcttttgcaccacaaggtcgaggatgtcttgcaactgcggatcaagctgcggctgcggctcaagctgcaagtgcggcaagaagtaccctgacctggaggagacgagcaccgccgcgcaggccaccgtcgtcctcggcgtggccccggagaagaaggccgcgcccgagttcgtcgaggccgcggcggagtccggcgaggccgcccacggctgcagctgcggtggcaactgcaagtgcgacccctgcaactgctgatcacatcgatcgacgaccatggatatgattattatctatctagcttgtggtggtggttgaacaataataagcgaggccgagctggctgccatacataggtattgtgtggtgtgtgtgagagagagagaaacagag

SEQ ID NO: 14988 - DNA, 416 bp, Zea mays
  Clone ID: LIB36-005-Q1-E1-H12
gggtcgacccaaacgtccgcccacgcgtccgcccacgcgtccggaacttccaactccagggccggcacggcaagtcccgcgtccgcgtctcccgcgtctggcgccgcccggccgcggcggggggcgacgtcatcgttgagtggaacgtcgccgtcagtatcgtctccgactgcctcccctcctacacctccagcgacaactccgccatcgtcgccacagattccatcaagaacaccgtgtatgtcaaggcgaaagagtgcacggaagtggtgtccatggaggaattcgccgtgattcttggaaggcatttcacttcgctgtaccctcaggtttcagaggccacggtgactatcgtggagcgcccatgggagcgtgtgactgtcgacggaaggcctcattcgcatgggttcaaagtt

SEQ ID NO: 14989 - DNA, 368 bp, Zea mays
  Clone ID: LIB36-005-Q1-E1-H5
gggtcgacgcacgcgtccagttcggcttcttcgtgcaggccatcgtcaccggcaagggccccatcgagaacctcttcgaccacgtcgccgaccccgtcgccaacaacgcctgggcatacgccacgaacttcgtccccggcaactaactgactgagcaacgccgtacatgtgtactaccatcagatccatccattcgttcgtccgtccgtcgagtgaacagtgtggtcttctctgtactctacttgttcagatcgtaggagtgtagtagttgcaccagccggcgtaggctcatgatcgatgtgtgctcatcaagcaatgtcaatggctgcctgctgtaagcggtcgatgtacaccacccacagacgcat

SEQ ID NO: 14990 - DNA, 165 bp, Zea mays
  Clone ID: LIB36-006-Q1-E1-A11
gtccacccacgcgtccgagagaacatcctggtgacaacaagcaggggcaccgaattaacctccaatccaaaacaatgggtccaagaaaaggaaccttcctcccaaaaaacccaagttaaccgttcaaaagaaaggtaatttaaaaaaaggaatccgtttaacctt

SEQ ID NO: 14991 - DNA, 301 bp, Zea mays
  Clone ID: LIB36-006-Q1-E1-A2
ttcccgggtccatccacgcgtccgaccacgcgtccggccaggattttgagaaggctggggaattgagagaccgtgaaatggcattgaaggcccacataacagccctcagtgacaggagcaaggaattgagcaaagcagaggaagagtctggagagacaggacctatggtcaatgaagaagatatccagcacatagtatcttcatggactggcatccctgtggagaaggtttccagcgaggagtctgataagcttcgtaagatgggacagactttggacaagcgtgtcatcggccaagatga

SEQ ID NO: 14992 - DNA, 309 bp, Zea mays
  Clone ID: LIB36-006-Q1-E1-A5
gggtccacccacgcgtccgaatttctgctaacctcatcaaacatgggccattggcaatcggcatcaatgctgcctacatgcagacatacatcggaggcgtgtcatgcccatacatctgtggcaggcaccttgaccatggtgttctccttgttggatatggtgcttctggtttcgcacccactcgcctgaatgacaagccttactggatcatcaagaactcgtggggctagaactgcggggacaacggatccttccacatatgcacgggttccaccgttcccaagatgtgctccgtcgatgccacggtcc

SEQ ID NO: 14993 - DNA, 280 bp, Zea mays
  Clone ID: LIB36-006-Q1-E1-A8
ccgggtccacccacgcgtccgcacacgcgtccgtgttctccctccctctctgcctgaccagctaggatcagcggaagcagcaatggtgatggcgtcgtcgagcgggctgaggagctgcagcgccgtgggcgtgcccagcctgctggcgccgtcgtcccggtccggccgcctggcgccgttctgcgccaacgccaccacctctggccgcgtccacacgtcggcggagtggccgccccgccctgcacgcgctgcgcacctcgacgcggccgctccgggggac

SEQ ID NO: 14994 - DNA, 409 bp, Zea mays
  Clone ID: LIB36-006-Q1-E1-B12
ttcacgggtcgaccgacgcgtccggccgccggcctctcattcccccgcgccggggccccgttcatcctcctccgcacctcctgtttctctccgtgggcagctctggtgccccgccgtcgacttctctctgggcctcccactgccggtgatcccccgcccccggcgctcccgccaacttcgaagctcgccgccccgccggttgtgggaacgccggagcccccgctgccgtttagggccgtggaggcggagatccttcgcgatattgaccccgtcgtcctgctcatcaaggatatcctccactccgatagatacggggatggcgaatgtctctgcccaagggacgaaaatgtcgtcgtggagaagctcctctcctaccatccacgcgcgcaggacaaaattgggtgtggac

SEQ ID NO: 14995 - DNA, 363 bp, Zea mays
  Clone ID: LIB36-006-Q1-E1-B3
cacggcagtcggcacgcaggctagcagcacagcagcagccagagccatcccctctcctcgctacgcttcgcttcctcggcgccgattcctcctcctcctcctccaccctcgtccgtcccgttccggcgcgcgagctcgcccgagatggcgaacgcgagatcgggtgtcgctgtgaacgatgagtgcatgctgaagtttggcgagcttcagtcgaagaggctgcaccgcttcataactttcaagatggacgacaagttcaaggagatagttgtggaccaggtcggggatcgcgctaccagctacgatgacttcacaaacagcctccctgagaatgactgccgatacgcgatctatgatttcgac

SEQ ID NO: 14996 - DNA, 369 bp, Zea mays
  unsure (1)..(369): unsure at all n locations; Clone ID: LIB36-006-Q1-E1-B5
gcctgcagtaacggtcctagattcncgggtccacccacgcgttcgaagaaaacccagccgccgccgcatcggcctcccaggtaagcagtagcgtccaccccagccgccgccatgaagcgcaacccccgcgtcacgagctcccgccggaagtgccgcaaggcgcacttcacggccccgtcctccgtccgccgcgtgctcatgtccgcggcgcgatcgacggagctccgccacaagtacaatgtgcgttccatcccgatccgcaaggacgaccaggtgcaggtcctgcgcggcacctacaagggccgtgagggcaaagtcgtgcaggtgtaccgccgtcactgggtcatccagcttgagcggatcacccgc

SEQ ID NO: 14997 - DNA, 405 bp, Zea mays
  Clone ID: LIB36-006-Q1-E1-B7
ttccgggtccacccacgcgtccgatcatctcttccaaatcccaccagcaaatccccaattcctccgagttcgagcgaccatgtcggggcgtggcaagggcgggaagggtctgggcaaaggcggcgccaagcgtcaccgcaaggttctccgcgacaacatccagggcatcacgaagccggcgatccggaggctggcgaggaggggcggcgtgaagcgcatctcggggctcatctacgaggagacccgcggcgtgctcaagatcttcctcgagaacgtcatccgcgacgccgtaacctacaccgagcacgcccgccgcaagaccgtcaccgccatggacgtcgtctacgccctcaagcgccagggtcccaccctcgaccgattcggccgctgacaggcgccaccgcc

SEQ ID NO: 14998 - DNA, 299 bp, Zea mays
  Clone ID: LIB36-006-Q1-E1-C1
ggctcgagcttccaccgtctccctccgcttccccgtgcggcggtgccgggtcgcgccgtgccatggcgcccgccttctcggtctcgtgcgcgcccggatcctcgcgcccgctggccgccagccccggccccagcgtcgtcgtcgtcgcctcctcccaacttcccgcgtcgtcgcggagcagcgaacgcaggagagcaccaggcctcgcgctcgccgcggccccgggtgtcggcggtagggatggcggtggcaggtggagagcaagcatctcgtccttccccttcctgccgccgttcttc

SEQ ID NO: 14999 - DNA, 422 bp, Zea mays
  Clone ID: LIB36-006-Q1-E1-C12
attcacgggtcgaccgacgcgtccgaccacgcgtccgatggagtatcggttgcatttttgcggagatcttaactgggaagccattttttccaggaaataaaggcttcccagttaagatctcctggaaaaaatgtggtccaccagttagatttgatgactgatctcttgggtactccatcacttgatacagtttccaggattcggaatgagaaggcaaggaggtacttgagtagcatgaggaaaaaacagccagtaccatttactgaaaagtttcctaaagcagatcctgctgcactcaaacttttgcagaggcttttggcatttgatcccaaggataggccaactgctgaagaggcattggctgatccgtattttaaaggcctcgcaaaagtagagagagaaccatcatgccagccaataac

SEQ ID NO: 15000 - DNA, 420 bp, Zea mays
  Clone ID: LIB36-006-Q1-E1-C4
gggtccacccacgcgtccgaccacgcgtccgcgcccagcacctggtggaggaggttcttttcagagctgcgaacaaagcagggatggacttccacgaactgatcgagatcccacacggcgaccggcggcggtaccacgacgacgtatctgtcattgttatatccttggagggcaggatctggaggtcatgcgtgtaaataggtcggccatactagattagagaaagaaacgtatatatctgtagagagagaggttcttggaggcctactccattactcccagctgctcctgtacaatatcaacgaagcaccactgggtgggcttgggatctcggcgcgtccaagttgaatcacgatgagaagatgcgtccccctggagcgcagtgccgtataagatgttcatgttaaagaagatctgttc

SEQ ID NO: 15001 - DNA, 329 bp, Zea mays
  Clone ID: LIB36-006-Q1-E1-C7
gcctgcacgtaacggtcgtaaattccgggtccacccacgcgtccgacgatgacgatgatgataccatatataatctaggactgcgcatatatatattttgttccagaaatgatcgatcactgtactgtactgtaaaatcttatagattattacacgcatggtgtgcgctgcatcttcattagttgttaataatggcgcacacatggtgatctctctgtatttgaatatttgatcacaaagtatttgtttcaaattaaaaaagagacaagaaaaagaaaaagaaaaaaacgaaaataatcaacaacaaatcaaaaacagaaaggcagcac

SEQ ID NO: 15002 - DNA, 189 bp, Zea mays
  Clone ID: LIB36-006-Q1-E1-C8
ccacgcgtccgacacgcgtccgcccacgcgtccgggcggcgacgagaagtggcgagccccgagagcgggtttagttagaggctacgggcggtcgggcgcggcggcggcggtggccatgagcagcgggagccagagcactaccgccagcacgtggcccgagctggtcacgccgcactccttggcgcgcga

SEQ ID NO: 15003 - DNA, 387 bp, Zea mays
  Clone ID: LIB36-006-Q1-E1-D1
tcgacccgcccgtccgcttgagtatattggcggataagaaggtgaacaagaagttgacagccaagctgaccctatactcaggatgtgttgtgccttctggtggtgaaaccgtctctttaagcaactgaactggtttaactataacagaagagctcagtgatttaccctttagaaaatcctctaccttgctagctctgatggcatggtcagctccataagcaccgagtaccaagcatatatcctccatgatgttcttccctgaagctgcatcagttgaagtccttgccaagagagcagcattgacatatgaagcagcattgccaaatggtcgaggcgctgcccggaatgtctcaaaggtgaggccatcgcaatcgcactttgggaggc

SEQ ID NO: 15004 - DNA, 406 bp, Zea mays
  Clone ID: LIB36-006-Q1-E1-D10
attctcgggtcgaccgacccgtccgggcacccacgcatactcttctcccccccagtccggaccccggaggagccaagccatggcgtccacctcctgctgcctcctccaccagtcaaccgcccgcctcggcgcgtcgccgcgcctggccgccgccccgccgcgcagcgcccagctgctcgtctgcaaggcccggaagcaggaagccgccgcggaccagagcgacgtctcgcgccgcgccgcgctcgcgctcctcgccggcgtcacggccgccgccggcgccaaggtgggtcccgccgccgcggcatacggagaagcagccaacgtgttcggcaagcccaaggcgagcacggagtacatcgcgtacagcggcgacggcttcaagctgctgattccggtcaagtgggac

SEQ ID NO: 15005 - DNA, 419 bp, Zea mays
  Clone ID: LIB36-006-Q1-E1-D11
ttcacgggtcgaccgacgcgtccgattgggcatggaagattatggtatcgttcaccagctagttactagtgtctcaaatgtttcatcagagtaccatcgtcagctgcttgaaaataccatgctatgtggtggcacctcatcaatgactggctttgaggacaggttccagagagaagcaaatctgtctgcttcagcaatctgtccatcacttgtgaagcctcctgaatacatgcccgagaacctagcaaggtattcggcctggttgggtggtgcgatattggctaaggtcgttttccctcaaaaccagcatgtgaccaagggcgagtatgatgagacggggccgtccattgtgcacaagaagtgcttttagagacaaatgccttgaactagcacggttggtgcaccatttgctgctgttc

SEQ ID NO: 15006 - DNA, 370 bp, Zea mays
  Clone ID: LIB36-006-Q1-E1-D4
cccgggtccacccacgcgtccgaagaaccccggcagcgtcaaccaggaccccatcttcaagagctacagcctgccgccgcacgagtgcggctacccgggcagcgtcttcaacccgctcaacttcgcgcccacgctcgaggccaaggagaaggagctcgccaacgggaggctggcgatgctggcgttcctgggcttcctgatccagcacaacgtcaccggcaaggggcccttcgacaacctgctgcagcacctgtctgacccatggcacaacaccatcatccagaccttctccggttgactccaggtcgaggatgaatacgatccatcgctggtccgctgacatggactgggagacaagccttgaggcctt

SEQ ID NO: 15007 - DNA, 320 bp, Zea mays
  Clone ID: LIB36-006-Q1-E1-D5
cgcctgcacgtacggtcctagattctcgggtccacccacgcgtccgaccacgcgtccgcttacgtaagtgctttaccagcatatgtagtgtagtaaaaaacatggcattgaatcccttcatgcttactataactagttatttcggttttctactgggtgctttaactataaccctagctctatttattagcttgaacaacatacgtcttatttgaaatgaattgaatatcagaatctttcttttggattcttggtattctagactcttttccacactacttaccaatttttttcttggtcattgagattcgtgggtagtt

SEQ ID NO: 15008 - DNA, 425 bp, Zea mays
  Clone ID: LIB36-006-Q1-E1-E12
attctcgggtcgaccgacccgtccgaccacgaatccgacttagattaaagacagacggcagtgtcattgtgaaggagggtcccaggtgcagcctaaggactcataaggtgtacagtgacttgaatgttgactacctaaagatgttcctcctaaatgttccagccaccaccgtagctctgggactgttctttttcattgatgaattgactggttttgagatcaatgtgttccagctgccagagcctttcggattcattttcacatggtttgctgctttgcccctaatattgttcttagcgcagtcattgactaaggctatagtccaggattttttaatccttaaggggccatgtcctaattgtggtactgaaaacctttccttctttgggactatactgtcagtctccagtggcgggacaacaaac

SEQ ID NO: 15009 - DNA, 388 bp, Zea mays
  Clone ID: LIB36-006-Q1-E1-E2
tcccgggtcgacccacgagtccgaccttccccaagaacccaagcccccaccatgacaagctcctcctctccttcccgaaaggcgctgagcaagatcgcttgcaatcggctgcagaaggaactcgccgagtggcaattcagcccccctgctggattcaagcacaaggtctccgataacctacaaaggtgggtaattgaggtcactggagcggcgggcaccctttacgccggcgagacctaccagttgcaggttgacttccctgagcattatcctatggaggcacctcaggtcatttttctcaatccagcgccaatgcatccacacatctacagcaacgggcacatctgcttacatattttgtatgactcgtggtctccagcgatgaccg

SEQ ID NO: 15010 - DNA, 263 bp, Zea mays
  Clone ID: LIB36-006-Q1-E1-E5
ccgggtccacccacgcgtccgaggacgcgtggggcagtcatggcttccatcaccctcctctccctcgctcccaccgccatcttcctccacatcccggctttcatctcctcctccgtcgttggtcccggaatcctacccggccgctgggccgctccccgcacgctcccgctccgcgcgctcccgccccgtcgcgtcaccgtccctctggagcagcgccgcggcggcagcccagggctcggacgccgcaacgccacgtggcgaag

SEQ ID NO: 15011 - DNA, 338 bp, Zea mays
  Clone ID: LIB36-006-Q1-E1-E7
gcctgcagtaaggtcttaaattcacgggtccacccacgcgtccgaggacgcgtgggctgagcggtggggcccgcgcggccaagttatcctgttcgctaccgtgatgtttaccctagtccagagggtttatcttcgttcgtctcgtttgttgttgcccatctgtgtttttgattgcaaggtcgctctgtgtcagttgttagtgctgtgttcatcctcggctccagcagacccatgcatcaaccagcatggactgtggatcgatggatgctgttactcctgtcaggatttgttctaagttaatcctaaggaaaaaatggtgcttcttggtgctgcaaaaa

SEQ ID NO: 15012 - DNA, 380 bp, Zea mays
  Clone ID: LIB36-006-Q1-E1-E8
ccgggtcgacccacacgtccgaacgtacatagcgtagatagatacttacaggaacacggcaaccatggttttccacagtcattatagtctcaacggtcagcgacctgcctccgttcgatagacacaatctataggtaacgtctgccacaagtatgggtccaccattggcctaccaaacggtctgtatgtcagcctgatcgacaacgtgaacgtcctacaagttctaaggaactggccacataggaacatgtcaaattatctgtgttactgatggtgagcgaatcttgggacttgtgagacatgggttgtcaaggaattggaaatcctgtatgcaaacctgcactatacactgctcttggcggaatatgaccatcactttg

SEQ ID NO: 15013 - DNA, 417 bp, Zea mays
  Clone ID: LIB36-006-Q1-E1-F10
attcacgggtcgacgcacgcgtccgacagatagctacaaacaccttggagcgagtggctcctctgacacatgctgtcggcaatgtgttgaaacgtgtttttgtcatcggtttctcaatcattgtttttggcaacaaaattagcacacaaactggaattggcacgtccattgccatagctggtgttgctatgtactcttacattaaggctaagattgaagaggagaaaaggaaaaagagcgcatgactgctgtgaataatattatcgggaccttcctcggacacaacatcgtcgacaatcacgacctacttctataccttgttttgttttcatcttgagtcagtcgatccattgtttgttcccagtctggtgattaaaagtctgcaaattctgtttgtggaattggcaacgatacaaa

SEQ ID NO: 15014 - DNA, 229 bp, Zea mays
  Clone ID: LIB36-006-Q1-E1-F3
cccacgcgtccgaggcaaaggcagcacactcagctatccagcaaaagagatcgagaggcaggagtcatggccaccgtcagcgccgccgtggtgaccaccatcgttgcccgcgccgcgatcgccacgcccaatgctctatggctgcctgcgctgagggcgacgagcgagagggtgcggtgcagctacgccaaggacgcggccgcactcagcaccaagggcgcaggcgcgt

SEQ ID NO: 15015 - DNA, 290 bp, Zea mays
  Clone ID: LIB36-006-Q1-E1-F4
acgcgtccgagagcacagaggcgaaggaggaggagcagcagcagcaggcggcgccgaggagcggcatcccactcagtgcttgcaaccatggctaggggattgaagaagcacttgaagaggctcaatgcgcccaagcattggatgctcgacaagcttggcggagcttttgctcccaagccatcttctggacctcacaagtccagggagtgccttcctctgatcctcatcatcaggaacaggctcaagtatgctctgaactaccgtgaggtcatttcgatcctgatgcaacg

SEQ ID NO: 15016 - DNA, 357 bp, Zea mays
  Clone ID: LIB36-006-Q1-E1-F6
gggtcgacccacacgtccggcctggggctcgctcggccctgctcaagtccaacgaccccgtgggcttcaacctcgtcgacgtcctcgcctggggctcgctcggccacatcgtcgcctactacatcctcgccacctccagcaacggatacgaccccaacttcttctgagcggtcgtcgaggatgtattctacagacagccgtgtgcgtgcgtgtgtgcttgtcatgtatccgatcaaagtttggttaatttggacaagtagtgcaactgcagaataattggtatttgtatagtgcaccatgccaacatgaatttgatctgtctctgtcttcactattcagttaaaaaacaggaaggac

SEQ ID NO: 15017 - DNA, 395 bp, Zea mays
  Clone ID: LIB36-006-Q1-E1-F9
gtcgaccgacgcgtccgaccacgcatccgagcagacccgcgccgggcagcgcacgcgcttcaaggccttcgtcgtcgtcggcgacggggacggccacgtcgggctcggcgtcaagtgcgccaaggaggtcgccaccgccatccgtggcgccatcatcctggccaagctctcggtcgtgcccgtcaggaggggctactggggaaacaagatcggccagccgcacactgtgccctgcaaggtcaccggcaagtgcgggtccgtcaccgtgcgcatggtgccggcgcccagggggtccgggattgtcgctgcccgcgtgcccaagaaggtcctccagttcgccggcattgaggatgtctttacctcgtcccgtggctccaccaagacactcggtaact

SEQ ID NO: 15018 - DNA, 439 bp, Zea mays
  unsure (1)..(439): unsure at all n locations; Clone ID: LIB36-006-Q1-E1-G11
tggctattcaaccttggcgtgctggggatctgggcggggatgatcggcgggaccgccgtccagacgctcgtcctggccatcatgacagtccgctgcgactgggaaaaggaggccttgatcgcgagcacgcgcatgggcaaactgtcggaagttcggtgatggcaggatctggtgctgcacatctgaacgagcgcccgtgatttttaagctctggcgggatcgtgtgttcccgcatgttagtttcgccaaattttgcctcgtggaaaagcaacgcaaggtgctcaggaatcagggacacaggtcgccggggcagctcttgaagacgacggaggangggcttggtgtggctatgatggttttggtgcttttgcttatgggctttatggtgggaacttcaaatcaaatagcttgactgtgggccctttatctgggtgtgttt

SEQ ID NO: 15019 - DNA, 281 bp, Zea mays
  Clone ID: LIB36-006-Q1-E1-G2
tccacccacgcgtccgcacacgcgtccgcggagccgtccgtactagctagcgtacgtacgtgtgaccgattcagcgaggtcgccgtttgtgtgtcgatatatatggcgaggtcgccgtttgttccgatggatcaggggaaagagcaaggcgccggacgaggagcggccggcaataataaggagcggcagcagcaggagcaggagcaggaggaggtgctgctggtgcacacccaggtgccgcggatcaagaccgaggacgaggaggccttcagggagcgcct

SEQ ID NO: 15020 - DNA, 389 bp, Zea mays
  Clone ID: LIB36-006-Q1-E1-H1
gggtccacccaagcgtccgaccacgcgtccggtaccacaccactccgcgctagctgaggacggtacagcggcacagaggtgcgacgtacgacgacgacgacgcaggcgccacacatggcatcccagctctccgccgccgtgccccggttccacggcctccggggctacgccgcgcccaggtccgcggtggcagcgctgccgtccgtgagggtgggcaggaagaggtcgtcgtcgcagggcatccgctgcgactacatcggctccgccaccaacctgatcatggtgacgacgacgacgctgatgctgttcgcggggcggttcgggctggcgccgtcggggaaccgcaaggcgacgggggggctgaagctggaggcgcgcgagtccgggct

SEQ ID NO: 15021 - DNA, 310 bp, Zea mays
  Clone ID: LIB36-006-Q1-E1-H2
ccagggtccacccacgcgtccgagattttgagacacaagggatgattttggatgatgagataaatacagcattagttcgaccacttcctcatggagttaaacttcatgcactcattgatgcttgtcatagtgggactgcacttgatttgccttatctctgcagaatgaacaggagtgggcaatatgtatgggaagatcaccgaccgcgatctggtgtctggaaaggcactagtggtggggaagctagttcccttagtgggtgtcatgatgatcacagctctgcagatactcctgcattagcatcgatcag

SEQ ID NO: 15022 - DNA, 315 bp, Zea mays
  Clone ID: LIB36-006-Q1-E1-H4
cacgcgtccgaccacgcgtccgcaaatcttgcagtggtgtgagggattcatgtgtattgcaagccaaagctcctctcccgctgccactaagttggcactgtccatagctgtgtgcgctgtcttcctgtgtttgtgatgaccacagccaccaaattcaccacaccatagctagaacattctagggagttgctggcccgtatgaagcttgttccgtaatcatctcagaacgcgacgaagaagtggaagtcactgaagagaagacaccaccaccctcggattctcgggcaggaaactgcttctactttcatatttgtg

SEQ ID NO: 15023 - DNA, 75 bp, Zea mays
  Clone ID: LIB36-006-Q1-E1-H5
aaaaaaaaaaaaaaaaaaaaaaaaaaaaaaaaaaaaaaaaaaaaaaaaaaaaaaaaaaaaaaaaaaaaaaaaaaa

SEQ ID NO: 15024 - DNA, 351 bp, Zea mays
  Clone ID: LIB36-006-Q1-E1-H6
actgagggctaaggaatgtgacgtactggtatatgtacattagttgaagcggaggctataaagggtgtagagattgtttcatcagtgtatatcatctgtcccgatgggttttgttttgtgcttttcacgattcattgtggaagcacatgtattattagtacaagaactgctagtagatatataggcttataattaagcacgacttctaaaaaaaaaaaggcacaaaaaaggaaaaagaaaagaaaaacaaccgacagaaagagacaatgtaagggaaaaaaacgccggagaaagggtgcagcggggggaaaaaaaagggggggcccccccaaaggtttcaagcttaagtac

SEQ ID NO: 15025 - DNA, 403 bp, Zea mays
  Clone ID: LIB36-006-Q1-E1-H8
gggtccacccacgcgtccgagtgttggttgggtgtcctgactcctgactccttctgagggtgtaggtggccatttggtacaggcgtcggactcccaggaggatgaccggtggcaagaggttcggcggcgggcgggtgccgacggggaccccgtccctcgcgtggtcgtccgtcgtcatcgtcgcctccctcctcgttggcgcctccatcgtccacaacatctacaagcctgacatgaccattccacctgtggagggtgccgccggcggcggcggccaagaaagctgagctacgaatggctggacactgcatgcaagagaggaggctgggcatgggagtagtgagggaccggccatcagcaccttttttttttttgttctagaacaaaaacgatattatgttgg

SEQ ID NO: 15026 - DNA, 378 bp, Zea mays
  Clone ID: LIB36-006-Q1-E1-H9
gtcgacgcacgcgtccgagagagttgatcagaggtttcagctcgagaagacaatgaagagcctcccttggggatcagaagaggaagacggcgcattgaatcaacttatgacgaccgactcgatgccttcagctcaggcttctagctctcacccagagatgggctcctggaccaccgcgcctgacttcaacgcaggaggtcctagcgaatctatcaagccttgtcgccttagatcgtatgtcatgtcattcgatccagatacgcttcagaggtatgcaacggtcaggtcaaaggaggcctttggtatcatcgagaaacacacagaagcgctatttgggaaagcagagattgtagtcacacctggaggcacggttggttc

SEQ ID NO: 15027 - DNA, 438 bp, Zea mays
  Clone ID: LIB36-007-Q1-E1-A6
acggtaggattccgggtcgaccacgcgtccgaaaatatgttgctttggagtgtggccatgtgtgcgatgatttggtgtaaattgatttcttcctaatcctagctgcactaaaatatgttgctttggagtgtggccatgtgtgcgatttaattgctgggttgcccttttaatttatgttttccaatttatgacatgctaagttaaatcatgtgacttgtctagacttataaaattactacatgtttttaataaatgtgtcaagtaactattatttgtttttgcacctcatgcactgacaaattatgttcttgaaaaataagattaatgggagtagaacttataattagaagttagaaccattggttgggtcgctttgggcttgtgtgttttacattctatctttgacatcttgtagaagaggataggatggtcagtgag

SEQ ID NO: 15028 - DNA, 465 bp, Zea mays
  Clone ID: LIB36-007-Q1-E1-A8
acggacggactccgggtcgaccacgcgtccgcccaagcgtccgggagattggaggagataaccagtcaaaaattgagttattggaaacgaagctcgcagaggcattggaggaaaacaagatgtacagagctcaacagaagagtccgatgcctgaggggcaacctgctgggggagacggcaaggagggcaatactgacaggattttgcaattggaaggagagctaagagatatgaaggaacggttactgaacatgagcttgcagtatgcagaggtggaggctcagagggagcggttagtgatggagctcaaagccatgaacaaaggcaggtggttttagcaatgatggagaactgttgcctgacatacaacagacacaggctgactgacagcacagatgggcatgtcatgtgagagcaagcaaagcacatgcaactgatgcagcacctggacctgctaacgggtgc

SEQ ID NO: 15029 - DNA, 342 bp, Zea mays
  Clone ID: LIB36-007-Q1-E1-B10
acggtccggagtccgggtcgaccacgcgtccgcccaagcgtccgcccacgcgtccggcctgaccagctaggatcagcggaagcagcaatggtgatggcgtcgtcgagcgggctgaggagctgcagcgccgtgggcgtgcccagcctgctggctccgtcgtcccggtccggccgcctggcgccgttctgcgccaacgccaccacctctggccgcgtcaccatgtccgcggagtggatgcccggccagccacgccctgcccacctcgacggctcctctcccggggacttcggcttcgattcgctgggcctcgcgaccgtgccggagaacttccagcggttcaag

SEQ ID NO: 15030 - DNA, 217 bp, Zea mays
  Clone ID: LIB36-007-Q1-E1-B5
cccgggccgacccacgcgtcaacagcaaccagagtcctcaatttcagcatgggcaagcctcgcatcaagttcaacagcaatcagataccagaggagatatagaatgtacgtatccaaggcccgtaaaagaatggtttctctgcagcgaggagggctgaggcggcggtggaaaagaagggcggcggctctagaggatggaggcttaaggtagcggtgc

SEQ ID NO: 15031 - DNA, 285 bp, Zea mays
  Clone ID: LIB36-007-Q1-E1-C1
gtcgacccgcgcgtccgcccaagcgtacgcccacgcgtccgctcttccatacgaccataccctacctccaaattcccaattgtcaacctctcctcagagttcgagtgaccatgtcggggcgcggaaagggcgggaaggggctgggaaagggcggcgcgaagcgtcaccgcaaggtcctccgcgacaacatccagggcattacgaagccggcgatccggaggctggcgagaaggggcggcgtgaagcgcatcccggggctcatctacgaggatacccgcggcgtgc

SEQ ID NO: 15032 - DNA, 310 bp, Zea mays
  Clone ID: LIB36-007-Q1-E1-C2
ggtcgacccaggcgtccgcgcaagcgtacgcacacatacatcgtttcttctactacacgacgaccaacctggggaagcctgccaagatcggcgagtgcggtggatacgcccgccatcttcgggatcttagggcgactccggatcggcttatccacgtcaaggtcccggctgcgaacgtcagctccatctcctcccacgccctcctcaccatctgacggcacagcttgccgctctaggcacgcccattaggtggcatgtcacatggctcactgctgcaatagcggtccatggccagcccaagcatagcccc

SEQ ID NO: 15033 - DNA, 484 bp, Zea mays
  Clone ID: LIB36-007-Q1-E1-D10
cggtccggaagtcacgggtcgaccacgcgtccgcgatgtcatggacgggcgctttgtgccaaacatcacaattggacccttggttgttgatgctctgcgtccagtgactgatcttccgttggatgtacatctgatgattgtggaacctgagcagcgagtccccgattttatcaaggcaggtgctgatattgttagtgtccactgtgaacagacatcgaccatccatttgcaccgaacagtcaatcagattaaaagtctaggagcaaaggcaggagttgttttgaatccagcgactccactcactgcaattgattatgttcttgatgttgttgacctggtgctgattatgtctgtgaatcctgggtttggtggccagagctttatcgagagtcaagtaaagaagattgcagaactgagaaggttatgtgcagagaagggagtgaacccctggattgaggttgatggtggtgttggtcccaaaaat

SEQ ID NO: 15034 - DNA, 357 bp, Zea mays
  Clone ID: LIB36-007-Q1-E1-D2
gtcgacctgggccgtccgcatgagatcaacacgctgtcttgtcagaccctacgatatgtctcaactgcaggagaaattaatatcttcaagtgtaacttgtgttcattctgtttcagtcgtcgcaacatccgtatatgaacctcttgcactatcagctggctcgatcgtcttctcagttaaataggttctgagattaggttaacgatggccacgtaatttcggacttgtgtttgttcaggtggcagcgccaaatgttccagtttcatgttcatattatatcaagagttcttgacattcagaatgtcaccgtaaattcaggtcacgtggcaggtcgttttgggaggtcgttctagggga

SEQ ID NO: 15035 - DNA, 248 bp, Zea mays
  Clone ID: LIB36-007-Q1-E1-D9
tccggatatcaagggtcgaccgacgcgtccgcttagaatggagcgtgattcgattgaagacaaaatccatcatcttgaatggtctcttaagcttgatgatatctcagaataccagaaggagaaattgttctctgaacatgacaatctgctgaaacagagagggcatgttcgtggtcttcatcaagaagctgagaggcaagatcagcagaagtttcataatgtgtggggacagctcatgaaggaccggg

SEQ ID NO: 15036 - DNA, 469 bp, Zea mays
  Clone ID: LIB36-007-Q1-E1-E2
gtcgacccaggcgtccgccgccgcccaccggtggactccccgggactctcaactctgaccaggcgagggacttcgacctccccttgaaggagcggttctacctgcagccgctgccgccggcggaggcggcggcgagggtaaagacgtcggcgcaggacatcatcaacctcaagccgctcatcgacaagaaggcgtggccgtacgtccagaacgacctccgcctccgggcctcctacctgcgctacgacctcaagaccgtcatcgcttccaagcccaaggaggagaagaagagcctcaaggagctcaccggcaagctcttcagcaccatcgacgatcttgaccatgccgcgaagatcaagagcacccctgaggccgagaaatacttcgcagcaaccaaagatgctcttggcgatgttctcgccaagctaggctagacgcaatggctaataatggccatgtaatttcggac

SEQ ID NO: 15037 - DNA, 403 bp, Zea mays
  unsure (1)..(403): unsure at all n locations; Clone ID: LIB36-007-Q1-E1-E5
tttatttttttgcaatgaaaatcgatccatactatacattacatggtacatacatacacagaaaagaaagaaagaaaaaacagagaggaacaccccatctggttcacgcacgctaaaccaccaacacagatagtagattgctgctacgctcttctttcgcctccaatctgcgaggcaaggcgtctgatccgctgcagccgtacgtccctaggagctcacccaccccgcgcaatcgagaactgactcggtcgccggcagcatgcaaatcataggccgagcgcgccgagcggcgtcttgccctgcccggcctcgaagtagaaggcgagcatggcaagcatggcgatgcgggcgtgcttgatctcggccagcttgagccgctcgagcttgtcgacgtcngggatgt

SEQ ID NO: 15038 - DNA, 356 bp, Zea mays
  Clone ID: LIB36-007-Q1-E1-E9
ggtcgaccgacgcgtccggttactgagaaagtgttcgccaatgtgggcaagactatcgggtacaaagttggaacaatgattgagatccccagggcagctctggtggctgatgagatagcggagcaggctgaattcttcgccttcggaacgaacgacctgacgcagatgacctttgggtacagcagggatgatgtggggaagttcattcccgtctatcttgctcagggcatcctccaacatgaccccttcgaggtcctggaccagaggggagtgggcgagctggtgaagtttgctacagagaggggccgcacagctaggcctaacctgaacgtgggcatttgtggagaacacggtgg

SEQ ID NO: 15039 - DNA, 225 bp, Zea mays
  Clone ID: LIB36-007-Q1-E1-F2
gtcgacctgagcgtccgctcaagcgtacgcccacgcgtccgggcattttccgtgctatggatggactcccggtgaccatccgactcctggaccctcgcctccacgagttccttccagaaggggaaatcgaggagattgtcggtgaagtgcctgctgagaccggagccacgccagtggaggccctcgcgcgaagtgaagaccgttcagaagttcacgctatgcgtg

SEQ ID NO: 15040 - DNA, 335 bp, Zea mays
  Clone ID: LIB36-007-Q1-E1-F3
ggtcgaccgagcgtccggcgcagtaaacagcgtgggcaaagctacgagcgcccggctagcttcgccatgaacatgggtggggtgtccccgtcgacagtccggtgcaagcactgcagcacgcagctcaccgtgtgccccggcgagcgcgccatccagtgcactcaatgctgcggcgtgacgcgtatccggcggccgcgggtccagcggccggcagcggcgccgcccaccatgggcttcgcgcgcgcccgcggcaagaagcgggccctcgtgatcggcatcacgtacgccggcacgcggcgtgggctgcagccagctcaggggggcgctcaacgacg

SEQ ID NO: 15041 - DNA, 289 bp, Zea mays
  Clone ID: LIB36-007-Q1-E1-F5
ccgggtcgaccacgcgtccggcaatttgagctgtatatgtaggtagtaggtaatagggtagttgccaaaaggacggctcccttttcctattgggaattgcgaatttttgtaggaactaataccatgcacagcaatgcctcgatgccaagatacagactttaaatttaatgttggattagatgctggaagagaaacatcctggtgtatattgcagtggaatgtactgctggaatacatgtttttccgaacaaacgaactggtcctagtgctgggtatggcgggtgccgtg

SEQ ID NO: 15042 - DNA, 266 bp, Zea mays
  Clone ID: LIB36-007-Q1-E1-F6
cttcagatctcataatgaggatcttgaaggactataaccagtatgtcatgaggaatttagcacggggctactcgaggaaagatcttggtgtgagctatgtcacggagaaccaattgcaagttcatatgaagatcactagactgcgggagactgtgacggcacatcaggaaaagttgcaaacagtggcaaacactgctggtttgaatcatgaagaatggcttgctaatgcggatcactgggtcgctggtctcctagagacgtttgag

SEQ ID NO: 15043 - DNA, 452 bp, Zea mays
  Clone ID: LIB36-007-Q1-E1-F7
acggtaggactccgggtcgaccacgcgtccgggaaagttagggcgatctaccaattcgacatggccgtgtacaccaagatcttcctcaagttccccaggaagttctggcctgaagggaaaggaagggagttcttcctctacgccagcagcaggagaggttactacggagtgtggcaggagttcgagaagcagtaccctgacgccaatgtcctcctggtcaccgtgaccgacgaggagtcgaggcgcatcgagcagcagtcggacgagcagaccaaggcggagatcatgcaggtgctgcggaagatgttccccggcaaggacgtcccggacgccaccgacatccttgtcccgagatggtggtccgacaggttctacaagggcaccttctccaactggccagttggcgtcgaacgctacgaatacgatcagcttagggcaccggttgggacggt

SEQ ID NO: 15044 - DNA, 414 bp, Zea mays
  unsure (1)..(414): unsure at all n locations; Clone ID: LIB36-007-Q1-E1-G1
tgttgatggcttgtgaaagcaggttcttggcctaagactgactcagatgacccttcaaagaggatggaataacaaatctaagcttctaattgttgaggatttgtctgcacggcaagtgtatgagaagctcctagaagctgtacaaccttaggcacccgagcgatggagcaatgtggtatgcagtatgcgtctggatattctctttcgagggcatangagaaggtttccatctatattgtgcaacaagtggagcagaacgtgtcgagacgaggtcgaaacatggctcaaatgtataactagaccatagcagtatccggttcattgtttctgtcgtgactcagatattgtatcctgtggtctcaagggaggtggttttgtgatttccacattctgatccagactgtttttgtggcc

SEQ ID NO: 15045 - DNA, 232 bp, Zea mays
  Clone ID: LIB36-007-Q1-E1-G11
gtcggactcagggtcgaccacgcgtccgtagacataatgcatatctaaatgcataccaaaagttatctgtctagatatagtgttttttctatgtatccagacataatgcatatctaaatgcataccaaaagttatctgtctagatacatagaaaaaacaatatatctagaaaagccaaagcattttataatttgtaatagagggagtatatgattgcttcagaagaaaaggg

SEQ ID NO: 15046 - DNA, 222 bp, Zea mays
  Clone ID: LIB36-007-Q1-E1-G12
gtccggaatcacgggtcgaccacgcgtccgcggacgcgtggggccgcgtgaagagcaagcgtgggaggtgggatgcagtgaaagacgggctcgcgaacctcaacatcagccagtgcaccgccctgacgcccccggcggtgcaggccgtctgcgactccggtccggcgctgcacagctgccccgagaggcactccctcaacatccgtggctgcctcagcctca

SEQ ID NO: 15047 - DNA, 445 bp, Zea mays
  Clone ID: LIB36-007-Q1-E1-G2
gtcgacccaggcgtccgcccaagcgtacgaagcaagcagcgagtacatacatactaggcagccaggcagccatggcgcccaccgtgatgatggcctcgtcggccaccgccgtcgctccgttccaggggctcaagtccaccggcagcctccccatcgcccgccgctcctccagaagcctcggcaacgtcagcaacggcggaaggatccggtgcatgcaggtgtggccggcctacggcaacaagaagttcgagacgctgtcgtacctgccgccgctgtcgacggacgacctgctgaagcaggtggactacctgctgcgcaacggctggataccctgcctcgagttcagcaaggtcggcttcgtgtaccgcgagaactccacctccccgtgctactacgacggccgctactggaccatgtggaagctgccatgttcggctgcaacgac

SEQ ID NO: 15048 - DNA, 466 bp, Zea mays
  Clone ID: LIB36-007-Q1-E1-G5
accggtacggtagtctcggcccgacccacgcgtcaacgctccgcaacacgcccgtgcacggccaggcgggcgcgctcggcgccgccggcctcgtcgccatcctcagcgtctgcctcaccatgtacggcgtcgcctccttcaacgagggcgactcgtccacggcgcccacgctcatgctcaccggcaggaggaatgaggccgacaagctgcagaccgccgacggctgggccaagttcaccggacggttcatcttcagtggtatctccggcgtgctctgggcatacttcctcctctacgtgctcgacctccccgacgacatcaagtacaatacaaattcataacgatgcatatatataatatagctccgcctccgatcctcctctctgcatgcaaaggtatgccatttcaggagtgacgaccagcgtggatacatgcaattcctctgcacatggatggattgggatgt

SEQ ID NO: 15049 - DNA, 403 bp, Zea mays
  Clone ID: LIB36-007-Q1-E1-G6
tgattcttgaagagatcgagcttcttttgcaccacaaggtcgaggatgtcttgcaactgcggatcaagctgcggctgcggctcaagctgcaagtgcggcaagaagtaccctgacctggaggagacgagcaccgccgcgcaggccaccgtcgtcctcggcgtggccccggagaagaaggccgcgcccgagttcgtcgaggccgcggcggagtccggcgaggccgcccacggctgcagctgcggtggcaactgcaagtgcgacccctgcaactgctgatcacatcgatcgacgaccatggatatgattattatctatctagcttgtggtggtggttgaacagatgtaagcgaggccgagctggctgccatacatacgtagtgtgtggtgtgtgtgagagagagag

SEQ ID NO: 15050 - DNA, 305 bp, Zea mays
  Clone ID: LIB36-007-Q1-E1-G7
gggtcgaccacgcgtccgcgcaataatcagcttccggatggtggcgttttgtcagttttggatggaaatgccgaactggcagcgtctgttttccctatgcatatgtaatttcctgcctctttatattcactcttgttgtcaagtccaagtggaaaatcttggcatattatacatattgtaataataagcatcgtacaatctgcatgctgttttgtaataattaattaatatcccagcccattggatggacttgtttaataaaaaaaaaaaagataaaatgcataaaaaaagagaagaataaagtt

SEQ ID NO: 15051 - DNA, 433 bp, Zea mays
  Clone ID: LIB36-007-Q1-E1-H2
gtcgacccaggcgtccgcggcgccacaacgtctcggccatcgggatggccttcaacggctggtacaaccgcctctacactgtgacgggccagtacatcgacgacgatgactcggagaagtacaggcctcagatagagaaggcgtgttggatcgttcaggctgacatgaaagatgcgatgtcatccagcaccagcagcagcagccgcccacggtacataaaccctaaatatgtatgcggagaggtccagcaacatgttgtgcccgaaaattgacaccttgccatttcgatgagacaagacaaggcatgtgcctattgccctattccaattcttgagcactgtaacactgccaatatgcagagtatatgttttctgcctgttgaggtggatacaaatgcatgccttttttttagtagaaaagagggcggtcgcgg

SEQ ID NO: 15052 - DNA, 225 bp, Zea mays
  Clone ID: LIB36-007-Q1-E1-H4
tcgcggccgcccgggaatcttttttctgtgttttagaacgaggcgtcatttaagttaaatcaagtgcagaaccagacttagttgccacccaattcggagcttatcagcgtccgttataaggtgcgcggaactgatctatatgaacctcagagaggaatagacggtctgacgcgttcccggggctgcagggatgtactcagggacatggggcacaggggacgtctt

SEQ ID NO: 15053 - DNA, 438 bp, Zea mays
  Clone ID: LIB36-007-Q1-E1-H6
ttcaggtgggtaacaaaaccgatctgaagcatgcgcgtgaggtgagcaccgcggaaggacaagcactggccgaggctcagggcctcttcttcatggaaacctcagctttggattcgtcgaatgttgcagcagcttttcaaactgtggttaaggagatctacagcatactaagcaggaaggtgtttcagtcactagagcagaagaaaagcgagctgcagtcgctaagcagcgggaaagccgtggtgctgcagggtggccaaccaaacaagcagtggtgggaggtggtgctgttcctcgtgacctgacacgaggactgcagctatggagggcgatcggattgtgagacatttgggtgtgtaaccctgtaggtccgatttgtgaaaagttgcttttcccccatgttcttgttctaaaggtaagctggcgtggctgcttgta

SEQ ID NO: 15054 - DNA, 285 bp, Zea mays
  Clone ID: LIB36-007-Q1-E1-H7
accggaagaaggaaccgaggaatggaaacttctggaagcctgcataaacccgaaggattggatctgattagccgtcattcttgagatcttttgttagagttttcccttctgtagggctaagaccacgtgcagtttcattatttctttttgcatctgtagaatcgtgaataaatatgatgtagtaatgctgtagctgtttgtatctatctgctgttttttccccatgtgaatgagtgaaccattggcttctgtatttacgaaggattcaggtttctaaaagtgaag

SEQ ID NO: 15055 - DNA, 312 bp, Zea mays
  Clone ID: LIB36-008-Q1-E1-A8
gggtcgccccacgcgtccgatcaagctcaccgtcgacacgccgcgccttggccgcagggaagctgacatcaagaacagatttgtcctgccaccacacctgacgctcaagaacttcgaaggtctggacctcggcaaaatggaccaggctgctgattcagggctggcttcctatgtcgccggccaagtcgaccgcaccctgagctggaaagacgtcaagtggttgcagaccatcaccacgctgccgatcctcgtcaatggagtgctcagcgctgaagacacgaggcttgctgtggcgagcggcgccgcggggat

SEQ ID NO: 15056 - DNA, 346 bp, Zea mays
  Clone ID: LIB36-008-Q1-E1-B12
gacccacgcgtcaagcaacaggcgggacctcttcatccacaccatgcgtatgttaggctactagggtacgtgagatgactcccacatggagtaccatgtgacgaatgtcatcctggtgaacgcgacggcggagggctcctcgcgcactgcgcacaagtcggacctgcaccggatcgccgtcatcaaggacgtgatccagcccatgttcgcctggtaggacgtgttgcaacccatcgacatccatgcacttcatctggtggctcgagacgttcgtcacctgcaccctgctcaactcgtggtatctcttcaacctgccaggactaccacagagcttttgggcaccgct

SEQ ID NO: 15057 - DNA, 323 bp, Zea mays
  Clone ID: LIB36-008-Q1-E1-B2
tcgaccacgcgtccgttaattttcattttttttttaaccaaagtaaaacccagtgattttattcgatgttatgtacaaggaaattcattagtactccgtacttcagtacacagaacctcgaacaaaacatattctgaacactccaggtatttacagcataaaccgcacacaccggttttcattaataagtagaagaggacaagtctaatctgcaaagcagcataggtgcaacactaaaatattaccagataccataaaacgagcttcagcctcagattatcatgctgcaaaacttccaagaaggacacctggatggtagatga

SEQ ID NO: 15058 - DNA, 453 bp, Zea mays
  Clone ID: LIB36-008-Q1-E1-B5
taccagtccggtagttccgggtggccccacgcgtccgcaaagtacaggaaggtccaagatgcagcctacggagtcgaaaggtctacagtgacttgactgttgactacttcaagatgttgctcttaaatgttcccgcagctgttgtagctctggcactattcttctttttggatgatttcacgggatttgaaatcacatatcttctcgagttgccggagcctttcagtttcatcttcacatggttcgccgcactgcctttaatattttgggtagcgcaggcgatcactaatgtcatagtgaaggacttcctgatcttgaatggtccgtgtccaaactgcgggaatgaaaacctctccttcttcggtaccatactgtcagtgcctagcggtggctcaaaaaacagcgtgaaatgtgcaagctgtggcactgagttggagtacgactcatcaaccc

SEQ ID NO: 15059 - DNA, 341 bp, Zea mays
  Clone ID: LIB36-008-Q1-E1-B7
gacaaacattgaaaccttaagttcctttctggatcagtttgtgtgtgttaatctatctggagggtacagattcgggccgtgttgcaatgcatgcatggtctgaagggagcgagggctgaggagtgactggtatgtacattagctgaaggggaggttaagggtagagatcgtttgatcagtatcatctgtatatccccatgcatggggtttcgttttgtgcgcttacttctggcttgccagcgtatggttcaatgtggaaacacatgtattagtacgagaactaatagacttataattaatatagaaggcagagtgggagagggatgtaggggagggcgtag

SEQ ID NO: 15060 - DNA, 230 bp, Zea mays
  Clone ID: LIB36-008-Q1-E1-B9
aaagcagctgctgtacctgggtatctgcgtcgtctggtgccctctggtgtacctctatatggatgtcgtcgtctaataaacatctgtggtttgtgtgtcatgaatcgtggttgtggcttcgttggtttaatggacctgttgtgtcctctgtgtgttgtacccaaaactcttctgcagcagtatggctcgaatccttatgaagtttgatgtttgaacttaaaaaaaacaat

SEQ ID NO: 15061 - DNA, 439 bp, Zea mays
  Clone ID: LIB36-008-Q1-E1-C2
ggtcgacgcacgcgtccgcgcagcggaccagagcgacgtctcgcgccgcgccgcgctcgcgctcctcgccggcgtcacggccgccgccggcgccaaggtgggtcctgccgccgcggcatacggagaagcagccaacgtgttcggcaagcccaaggcgagcacggagtacatcgcgtacagcggcgacggcttcaagctgctgatcccgtccaagtggaaccccagcaaggagcgggagttccccgggcaggtgctccgctacgaggacaacttcgacgccaacagcaatgtgtccgtcatcatccagcccacgtccaagaagaccatcgccgactacggctctcccgaggagttcctctcccaggtcgactacctgctcggcaggcaggcctacggcggcaagaccgacccgacggcgggttcgagaccggccccgtgg

SEQ ID NO: 15062 - DNA, 420 bp, Zea mays
  Clone ID: LIB36-008-Q1-E1-C3
ccacgcgtccgcggacgcgtgggcgcgcgcaccatcttctgcgcgccgccagccccgcttgttctggctcctgcgcgccgccagccgtcagcccgtcaccgattggagatccttggacacctgcacgccgccagcccgtcaccgcttggagacccgcgcagccgcgcttccctgcgcgccgccagccgtcgccgatccgtggccgcgtccgcgtccgccgccgccagccctaacgtcgcgccgtcagccagcccgtctgccgtcgtgaggtactgatgaatttttctggtaatcagcatggcactgtcatcaatgtctacgacaataaatgtgaaagatttgacctccaaggtttcagtctataccagtgcgacagagttatctggtggactaaacatgatagttaggcgctgggccacg

SEQ ID NO: 15063 - DNA, 293 bp, Zea mays
  Clone ID: LIB36-008-Q1-E1-C5
tacagtccggagttcgcgggtcgccccacgcatccgggaaaaatatgcagagaactgcatgtacactcccgtctaccgcaactaccggtagtgctgcggggatcaattttgcagtaataaaaatctatcaacgcggatggtactctgttgtttatagtccctgctgctaaccacccttgttgctggtgctgctggagaggcattgtacctgtccatgcatatatgatatatatgttgtaacgttgtgaaagcaaacaatcttgggtaccaatgtttgttattctttcgctcaa

SEQ ID NO: 15064 - DNA, 378 bp, Zea mays
  Clone ID: LIB36-008-Q1-E1-C7
tccggagttcgcgggtggccccacgcgtccgataaaatccacggtttaataacgaaccgtgttaacttaccataacaacaactcaattcctatcgaattccttcctatcgaattcctatagtaaaattcctataggataaaacgtacacagggtgtacacattatatatgaatgaaacatattcattaacttaagcatactcctttttttatttaatgagttgatattaattaaatatctttttttttagatttttgcaaaggtttcatttacgcctaatccagatcgagtagaccctgtcgttgtgagaagtcctaattcatgagttgtacggagggacttatgtcaccacaagcagagaccacggcacgtgttgga

SEQ ID NO: 15065 - DNA, 247 bp, Zea mays
  Clone ID: LIB36-008-Q1-E1-C9
ggcccgacccacgcgtccacgcaaaccctagagccgcagcagcacactcccgcagtagcagcagccgccgccgccgctgctcagccgcacgaaacacgacgaatatgccggcggggcacgggcttcggtcgcggacccgcaatctgttcgcgcggccgttccgcaagaagggttacatcgcgctcaccacgtagctgcgcacctacaacgatcggcgaccacgtcgacgtctccgtgaacggcgccg

SEQ ID NO: 15066 - DNA, 165 bp, Zea mays
  Clone ID: LIB36-008-Q1-E1-D10
cccacgcgtctacccacgcgtccgcccacgcgtcaggcgtgttgccagggacagcggtggcattgtcccatgctctgcaattaatactagccctctgactctgaggctattcattgtgatactgtcatcggtgctgcctgttagcacgcagggctgtccgtgacc

SEQ ID NO: 15067 - DNA, 433 bp, Zea mays
  Clone ID: LIB36-008-Q1-E1-D4
ggtcgacgcacgcgtccgcccacgcgtccgcacgcatactgcatacacaacacagagcatcagaaggagctgcgatctgatcgacatggctgccgccaccatggctatcacctcccgcgcgctcatcggcaagccggcggctggcacgagggacgtcttcggcgagggccgcatcaccatgcgcaagaccgccgccaagcccaagccggcggcgtccggcagcccctggtacggtgccgaccgcgtcctgtacctgggcccgctgtccggctcgcccccgagctacctgaccggccagttccccgcgactacgggtgggacaccgcggggctttcggccgacccggagaccttcgccaagaaccgcgagctggaggtgattcagtgccgctgggccatgctcggcgcgctcgggtgcttgttcccggagctgc

SEQ ID NO: 15068 - DNA, 371 bp, Zea mays
  Clone ID: LIB36-008-Q1-E1-D5
gggtcgccccacgcgtccggcttcacgcggggcagccgggtgtcggcgaggaaccccctgatgagcaggaacctggagaggaatggcaggatcacctgcatgacgtttccccgggactggctgcggagggacctgagcgtcatcggcttcgggctcatcggctggatggggccgtccagcgtcccggccatcaacggcaacagcctcacggggctcttcttctccagcatcggccaggagctggcccacttccccacgcccccgcccgtcacctcccagttctggctgtggctagtgacgtggcacctgggcctgttcatcgtgctcaccttcggccagatccgattcaagggcaggaccgaggactactt

SEQ ID NO: 15069 - DNA, 461 bp, Zea mays
  Clone ID: LIB36-008-Q1-E1-D7
tccggagttcccgggtggacccacgcgtccgccaacgcgtccgcggacgcgtgggtttttttttttttgacccataaaatctttgtgatttcatatactttttactcatgaaccctttctttgggttctgctacatttgcaatataagatagttcgtattcgtgaatgctatgtggcctagagttgttcttgctacaatctattcagtatccagcggcgtgtttctcttggattggattcctgtgctttgatcattgctgctgcgcctggagctcggcctgcgtgataaagatgccgtggaagccgtaggggacgcgcgcgggcagctgcacctcggcgacgatgtccagctgcgccgacctggcgtccatcaccacgaactggttctcgccggtccgctcgttgtggacgtagcacaccaagtagccgtcgtcctcgttgctattcccctccacgtcgtc

SEQ ID NO: 15070 - DNA, 370 bp, Zea mays
  Clone ID: LIB36-008-Q1-E1-E2
gaaggggagctgctttcccagcttgtcgacttgctgaagctgtctggggctagacacacgattctctacgcttcccagccatctggttatctactggagaacccttccggctcgccagtggctaggcaccttgcggagaggactaacggtacaaaaactggcctactgagcaaatgtgacggagagtgcctagtcaaatcaactcttcttgaaggaacctttgtcggaatagtgctccttagcatcttgatatcagggctcatgtgtatgatgggaatcgatactccctccaagtttgaagctccccaggagtccgtgatctcccttcgaagcagaacccttgttctgtttggccgcactgtggatagat

SEQ ID NO: 15071 - DNA, 257 bp, Zea mays
  Clone ID: LIB36-008-Q1-E1-E3
ggtcgccccacgcgtccgctattttccattcattattattctatttattctgacctccatacctcgatcgagatagtggacataggatgccactctttaaaatgaacaaaatgagtaatcagctgtgacacgaaagaacgcgaatccttttgtagctcgtcagttattggcaaaaatcgaaaaggtcaatatgacggaggagagagagataatagtaacgtggtcccgggcatcgagcattctagccgcaatggttg

SEQ ID NO: 15072 - DNA, 251 bp, Zea mays
  Clone ID: LIB36-008-Q1-E1-E5
ggtcgacgcacgcgtccgcggacacgtgggcaacggcgaccccttcatcggcagcctggagacgccggtcaactccaacccgctcgtcacgtggtagctctgcaagctcccggcctagcgcaccgccgtgagcccgctgctgcggggcgtccaggtcggcctcgcgcacggcgacctcctgcgtggggccttgcgcgccaacggcccgctcctcagcaacgcccgtgcacggccaggccggcgcgctcggc

SEQ ID NO: 15073 - DNA, 64 bp, Zea mays
  Clone ID: LIB36-008-Q1-E1-F3
tcccgaggtcgacccacgccgtccggcgcaactttgcgtgcggatcgggttcatgttatgacat

SEQ ID NO: 15074 - DNA, 262 bp, Zea mays
  Clone ID: LIB36-008-Q1-E1-F5
taccgagtccggaattcacgggtcgccccacgcgtccgccaacgcgtccgcccgccgccgccccttcctctacgtcgctcgcctcgcgcctgcgccagcagctctgccatggccccgaagaatgataaggccccgccgccgtcgtccaagccggccaaatccggaggcgggaagcagagtaagaagatctggagcacgggtaagcaaaaggagaaggtcaacaacgctctgctcttccgaccaggccacctatgacaagtgg

SEQ ID NO: 15075 - DNA, 269 bp, Zea mays
  Clone ID: LIB36-008-Q1-E1-F6
gggtcgactcacgcgtccgccgaagcgtcggactctatcgccttcgcgatcgcactcgagcctatcttgtccgcaactacatccactcgctttggttcgtcgacaacccactcaacggcgacgtgctcaaggtctctgacatcatgtacgcgcggccgagccatcgtccggcgatgacgcttcgtagctcaggcgaccgatcgagcgtagtcgttcctcgaaaactcgcgctatcagatgaactagaccgtcgagagcatggcattggt

SEQ ID NO: 15076 - DNA, 422 bp, Zea mays
  Clone ID: LIB36-008-Q1-E1-G1
tcgaccacgcgtccggcagaatatagcagagggccagaggcgcagaaggcagtcgcggacaggaggaagaggaagaagaagcggcagcgagcgaggatgccgtgcctgaacgtgtcgaccaacgtgaacctggagggggtggacacctccgccatcctcgccgaagcctccaagtccgtcgccaacatcatcggcaagcccgaggcctacgtgatggttgttctcaagggttcggtgcctatggcatttggaggtacccaggagccagcagcttacggtgagctggtttccatcggaggcctgaaccctgatgtgaacaagaagcttagtgctggcatcgcttctatcctggagtcaaagctgtctgttcccaagtcacgcctctacctcaagttccatgactccaagcgctcggacttcgg

SEQ ID NO: 15077 - DNA, 414 bp, Zea mays
  Clone ID: LIB36-008-Q1-E1-G3
gtaggcgtcggtagttccaggtggacccacgcgtccgcgcacgcttcagcttcaccagcccgccgccgccatcgcacgcccgcagccgcatccgctatgggtgcgtacaagtacgtctcggagctatggcggaggaagcagtccgatgtgatgcggttcgtgcagcgcgtgcgctgctgggagtacaggcagcagccggccatcgtccgcctcacaaggcccactcgccctgacaaggcgcgccgcctcggctacaatgccaagcagggttatgttgtttaccgtgtccgtgttaggcgtggtggcaagaagaggcctgtgcctaaaggtattgtcgatggcaagccagagcaccagggtatcacccagctcaagttccacaggaacacagagtctgttgctgacgagagggct

SEQ ID NO: 15078 - DNA, 121 bp, Zea mays
  Clone ID: LIB36-008-Q1-E1-G6
gtccggagattcccgggtcgactcacgcgtccggcagcagcacacagccccatcccaatcctagtcgatcttcttcccctcctcaaggaataaaagaagctgaaccatggggaagagaaag

SEQ ID NO: 15079 - DNA, 276 bp, Zea mays
  Clone ID: LIB36-008-Q1-E1-G8
tgtcatgcgaacagtttctcttactcaagcaagaattgatatgagtgagcttgatgaggattctgatggtttccttcagcctcatgaaatggaagcatatattagaggactcatccccaatttggcgcaattgcgcgatatgcccactgcatttgttcagatgtagtgccgcatagctgcacgcaagttcttgttcttctgtgatcgacacagacgggggaaagcatgcagtaaagaaagtgttgctgagcagttgtcttcgggagctaattggaa

SEQ ID NO: 15080 - DNA, 384 bp, Zea mays
  Clone ID: LIB36-008-Q1-E1-H11
cggcccgacccacgcatcgacggaaccgtgggcagagtcgtcggccgcaccggcggctggctgcacagccggtcggcgttctccatgaacttcacgcggcgcatccgggggtccgcgaagaaccccctgataaccaggaagctggagaggaatggtaggatgacctgcatgacgtttccccgggactggctgccgagggacctgagcgtcatgtggttcgggctcagctgctggatcgggccgtccatcgtctcggtcatcaacgacgacaggctcacagggctcatcgtcacgaacatcggacacgagctggcccacctcaccacaccgtcgacagtgatatcccagttctggctgtgggcaatgaccttgcacctgggcctg

SEQ ID NO: 15081 - DNA, 227 bp, Zea mays
  Clone ID: LIB36-008-Q1-E1-H3
ggaaaccacggttacgaaagacgttttccaagacaagtagcgtaatatatgttgctgcgttttctacgttttgtacctgtcctctgggcccgaatggccagtgactgtaatagcacctaagtgcccgagactggtaagacaaggggtattcagacaatcaagaaaccacggtgcggctgaggcctgaggcagtcctctccgtcgttcacccacaacaagtcaaaagt

SEQ ID NO: 15082 - DNA, 235 bp, Zea mays
  Clone ID: LIB36-009-Q1-E1-A8
tatgttaagcgtatagtacgctcggattaaacaaacaaaagcaggtccagatctcggaggccaaagatccatccagtgaaagaggaagcactacttgtgtacatcacattaagttacaaataccaattaacaatagaaatccgccgaaagggaaagggaaaaaaaagccaggggaaaaaaggaataataaagccaacaattcaagggtgggtacaatgaatggttggggaaaacc

SEQ ID NO: 15083 - DNA, 443 bp, Zea mays
  Clone ID: LIB36-009-Q1-E1-B10
ggtccacccacgcgtccgcaccaaggagagtacgtggaggagcagccatggcttcatcggtggccgccgcggcgagcacattcctgggcacccgcctggcggacccggcgccacagaacgggcgcatcgtggcccggttcgggttcgggttgggcggcaaggcgaagcctgctccgaagaaggtggcgaagacatcgacctcctctgaccggccgctgtggttccccggcgccgtggcgcccgactacctggacggctcgctggtcggcgactacgggttcgacccgttcggtctcgggaagcccgtggagtacctgcagttcgagttggactcgctggaccagaacctggccaagaatgaggccggcggcatcatcggcaaccggttcgagtcctccgaagtcaagtccaccccgttgcagccctacagcgaggtgttcggc

SEQ ID NO: 15084 - DNA, 456 bp, Zea mays
  Clone ID: LIB36-009-Q1-E1-B9
tccgagattccagggtccacccacgcgtccgcacacgcgtccgcccacgcgtccgccggcggcggcggcggcggcgcagcagcggcagcagcatccgaagatggtgaagttcctcaagcccggcaaggccgttatcctcctccagggccgcttcgccggcaggaaggcagttatcgtgcgcgtgttcgaggagggcacccgcgaccgcccctatggccactgcctcgtcgcaggcctcgccaagtacccaaagaaggtgatccgcaaggactccgccaagaagactgcgaagaagtcgcgcgtcaagtgcttcatcaagctcgtcaacttcactcacctcatgcccacccgctacaccctcgacgtcgatttcaaggatgtcgccaccggtgggcccgacgcactctctacccacgacaagaaggtcgccgcctgcaagacggccaaagcgcgcct

SEQ ID NO: 15085 - DNA, 364 bp, Zea mays
  Clone ID: LIB36-009-Q1-E1-C1
gggtcgagccacgcgtccgactacacgtccgcccacgcgtccgcccacgcgtccgaaacagacaaaaaaacacccgggaaatccaagcagctgttgcaaccggttccttcgaggagaacgtgagaaagaagcatgaggccccaggtgctgctcgtcgcactggccgtcttcgccgtcctcgtagctctgccactgggcaaagcgcacgaggaggaggaggaggaagggcttgaactcgaagccagcaggaggcggtggccgtgctgcgaccagtgcggcatttgcaccaggtcgcagccgccgatatgcgagtgcacggacacatcgacgaccggctgccacccggcttgcaacgcgtgcgccc

SEQ ID NO: 15086 - DNA, 451 bp, Zea mays
  Clone ID: LIB36-009-Q1-E1-C10
gggtccacccacgcgtccgcacacgcgtccgcctagcgtagtaggaaattctccgccgacgccccgccatcatcgcccccgcacccgacattctacccctcgcgcaccttccttcggctccacccctccccacccccgctatgcccctgcctccgtgacacccgtgcccagccccaccacccccggcaatctcccatgctcccccatcaacgctccctcctcacatttcccgcacaccgagacaaatccgtccacgctatggtttggattcgtggatggagcccgaggttagatccagcaggagaaggaagatagaggaggagagggaatgggtggcgggcctatcagacatggatggccgccaccgtcgcagagtcggacgacgctggtagcggcggcggctgtgggtgcggcgagcggatgaagctactattcaacctgggcgggcgca

SEQ ID NO: 15087 - DNA, 426 bp, Zea mays
  unsure (1)..(426): unsure at all n locations; Clone ID: LIB36-009-Q1-E1-C11
ttcagggtccacccacgcgtccggaaagttagcaaagctcaggacgctggttctgtccagtaacaaattacatggcacagtcccaaattctttaggccgactcggaagactccagtacatagacttgtcgtacaataacttgagtggcccgataccaaaaacgtctgcaagaacgctcaacatagccgggaatcctctcatctgtgctgcagaacaggattgtgacagtaccaagctgaaaccgatgctggattcctatatcgctggtgaacagtaggagccccaagttgggagtcggttaccttgctaaggagtatgtacctaacgaacctcgggtgccgtttggtttcacanaatgtaatgtaaatgataataattaacactcgtgtgacaacaataataagtttgagtaagttggtatcaaaa

SEQ ID NO: 15088 - DNA, 428 bp, Zea mays
  Clone ID: LIB36-009-Q1-E1-C12
cacacgcgtccgcccacgcgtccgcccacgcgtccgtacaatactgctcgtggtgttcagaaggttcttcagaactacaaaaatcttcaggatattattgctatcttgggtatggatgagctcagtgaggatgacaagttgacggtcgctcgtgcaagaaagattcagcgtttcctgagccagcctttccatgtcgctgaagttttcacaggtgctccagggaagtatgtggagctgaaggaaagtgtgaagagtttccagggtgttttggatggcaagtatgatgacctccctgagcagtcattctacatggttggaggcattgaggaagtcattgctaaggccgagaaaatcgccaaggagtctgcttcataaggaggcttcttgcttgttgaatcctgtacaatcaagttccatttttggatttt

SEQ ID NO: 15089 - DNA, 439 bp, Zea mays
  unsure (1)..(439): unsure at all n locations; Clone ID: LIB36-009-Q1-E1-C9
gggtccacccacgcgtccggagatggtgtcatccaagaaagtgtgcgtggtcggcgctggcgtgtcggggctggcgtgtgcccgcgagctgctccgcgagggccacgacgtgacggtcatggagcagagcggcggcgtcggcgggcagtggctgtacgacccgagggcggacggcggcgacccactcggcgctgccggcgcgcatagcagcatgtacgcctccgtccggctcatcagcccgagggagctcacgggcttctccgacttccccttcttccccagagacgacggcaccggcgactcccggcgggtaccggggcacgctgagttcctgaggtacatcanggacttctgcgacgcgttcgggctcatggacgtcgtcaggctcaacaccaaggtcctgcgcgtccgcctgccggcgccgcgtgccgctgatgac

SEQ ID NO: 15090 - DNA, 450 bp, Zea mays
  Clone ID: LIB36-009-Q1-E1-D9
ggtccacccacgcgtccggagttccaggcctacacgctgaagcggataagggaccccaacttcaaggtgacgccccagccgccgctgtccaaggagttcgccgacgagaacaagcccgccggactggtcaagctgaacccggcgagcgagtacccgcccggcctggaagacacgctcatcctcaccatgaagggcatcgccgccggcatgcagaacactggctaggcggcttctcttcactcacctgcagagtgcaccgcaataatcagcttccggatggtggcgttttgtcagttttggatggaaatgccgaactggcagcgtctgttttccctatgcatatgtaatttcctgcctctttatattcactcttgttgtcaagtccaagtggaaaatcttggcatattatacatattgtaataataagcatcgtacaatctgcatgctgtt

SEQ ID NO: 15091 - DNA, 449 bp, Zea mays
  Clone ID: LIB36-009-Q1-E1-E10
gggtccaccgacgcgtccggaaggaggtccttcaccgtgcgtgcctctctccgcaaggccactgccaccgccgccgtggccgttgccgccagcgtcctgcttgccggcggcggcgccatggcccaggaggtgctgctgggcgcaggcgacggcgggctcgtcttcgagcccagccagttcaccgtcaaggccggcgacaccatcaccttcaagaacaacgccggcttcccgcacaacgtcgtgttcgacgaagacgatgtgccgagcggcgtcgacgcctccaagatctcgcaggaggagtacctcaacgcgccaggcgagacctactccgtcaccctcaccgtgccgggcacctacggcttctactgcgagccgcaccaaggagcatgaatggtcggcaagatcacagtcaactaaagctagctatccattccatgcatctcgatctg

SEQ ID NO: 15092 - DNA, 450 bp, Zea mays
  Clone ID: LIB36-009-Q1-E1-E12
gtcgaccgacccgtccgaagcaagaaagcaagcagcgagtacatacatactatgcagccaggcagccatggcgcccaccgtgatgatggcctcgtcggccaccgccgtcgctccgttccaggggctcaagtccaccgccagcctccccatcgcccgccgctcctccagaagcctcggcaacgtcagcaacggtggaaggatccggtgcatgcaggtgtggccggcctacggcaacaagaagttcgagacgctgtcgtacctgccgccgctgtcgacggacgacctgctgaagcaggtggactacctgctgcgcaacggctggataccctgcctcgagttcagcaaggtcggcttcgtgtatcgcgagaactccacctccccgtgctactacgacggccgctactggaccatgtggaagctgcccatgttcggctgcaacgacgccaccca

SEQ ID NO: 15093 - DNA, 436 bp, Zea mays
  Clone ID: LIB36-009-Q1-E1-E3
cacggcagctaacgacctgcagccaaccatctaccagcgactcagcgagcgagagcagcacacactgcacgcagctagctaggagcagcagcagcggcggcgatggcggcctccatgatctcctcgtcagctctggcggtggcgcctcagggcctgccgcccctcggccgccgcgcctcctccttcgctgtcgtctgctccaagaagaagatcaagaccgacaagccctacgggattgggggtggcctgaccgtcgacgtcgacgccaacgggagaaagggcaagggcaagggcgtgtaccagttcgtcgacaagtacggcgcgaacgtcgacggatacagcccaatctacaacgaggatgactggtctcccaccggcgacgtctaagtcggtgggaccactgggcttttgatctgggccgtcaccctcgctggga

SEQ ID NO: 15094 - DNA, 348 bp, Zea mays
  Clone ID: LIB36-009-Q1-E1-F5
gctctgccctctggcaaaatctggtgaccaaattgtgggtgaccaaactattttgcatgtgcctacttcgtcaaaacaacacgcgtagatcagtagaatatacaactaatacataaataaataattacatcatgggtgacaattcagtcgataagtgacgaccgtgtgaacagaacagcattcccggattacacagttaacagagctcgtgctctttctcagctaacagcacgcacattacacgttgacacaaacccgttcaaattagcttcgcatcttcaaaccaatcctgaaccgagtcaacaaaaatgccacaccttgggctgatcaccccaagatgcccgacaa

SEQ ID NO: 15095 - DNA, 322 bp, Zea mays
  Clone ID: LIB36-009-Q1-E1-G1
gggtcgagccacgcgtccggacaaacgcaacgtgatcagcgtcacacccttccgtacgatacacagactgaagtgctcaactgacgcaggtcgcctcgcagtggcaactgccgatcgatgcaacacataatcagcgcctgcagtctgcctcagacacagcgggccgccgcgctcctgccactgaggcgatcgctcaggcgccttccagtctcagcatgtgcgccgccgccgctgcgattggtactcaggaggagatgctaagaagaggataagcatcagcaataggccgatgagggaagcagccctgacaatcaggagcagg

SEQ ID NO: 15096 - DNA, 193 bp, Zea mays
  Clone ID: LIB36-009-Q1-E1-G6
cagacgcgtgggtttttttttgataaaattttctatatgccatatcaattaagtacattacatttaaaagacttatgcataacgaaaacaccaagcccggcattattaatccaagtccacaattccgaaattggaaagaaggatcttcaattgctgaacaaaatcagagcctgttgcgtactctgttagcaac

SEQ ID NO: 15097 - DNA, 386 bp, Zea mays
  Clone ID: LIB36-009-Q1-E1-H2
aagcaagcaagcagcgagtacatacatactaggcagccaggcagccatggcgcccaccgtgatgatggcctcgtcggccaccgccgtcgctccgttccaggggctcaagtccaccgccagcctccccatcgcccgccgctcctccagaagcctcggcaacgtcagcaacggcggaaggatccggtgcatgcaggtgtggccggcctacggcaacaagaagttcgagacgctgtcgtacctgccgccgctgtcgacggacgacctgctgaagcaggtgggctacctgctgcgcaacggctggataccctgcctcgagttcagcaagggcggcttcgtgtaccgcgagaactccacctccccgtgctactacgacggccgctactgga

SEQ ID NO: 15098 - DNA, 248 bp, Zea mays
  Clone ID: LIB36-009-Q1-E1-H3
gagttatacaaaggtttcatcaagtttcttaaagtacagcagagcttccatttcctacatgaccagatagccctagcaaagcatgcagctcctacaccaaaagccatccatgtttccccacgtactatccaagcgccagctcggcagcagcaatatatatgcacagtgcaagcaggtgaacaagcgcagctagtagtagccgatgtccttgtcgtccgagaagaggttcccgttgatgagctcgcggt

SEQ ID NO: 15099 - DNA, 465 bp, Zea mays
  Clone ID: LIB36-010-Q1-E1-A10
gctggcgtaccggtacggtagttccgggtcgccccacgcgtccgcccacgcgtccgcccacgcgtccgcccacgcgtccgcctacgcgtccgcaagcaagcaagcaagcagcgagtacatacatactaggcagccaggcagccatggcgcccaccgtgatgatggcctcgtcggccaccgccgtctctccgttcgacgggctcaagtccatcgccagcctccccgtcgcccgccgctcctccagaagcctcggcaacgtcagcatcggcggtacgatccggtgcatgcaggtgtggccggcctacggcaacaagaagttcgagacgctgtcgtacctgccgccgctgtcgacggacgacctgctgaagcacgtggactacgtgctgcgcaacggctggataccctgcctcgagttcagcaatgtcggcttcgtgtaccgcgagaactcagctccccgtgctacta

SEQ ID NO: 15100 - DNA, 207 bp, Zea mays
  Clone ID: LIB36-010-Q1-E1-A11
tcgacccacgcgtacgctcacatcttgccactcgctcgctcgatggtaacttaccttccacgaatcgcaacgcctatggtcatgtcgacgcatgcttccatctccacgcgctatctgctgtccgccgcatgtgcgcccggttcaacgactcagcagcttagcactgagttcgcgctgtccttgccgtccacccgattgtcggtcccg

SEQ ID NO: 15101 - DNA, 324 bp, Zea mays
  Clone ID: LIB36-010-Q1-E1-A4
tgattcttgaagagatcgagcttcttttgcaccacaaggtcgaggatgtcttgcaactgcggatcaagctgcggctgcggctcaagctgcaagtgcggcaagaagtaccctgacctggaggagacgagcaccgccgcgcaggccaccgtcgtcctcggcgtggccccggagaagaacgccgcgcccgagttcgtcgaggccgcggcggagtccggcgaggccgcacacggctgcagctgcggtggcaactgcaagtgcgacccctgcaactgctgatcacatccatcgacgaccatggatatgattattatctatctagcttgt

SEQ ID NO: 15102 - DNA, 359 bp, Zea mays
  Clone ID: LIB36-010-Q1-E1-B12
attgattaggagttcggcagagagaattatattatacatatgtaaattatcacattttgttcgtctatatagccttggtgtgcatgcaagtcatcgaacatgcagcttcttggatgcaataattgttgtgaacctagttgtgtagaaccttgtggtttaggttgctaggtgcccacaagatatgtattattcgtcagataagagttttctagcatcaggttcattttgtatctggttattgtcatattgcagtttttggtgatgggatagtcaacacaggtgtattctcagtttgaaaaaaaaaaaaaaaaaaaaaaaaaaaaaaaaaaaaaaaaaaaaaaaaaaaaaaaaaaagaaaa

SEQ ID NO: 15103 - DNA, 346 bp, Zea mays
  Clone ID: LIB36-010-Q1-E1-B6
gggccgacctacgcgtccacggacgcgtgggttttttatgaacaactggctagtaacatatacatgtatacatatttttttgcaaaaaataatgagtattcaattaaatactgaatacccttatttgcatccttacttgcatgtaagtccgccttaattaagacgacatagcatctaacgaccatcgcatttttatattagttacaacatactacaagtacaccatgcatcgcaccacgagcatttcatcatcatcatcatcatcgttgacagtctacccagtagtcagcccccaacataaacaaaaagttccagatcggccatcaaaccctaaaatgcatgcatg

SEQ ID NO: 15104 - DNA, 349 bp, Zea mays
  Clone ID: LIB36-010-Q1-E1-B9
aagggacacattgattcacatgcttgatgaggtcgtaaggaattgagaagatgatgtaagttcttgaatatgagcgtaatatcttctaccctacgagcatattgagatggtctctcaactaatatatctgccagctccaaaatatgcaattgaagctctctgttgagggtcctaagctccttcttgaagtcaatattgggaccctttggataaagctgacggacattatgactctccaagcttggaatcacaacatctcctgtgtaatcaacacccaaggctttgaatggttcatcaattggtggtggacgttctggtgcagatgatggatcttgctcaaattttttac

SEQ ID NO: 15105 - DNA, 239 bp, Zea mays
  Clone ID: LIB36-010-Q1-E1-C1
acgcgtccagtaacgtgtaccctccgtggcaagatgctggacggtggtgtatctgtgctcccggttggcgtcaacctgatctggtcttaagaaccccggtggcgacttgacatatgcaacggttaagtgctacatatgtcctgtgattgacgattctcagctgactacaatccattccgatcgccgtaccttcgtggttatgaatacttggtcactgccctaaacgtaccaatccaatc

SEQ ID NO: 15106 - DNA, 187 bp, Zea mays
  Clone ID: LIB36-010-Q1-E1-C8
ccatcctgtattattctgttccagggtttcacctttatcgtcagtgtgtggtcaggtttcaacccttctcagaacaaccccctcccagaaaaaaaacaaaggaagaagtttgtgtccaggtttcagaatcccctgtctgtaattaccattttgcatgacaataatgagatactgtagatattaataa

SEQ ID NO: 15107 - DNA, 211 bp, Zea mays
  Clone ID: LIB36-010-Q1-E1-C9
agatggcacaacaccatcatccagaccctgtcgggttgagtcgacggtccatcaggtcatgtggtccgagctgaaaggccgagactcgaagacagttcgtgtgatgcgttcttaatcgactgagggctaacgaatgtgacgtactggtatatgtacattaattgaagtggaggctataaagggtgtagagattgtttcatcagtaaagaat

SEQ ID NO: 15108 - DNA, 465 bp, Zea mays
  Clone ID: LIB36-010-Q1-E1-D1
ggtcgaccgaccgtccgcactgtccagtgcgcgcgtcaagcttgcttagctagccgccatggcctcgctcgccgccgtctccgtgaagcccgtggccatcaagggtctcgccggcagctccatctccggaaggaagctcgccgtcgccaggccgtcggcccgctccatccgcaggccccgcgcagccgccgtggtggccaagtacggcgacaagagcgtctactttgacctcgacgacatcggcaacaccaccggacagtgggacctctacggctctgacgcgccctcgccctacaacccgttacagagcaagttcttcgagacgttccgggctccttcaacaacagaagtctgctgcccaagttcctgctgctgggcggcggtcaagtctggcctacgttagcgcgtccgcgtcacgggcctcctgccgataactaggggactcaggaaccgccgaaccggggc

SEQ ID NO: 15109 - DNA, 352 bp, Zea mays
  Clone ID: LIB36-010-Q1-E1-D2
ggtcgacccgacccgtccggcgatcgacttgctaaaagtggttgtacaggtgatcgcttgaaggaaactcatgttcaagaaggacacatgagtatccgagaaaaaactcctcaaatcctggaatagcctcgatggttccagacggcgaacgaacggggtgaggaaaagaacccaccgggctgctgtccattgctcctagaagcatcgtgtcgtggatcggctttcgccgtgctccaactcggctggctcatgccccgtagccccgactccccatctgccgcctccacctcatgggccaccgggtccaccctcgccttcaaacttggcgacatctttaacgttggtgggcgac

SEQ ID NO: 15110 - DNA, 80 bp, Zea mays
  unsure (1)..(80): unsure at all n locations; Clone ID: LIB36-010-Q1-E1-D3
ggtcgaccgacccgtccgataaaataaaanatcaccactatgccaatgctacagctaggggctaagctccatcctaaagc

SEQ ID NO: 15111 - DNA, 394 bp, Zea mays
  Clone ID: LIB36-010-Q1-E1-E2
gtcgacccacccgtccggacgaagaagctgcaatgagtcctagatagcaaagggagcacctaatctgttattcaacttacaagagatgtgttagggtcaaatacgatatttgtactctcgcgattgccatgccggtgcctgtaaaaacgttgcggtttgtttgccacggtgaatgcttgtgttcctttgtcagctggatttgtcatcagctcataggaaaagaaaagaacttgtaaggtccagtgggcctgacgagcccttcaattttttttgttcactttgcagcctgaatcctaacaggcgagaatttcatctgaactgtgatattacacagaactcttggtttctagagactaattttagtccctccattttaaaaaaaattggttacaag

SEQ ID NO: 15112 - DNA, 314 bp, Zea mays
  Clone ID: LIB36-010-Q1-E1-F1
gtcgacccacgcatccgcttcaggaatctggggtttcttaagtggtttattttaagtcaagcgatctgctgtacggcgatgcagtcctccttggatatttttatctgataatggatgtaatatggttcggaaaatatccgttcggatcatgattcaaagatggtgaacattggttcagatggaattttcggatatccggacttttttcggataacggatactaatactaatattttgttcggatatcgaattcgaatacaatatgtctgacattcgtcggatatcgaatatctggatattttctcggataaatc

SEQ ID NO: 15113 - DNA, 76 bp, Zea mays
  Clone ID: LIB36-010-Q1-E1-F10
taaaattgctcctctggagcttcgttccgcagttttgtacaaatatgttttaggtgaatggaaggttatgggccgc

SEQ ID NO: 15114 - DNA, 345 bp, Zea mays
  Clone ID: LIB36-010-Q1-E1-G1
ggtcgacggacgcgtccgcaagaccaacatcgcttccaggcccaaggaggagaagaagagcctcaatgagctcaccggcaagctcttcagcaccatcgaggatcttgaccatgccgcgaagatcaagagcacccctgaggccgagaaatacttcgcagcaatcaaagatgcgcgtggcgatgttctcgccaagctaggctagacgcaatggctaataatggccatgtaatttcggacttgtgtttgttcatatggacccggcaaggcaatgtaccagtttctgttgatattgtatcaggaagcacttaactacaatgctaacctgagtccttgacaaattgctgt

SEQ ID NO: 15115 - DNA, 422 bp, Zea mays
  Clone ID: LIB36-010-Q1-E1-G12
tgaggttatgtgtatttgtgtgcaagtgtggcgaaaagaaagattctagagtttggtgggaaaggaaagctctatcacgacgaccaccaggtacgctagatgattatgtgaattggagggcatggatcaggatggatcacaacgtggctttgatgaacccatctctatagggacgacttaatcaagtgtcaggattgttgatgctcaccaagcggacgtcatctaaccacactaacctaatgttatcccaggttagaattttgttctgttgtggatgctgctaagtgccggtgggctcggccttcttatataagtatatcgcatctttagcttctttattgaagattgtcacttaatctagcatgtagtttaaaacttagaactgttttatacattcaaattgcaatcgtttgaatcaattt

SEQ ID NO: 15116 - DNA, 190 bp, Zea mays
  Clone ID: LIB36-010-Q1-E1-G6
cccgagcaatgtgaatgcgtcgagtactatatatctgttttctgcatctacatatatataccggatcaatcgcccaatgtgaatgtaataagcaatatcattttctaccacttttcattcctaacgctgagctttttatgtactatatcttatatgatgaataataatatgaccgccttgtgatctaaag

SEQ ID NO: 15117 - DNA, 338 bp, Zea mays
  unsure (1)..(338): unsure at all n locations; Clone ID: LIB36-011-Q1-E1-A10
agtgagtcgtattaaatnataccactccctacagtgagtcgtagtagcggccgaggtacaggacacaggcactcctttgtctggtagagacgaggaggggaaatggagggattcgaggatacaagggatggcactgagggatgcataagtcccctgcctcccttgtctcaacatgttctcctctgcgagcccagtcagcttggggagctaagtatcagaatcctgaaggattcaagccggctttgtcctactagtgtctagaagtctctgtcgtgagatcctggggctcctcctatttctagaagggatgacgtggcatcaacaataacttcgctggg

SEQ ID NO: 15118 - DNA, 219 bp, Zea mays
  Clone ID: LIB36-011-Q1-E1-A11
tcactccctaaagtaagtcgtattaattagtaccactcccgatcgagagtccttcgtatctagaggcgtataacctacgcttgctgatccgcctcatgcatcttagtctacaagtgttcggaatgggtctgtgtagaatgctgctctagaggatggtaaagcctcaggcgtggtcacatcctacaaccgcgacttcacttgtcataaagtgggtgattc

SEQ ID NO: 15119 - DNA, 417 bp, Zea mays
  Clone ID: LIB36-011-Q1-E1-B12
acgcgtccgattcaagtctcgctacgtagcagtgcaataaaaaaagcagccgcaatggcgagcagcaccatggccctctcctccacggccttcgccggcaaggccgtgaacgtgccgtcgtcgtccgccttcggcgaggcccgcgtgacgatgcgcaagacggcggggaaggccaagccggcggcggcgtccgggagcccgtggtacggccccgaccgcgtgctgtacctgggcccactgtccggcgagccgccgagctacctgacgggcgagttcccgggcgactacggctgggacaccgcggggctgtcggcggacccggagacgttcgccaagaaccgggagctggaggtgatccactctcgctgggccatgctgggcgcgctcggctgcgtcgtcccggaggtggtcgcccgg

SEQ ID NO: 15120 - DNA, 69 bp, Zea mays
  Clone ID: LIB36-011-Q1-E1-C9
tcgccacaccctaaagtgagtcgtattaaatactgccactctctaccgtgagtcgtatcaggccggggg

SEQ ID NO: 15121 - DNA, 65 bp, Zea mays
  Clone ID: LIB36-011-Q1-E1-D11
cgttggtcgtcgtcactccctgtagtgagtcgtattaattgctacctctctctattttgcgtcgt

SEQ ID NO: 15122 - DNA, 485 bp, Zea mays
  unsure (1)..(485): unsure at all n locations; Clone ID: LIB36-011-Q2-E2-A4
tcggctatccagggtcgaccacgcgtccgcggtagcgtgggtggacaccttcatcagcaccctcaacgagctctactgcagcacacttgcagcacactgtagcacacatacaccaccagcaaacactcttgacgacacttcctccttcacgacattcatcatgacccattccacatcacacagcaagaggcgcaccaggaccgcacactcgaggaaaccatggtcctggctgggcttgaccacagctgccctcttcatgacctcgctccctctcctggccgccgcagcgccgtcatcacggctggtcaagcgcgccccggtcgagtacattgccgactcggaaccgacgatcgagctcacgtttgaggccaatgactcgtactaccttcaagccctgaccctcaaccaatgtcagaaccagctcgtcctgcncgagaacgggacgcatggtcgctcttactacgccatcgacacgccagagattg

SEQ ID NO: 15123 - DNA, 371 bp, Zea mays
  Clone ID: LIB36-011-Q2-E2-B10
aacaccctatagtgagtcgtatattcacctctctgctcaccatctcatcaactctccaagcatgacgcaactcccacgccccccttcgggcttctcatgccgatgcgttaggcgcggcattgatgaaaactacgatggtgtcatttaccagtacgcctcaagctcctatgttaaagaaggatatatcgaacccagagccgtgatctatcctaccgatgacgaggacgtcttcaaggccatcgagtacgcgagaaccaacgatgtctgaatcgcgatccgtaccggcggccacagctactgcggctcttcctcgaccaatggtgccaacatccagctggacctgtcgccgacctacacagactttcactggg

SEQ ID NO: 15124 - DNA, 485 bp, Zea mays
  Clone ID: LIB36-011-Q2-E2-B11
tcgtagtacgacccaagactctatactgagtcgtattacacgacccacggaacacggtatcgaccacgcgggcctgagcatgtcaggggtcgtctttgcttcaagcgcttcatttagcgctttttggtgcaacaaccaccggacttgttcaaactgtgtacaaggaaagccaggcatatccagaaaggacaaactactgacagcctggtgattatcgcccccacttagtactacacgaaaaagtctcttgcaagatatacatatctcggatgacttaccctaccccagggagttcgcctcaagattcgcatgcgaaacttaagtcctcgccagcagggtcaggagtcaactctatcaagacaaactcactttctgcacatggaggacagagcgacaacatggacctgatattttccagattgcagaacgagctcctgcgctcacaggagacctatgctgatcttgggtttttaaagcagggatta

SEQ ID NO: 15125 - DNA, 474 bp, Zea mays
  unsure (1)..(474): unsure at all n locations; Clone ID: LIB36-011-Q2-E2-B12
gtcgacccacccgtctgcccgtctcgacgataaacatcctccgtggctcggcgccggatagccctaacaagagcggtgcgtcctcgagtgctaagcattcaatcgcatattgtttctggttactgtgggaacaaagcggcgacatttccgctgcagctgcttggattcgatgttgatgtcatgaacaccgtcagcttctccaatcacactggatatccgtcgtggacaggcgaaaaggcaacaggcgaacaacttaccaagctctttgaagggcttgaggcgaatggcctcgtagagtacacacacattttgactggttatattggtagtgcccagaatctgacagctgttacagagattatttcccagctgaaggcacagagcaatccgttctttgttctagatcctgtcatgggcgataacggacaactttatgttcaaccagatgtgattccaatttacanggagcttatg

SEQ ID NO: 15126 - DNA, 476 bp, Zea mays
  Clone ID: LIB36-011-Q2-E2-B4
tcgacccaggcgtccgcctcaccccacccttccctccgtcaccgcaccttcctcaccctctcctcctggtgcccaacctgtctccataaagagctcgttccgtatcctgaacagtctgttcaaccagaaagtgaccaagaaccaccgccatgtctgaaaagatcgaagacgcccagaccaagggtaagctcgaggtcgaagaggctgtccaccacgagcacgccgatgagatctcgcccgagctcgaggccctcctccagaccgaccccaagcagggtttgtccacggaggaggccgccaagcgtcttgcccagttcggccccaacgagctggctgaggtcaagcgcaaccccttcctcaagttcctgagctacttcactggagccatcgcctactttattgaggtcccctgcaccatttccgccgttgtcaacgactggctcgatttcggtattattctcgggctgttgcttgtc

SEQ ID NO: 15127 - DNA, 480 bp, Zea mays
  Clone ID: LIB36-011-Q2-E2-B5
gggactcgtggttcgtcgcaatactctatagtgagtcgtatcacacacgcacaccaaaacgtatacacacagcacacacacacaccctctctcttctctctgcttattctctggcaaccaaccagaccaacaatccatttctcagaaccctcctatcttcattctcattatcaaaccatgactacactcgccccactccggacgtccttcggaccccatgctcagcccacggcgaccaaggccgtccagtcgctcttcaacaccctccaccataccacctatgcctctcataagcgcttcctggcatcctcgtaccactcgacggccacgaccggctttgcgcgaccctgctcgatcctcaccccggcctcgacgatccgataccgtcaagagtccagcagcatgcagcttcatcagcaacagcaacaacaacaacaacaacaacgtcaacagagccaacgacgagccctctcgttgttt

SEQ ID NO: 15128 - DNA, 433 bp, Zea mays
  Clone ID: LIB36-011-Q2-E2-C11
tgctatccttttctttcccgttctacagccgtctggtcgcccacgtccgcccttgccaccacccgcagccttctctgtccccgcactgctgccacacgccttcgacgcaaaactcaggtcccttgtaagggctcagcgctagtggatacacagctacactcccacactctacatccaatacagcttcttcacaggcgaactggctgcaaacacttgtcttagatgtcaacctcgctggagataacaccgtttgtgaggcgccctgctcctggcaaggcgggtaagcctattgccatccgctccaactttttcgaagtcctgcaactcccggacatcacagtgcatcactacgacgtaacgattacgccagacgttccacctccagtgaaccgcaaggtgtttacgcaacttctggaaacctaccgcgactctg

SEQ ID NO: 15129 - DNA, 476 bp, Zea mays
  unsure (1)..(476): unsure at all n locations; Clone ID: LIB36-011-Q2-E2-C12
gtcgacccgcgcgtccgcggacgcgagggacaatatgaagttgaacattgccaacccagccactggctgccagaagaccatcgacttcgatgatgagcgcaagacccgcatcttttacgacaagcgtatctccgctgaggttgccgtcgactctctcggtgacgagttcaagggctacgtcttccgcatcaccggaggtaacgacaagcagggtttccccatgaagcagggtgtcctcctcccttcccgtgtccgcctcttgttgtccaagggtcactcttgctaccgcccccgccgcaccggtgagcgcaagcgcaagtcggtccgcggatgcattgtcggttccgacatgtcggtcctctctgtcaccattgtcaagcagggtgagcaagacctcnccggtcttactgacaccactgtccccaagcgtctcggacccaagcgtgccaaccacatccgcaagttcttcaacttga

SEQ ID NO: 15130 - DNA, 475 bp, Zea mays
  Clone ID: LIB36-011-Q2-E2-C6
tcgtgggtcgacccaagactctatagtgagtcctatcatcccgcccacgctggcgagtgaccaagtggtgtcgagtcttggagccatgttctttttctgctccatgatggtcatctttatttgcgtgctcaaccagatcgtcaccgagaaggagctccacctccggcacagcatgcagatgatgggcctcaagacactcgtctactggttctcgtggtggctctcgaacgctgtcctggtcctgatcagcgcagtcgtcatttgcggctttggaatcgcgttcggctttagcgtgttcaagaacagcaactttttggctcttcttgtcacctttttcctctttggactgtccatggtgaccatggcgttctggatcaccaccatggtcaaggcaagcaggaccgccatcgtgatcggcatctttttgttcaccctcggaatgctccttgagagcatggtgttctcgaacagctac

SEQ ID NO: 15131 - DNA, 482 bp, Zea mays
  Clone ID: LIB36-011-Q2-E2-D1
gtcgacccacgcctctgccatctcatcatcctcatcttcattcatcatgtcttggcaatcatacgttgacaccaacctcgtttccaccggcaaggtctccaaggcctccatctttggtctggacggttctctttgggccaccagccctgatttcaaaattggaggcgaggaagtcaagaagctgattgccgctttcaccgacatttccgatatcgctgctaatggtctctacttggagggtgccaaatacgtgttcttgagaaacccggacaatagcatttatgcccgcaacggtgccaccggtgtctgctgcaccaaaaccagccaagctatcattgttggctactacagcgagaacatgcagggcggcgattgcaaccaagtcgttgagactttggcccaatatcttgtgggcgctggttattaaacatgttcaggccccaagtcccagggtcgaacaggtccatgttctcaatcatata

SEQ ID NO: 15132 - DNA, 419 bp, Zea mays
  Clone ID: LIB36-011-Q2-E2-D4
gtagtatgtccaacactctatagtgagtcgtattatgctaacgcgcatgcctggcatctcgtcgcggcaacaatcactcttctcctgtcccagctagccgggcgtttgttcgcattcactcttccactaccgcttaccgccaatctgctccacagtagccatccgcctctctccattcatcgacccacacttccaacccgccatggaggaccacgaattcgtcaattatctactggaggtggaacaccctatcagcggtcggaaaggtgtcccccacgttcttatttcaggggcgggcttgggaggcctcttcctggccatcctcctagaggaggccgggatctcctacactatcttcgagcggtccagggacatcaggcccataggggctataatggcgttgtcggccaacatcttac

SEQ ID NO: 15133 - DNA, 468 bp, Zea mays
  Clone ID: LIB36-011-Q2-E2-E4
ttcgtcccaagcctctatactgagtcgtattaattgcccctactttcactctccctccactaacatctcagaagacaatgtcctcagtaacagcatcgcccagggcgcgttctctcggatgcccgcctgtctacctgctggtcgtcctctccgcactcttcaacttcattgtccaagcggcccctatctccaccagtgccaagaagcccaatgatgataacgacaacattctacgcaccgctcgcgatggtccatacaatctcactgtccaagccggcatcgcaggagccatcctgatcgtctttggcctcatcctctgcttccttggtgtccgcttcttccgcgtgtgcatgttcttgattgggttctacttctttgccaatgtctcgtacatcggcatgtccaatggcggggtcaccaacttctacctcctgctcgtcatctcgatcgttgtccgtatcctcggtg

SEQ ID NO: 15134 - DNA, 483 bp, Zea mays
  Clone ID: LIB36-011-Q2-E2-E5
cctggacgtaccggtacggaactccgggtcgaccacgcgtccgcggaagcgtgggtctcacccgtcctagtccccttcaacccccctctttgacaaagacaacaaaccatggctgctgctcccagtgtgaggacgtttactcgggccgaggttttgaatgccgaggctctgaatgagggcaagaaggatgccgaggcacccttcttgatgatcatcgacaacaaggtgtacgatgtccgcgagttcgtccctgatcatcccggtggaagtgtgattctcacgcacgttggcaaggacggcactgacgtctttgacacttttcaccccgaggctgcttgggagactcttgccaacttttacgttggtgatattgacgagagcgaccgcgatatcaagaatgatgactttgcggccgaggtccgcaagctgcgtaccttgttccagtctcttggttactacgattcttccaaggcatactacgcc

SEQ ID NO: 15135 - DNA, 438 bp, Zea mays
  Clone ID: LIB36-011-Q2-E2-E6
tgggactcgtgggtcgacgcaacactctatagtgagtcgtactatttgtcactgaagtgttttcattcttcttcagtgcccgttctgtatcttttgttctgctgtcccttttcgttgttgttttttactctcactctcactctcactctctcacgcaatcgctctctcacacttgactacgtctgtgctctttcctttttgcccacttgtctgttttgagttgaacatttctgttctttttgtgaagttgcacctttttcttaattttccttatttctgagcaatgtctgcatctaaccattcgcgcaagaccggagtcgtcaagttcttcaacagccagaagggttttggttttatcagtccccacgacaaggcaccggataacccccagggaaactccgactagatctttgtccaccataccgccattcagaatga

SEQ ID NO: 15136 - DNA, 470 bp, Zea mays
  Clone ID: LIB36-011-Q2-E2-E8
ccgggtcgaccacgcgtccgtcacacaccccctcccctcccctcctaccctacacctaacacccttccgccgtcctcgtcgttgaccctcattcaccctccttggatccgattaccttacattgttcatttctctcgagccgtgatttccattaagcaccaacttacaccatggacaaatccgaggtgtttaacgaaaagactcttgcagaggagaaaaaagatatccatgatatcgagccccagatagatctcgatgaagaggatgactctcctattgaagaggtccgggtcaccgttacaaacacggacgatcctagcctgccctacaacaccttccgcatgtggttcctcggcctcaccttcacggctattatctcgttcgtgaacgagttcttctatcttcgtcaaacgaccgtctctatcggctattcagtcgttgctttgatctccctgcccatcggacacttc

SEQ ID NO: 15137 - DNA, 498 bp, Zea mays
  Clone ID: LIB36-011-Q2-E2-F12
gcggtccggaactcaagggtcgacccacccgtccggttcacctcacacgttcgcacacctcctctcttcctctcttcctctcattccttcttctcatcccttcttcactgcacaccatgctggcttcaattcacgagaaggtctcgtccttggtcaaccgtcatagagacaccatcggcaaggtggtcgaccctgcgcttgtacagggggccgtcgacaaagccaacccaagcaagaactgggactataccatcactttcaagggcgcaaaggacgtcccccgcggcgatatcctctcctccgatccgtttcttgaggcctatgtgggtgccccagaggacccccagaccttggctttcgtcactggcattcactggaatacactgaatcctgtttgggatgctgtgtgggaactgctcaacgttgccgatgatactgtgttggacctgcacatcaaggacaaggacaagatgaaggaggacacccctcttggcaagg

SEQ ID NO: 15138 - DNA, 393 bp, Zea mays
  Clone ID: LIB36-011-Q2-E2-G10
ggagttagaatgctatgaattccaaaccagagaagattcacataaaacagagactaaaaaggctgttcaaacagtaataattcttgcacatgaacactaaaccagaacgataacaggaaacaaagatacagtcagtactcagtagtttgagggcacctacggaaagcaagtaatactacagagggtagacgttccaatgcttaatgatgaaacatcatcagtacaagcaaacgtgtttttcatcatacaccgtatcactttcacaagtggctgcagtcattccgcagcataaggagattgacttcgagaagcagcatcaactttgcgcagaggagcaaggctaccaggagatggggacctctcattgctacgcctttcaagagacatctcctt

SEQ ID NO: 15139 - DNA, 431 bp, Zea mays
  Clone ID: LIB36-011-Q2-E2-G12
ggagttagaatgctatgaattccaaaccagagaagattcaattataacagagactaaaaaggctgttcaaacagtgataattcttgcacatgaacactaaaccagaacgataacaggaaacagagatacagtcagtactcagtagtttgagggcacctacggaaagcaagtattactacagagggtagacgttccagtgcttaatgatgagacatcatcagtacaagcaaacgtgtttttcatcatacaccgtatcactttcacaagtggctgcagtcattccgcagcattaggagattgacttcgagaagcagcatcaactttgcgcagaggagcacggctaccaggagatggggacctctcattgctacgcctttcaggagacatctccttagaatgagaggccttttgcaaagcaaggcttcttgggc

SEQ ID NO: 15140 - DNA, 474 bp, Zea mays
  Clone ID: LIB36-011-Q2-E2-G2
gtcgacccacgcctctgctctagtcctcggcagacgctctggcgaccacaaggatttccgccctcactccatgagcaacgtcgtcatcggcacttgcttcatctggttcggctggtttggattcaacggtggatctgctctttccgccaacttgcgcgccgccatggcctgcgtcgtcactaatctcgcggcctcggtcggtggcatcacatgggtccttctcgactaccgccacgatcgcaagctgtcagtccttggattctgctcgggtgctgttgctggattggtctctatcacccctggctccggctacgtttctcctgcatcaagtgttgccattggattcttgggcgcctgtgcttgcaacatggcagttcgcctgaagcactacttgaagtacgaccatgcccttgaagtccttggcgttcacggtgtgggtggaatcgtcggaaactcctgaacggtgtctttgcc

SEQ ID NO: 15141 - DNA, 389 bp, Zea mays
  Clone ID: LIB36-011-Q2-E2-G4
ggagttagaatgctatgaattccaaaccagagaagattcaaataaaacagagactaaaaaggctgttcaaacagtaataattcttgcacatgaacactaaaccagaacgataacaggaaacaaagatacagtcagtactcagtagtttgagggcacctacggaaagcaagtaatactacagagggtagacgttccagtgcttaatgatgaaacatcatcagtacaagcaaacgtgtttttcatcatacaccgtatcactttcacaagtggctgcagtcattccgcagcataaggagattgacttcgagaagcagcatcaactttgcgcagaggagcagggctaccaggagatggggacctctcattgctacgcctttcacgagacatct

SEQ ID NO: 15142 - DNA, 415 bp, Zea mays
  unsure (1)..(415): unsure at all n locations; Clone ID: LIB36-011-Q2-E2-G6
cgttccatcaccttctattcaccatgagcaacccgcgttaccccgccggcaactaccacaacaccaagcctgacggcacgtactactacacaaactcgtcaaaccccaactcgtactactacaacaacagcaacggctcctactactaccagaacgccgacggctccaagtactacaacaaccccaacaccggcacctcccgctacaccaccccgagtggctatgaaatcaacaccaaaggtggcagaaagtattaacgggctttcttttcgtggccaatggctctattaacctatgccataatctctgaggccacccaagcatgacaaaggctaaccctgcccgctatttacctgtatatcgaatanaacgacanacgaaaagaaaaaataaagccttcttgtcctacttcann

SEQ ID NO: 15143 - DNA, 482 bp, Zea mays
  Clone ID: LIB36-011-Q2-E2-G7
cgcgggtcgacccaagcgtctaaatttcatccatcaccatcgcgctactgcacgctaaaactcaacatcatgccaggcgaacacgaaaacatcaccatgttccagttctttgaatggtacactcctgcagacaggatgcattgggtccgcctcaaggaacaggctagcctgctgagctctctcggtctatcggctatttggatcccacctcccatgaaaggatgctccgaatgggatgtaggatacgctccctacgatctctgggactttggtgagttcgaccagaagggcatggtaccaacaaagtacggcaccaaagacgagctcaaggcagccattgacgagtgtcacaagtatggcatgaagatctaccttgacgccgtgctgaaccacaaggctggtggtgacgagaccgaggtcttcaaggctgtagctgtggctgacgatgaccgcaaccgcgagattgaagagcccatgacatc

SEQ ID NO: 15144 - DNA, 429 bp, Zea mays
  Clone ID: LIB36-011-Q2-E2-G8
tctcactctttcttcattcctcgcgctttcacattcagattcttgcattcacctgttcattcgcttgacttgcttgttacccactccacctcaagaaggtttattgacaagcgcgcgacttctgtacccctgtgccgcgtgtgcccagctcttgtatcctttgtgtcatttttccatcctatcaagctctccaacaaccctcgcacagtcctccatactttggcaaacagtggacttagttctgacgagagcatatatataagcgccacagacaacatcaagccctcgtcctcaaaacccgccctcctcgagtccacaatgccgcccccacctgacattcctctgacagagacagaagcactactgatcgaagcctacaacaggattctaaacgaaccctttgaggacaagtacgaagatctttgggag

SEQ ID NO: 15145 - DNA, 400 bp, Zea mays
  Clone ID: LIB36-011-Q2-E2-H11
ggagttagaatgctatggattccaaaccacagaagattcaaataacacagagactaaaaaggctgttcaaacagtaataattcttgcacatgaacactaaaccagaacgataacaggaaacacagatacagtcagtactcagtactttgagggcacctacggcaagcaagtaatactacatagggtatacgttccagtgcctaatgatgaaacatcatcagtacaatcaaacgtgtttttcatcatacaccgtatcactttcacaagtggctgcagtcattccgcagcataaagagattgacttcgagaagcagcatcaactttgcgcagaagatcatggctaccaggagatggggatctcgcattgctacgcctttcaggagacatctccttagaaaga

SEQ ID NO: 15146 - DNA, 451 bp, Zea mays
  Clone ID: LIB36-011-Q2-E2-H12
ccctctgctacgagtcacttcacatccacagctacaatcaggacaacgccaagggcgcgctaggacacaccaggagacatgcttcacgagcttctcgtcaccctctcgggatacccgggcgacatctttcgcccattcccacaggagccagaggttgcaaccacatttgctgtgacagactttcccatgctgcatcctgccgagaaggagggtctcgatcgactggcacagctcggcttctacttcaaagagttcaacgccttcatagcctcttgcaggtcttgctcctaccgctcttcgccgacacacggcactccggctcactcaccacctggactttacctgacggccctcgcacactcgttggaaaagaaacttcagacctatcggcgagttattgtcgacaccgagtctgccattctctctggagaggataacttaggacgcatag

SEQ ID NO: 15147 - DNA, 328 bp, Zea mays
  Clone ID: LIB36-011-Q2-E2-H2
gcgtagtatgtcgcaacaccctatagtgagtcatattaaccatttctttttttttggagttataatgctatgaattccaaaccacagaagattcacataagacagagactaaaaaggctgttcaaacagtaataattcttgcacatgagcactaaaccagaacgataacaggaaacaaagatacagtcagtactcagtagtttgagggcacctacggaaagcaagtaatactacagagggtagacgttccagtgcttaatgatgaaacatcatcaatacaagcacacgtgtttttcatcagacaccgtatcactttcacaactggctg

SEQ ID NO: 15148 - DNA, 417 bp, Zea mays
  Clone ID: LIB36-011-Q2-E2-H4
ttcagtctcctaacacgactctaccagaccggctcccccattctctccctctttcagcaccctcgctctccctctcaatcctttgcaaacatgcgtgaagttatttccatccacgtcggacaggccggtattcaaatcggtaacgcctgctgggagctctactgcttggagcacggcatctcgcctgacggtaccgttgcctctgacaagcagtcttctcagtttgactcctcctccagcaccttcttctcggagactggtgccggcaagcatgttccccgtgccatctttgtcgatcttgaggagaccgttgttgacgaggtcagacgcggcacctaccgcagccttttccaccctgagcagttgatcagcggaaaggaggatgctgccaacaactatgctcgtgggcactacacc

SEQ ID NO: 15149 - DNA, 414 bp, Zea mays
  Clone ID: LIB36-011-Q2-E2-H8
ccgggtcgaccacgcgtccgctttcaatatgagcagcaaaattcaggtttcggccgtccgcgagagcgttcgcaccgtcaagctccagtccgaggagaagaagcgtaactttgttgagaccgttgagctccagattggactcaagaactacgatccccagcgtgacaagcgtttctctggctcggtccgtctccccaacatcccccgccccaagatgtcggtctgcattctcggtgatgcccttcactgcgaccaggccaaggagatcggtatggagtaccagtccgttgatgacgtgaagaagctcaacaatgacaaggagcagattagaaagctccgcaagaagtacgatgccttcctccgctccgaaggcctggatcaagccaattcccccgtctcttggggacctggtct

SEQ ID NO: 15150 - DNA, 471 bp, Zea mays
  unsure (1)..(471): unsure at all n locations; Clone ID: LIB36-012-Q1-E1-A1
ttacgcctgcccgtaccggtccgaaattcncgggttgacccacgcgtccgcttcaacaggaatttcttgaccatggagttctcactcttctaaaaaactggcttgagccattacctgatggaagcatgccaaacatgaatactcgatctgctgtactgaaattattagctgattttccaattgacttggaacaatatgaccgaagagagcagcttaagaaaagtggcctgggaaaggtcattatgtttttgtccaaatctgatgaggagaccactgcaaataggaaattggctaaggagcttgttgataaatggagtcgaccaatattcaacaagagcacgagatttgaagacatgaggagatatgatgatgaaaaagcaccttacaggcggccacaaatgaagaaaccatccagtaactccggaatgggatccagagatgatgatgttgaagctgacctttcacaacgca

SEQ ID NO: 15151 - DNA, 409 bp, Zea mays
  Clone ID: LIB36-012-Q1-E1-A2
gggtcgacgcacgcgtccgcacacacaagacacacccccactcacccggcagggacgccctcttcgtcggcggaggccatggtttccctcaagccgcagaagacgctcgccgccggagtcctaaaatgtggcaaggggaaggtgtggcttgaccccaacgaggtctacgagatctcgatggctaactcgcgtcagaacattcgtaagctggtgaatgatggattcataattaagaagccacagatgatccactcaaggtcccgggcaaagatggcccatgaagccaatcagaaagggatgcactctggttacagttagcgcaagggtaccagagatgctaagctccccaccaagatcctttggatgcgcatgatgcgtgtcctcaggcgtctgctgcgcaagtatcgtg

SEQ ID NO: 15152 - DNA, 77 bp, Zea mays
  Clone ID: LIB36-012-Q1-E1-A3
gtccgagactcacgggtcgacgcacgcgtctaaacggagtcgtgttaccattggatttcaactctagagttgaaaca

SEQ ID NO: 15153 - DNA, 464 bp, Zea mays
  Clone ID: LIB36-012-Q1-E1-A4
gtccgagattaccgggtcgacgcacgcgtccgaacgaagtgcgagcgacccacgtccacacgacacgaaccaccaccaccaaccagcagccgcaccacgcacccagcgcaaagcgatggcgtcgctcaccatgatggcgtccttcgccgccgtggcggtggccgcgccctcgcgccgcggcaccttcgccgtggtcaggtccgccaaggtcgaccgctgccaggagcccgccacgctagcagcaaccgaggccaggcccgccgccgacggacgccgcgccgtcatgctcgcggctgctgcggcggccgtggcagccatcggcggcgccggcgccgccatggcgggccccaagaacgggacccccgaggcgaagaagaagtacgcggccatctgcgttcacatgcccaccgccaaggtctgccacaactgagcacgcccgcgttgcagctgcagggccggggggt

SEQ ID NO: 15154 - DNA, 429 bp, Zea mays
  unsure (1)..(429): unsure at all n locations; Clone ID: LIB36-012-Q1-E1-A5
tgcaaggagtcgcagtggccccttggggtggtgttgcagcaggaaatgcaaattcttatcctgcctggggaaaccaacaagttggaaacatgaaccaaaacgttcgatggagtgctcctgtgcagggaaacccgagtcaggaaaataacaacatgaactggaatgcaccaaatggtaatcctaataattggaataatcagcagagagagaatgagggcaggcactctggacaccgtggtgcttttagtgctggcgactcaggcagaaagtcatggaagccacgctctggtgccgatggggggtcatgggggacatanaggagtctgctatacatttcttgaacgcggngactgctttaaagttgactgcaaattcgcccattcaacanacacaganggatatccatccatccaggattcgggcaacgag

SEQ ID NO: 15155 - DNA, 241 bp, Zea mays
  Clone ID: LIB36-012-Q1-E1-A6
gcaagcctctatagtgagtcgcattatggccccttggggtggtgttgcagcaggaaatgcaaattcatatcctgcctgcggaaaccaacaggttggcaacatgacccaggacgttctcgggagtgctccggtgcatggaaactcgattcacgacaacatcaccatggactggtatgcaacagatggtagtcccaataattgggataatcagcacagagacaatgacggcatggactctgga

SEQ ID NO: 15156 - DNA, 459 bp, Zea mays
  Clone ID: LIB36-012-Q1-E1-A7
ttcccggggccacccacgcgtccgaacgctgtgaagtcagtcagcttcagcaccacgagcacgatggccctcgcgctcgccacgaccccactcgcgcatctcgcccttgccccgccctcgatcttcggctcccagtcctcgctgctgctgctcccgcgccgcgcgtcgcccgcccccgtctccctctcccaccgccgcatcatcgcggccgtcgcgaccaaggaacccgagctcggcggcggcggatcgggggccggcgacggtgccggagggagcggcggcggcagcgacccgaggggaggagggcaggaaggagacggggaggaagagaagatggggcagggcctgtccatgtcgcagaaactcaccctcgcctacgccgcgctcgtcggagctggtggtgtaatgggatatatgaagagtggaagccagaaatccttggctgcaagaggcatatca

SEQ ID NO: 15157 - DNA, 371 bp, Zea mays
  Clone ID: LIB36-012-Q1-E1-A9
cccgggtccacccacgcgtccgtgcacgcatgcaagaagcacacgcgagcttggacgagcacatctcgagatggttcgggctggaccagtccaagtaccagtgggcgctcaacgactattatgagaggaccgggcaggagatagatttgagcaacgttggcactcgttagcagcacagttgtaaaaattcagaaagcttgaaaaagtggattatttctagtttttatgtgtgtaactaagctggtgccgtgtcaagctgcatatagaatccttttggttgcgtgaagactgagttctctttttctgcacccggaagctcttggttgtaacaaatccatatttagcacctttattgtagcttcgttgtggat

SEQ ID NO: 15158 - DNA, 347 bp, Zea mays
  Clone ID: LIB36-012-Q1-E1-B3
gacggttttaatgtcgagaaggttcagtataagaatgtggcattcactgtgtgggatgtgggtggacaagaaaaactcaggtcactgtggaagatgtacctgagtaattctgatgcactgatctatgtcgttgattctctggacagagaaaggatcagagatgcgaggcaagagttccagaccattatcaaggaccctttgatggcaaacagcataatcttggtatttgcaaacaaacaggacctgagaggcgcgatgagcacggacgatggtcagcgaaggctggggctgcatgacctcaggaacaggatctggcacatacaggggaactgcgcgctccgcggcga

SEQ ID NO: 15159 - DNA, 462 bp, Zea mays
  Clone ID: LIB36-012-Q1-E1-B8
gtaccgatcctaaattcccgggttgacccacgcgtccggatatcctttttgctcaacaaacagcagagaacattgcagcactccttacaccacagtccggggcttattatgacctgtgggtggatggcgagaagataatgtcagctgaagagcctcctgaggtgacaaaagcccgcaatgacaactcgcatggaacgaacttccctgactctccggaaccaatctatggcacccagtatctaccaaggaagttcaaggttgcagttaccgcggctggtgataactctgttgatattctgaccaatgacatcggtgttgttgttgtttcagatgatgcaggagaacctattggctttaacatctatgttggtggtggcatgggaaggacacaccgagtggaaactacattccctcggctggctgatccattgggttatgttccaaaagaagatatattatatg

SEQ ID NO: 15160 - DNA, 406 bp, Zea mays
  Clone ID: LIB36-012-Q1-E1-C3
ggtcgacgcacgcgtccgggagaaccagaaggccacccaccttccaaggcaggggccatggacgaccccgtcgagcgcttgaaggacgggttccacaagttcaagaccgaggtctatgacaagaagccggagctgttcgagcctctcaaggccggccaggcccccaagtacatggtgttcgcctgctccgactcccgcgtgtgcccgtcggtgaccctgggcctgcagcccggcgaggcattcaccgtccgcaacatcgccgccatggtcccagcctacgacaagaccaagtacaccggcatcgggtccgccatcgagtacgccgtgtgcgcgctcaagggggaggtcctcgtggtcattgggcaaagctgctgccgtggcaataagggcgctcctctccctccaa

SEQ ID NO: 15161 - DNA, 473 bp, Zea mays
  Clone ID: LIB36-012-Q1-E1-D11
gcctgccggtacaagtccgagattcccgggtccacccacgcgtccggattcgctgaagagattgttcggaaggccatgaaggacaatggggataatggagcagattcattagttgaacttcttcttacttactaggaactaggcaatgacctcaaagtggataacggcttcgcttctggttgtgccccccaaactgttgatgatagtgatgatgacgacattctagaaaactgggatgatgaggatgctggtggtgggagaagcaccggggttgctaactctattgatgattctgaagacgaggatttcttaaatgagatgtcacagaaggacaagaaagttgattccttagttaaaatggggtttcctgaagacgaggctgcactggctattactagatgcgggcaggatgcatctatttctgttctggtggattccatatatgcttcacagaccgcatgagatggttactg

SEQ ID NO: 15162 - DNA, 422 bp, Zea mays
  Clone ID: LIB36-012-Q1-E1-E7
gacggcagcgctcacctcccactccctgcagcgcccagcagcagcagcagctgctcccgcgcatggccagcggcggagggtcggagcggcgggcctgcggcaccggcagccgcgcgccggcggcaggatccgggccctgccttcggcggaggtcatcagcgagatcctgagccccaagctggtgcccggctcgcccgccgacaccggcgacgtctcctcgctcgtcccggtcagtgccctgatgctgctcttctacttcgtgtccaactgggtggtgcccgagctgctcctgaagggcctcaaggagcccaagcccgaggacgaagcgtccacgtccttcgccgcgtccgcggacaacgccgccgccgctggcccagcagacgacggcggcgcccgtaagatccgcctcaaggtcaagaaga

SEQ ID NO: 15163 - DNA, 460 bp, Zea mays
  Clone ID: LIB36-012-Q1-E1-E9
caagtccgagattcgcgggtcgacgcacgcgtctgcacacacgttcctgctgtccctcacgcacgccatggtgttgaattcatcccttccctcacgcgcgtctggttcccttgcccatggtcgcgcccctgctatgctcgtgcctacgccagggatgctagcaagtttgccttctcttccattccacgcgacgccctgtgctcacccatctcatgtctaactcccctgttgctgacgaacgcgtgctctgctagcaggatccaaggtcgtcctcgtctccttgctcgccggcgaccttccctctgtcctccagtgccgcgccggcttggagctttcatggccgccgtcctgccctgtcttccatggcgcgcggtggtggtgggttggtgttggtggcagtgactcactgatgggcacgcgtcctgctcgtggaatccacgacttgtgcgccctgctcagt

SEQ ID NO: 15164 - DNA, 250 bp, Zea mays
  Clone ID: LIB36-012-Q1-E1-F12
gggtccacccacgcgtccgcacacgcgtccgaagacgacttgtttcattgattcttgaagagatcgagcttcttttgcaccacaaggtcgaggatgtcttgcaactgcggatcaagctgcggctgcggctcaagctgcaagtgcggcaagaagtaccctgacctggaggagacgagcaccgccgcgcaggccaccgtcgtcctcggcgtggccccggagaataacgccgcgccctagttcgtccaggccg

SEQ ID NO: 15165 - DNA, 384 bp, Zea mays
  Clone ID: LIB36-012-Q1-E1-F7
tgaataacttcagtagtgatatactatttcttttcatattcagtgtctgaagctcgtataatcaagaagaaaaaaataataacaataaacacctcacattaggagaccatccaaaaccggaatatcaaatggtaaccttataactccaagggcaataaatagaagcaagaaccacgcaggaaacgtcgtcatgcatagcactaagaaagatttctgtccttcgcaagcgcgcgtctcagtggtgtcgactacccactcggcggcctcgcggaggcggcgctcgggctcgctctccggctgcccgatgggcgtgctagcgacgaggtccatgaatgcagagtttttcgcctccatggatgcggcggcagacgcggcgtcgtcgga

SEQ ID NO: 15166 - DNA, 471 bp, Zea mays
  Clone ID: LIB36-012-Q1-E1-G10
gcctgccggtacaggtccgtacattcccgggtccacccacgcgtccgcacacgcgtccgcccacgcgtccgcccacgcgtccgcccacgcgtccgcggacgcgtggggttgcattggaggcgaggaggagccacgccggggctcaaggaatggccgctctccgccacctcgccgccggccccacctgccaccaccaccaccacggcgtcgcggcagccaccgcctccctccggctccatcgcctccccctccccttccgcccccttcgctcccgctcccgctcccgctcccgctccttcaccagggtttatgcgatctccagcaatgacatcagggtcggcaccaacgtcgaagtcgacggcgcgccatggaaagttctagagttcctccacgtcaagcctggaaaaggcgctgctttcgtcaggacaaaactgcgtaactatgttactggcaacacggtcgagaaaaccc

SEQ ID NO: 15167 - DNA, 453 bp, Zea mays
  Clone ID: LIB36-012-Q1-E1-G5
gtaccgatcctacattcccgggtccacccacgcgtccgcactccgtaaggaggttggcaagtacatgattgagggagaccttaaacgtttcaaccgtgtggcgattgagaggctgaaggagattaggtgctacaagggcatccggcacaagcttggactcccagttcgtggccagaggacaaagaacaactgccggacacttaagggaaagagggcttcagttgccaagaagaagtcacccgcctcccaggatgaataaatcgtattgccatgtattgaagttctctctctctctctctctctctctctctctctctctgtgtgtgtgtgtgtgtgtgtgtgtgtgtgtgtagcgctactactgctgggtgttttgtttcgagcttttatgctgccattgacaaatcatggggtagccatcagctgctgcagattttgtagcaatgacatact

SEQ ID NO: 15168 - DNA, 467 bp, Zea mays
  Clone ID: LIB36-012-Q1-E1-G9
cctgcggtaccagtccgagattcccgggtccacccacgcgtccgcacacgcgtccgcccacgcgtccgcggacgcgtgggtttttttttttttttttaacaatacaacaattttagagagcaagagagattattgagtacacggtgaataaagcaagcaattacatgatatgattatgtggattatgctattacacataggatcgatgttgtgacgctagccagcacagcatgcagcttcacagcctcatttcacaactactacaaatcaatcacacggtagctagcgcggagcccttgagccggccggccccacttatttcacctctaagacctcgtccaaggcgtagttgttggtggacacgccggcgtagttcaccttgttgaaccgcacaaccaccgggtagcgggtgttgggatcctgatcgacggtgacgacgttgccgatcccgttgtaccagtacgact

SEQ ID NO: 15169 - DNA, 380 bp, Zea mays
  Clone ID: LIB36-012-Q1-E1-H12
gcgggtcgacgcacgcgtccgcagagacgtgggctaggatcagcggaagcagcaatggtgatggcgtcgtcgagcgggctgaggagctgcaacgccgtgggcgtgcccagcctgctggcgccgtcgtcccggtccggccgcctggcgccgttctgcgccaacgccaccatatctggccgcgtcaccatgtccgcggagtggatgcccggccagccacaccctgcccacctcgacggctcctctcccggggacttcggcttcgatccgctgggcctcgcgaccgtgccagagaacttcgaccggttcaaggactcagaggtgtaccactgccgctgggccatgcttgccgtccccgggatacgtttgccggaagctctggg

SEQ ID NO: 15170 - DNA, 454 bp, Zea mays
  Clone ID: LIB36-012-Q1-E1-H2
gggtcgacgcacgcgtccggctgaatacacataggcagaaagaggaggaaagaaaagagcttgaaaagcaatagaagagagaggtagagaagaaagagctggataagcaaaagcaaagggaggaagagaggatggagatggagaaggagaagaaaaggcagcgagagagggaggaagagagacagagggagagagagcaatacgaaaggaaaggtggaaatgatgtggagagagacaacaaaaggaaactgatagatgatcggtatgatccaaattcaagtagagatagagaagagggatacagagactctcagaacagagatgacaatagaaggcaggaagagcatggtcaacacaatagatatatggatagtcatgattccaagaggtcaaggcatgactcgcattaccattcaaggagggattatgaacaacgctattctagagacgaaca

SEQ ID NO: 15171 - DNA, 361 bp, Zea mays
  Clone ID: LIB36-012-Q1-E1-H5
gcaagtgaccgtgcacttattctgaatgcacacgtgcgaaactggcacgtgcgggttggatcattgtactgctacgccattgtctcgagcatggaccacgccagcagctgcagcttgggatggagaagcgaaaggggtcagtgattgtgcttaggtttttcatctctctcctaatctttttttgtgtaactggagcaggaaatgctgaaacctcaagcttctgtccaaacgatgtactcctatttagtattgttgattgattgagaggccgatcgataacaaatgaacacataaaacgctgttcatgacgcagtgcttttttccctgcgtcactgcgtgcttttgcgtgaaaaaaaacagc

SEQ ID NO: 15172 - DNA, 296 bp, Zea mays
  Clone ID: LIB36-013-Q1-E1-A11
ttaccagatgacagctatatttaaaattttctgaattcagttttacaacgttgaggcgaataacaacagaaacaggggagaagagctgcccattctagccagtagtcaaactgctactacagagcaaacgcatagcagaaaaggtatgaacagaccatttcaatagagaacctggcaagctgttgagacccgtgaatagcatagtcgcccaataatgacaagctgacacatgatagcgatttctcaagaatcctaggtggcagcgacaggttcagcgtttgggacatacaaccacg

SEQ ID NO: 15173 - DNA, 330 bp, Zea mays
  Clone ID: LIB36-013-Q1-E1-A2
ggccgctcaacaactgggccacccacctgagcgacccgctccacactaccatcttcgacacgttcggagggtcctcttaagcccgccattgctccgccccgtccatcgaccggaacgtgttcttggattaattaactacgatctctatgagcctggggatggatcaacccgtcgtgcgtggtctcgttttgtgatgagtgggagagagaagatgacaagatcgatcctttgttaatggagatctcgttaattaggagagctaccgctgggacttggtggtttgtaatatatgatccaaccagtgatgaatcaatgcattcacttgtgtaa

SEQ ID NO: 15174 - DNA, 265 bp, Zea mays
  Clone ID: LIB36-013-Q1-E1-A5
gggagaagcgttagatgctccggcctctttttggtttcggtacagcctttgtagtccctgttcgtcgtcaggtgcacagtatacaccgtcatatgctgtcaaatagatgcaatgcaacgactgcgcgccgtgcttgtgttgcaagcgtggataatgcatatattatattgtagcattgacatgatgtgcgttattgcattttactgtacgtaagggagttggataaataagtgtgatttgtttgtcaattattcagtgttgagaa

SEQ ID NO: 15175 - DNA, 453 bp, Zea mays
  unsure (1)..(453): unsure at all n locations; Clone ID: LIB36-013-Q1-E1-B3
gggtcgacgcacgcgtccgggcaaagtctacactaatggtgattccacctccgtcaaggaatcaggaatacccatgcaattatttagaattagagttagatttcttgaaagatcaacatgcttatgatgaagacatcccatctgtagtaaatgtgtccatacaggaaccagaaccatccaaacagacgccagagccagtggaacaatcgttgttgtctgcactttcttgtagacaggctgagaaccggctcaggatagcatcagaagcttgttatgatggtgaaagttctcattgggcatcatcagcttttcacataaatgatgctgcccgccacaaatctggttcaaagtctataggaaagcacanagccgcattggaatctggtagacttctcanatccaaagttcagaagataactgaatcgcatcaggaaagggcaattgctatgagta

SEQ ID NO: 15176 - DNA, 477 bp, Zea mays
  Clone ID: LIB36-013-Q1-E1-C1
ggtcggaaaaccgggtcgaccacgcgtccgctcagctagtcagctacctccatccaccagaccagaccagaccaatggccctgcgcctaccaatctcatcgtcccacgggctggcctccacgccggcgccaatctccacgactacgtgccggccggccgtcttggcgacggccgcggcccagaagaggagcctgctgctggcgacggcctccgagacgaggggagtcgcgccggtgaggtccagcgggatcgagacgagcacggtgggtctgggatgtgaggccgtcaccgggcacgtcacggaggtcaacaaggacaccttctggcccatcgtcgaggccgccggcgacaaggtcgtcgtcctcgacatgtacaccgaatggtgcgggccttgcaaagtgatggctccgaaattccaggagatgtctgagaagaactggatgttgtgttcctgaagctcgactgcaccaggacaac

SEQ ID NO: 15177 - DNA, 197 bp, Zea mays
  unsure (1)..(197): unsure at all n locations; Clone ID: LIB36-013-Q1-E1-C4
ggtccggataccgggtcgaccacgcgtccgggcttctcctccgcctcttaccaagtcctcctcgggttacggttccttatggttttgtggangggcgatggcggcagctgatgtggagtaccgttgcttcgtcggcaggcttgcctgtgccaccaacatcgagtcgctggagaatgccttcgcctcctactgcgaga

SEQ ID NO: 15178 - DNA, 372 bp, Zea mays
  Clone ID: LIB36-013-Q1-E1-D1
ggtccggaataacgggtcgacgcacgcgtccgcccacgcgtccgcgcttcgccttcacccgttcgccgtgcggccgagctctctctagctccgccgcttgctagtcgccttcctcccaaatggcgaccgccatgcggggcagcagcctcctgcggttcggtttccgccatgcttcctgcctcctcttccagtcccctcggtgtcctgccccgagcctgggtctgaacctggccgttggccgcaccgggcttatacgcctccgatgctcggcggccggggccggcgacgccggtggcaagaaggtgtcagctcggctggctctgacgcagcaggtgctgcggaacgccgaggagcgcgccgcgtcagcgggtt

SEQ ID NO: 15179 - DNA, 220 bp, Zea mays
  Clone ID: LIB36-013-Q1-E1-D4
ggtcggattacgggtcgaccacgcgtccgcagaagcttgggattccagccggctgctgagcaggatcgacgtggacgtgcacatccagatgacgtcatagacccggtatagtgtcatggcgctgtacttcactaaccgtagtatttctgggcgctgcatgatgatagcggggtggataccatgttaaccacgctggagcacatcgtacgttcgtcacctg

SEQ ID NO: 15180 - DNA, 355 bp, Zea mays
  Clone ID: LIB36-013-Q1-E1-E12
tttaatgacaatgaacacaattattccttgtcgattgaacaatagtttacatcatggtacaaaccgaaaaccagcgtgcgctcgtcaagcttgcttagctagccgccatggcctctctcgccgccgtctccgtgaagcccgtggccatcaagggtctcgccggcagctccatctccggaaggaagctcgccgtcgccaggccgtcggcccgctccatccgcaggccccgcgcagccgccgtggtggccaagtacggcgacaagagcgtctactttgacctcgacgacatcggcaacaccaccggacagtgggacctctactgctctgacgcgccctcgccctacaagccgctaca

SEQ ID NO: 15181 - DNA, 430 bp, Zea mays
  Clone ID: LIB36-013-Q1-E1-E3
agtccggtatatccgggtcgacgcacgcgtccggcagcaggggctgcagcaagagcaagtcctccaggcagcatgaatggagacaccagtcaccatcccatcatcagcgacactgtactgtatagcaatcgggagatacacgatactccaacgcgtaaaaaagcgtaaaagatacgtcaaaacagatgtgatttttgcatccatgcagatgcgaaacaggattttgaatcctagcacctaacggatttaaatgatgaagtttcagttctacgagaggaactgagttgtacgatagggataacttagctgttgtcggactgtgtacattgttggtatcatcacccaaaatattgtacatctagaagccatattgtaattacggcacgtatacagtaacactttgatcatgtaatacagtatatagttgttt

SEQ ID NO: 15182 - DNA, 110 bp, Zea mays
  Clone ID: LIB36-013-Q1-E1-F11
cccacgcatccgcggacgcgtggggttgtgtgatgcatacccttaccttctgtatacataacgaaattaaagagaggacagcattttgccttgccagccatttctcaaaa

SEQ ID NO: 15183 - DNA, 181 bp, Zea mays
  Clone ID: LIB36-013-Q1-E1-F2
gggtcgacgcacgcgtccgcaacatagccgcctccgcctccaccgtctccggcctcgccggcgcctccctggccagccgcccggcgttctccaccagcttcacgcggggcagccgggtgtcggcgaggaaccccctgatgagcaggaacctgaagaggaatggcaggatcacctgcatgac

SEQ ID NO: 15184 - DNA, 383 bp, Zea mays
  Clone ID: LIB36-013-Q1-E1-G3
gggtcgacgcacgcgtccggtcatctccagacatcagcgacgagctcgccaagtggtatggtcctgacaggaggatctacctgccggatgggctgttggaccggtcggaggtgccggagtacctcaccggagaggtccctggagactatggctacgacccttttggcctgggcaagaagccagaggacttcgccaagtaccaggcctacgagctgatccatgccagatgggccatgctcggtgccgctggcgctgtcatcccagaggcctgcaacaagttcggcgctaactgtggccctgaggctgtctggttcaggaccggcgcgctgctcctggacgggaacaccctcaactaacttcgggaaacagcaatccccatcaaa

SEQ ID NO: 15185 - DNA, 105 bp, Zea mays
  Clone ID: LIB36-013-Q1-E1-G4
gggtcgaccacgcgtccgcggacgcgtgggcggacgcgtgggtgaggatgatgctgtaaaatactgcaaccctccgcaaggccgccggcaaaggttccaaggaaa

SEQ ID NO: 15186 - DNA, 430 bp, Zea mays
  unsure (1)..(430): unsure at all n locations; Clone ID: LIB36-013-Q1-E1-G7
taccgcaggacattcactaccaagaacggcaagaaggtcagcaaggcacctaagatccaacggcttgtgacacccttgaccctccagaggaagcgtgctagaatcgctgacaagaagaagaggataactaagaagaagtctgaggctgctgagtaccagaagcttcttgcccagaggctgaaggaacagagagaccgccggagcgagagcttggccaagaggaggtccaagctttctgccgccgccaaggcttctgctgccacctctgcttaagaatgttcagtgttttgggatcnttgtaaggtctatcttgtaacggcaaaagtgttttgggattcttgtaagctccatagttcacatcacttaagtgtttctgctagtagtggatcacaacctattgcttgcctggctctgagtcacacctgaccga

SEQ ID NO: 15187 - DNA, 211 bp, Zea mays
  Clone ID: LIB36-013-Q1-E1-G8
ggtccggaataccgggtcgacgcacgcgtccgcccacgcgtccgcacgcacgcatacacagcacagagtgaggtaagcatccgaaaaaagctgtgatctgatcgacatggccgccgccaccatggctctcacctcccgcgcgctcgtccgcaagccggcgaccaacaccaaggacgtcttcggcgaagggcgcatcaacatgcgcaagact

SEQ ID NO: 15188 - DNA, 362 bp, Zea mays
  Clone ID: LIB36-013-Q1-E1-H1
gggtcgacgcacgcgtccggcttgccaattgccattgcactgcgcgcgcgcacctcacatccgccgccagcaggtgccaccgccatctctgctttctctctctctctctctctctctctctcaagcaacgcccgcctgcccgcccgccatggcgaccatagccacgatggccctgctgaagcccgccaggatcgtggcgcggtcggcgccgccgtccaccagcggcagcgtctcgctgcgcgtcccggcgcgggccaagaacgccgcggtgtccgtgtccgtgtcgtccgcgctggcgggcgccttcttctcggcgctggggttgtcggacgctgcgctggcggcgcaacccgttgccgacg

SEQ ID NO: 15189 - DNA, 185 bp, Zea mays
  Clone ID: LIB36-013-Q1-E1-H12
cccacgcgtccgagtttagatcgactatactcattggacatggacctatctatatatcttctttgtaaacaggacagagtcggactcctgctgcagtattatcaactcatctattttaaactctttaagttggatttattttcaatttttttttgtgcttcaataaattactagattttataaaa

SEQ ID NO: 15190 - DNA, 450 bp, Zea mays
  Clone ID: LIB36-013-Q1-E1-H3
cggtccggtataccgggtcgaccacgcgtccgcggacgcgtgggcggcgctgcttatctcgcgctcccggctctcctcctcgcccgcgccgcgatgaacacagccatggccaccacctccttatccctccaaggccgcccatcccacgctcccactaggaagctctcctccccgttcctcggagcccccgcgtcctttctccggccgctggctcccacgcccgccgccggcccctcctcgcggcggacgcttgccgtcagggccatgggcgcctcccaagcccggagggaagcccaagaaagtggtgggccttaaaaacctgcggcccaaggccgggaaggcgacgcctgagccgcccgtcaggccggcgctcggtgccaacggagtcaacatcatggcgttctgcaaggggtacaatgctaagactgccgacaagcccgggtacatcat

SEQ ID NO: 15191 - DNA, 148 bp, Zea mays
  Clone ID: LIB36-013-Q1-E1-H8
acggtccgtaatgccgggtcgacacacgcgtccggtcagaccgctctactgtatagaggaaggccgaaggccgtttccatttctcgaagccgcggcagcacgcgtcctgcttgcctcccggtcccggatcttgccaaccccgaaacgc

SEQ ID NO: 15192 - DNA, 409 bp, Zea mays
  Clone ID: LIB36-014-Q1-E1-A1
cggaagcgtgggggcgcgtcgctgctcgccgcagcgggcgcggtgaccgcgtcggcggggctcgcgctggcgctcgtggacgagcgcatgtccacggagggcaccgggctgagcctcgggctcagcaacaacctgctggggtggatcctcctgggggtcttcggcctcatctggtccctctacaccatctacacctctgacctcgacgaggacgaggagtccggtggcctctcgctctagatccacctcctctcctgttaatgatctgaatgtaaacatggtggtggtcatcggtgttaatttagacatggctatttgcatctaagatccatcctctcctgttaataatgtttggagactacgtacgcctgaagcaatagcaactttgcgagaaaacttgctgcacaaa

SEQ ID NO: 15193 - DNA, 122 bp, Zea mays
  Clone ID: LIB36-014-Q1-E1-A7
acggacgcgtgggctgccttttggtataatctgtacgccattagggtatccattaatcggctctgtaccgagattgagttttgtatagcaaaaaaaaaaaaaaaaaaaaaaaaaaacaaaaa

SEQ ID NO: 15194 - DNA, 366 bp, Zea mays
  Clone ID: LIB36-014-Q1-E1-B10
ccacgcgtcagcgcaagtgagtgaacaccagccgtattgtcccgactcctgatccctaccgatcctcgcctgctgcagccatggcgacctccgcggcgctctccaccgccgccaatctcacccagctctaccggtcccgcgcttcgctgggcaagccggtgaaggggcttggcctgagcatgggccgcgagcgcgcccagcggagcattgtgtgccaggcggcgagcagcatctccgccgaccgcgtccccgacatggagaagcggaagctgatcaagctcctcatcctcggcgctatctcgttgcccatcgtcggcatggtcatcacctactgcgccttcttcgtccctgcaggctccgggaacg

SEQ ID NO: 15195 - DNA, 331 bp, Zea mays
  Clone ID: LIB36-014-Q1-E1-B2
gtcgaccgaccgtccgcccaagcgaccgagcattgtctgtgccaacaatggagcagcagctagcagcaaaccagagacatggcgaggagaaagatgaagctgcttgcttggaaggagggggagagagagagagaggaaagctttgtgcatgcgtggaatgatgtgtggtcgctttgttctttttcttttgtgcccctagtaggggtgtgcgtgtgtgtgtgtgtttagcaagacatgcaaaaggagtggagagtcgagttgaatctccatgatgcgtggttgtacaaagccaaagatcactcttctttcttgtctatcagtctattgtcta

SEQ ID NO: 15196 - DNA, 476 bp, Zea mays
  unsure (1)..(476): unsure at all n locations; Clone ID: LIB36-014-Q1-E1-B4
gtcgaccgacccgtccgtcncctcaatccttcctccgtcccatgctccgccgctgacacgttcgcccgacttaaccttacgatggccgccgccgcctccgccatcaccgccgtctccggcgttgtgcttccccaaaccttcctatcccaccgattgccgccgccgcaggtcctagccgtggcctcctcattccgccggctctccttgtgcgcttctcctcaccggatcactcacataatcccccgcgctgatgcaagtgccgaagctggagaaccggagcctgccactgcttcagctgaatccgaagaggaggtggccgagggatctgtcgctgtggcggaggcggaggaaccgacgccgccgagcaagccgaaggttaagttcggcgaaataattgggattctgaataagcagttcattgaggaggctgagaaggtgaagactgtaccggatctgaggcctggcgatatcattga

SEQ ID NO: 15197 - DNA, 473 bp, Zea mays
  Clone ID: LIB36-014-Q1-E1-B7
cggtaggaattccgggtcgaccacgcgtccgctcaacctggctggccgcgacctcaccgactacctcatgaagatcctgactgaacgcggctactccttcaccaccactgctgagcgggaaattgtcagggacatgaaggagaagctcgcctacattgccctggactacgaccaggagatggagactgccaagaccagctcttctgttgagaagagctacgagctgcctgacggacaggtcatcaccattggtgctgagcgcttccgctgccctgaggtcctcttccagccatccttcattgggatggaagctgctggtatccacgagaccacctacaactccatcatgaagtgcgacgtggatattacgaaggatctgtatggcaacatcgtcctctccggtggtaccactatgttccctggcattgctgacaggatgagcaaggaaatcaccgccctggctcctagcagca

SEQ ID NO: 15198 - DNA, 481 bp, Zea mays
  Clone ID: LIB36-014-Q1-E1-B8
accggtcaggaactccgggtcgaccacgcgtccgcccaagcgtccgcacgcgaccacgcccccgctcctctcgtctctttcttcgcctcttccatcgcaggattcggcggccatgggcggcggcaacgcccagaagtccaagatggcgcgcgagaggaacgccgagaagaacaagggcggcaaaggcagccagctggaggccaacaagaaggccatgaacatccagtgcaagatctgcatgcagaccttcatctgcaccacctccgaggccaagtgcaaagaacatgcggaggcgaggcatcccaagaacgacctctaccagtgcttcccccacctcaagaactagtaagcagcagaagcatatgctctgctcagctaaaagacaagtactacatatatatatatacgctgtgtgtcaattaatgggttctaggctgctgctgatgccgctgcttcgttcgtgttgccccgttcgaatatg

SEQ ID NO: 15199 - DNA, 271 bp, Zea mays
  Clone ID: LIB36-014-Q1-E1-C11
gggtggacccacgcgtccgctcagggtcagcgtcgtccgtgactaccaccacgtccagctgctctggctctcctagtccgaccagccgcggctgtggcacggccacgtcatcgtccgctctgaccgagtccgcgctgcggcaaagcggcggcgaagacgaggacgccgagctcgacgaggcgtccaacaccaacagcaccaggggagagccagcgtcaacaccacgacgacgaccaggagcagcagcaccaggagtgctacgcctccgacc

SEQ ID NO: 15200 - DNA, 456 bp, Zea mays
  Clone ID: LIB36-014-Q1-E1-C12
tcccgggtcgccccacgcgtccgccaacgcgtccgcccacgcgtccggcaaaggcagcacactcagctatccagcaaaagagatcgagaggcaggagtcatggccaccgtcagcgccgccgtggtgaccaccatcgttgcccgcgccgcgatcgccaggcccaatgctctagggctgcctgcgctgagggcgaggagcgagagggtgcggtgcagctacgccaaggacgcggccccagtcagcaccaagggcgcaggcgcgtcgctgctcgccgcagcgggcgcggtgaccgcgtcggcggggcccgcgctggcgctcgtggacgagcgcatgtccacggagggcaccgggctgagcctcgggctcagcaacaacctgctggggtggatcctcctgggggtcttcggcctcatctggtccctctacaccatctacacctctgacctcgacgaggac

SEQ ID NO: 15201 - DNA, 401 bp, Zea mays
  Clone ID: LIB36-014-Q1-E1-D4
gtcgaccgacccgtccgcaacacaccaacactgctggcctgccctaagacacatcttcgcgttgcgtccactggatacctgctttcttagtcagcagcatgccgaaaccctccatttgtgaaacctcagcggtgataggcggtggttgtcgaacgctggcatgaaggtgtgagctcccaactgctgaatcgtgttcctcttttacatgcacgtgtccaacaacaaccaaggtggaactgtgaagccttgtgtcgttgaactttgcagccacgtattcagatttttttttgagttagtgtaatttagttacattccctctagaaccgagattagcgctacctcagtacactgccggtgcaagataaacgaaggaagctgggattgcatggcactgcgggtct

SEQ ID NO: 15202 - DNA, 198 bp, Zea mays
  Clone ID: LIB36-014-Q1-E1-D6
acacggtgaatagcgcaagcaattagatgataggagtatgtggattaagctcgtacacataggatcgatgttgtgaggctagccagcacagcatgcactttcagaggctcatttcacgcgtactagacctcattcacacggtagctagcgcagagcccttgacccggagggccccagtcatttcacctctgcgcactc

SEQ ID NO: 15203 - DNA, 392 bp, Zea mays
  Clone ID: LIB36-014-Q1-E1-D9
tcccgggtggacccacgcgtcagccaacgcgtccgcccacgcgtccgcctccctctctgcctgaccagctaggatcagcggaagcagcaatggtgatggcgtcgtcgagcgggctgaggagctgcagcgccgtgggcgtgcccagcctgctggctccgtcgtcccggtccggccgcctggcgccgttctgcgccaacgccaccacctctggccgcgtcaccatgtccgcggagtggatgcccggccagccacgcgctgcccacctcgacggctcctctcccggggacttcggcttcgatccgctgggcctcgcgaccgtgccggagaacttctagcggttcaaggagtcagatgtgtaccactgccgctgggccatgcttgccgtccccggg

SEQ ID NO: 15204 - DNA, 434 bp, Zea mays
  Clone ID: LIB36-014-Q1-E1-E12
tcgaccttcaagtctcgctacgtagcagtgcaatagaaaaagcagccgcagtggcgagcagcaccatggccctctcctccacggccttcgccggcaaggccgtgaacgtgccgtcgtcgtccgccttcggcgatgcccgcgtgacgatgcgcaagacggcggggaaggccaagccggcggcggcgtccgggagcccgtggtacggccccgaccgcgtgctgtacctgggcccactgtccggcgagccgccgagctacctgacgggcgagttcccgggcgactacggctgggacaccgcggggctgtcggcggacccggagacgttcgccaagaaccgggagctggacgtgatccactcgcgctgggccatgctgggcgcgctcggctgcgtcgtcccggaactgctcgcccgcaacggcgtcaagttcggcgag

SEQ ID NO: 15205 - DNA, 378 bp, Zea mays
  Clone ID: LIB36-014-Q1-E1-E2
aaataatcacgtgatgcggaagaagaaccaagccgaccccaagcgtgggctaatctgcaagctgaagctgatgaatcaacctgaagacggttaaatcaagcaagtgctcggtcgaaggatactcgtcaagcggacgtcacctaacaacactaacctagtgttactcaggttctaactttgtgctgttgttgatggtgttaagtgccggtgggctcggccttcttataagtctaagtaacccttctatacttcttattgaggatgatcccttgagctagcatatatttcaaacttatatttttgtaatcactccgataaactaatgtaaaatttttgtaacttgtaaaatttggtagtaagatttccgctgtaacaaaa

SEQ ID NO: 15206 - DNA, 477 bp, Zea mays
  Clone ID: LIB36-014-Q1-E1-E3
ggtcgaccgacgcgtccggcgggtcacgggctctactccgagatcgggcaagaagccagagatctcctatataaggactaccacacggaccagaagttcacgctcaccacctacgccgccaacggagctgccattactgctgcaagcacgaggaaagatgaagctatctttaatgaaatccagagccagctgaagcacaacaatgtgactgtggatgtgaaagcaacttcagaatcaaatgtgataactacaatcacagttcatgagctgggcacaccaggcttgaaggcaattttatgcgttcctttcccgtaccagaaatctgcaaaggctgaactccagtatttgcaccaccatgctggtgttgctgcaagtgttggcctaaatgcaaaccctgttgttaacctttctggtgtattcggaactaaagctattgctgttggcgctgatgctgcatttgatacgtcttctggggac

SEQ ID NO: 15207 - DNA, 304 bp, Zea mays
  Clone ID: LIB36-014-Q1-E1-E5
accggtcgatatccgggtcgaccacgcgtccgcatcaatgtgatgatagctcgtcaccggcggcgacagcagcaccgccgtcaccttcgactgcacctcctgggtgcatcccaagttccacaacccggagaagcgcatcttcttcaccctcaagtcatacctgccgtccgacacgcccaaggggctggaggacctgaggaagagggacctgcaagcgctgcgcggcgacgggcacggcgagcgcaaggtgttcgatcgcgtctacgactacgacgtgtagaacgacctgcgcgacccggacaag

SEQ ID NO: 15208 - DNA, 380 bp, Zea mays
  Clone ID: LIB36-014-Q1-E1-F3
ggtcgaccgacgcgtccgcccaagcgtccgcgtccttcgccaagatcgtcaggttcttgcccgcgcaggcgcagatcagccgcaggcggcgcgcggcggtgctgcccacgccgagggcggcggtgtcgggcaccgagaaggcgccgtcgagcaagcacgagcgcgtggtcagggtgcacagcacccaggagttcgacgacgcgctcaacgccgccaagaaccggctggtggtggtggagttcgcggcgagcgacaccgaggacagcagccagatctacccgaccatggtgcagctcaaccgcacctgcggcgacatggacttcctgctggtcctgcctccacgacgagtcggaggccaccaaggagccgttccgccggga

SEQ ID NO: 15209 - DNA, 312 bp, Zea mays
  unsure (1)..(312): unsure at all n locations; Clone ID: LIB36-014-Q1-E1-G3
cagatctgcccgctgaaggatgttggcccaaattaacttccttggctttggagacggaaccctactctatctcaacttaaatcggaaaagaagtgtatcaccaaaggattgctaccgagacattcacctggcttgagctggcttttgctatagcgtgcaaggggttgctgggtgtcgtacctacctgacttatcattatctgtggttacattctggaccctgtattttctatgctttcatgtctctctactttctagtattaattatcaataagttggtttggaatggttgaaaaaaaaaaaaaaanaanaa

SEQ ID NO: 15210 - DNA, 306 bp, Zea mays
  Clone ID: LIB36-014-Q1-E1-H10
taccgaatcggtaattcgcccgtcgacccacgcgtacgtcatcatccactccgggctgccatggcctgctccttctccgccgacatcaccgtctcttccgcccctacaccggccgccagacccctcgctgctgctacgcactccgtccgtatcgcacgctcggctgtcgctaccaatgccaggccgcaccgcctcgccgcctcaaagttcgcgcaggctatcatactcgttgcacgcgctagtctactcgatgacttgctgctggtcgggaacaaggtgcctgacttcgaagttgacgctgtattc

SEQ ID NO: 15211 - DNA, 436 bp, Zea mays
  Clone ID: LIB36-015-Q1-E1-A11
gtcgacgcacgcgtccggccactcgccatggtcgtggcgtccttgctcacatcaaccagcttggactgcacgctctggcatccgctggccgagcagctccctcacgccgcgcccctggtcaagctcgtccccatggcggctttcccatggcgtcccttggcctccagcttctgctcgcgctagctcgccggtgacggcaaggccgaccatccctgctacccagcgccgaccgctcactttccatggccggcgctcgcccttaacgccggcgctcggaccacgccctcgctgccggtgctcgccgaccgcggccgtcctgctccctgctccaaccaagctcgcccaggtcttccacttcaccagcagcaggagctgcttctccctcaagctcgccctcacctccattaatctacttgcgttcacactcctctcatcc

SEQ ID NO: 15212 - DNA, 449 bp, Zea mays
  Clone ID: LIB36-015-Q1-E1-A12
gtcgaccgacgcgtccgcccacgcgaccgcccacgcgtccgcccacgcgtccgtcgaccttcaagtctcgctacgtagcagtgcaataaaaaaagcagccgcaatggcgagcagcaccatggccctctcctccacggccttcgccggcaaggccgtgaacgtgccgtcgtcgtccgccttcggcgaggcccgcgtgacgatgcgcaagacggcggggaaggccaagccggcggcggcgtccgggagcccgtggtacggccccgaccgcgtgctgtacctgggcccactgtccggcgagccgccgagctacctgacgggcgagttcccgggcgactacggctgggacaccgcggggctgtcggcggacccggagacgttcgccaagaaccgggagctggaagtgatccactcccgctgggccatgctgggcgcgctcggctgcgtcttcc

SEQ ID NO: 15213 - DNA, 445 bp, Zea mays
  Clone ID: LIB36-015-Q1-E1-A3
gggtcgacgcacgcgtccgcccacgcatccgcgaatatgtgctggagctcctctcgtgacgctcttctctcccggcgctggagctcccctatcaagtcttgtccgacggcgctccggggcgctcctctccctggtcccggcggtgctcctcttcctgatgttgatgattactcgggccagccagcagtgcttccccgccagcagtgcttccccgccagtgcttcctcgctcctggctgtgcttccccgcgaccggttatcgttccctgagacgctcggtctcgctcccgacctcaacaatggagaccccgccaggagcgatgacgtctgcaccggctgttgtcatctccgatgacaaccatggttcgttcttagttgaacagttaccttgttgttgtgctaaaccctatacattattcattactacacattgtgtcagattcgta

SEQ ID NO: 15214 - DNA, 359 bp, Zea mays
  Clone ID: LIB36-015-Q1-E1-A4
gggtcgagccacgcgtccgatattaatcagttggtgtcggatacttggctggatgcttaacggtgttatgaatgctgtcttaatatttttcttcagcatcactacctttgatgaccaggtgttccgcacggatggtcaacttgcaggcttggttgctctaagcgtcgtcatgtacacttgtattgtatgggttgtcaactgtcatatggcactctctgtgcactaattcatcataatctagcacatattcatatggagcagcattgcagtatgggaacttcttcccatagcttatggttccatgaacccgtggttctcagctacacactacatagtcttcatcgatcaactggccccag

SEQ ID NO: 15215 - DNA, 443 bp, Zea mays
  Clone ID: LIB36-015-Q1-E1-A5
gggtcgccccacgcgtccgcgacttgtttcattgattcttgaagagatcgagcttcttttgcaccacaaggtcgaggatgtcttgcaactgcggatcaagctgcggctgcggctcaagctgcaagtgcggcaagaagtaccctgacctggaggagacgagcaccgccgcgcaggccaccgtcgtcctcggcgtggccccggagaagaaggccgcgcccgagttcgtcgaggccgcggcggagtccggcgaggccgcccacggctgcagctgcggtggcaactgcaagtgcgacccctgcaactgctgatcacatcgatcgacgaccatggatatgattattatctatctagcttgtggtggtggttgaacaataataagcgaggccgagctggctgccatacataggtattgtgtggtgtgtgtgagagagagagaaacagag

SEQ ID NO: 15216 - DNA, 471 bp, Zea mays
  unsure (1)..(471): unsure at all n locations; Clone ID: LIB36-015-Q1-E1-A7
accggtccggagnttccgggtcgccccacgcgtccgcccacgcgtccggctgtttcgatagtggatgctattagatccctcgtaactcctaccccagaaggtgactggttttctacaggggtttatacgactggaaatccttatggcatagcagaggatatcgtgttcagcatgccatgcagatcgaagggtgatggtgattacgaactagctagtgatgtgttgatggacgattttctctgggaacggattaaaaagagcgaagctgaattgcttgctgagaagaaatgcgttgcccatcttacaggagaggggaatgcattctgtgatcttccggaagataccatgctaccaggagaagtgtagtttagttacagaagcaacagcagcggaatgcatttgccaatacattagctgagacttganacatctgcttgccagatgcagcaactacttttatatatatatgtg

SEQ ID NO: 15217 - DNA, 318 bp, Zea mays
  Clone ID: LIB36-015-Q1-E1-A9
atacatccatccatccatccatctatagcagtattatgtatgcatccacatggtaataatctggctgaccgcatccgcatatggtcgtctcatcgtccatctataccttgaaagctactaattaattactgagttattattactactgtttttactactactacgtacaactacctcatctagctggtgtattaattgattttgtttgttactgctgtactactgttgttgtggagatgaaccatgcatggagtggttagtcactctttagtactttcatgacgttgttttcaacggtcaaaactaatgataaaattc

SEQ ID NO: 15218 - DNA, 370 bp, Zea mays
  Clone ID: LIB36-015-Q1-E1-B10
gtcgactcacgcgtccgctcacgcgtccggttcctctccggcgggcagtcggaggtggatgcgacgcataacctcaacgccatgatccaatggcccataccgtggcacgtgtccttctccgacgcgcgggcgctgcacaacacctgcctcaagacctgtggcgggcagccggacaaggtcaaagcggcgcaagacgcgctgctgctgcgcgccaaggccaactccctggcgcagctcggcaagtacacctccgacggcgaggccgccgaggccaacgagggaatgttcgtcaagaactacagctactaattaatcgcccggccatcacccgggataccgccgcccctccgagagatacctgtgtactgat

SEQ ID NO: 15219 - DNA, 432 bp, Zea mays
  Clone ID: LIB36-015-Q1-E1-B2
gggtcgacgcacgcgtccgcagacacgtgggcggacgcgtgggtttttttttttttaacaatacaacaattttagagagcaagagagattattgagtacacggtgaataaagcaagcaattacatgatatgattatgtggattatgctattacacataggatcgatgttgtgacgctagccagcacagcatgcagcttcacagcctcatttcacaactactacaaatcaatcacacggtagctagcgcggagcccttgagccggccggccccactcatttcacctctgagacctcgtccaaggcgtagttgttggtggacacgccggcgtaattcaccttgttgaaccgcacaaccaccgggtagcgggtgttgggatcctgatccacggtgacgacgttgccgatcccgttgtaccagtacgactccctcc

SEQ ID NO: 15220 - DNA, 463 bp, Zea mays
  Clone ID: LIB36-015-Q1-E1-B4
ggtccggaattaacgggtcgccccacgcgtccgcgagagtgagtgaacaccagccgtattgtcccgaccccgaccgatcctcgcctgctgcagccatggcgaccgcacgctcgcgcaggggctcaagggtgaccccacgtacctggtggtggagcaggacaagacgctggccacctacgggatcaacgccgtgtgcactcacctcggctgcgtcgtgccgtggaacggcgccgagaacaagttcatctgcccatgccacggatcccagtacaacaaccagggcaaggtggtccgtggaccggcgcctctgtcgctggccctggttcacgccgacgtcgacgacggcaaggtcctcttcgtcccgtgggtggagaccgacttcaagaccggcgaggacccgtggtggaaagcatgacgatgatccgaaaccagcggtgctcagtgctcacacatgagacctacg

SEQ ID NO: 15221 - DNA, 373 bp, Zea mays
  Clone ID: LIB36-015-Q1-E1-B5
gggtggccccacgcgtccataagtgttgaattagctggaagttcagttcaattgccccttgtgtggaatattcaagtgagcacatggctacgatactatgtctatgagaggttaattcataaaggaaagaaaccaggtttccttcaattgttgggtacacagacagtcagtgccatctggcatggactatagcctggatatatcatattctttgttcaatcagcattgatgataaatggttcacgagttatatacagatggcatcatgcagcgagcagttcattcctgagcggtatcctggcctttccaaattttgcttatacattgctggtgcttaactactcctgcatcgggttccaggtactgagcttca

SEQ ID NO: 15222 - DNA, 218 bp, Zea mays
  Clone ID: LIB36-015-Q1-E1-B6
taccggtcaggagttcccgggtcgccccacgcgtccgaaaataagcagaaacatgggattaaaaataaaaaaaacaaaaaaaaaaaatttcaaaaaccaacagcaaattattaagtcaacagtggagtacagcagtcaaatacctgagtggccctaggtggcttgggctaatacacttaggatcgatggttgtgacgcctgtgagagaagggaggggg

SEQ ID NO: 15223 - DNA, 371 bp, Zea mays
  unsure (1)..(371): unsure at all n locations; Clone ID: LIB36-015-Q1-E1-B7
gtaccggtcaggagttcccgggtcgccccacgcgtccgggacggcgacgagggcggcaagcaccagctcatcgcggccaccgtctccgacggcaagctctacatctgcaaggcgcaggccggcgacaagaggtggttcaagggcgccaggaagggagtcgagaaggccgcctcctccttcagcgtcgcatgatgatgtaattttatttcttcgatgggatgggatgcacgcactacgtagagagcttggctaggccaggcctggctgagcacgcttgtgtgttccttcgactgtacatgagaacaaagactaaggagagctccattcccgtacaaggatcgatttcttcagtcnagaaaagaaaagggaac

SEQ ID NO: 15224 - DNA, 332 bp, Zea mays
  Clone ID: LIB36-015-Q1-E1-B8
acccacgcgtccggtcaccaagagcaacccggagaccggcgaggtcatcggcgtcttcgagagcgtgcagccgtccgacaccgacctcggggccaaggcgcccaaggatgtcaagatccaaggggtctggtacgctcagctcgagtgattcgagtgtctaactgctacgtgtccgaccgccgtcatggatcttgggaaggtgtatgtataccatggaaaactttggatagcataggaggaatcgtgtatgtaatgtacttgttaatgcaaattcgggctgtcgcttttttaaaaaaacgtccatcacggcaaggtcatcttcgtcccatgag

SEQ ID NO: 15225 - DNA, 193 bp, Zea mays
  Clone ID: LIB36-015-Q1-E1-C2
actccctataatgagtcgtattataggcgtccagtatgccgtctgcgatcttcggcggcagcatcggcgggctgctccgcccggcgcacgtggaggagttctacgtcgtcacgtaggcgttccccatcgaggaggtgttctaggtgcatatcggcggcggcgccagcatgcgggaggggcgcacgctcgtcga

SEQ ID NO: 15226 - DNA, 408 bp, Zea mays
  Clone ID: LIB36-015-Q1-E1-C3
cgggtcgacgcacgcgtctacagacacttgtgcgaacgcgtgggttttatctttttttttgaatgccatcttactagtttaattggtattaactcagagtctcaaacgtgcctcttgttgcattgacacacatgtacaatacaatcgtacatatagtacgttttatgcgacaagcagcctctggatgcaataatactacaccccccgatttaattggactaatgcatgctgaggatggatcagatggagatgctgctggggatgcccctcccggtgactcgcagcttggataagggcttgagcaactcgtacggcacgatcccggcgccgcagctgttcttgaggtccaggttgttgttgcactcgtcgattaacccctcgatctccttcatcctgccgccgaacttc

SEQ ID NO: 15227 - DNA, 408 bp, Zea mays
  Clone ID: LIB36-015-Q1-E1-C4
gggtcgccccacgcgtccgctaatatatatcgatccaccatccctcgcagctccaaagcattgaagcagagaaccctgcaactgcaacaagccctgacgcttaatacatcggccggcactcgatcggcagcagatcaaagatggcggcggaggagggggagaaggcgaagagcggcggcggcgggcagcagatgacggtggtgcgggggctggacgtggcgcggtacatggggcggtggtacgagatcgcgtcgttcccgtccttcttccaaccgcgggacggccgcgacacgcgcgccacctaccggctgctggaggacggcgccacggtgcacgtgctcaacgagacgtggagcaagggcaagcgcgactacatcgagggcacggcctacaacgccgaccccggca

SEQ ID NO: 15228 - DNA, 460 bp, Zea mays
  unsure (1)..(460): unsure at all n locations; Clone ID: LIB36-015-Q1-E1-C7
gcctggacgtaccggtccggtagttcgcgggtcgccccacgcgtccgcgagacgcgtgggcaggaggtccttcaccgtgcgtgcctctctccgcaaggccactgccaccgccgccgtggccgttgccgccagcgtcctgcttgccggcggcggcgccatggcccangaggtgctgctgggcgcaggcgacggcgggctcgtcttcgagcccagccagttcaccgtcaaggccggcgacaccatcaccttcaagaacaacgccggcttcccgcacaacgtcgtgttcgacgaagacgaggtgccgagcggcgtcgacgcctccaagatctcgcaggaggagtacctcaacgcgccaggcgagacctactccgtcaccctcaccgtgccgggcacctacggcttctactgcgagccgcaccaaggagcaggaatggtcggcaagatcacagtcaactaaagc

SEQ ID NO: 15229 - DNA, 342 bp, Zea mays
  Clone ID: LIB36-015-Q1-E1-D1
cacgcgtccgcgagcgcgtgggcaggaggtccttcaccgtgcgtgcctctctccgcaaggccactgccaccgccgccgtggccgttgccgccagcgtcctgcttgccggcggctgcgccatggcccaggaggtgctgctgggcgcaggctaccgcgggctcgtcttcgagcccagccagttcaccgtcaaggccggcgacaccatcacccttcagaacaaggccggcttcccgcacaacgtcgtgttcgactaagacgacgtgccgagcggcgtcgacgcctccaagatctcgcatgaggagtacctcaacgcgccaggccagacctaccccgtcaccctca

SEQ ID NO: 15230 - DNA, 464 bp, Zea mays
  unsure (1)..(464): unsure at all n locations; Clone ID: LIB36-015-Q1-E1-D3
ggtcggaatatcgggtcgagncacgcgtccgcgccaaagacaagctgggcaacgacatcacggtggaggagtggctcaacacgcacggtcccaacgaccgcacgctcgcgcaggggctcaagggtgaccccacgtacctggtggtggagcaggacaagacgctggccacctacgggatcaacgccgtgtgcacccacctcggctgcgtcgtgccgtggaacggcgccgagaacaagttcatctgcccctgccatggatcccagtacaacaaccagggcaaggtggtccgcggaccggcgcctctgtcgctggctctggttcacgccgacgtcgacgacggcaaggtcctcttcgtcccgtgggtggagaccgacttcaggaccggccaggacccgtggtggagtgcatgangacgatcatccgacacaagccgtgctcagtgctcataggctttctccgagggc

SEQ ID NO: 15231 - DNA, 268 bp, Zea mays
  Clone ID: LIB36-015-Q1-E1-D4
ggtccggaattaccgggtcgccccacgcgtccgcaaagtattgagaggtgtcgccgtcctagtaaaaaaaaaagaggcgacgctggaaatcgatctctgcttcaacaatggatcgtaatataattttattatgcgaatataaggcaagctagctatgtattttttttattaaaaaaatagtacaacaaaatagaacaccagtgattgcacgtatgggcttatcactatcttctctttttgcctaaaagaaaaaatttccaaagagaaa

SEQ ID NO: 15232 - DNA, 465 bp, Zea mays
  Clone ID: LIB36-015-Q1-E1-D5
taccggtcaggtagttcccgggtcgccccacgcgtccggaaatcggcatgatcagcgccgtgcccgggatgaaggcgctcgacatgaacgccgccgaggacgagatcgtgcgcctcacgcgcgaggtcgtgcccggcatgatcgtcaccgggatggaggtcgcagagatcgacggcgccccgaggatgggcccgacgttcggcgccatgatgatctccggccagaaggcggcgcacctggcgctgaaggcactgggcaggcccaacgccgtggacgggaccatcccagaggtgtcgccggcgctgcgcgaggagttcgtgattgcgtccaaggacgacgaggtcgtggacgcctgagcgagcatccacgcgccagcatgcaagcagcgtcttatctgggccggcgcatcacggggtttcttcttttaatctgggactttgttgctgttggacgaatgaattccct

SEQ ID NO: 15233 - DNA, 399 bp, Zea mays
  Clone ID: LIB36-015-Q1-E1-D7
gggtcgccccacgcgtccgggacaacatcctcacggggctcttcttctccagcatcggccaggagctggcccacttccccacgcccccgcccgtcacctcccagttctggctgtggctagtgacgtggcacctgggcctgttcatcgtgctcaccttcggccagatcggattcaagggcaggaccgaggactacttcgagaagtgaagcggttaagatcctatccatcatccctggtgctgcgctgcgttgcgttgcgtgcgtgctcgccgctatcgaacctttgctgtatacggttccgatttcgtcgaatgtaatgtatgatgctacttttgagcttcaatgtaaaatctatgccgtccggccccaggagaaaacatgtgagcaatacaaagggcgg

SEQ ID NO: 15234 - DNA, 450 bp, Zea mays
  Clone ID: LIB36-015-Q1-E1-D8
taccggtcaggatttcgcgggtcgccgcacgcgtccgcaacgacgccctcgccaccgacgagccccgcgaggttgccaagatcgccacgctcgtgccgccgctgccggagcgcggcgggctgttcgccgtccaggccacgctccttcccgcgcgccgcggcctctccatcggcgtcaccgtgcaccacgccgcctgcgacggctcgggctccacgcatttcctgcacacctgggcggtcgcctgcagagccggcgcagaagcgccgccgccgccgccgcctgtcatcgaccggtcactcatcgccgacccaaggcgcatgtacgacgtcttcatccaaggagcgccgagcactgaagagtacgagttcgtcaagatgtccgccgaccagctcttcgctacgttcgcgctgtccaatgacgaactgaagcgcatcaaggacgctgtggccg

SEQ ID NO: 15235 - DNA, 355 bp, Zea mays
  Clone ID: LIB36-015-Q1-E1-D9
atcaccatcagtaccatttcatcttggtttaaactatacatacagtcgcagctgacacaacccaaggcatgcctattatatacacacccttggctttgcttggctgctgttattctgtaagcacgctagctagcttctccagctctccgggctctaacacgtagatgtaaaccatctgctacacatacgtacatagcgtggtggacagaaatggatggatcagggtcttcaggcgtgcgccagctccttggagacgccgtcctggtacggcgcctcgcagaactcgccgccaaggtcatcgcacgcctcgcccgggaacaccgtccttggctcgtcgtaggacaggtaatccctg

SEQ ID NO: 15236 - DNA, 444 bp, Zea mays
  Clone ID: LIB36-015-Q1-E1-E10
gtcgacgcacacgtccggcgacaacagcgcagcggcgccgccaccggacgtcagatctccgttgggtgtttgatggcgatgagcacctgtcaggtactctaaggtcactttctctcattaaggtagtactgagttcattgcatgactatgacttctgaaaatggacacattttggctcttctgtctgagcgaagcataaacgaagagcaccttgaggcttctgaatctgatgctatgttttctgcaattatgaaatccattgattcacctaagaatgtactttaagtatcacctgaggaagctgcctgggcagattcatgcttcgtgacatcttctgaactgtcatatgatgatctgcggatcgatgacgaatatgctgcttgatgctctcgaaaatccaacagaaagtcacaatgataactcagaaagtgcacataatgcaat

SEQ ID NO: 15237 - DNA, 423 bp, Zea mays
  Clone ID: LIB36-015-Q1-E1-E11
tccggtattcacgggtcgaccgacgcgtccgcggacgcgtgggcggacgcgtgggctcccgctcgtcctcctcctctcctcctggacagcagagcacagcacagtcacaccgagaaagaacaagcagccgccatcggagctcggaaccaccatcagcagcagcacacccggtcaaccttccacacgcgcacacacacacacacatggcgtctcagcagaggcaacagcaggcgggagcggcggcggcgtcctccgccgtgggcttcgaggactacctgccggtgatggcggagcggctgggcgaggacgggctgatgcgggagctggcgagcgggttccggctgctgatggacccggcgcgcgggctcatcaccttcgacagcctccggcgcatcgcgccgctgctgggcctgggcggcatgt

SEQ ID NO: 15238 - DNA, 438 bp, Zea mays
  unsure (1)..(438): unsure at all n locations; Clone ID: LIB36-015-Q1-E1-E2
cgggtcgccncacgcgtccgccaacacgtccgccccgccacaaggaggagcgtccgtgtagctgccgtcgtcgcgaccgaggccgcgcagatcgactacagctcaagcgtctcggtgttcccgatggaggcctgcgacctgcttggtggcgacgcgtgcaacgggcccatgttcccggaggccaagcccgcctcggcggcggcggcggcgagcaggagtgtggtcggggtggacagggactacctgtcctacgacgagccaaagacggtgttcccgggcgaggcgtgcgatgaccttggcggcgagttctgcgatgcgccgtaccaggacggcgtctccaaggagctggcgcacgcctgaagaccctgatccatccatttctgtccaccacgctatgtacgtatgtgtagcacatggtttacatccacgtgttaagcc

SEQ ID NO: 15239 - DNA, 251 bp, Zea mays
  Clone ID: LIB36-015-Q1-E1-E3
gatcgattcaaaaatgaatggcacaggccatcgatagattgattcatccactgatgacgatacatgcgtctgtgcttagtttacatcgaccgcttacagcaggcagccattgacattgattgatgagcacacatcgatcatgagcatacgccggctggtgcaactactacacgcctacgatctgaacaagtagagtacagagaagaccacactgttcactcgacggacgggccaacgaattgatggatctg

SEQ ID NO: 15240 - DNA, 414 bp, Zea mays
  Clone ID: LIB36-015-Q1-E1-E4
cgggtcgagccacgcgtccgcccacacgtctgcagcaaagcaacacgcgcctcgatcctcctcgcccctccggcctctcctcccctccctgcacccgcacctgcggagagcgccgcaagctagctgcagaggagcgagacagtatcaggaggaggacgagaggaagaagagatggcgggctgtgatggagccaagtcgtcggcgtccatggaggaagaggcatgcgcggagaagaagtacggagggatcgcacccaagaagcccttgatatccaaggaccacgagcgcgcctacttcgattctgcggactgggtgctgggcaagcaagccgcgaacagcatcagcagcacgaggaccgcaaccgcggtcgagtctctggaacccaacctgaagagaacgccgcagcaccagctg

SEQ ID NO: 15241 - DNA, 301 bp, Zea mays
  Clone ID: LIB36-015-Q1-E1-E5
tcgcgggtcgacgcacgcgtccgcatatcgtcaaatgacagctatgtttatgccgaaggggaaaaatgattcaacggtctaccgatcgatacgtccatggagggtgttggttatgttttgatgacaatgctgttcgaaagcagtcttcgtccgtctacaaggactactatgtactatcatcgtcaagagagatagagagatgacgaccacatgaacagtgcgattatcaagtggaagtttgcttgtaccgatgatgatagttgccggtggaatcgactaggctcagttcagtgtgatctct

SEQ ID NO: 15242 - DNA, 419 bp, Zea mays
  Clone ID: LIB36-015-Q1-E1-E8
gggtcgacgcacgcgtccgcacagattactctccaacgccctcggtatgaagctcagggacaacctcaacaagctcaaaaagatcagtcccttgttggatttcatttctagcctacccgatggtgagagcaagtgaacgcatgcgcacttggaggagacaacgtcacatgataaggttgttcaaggcgttgatcaagtggacgtagcggcttatcgacaagcatgttttggtcctggagagctacaacaagaaagtttctttcgctcagatacatctccattttgttctgaagctcatatttgggaatacaaaagaatcgaaaggggaaaaggcagagaggattgttggtctcaactctcaagtcagtaccagcagcacagttgaatgtttggtaatttggtgggagaagcctggagag

SEQ ID NO: 15243 - DNA, 386 bp, Zea mays
  Clone ID: LIB36-015-Q1-E1-F1
ggtccggacttaccgggtcgagccacgcgtccgcccacaagtccgcccacgcgtccgcggacgcgtgggtttgtatatccaagccactaaacctgaccaaacagttcacagtcaaatactgagtatagcatatataaaatgttggttgcctgatcagtgtaaaagaatgctgcaaatgcgtgtgatcgataatatcagctctcttcgggggctatggttgcctgatcagtgtaaaagaatgctgcaaatgcttgtgatcgataatagcagctctcgtcgggggctatggatagcaatacaaagcgttctctgccctgtgacaacgtgggagaacgaattttacctccggccttaatctgtaatataacatctcacccagctgtggt

SEQ ID NO: 15244 - DNA, 450 bp, Zea mays
  Clone ID: LIB36-015-Q1-E1-F11
cacgggtcgacgcacgcgtctacagacactcgcgcggacgcgtgggcggcctccggggctacgccgcgcccatgtccgcggtggcagcgctgccgttcgtgagggtgggcaggaagaggtcgtcgtcgcagggcatccgctgcgactacatcggctccgccaccaacctgatcatggtgacgacgacgacgctgatgctgttcgcggggcggttcgggctggcgccgtcggcgaaccgcaaggcgacggcggggctgaagctggaggcgcgcgactccggcctgcagacgggtgaccccgccgggttcaccctcgccgacacgctggcctgcggcgccgtcggccacatcctcggcgtcggcatcgtgctcgggctcaagaacaccggcgccctcgaccagatcatcggctagatccctacgtcgtcgttgttaagatcagactcagcag

SEQ ID NO: 15245 - DNA, 443 bp, Zea mays
  unsure (1)..(443): unsure at all n locations; Clone ID: LIB36-015-Q1-E1-F4
cgggtggacncacgcgtccgataaaagaaacactaatggcagccctttttccaatgccaaatcgacgacctatgtataaaaaaaagagaaattttttggatttgaagaaaaaataaaaggaattctatcaatttttattttccatttatttagttagtttttcttaatgaaattgaaattattaactaacagagcaaacacaaataaagaaacaactttgctgaccatgatagatttttatctagttggaagagtcctcttaatattcatctagtcttatataagtttgggtatatagaaatacaaacagaaaagagaggatagaggataggctcattacataaaaaaaagatatggaaatagccataatacataacaaaaaagaaaaaaaggagcgggagagccaaatgaatcgaaagattcatgtttggttcgggaagaga

SEQ ID NO: 15246 - DNA, 414 bp, Zea mays
  Clone ID: LIB36-015-Q1-E1-F5
taccggtcaggacttcccgggtggccccacgcgtccgctactttttggatgatttcacgggatttgaaatcacatatcttctcgagttgccggagcctttcagtttcatcttcacatggttcgccgcactgcctttaatattttgggtagcgcaggcgatcactaatgtcatagtgaaggacttcctgatcttgaagggtccgtgtccaaactgcgggaatgaaaacctctccttcttcggtaccatactgtcagtgcctagcggtggctcaaaaaacagcgtgaaatgtgcaagctgtggcactgagttggagtacgactcatcaagccgattgatcacactcccagaaccggctgaggcttaataagtgatggcgtggtttcgatttcgctagcaggaaagatggcccggcc

SEQ ID NO: 15247 - DNA, 395 bp, Zea mays
  unsure (1)..(395): unsure at all n locations; Clone ID: LIB36-015-Q1-E1-F6
ccgggtcgccccacgcgtccggcatgaccagctaggatcagcggaagcagcaatggtgatggcgtcgtcgagcgggctgaggagctgcagcgccgtgggcgtgcccagcctgctggctccgtcgtcccggtccggccgcctggcgccgttctgcgccaacgccaccacctctggccgcgtcaccatgtccgcggagtggatgcccggccagccacgccctgcccacctcgacggctcctctcccggggacttcggcttcgatccgctgggcctcgcgaccgtgccggagaacttcgagcggttcaaggagtcagaggtgtaccactgccgctgggccatgcttgccgtccccgggatcctggtgccggaagctctgggcctgngcaactgggtga

SEQ ID NO: 15248 - DNA, 436 bp, Zea mays
  unsure (1)..(436): unsure at all n locations; Clone ID: LIB36-015-Q1-E1-F7
taccggtcaggacttcccgggtcgccccacgcgtccggcaaaggcagcacactcagctatccagcaaaagagatcgagaggcaggagtcatggccaccgtcagcgccgccgtggtgaccaccatcgttgcccgcgccgcgatcgccaggcccaatgctctagggctgcctgcgctgagggcgaggagcgagagggtgcggtgcagctacgccaaggacgcggccccagtcagcaccaagggcgcaggcgcgtcgctgctcgccgcagcgggcgcggtgaccgcgtcggcggggcccgcgctggcgctcgtggacgagcgcatgtccacggagggcaccgggctgagcctcgggctcagcaacaacctgctggggtggatcctcctgngggtcttcggcctcatctggtccctctacaccatctacacctctgacct

SEQ ID NO: 15249 - DNA, 393 bp, Zea mays
  Clone ID: LIB36-015-Q1-E1-G1
cgtattacagtcgcctagccagcaaaagagatccaagtggcaggaatcatggccaccgtcagcgccgccgtggtgaccaccatcgttgcccgcgccgcgatcgccaggcccactgctctatggctgcctgcgctgagggcgacgagcgagatggtgccgtgcagctacgccaaggacgcggccccactcagcaacagtgggctcatgctcgtcgctgctcgccccaatctggcacggtgaccgacgtcgggagtcgccgcgcttgcgctcgtgggctagctcatgtccactgacggctacgggcttagcctctggctcagcagcagcctcctggggtggatcctccttgagggtcttccgccctcatctgggtccctcgtacaaccatctaca

SEQ ID NO: 15250 - DNA, 372 bp, Zea mays
  Clone ID: LIB36-015-Q1-E1-G2
ttcgccgcaagaccctagaatgagtcgtattacctctccatttgattgttgatgttataattgagcaaggctgtctacaatctgcttacagcttatacacatttagaatagaaagcatagcccatgggaaacctgcttcagtggatgaactgcaatttcatggtgtccataatccagattttccaagaaaggttataaccagagaagcctccaggagcatcagagaagtccaaagttggcaaaatagattgtactccgaggaaggtccttctcatgttcaaagtagtggattacactcacctagtgcaaaagtcagagcttccccaatctgtgctgcctttgattccaaaggtaaaatttctgacaatatag

SEQ ID NO: 15251 - DNA, 166 bp, Zea mays
  Clone ID: LIB36-015-Q1-E1-H1
ggtccggacttaccgggtgcgccgcacgcgtccgtcaacaataaccttcgagattccctacgttacgatgaataacgctgggaactggtgagtgttgtaacaacatgatagaactactcctcgaatcacttcagtcacatggctatacacgtgcggtcatcctccg

SEQ ID NO: 15252 - DNA, 449 bp, Zea mays
  Clone ID: LIB36-015-Q1-E1-H10
gtcgacgcacgcgtccgcccacgcgtccgggtccagcttcgactggctcgcagtggcaactggcaggtatgcacacgcgaagcgataaggtcggttaagccgtaacagtcgttgatgtcgccgccgccgtcgtccctcgtggtgctcccgctcctcctccccctcctcctcgccgctgtatcccacgctacggctaatgcggccggtgccggcgcccctcccccagtgccgacgccgtggccggagcagttccacgcggtggtcttcaccaatctcaccgagagcggcggccggctgcagctgatcgacctgtactacgactggcccaggggccgcaacctcaacctcatccgggaccagctctccagcgacccgctctacgacgtcgagtggaccaacggcacctcctacttcttcgactccgggtcctgccgcaccatgcgtttccc

SEQ ID NO: 15253 - DNA, 348 bp, Zea mays
  Clone ID: LIB36-015-Q1-E1-H2
gcgtccgggaagcaaggcgttggcaatctcagtccattcgtcggtgcactcgcaatttcccgtcacagctggccactgctccaccctcacggcctcacctcctctcgctacacgcacgcgcccacctatccaaaacgaccgcgcgcggcgccctcctcccgcggtgccaccagcaacagcaactcgtcggatcatcatcacaccgatcggcatctatgcagctcccgcctccatcaccgcgagcggcgatggcaatggacgcggccgtggccgtgaagagcggcggtggcagtgccggatcgaccggggtcaccgcagaggcctcgcagtccccgcaggctgcgacta

SEQ ID NO: 15254 - DNA, 446 bp, Zea mays
  Clone ID: LIB36-015-Q1-E1-H5
gggtcgccccacgcgtcagctaacgcgtccgcccacgcgtccgcccacgcgtccgatggaagcagcgatggctgccacgtcctccctactccttgcctccggctccaggaggtggccagcaaccttgcctccttctccctcgcggcagcatcagcgtctggttattttctgcctcgctgcaagaacgaggccgctggacagcaagaggggtagctggaggcgctcttccagtgccaccggcggccggtcgaccgccgtctcgtcgtcgtcagaaagatgggttcgcgaccctgcaggagacggtgactggcgccacatccgctacaaagtcgcgcgccctggggcgatcgagagagtctcggtaactgcagtatccatccattgcctccacacgacacaccccctgtctggcactggcactcacgttcgactctcccacaggagga

SEQ ID NO: 15255 - DNA, 315 bp, Zea mays
  Clone ID: LIB36-015-Q1-E1-H8
ccacgcgtccgcaaaaacgccacgccgcgagactcccacgcggtccgcccccgcgtcgtctggcctcgcgatggccgcgccgactacgaccgcgcgcaccgcccctacgcggctcccgcccccgccggtgagtacgaccgcccctaccgcaacgaggtcgtgccctacggtgaccgccgcatcgacatcatcgtcaagccgcccgcgatgtcgccgccgccggtatccaccaggggcggcgggggaggggtggggtcggcgtggtgcttcagcgatccggagatgaagatgccgcggccggtggccagctacaag

SEQ ID NO: 15256 - DNA, 251 bp, Zea mays
  Clone ID: LIB36-016-Q1-E1-E11
gtgatggatatctgcagcattcggcttagcgtggtcgcagccgacgtacctacactacacgaatgaccccacattcaaagttggtataacagagggagacatgatctcaacgcagccacatcacagatgtggcaaactatacggaatgaacaatattctatacagggcacttatttcatagccagatgtgacaagcattttcagttcgtacctgatctgccgcctgtaagcgttcacagacttgaagttga

SEQ ID NO: 15257 - DNA, 60 bp, Zea mays
  Clone ID: LIB36-016-Q1-E1-H12
aatatgtcataacactctatagtgagtcttattataatctacaacactctacactgagtc

SEQ ID NO: 15258 - DNA, 418 bp, Zea mays
  Clone ID: LIB36-016-Q2-E2-A1
caaaaatgaatggcacaggccatcgatagattgattcatccactgatgacgatacatgcgtctgtgcttagtttacatcgaccgcttacagcaggcagccattgacattgattgatgagcacacatcgatcatgagcatacgccggctggtgcaactactacacgcctacgatctgaacaagtagagtacagagaagaccacactgttcactcgacggacggacgaacgaatggatggatctgatggtagtacacatgtacggcgttgctcagtcagttagttgccggggacgaagttcgtggcgtatgcccaggcgttgttggcgacggggtcggcgacgtggtcgaagaggttctcgatggggcccttgccggtgacgatggcctgcacgaagaagccgaacatggagaacatggc

SEQ ID NO: 15259 - DNA, 451 bp, Zea mays
  Clone ID: LIB36-016-Q2-E2-A11
tgcagatacagcagagagccatcgacacgatcgcgagcgcaagcacgtacgttgtcggaagctcaagttagaagaagcaccagtgcctgatcgatggcagcccatgctctcctctccggccggcagctgctgggccgccccgtgcagtcggccgtctctaggtcgtcggcgacgaaggtgcccttcgttgtcacggctagctccagccctccagccaatcaaggtgccgataggcagctgtggttcgcgtccaagcagtcgctctcctaccgcgatggcacgctgcccggcgactatggcttcgacccgctgggcctctcggacccggagggcaccggcggcttcatctagcccaagtggctggcctatggcgaggttatacaaggccgctacgccatgctgggcgcggtgagcgccatcgcaccggagatcttcagcaagatgggcatca

SEQ ID NO: 15260 - DNA, 420 bp, Zea mays
  Clone ID: LIB36-016-Q2-E2-A3
cggatcgaccacgcgtccggtcacgcgcagagcacagcaggagcgacgccagagatcgtgacgctcgacgcgaggcgaatggggtagctgtcgtgggtgttgctgtcatcatttgctgtccgcgcggcgacggcttcggccacggggttcttcctcctctacaatgaccacgtgttctcacgcactgcaatcatcagacagttggaggacatcacagaaacttctgaaaagcattatccagctcttaactaaaggatatcttcactggaaaccagtagagaagcaggatctatcactcaagcatcacattagttctgacttgcgcttacgtcatcgttacatctgcccatatgttattgattgctgcaggcagtagaaactgcagcattttaagccgtgctaatgtattgttgacattct

SEQ ID NO: 15261 - DNA, 415 bp, Zea mays
  Clone ID: LIB36-016-Q2-E2-A4
ctacgcctgccgcattcatgaccttcttcggaatttgtggcttgctcctcggctctgtcccatgcttcctcaagggatgcgttttcgtgatggatgccttcgtcgagtactaccggcacggcggagggaaggtcatcctcctgctggtggaagccattgagatgtttctcattgcaacggtcacgtttgtcttggggacgggcttgtacgagctcttcatcagtaacatggactccttttacgggtccaacctcctcggcctgttcagccttccggaacgggccaagtgggttgaaatcaagtcggtaaatgatctcaagacaaagctgggccatgtcattgtcaagggtcctctggttggcatccttcgagaaagagcaagaaggtgaccaccaaatcctgtgctgacctcttg

SEQ ID NO: 15262 - DNA, 446 bp, Zea mays
  Clone ID: LIB36-016-Q2-E2-A8
aatactgggacgcgtagtacgtcgcaacaccctatagagagtcgtattagcccgcggcatggagcgcgcgtcgtgctacgtgctttccacctgccgcgtgcgctcgtcggccgggttctgcacgcacttctgcctcgcgcgggcgcagtgcttcggcgaccctgtcgagctccagctccgcaacgcctggctcaaccgcctggccggccgccggtagccgcccgtcggcagctgctgctactgatactactaataggattcgatgctccaaggaccaaatgcaatgatgcctcctcttcgctggcaagaacgaggaagagaagcttgcagattggatttgaagcaggggaggccaacatatcttttcgttctcccggaattggatatcaattgtacagattagtgattgtaaatttgcgtagtcaatcaagaagcaattcatcgag

SEQ ID NO: 15263 - DNA, 494 bp, Zea mays
  Clone ID: LIB36-016-Q2-E2-B3
acaggaccgggactcgcgggacgacccacgcgtccaaagacaatctgattcattgattcttgaagagatcgagcttcttttgcaccacaaggtcgaggatgtcttgcaactgcggatcaagctgcggctgcggctcaagctgcaagtgcggcaagaagtaccctgacctggaggagacgagcaccgccgcgcaggccaccgtcgtcctcggcgtggccccggagaagaatgccgcgcccgagttcgtcgaggccgcggcggagtccggcgaggccgcccacggctgcagctgcggtggcaactgcaagtgcgacccctgcaactgctgatcacatcgatcgacgaccatggatatgattattatctatccagcttgtggtggtggttgaacaataataagccaggccgagctggctgccatacataggtattgtgtggtgtgtgtgagagagatagacacagagttcttcagtctgctatctctctctgcatgt

SEQ ID NO: 15264 - DNA, 341 bp, Zea mays
  Clone ID: LIB36-016-Q2-E2-B4
atgcatagtgtgtgactcgttagttttttctttagggtcaaaaatggaaaaaaacttagtaatgatagaaaattaactaataaccaacctattgcttcgtattgtcgagatcctaactaagaaacagtcactatgtgaataaatacatctatcaaaaatgagtagatctatcatatagttgtagcaactgcatttttttctctacaaaagaaacctgattctaggctgtgaagcaaaactaaagggatgtggataaaaggagggatgatagataaaaaaaaaaaagaaaaaaaaagaagaaggaaaaaacaaagaaataaagtgaaaaagaaaagatagac

SEQ ID NO: 15265 - DNA, 75 bp, Zea mays
  Clone ID: LIB36-016-Q2-E2-B7
tcaatactgggacgcgtgggacgacgcaagactctatagtgagtcgtactagccgattggaatctcgtttcaaag

SEQ ID NO: 15266 - DNA, 455 bp, Zea mays
  Clone ID: LIB36-016-Q2-E2-C1
gggacgacccacgcgttcgctttatctcggaattgaagacgggtccgttttaatttgatctgcgctggacgaatttagctagtctgatcgaattgaatcgtcgtgcagttggatgactgggtgctgtgccggctgtacaacaagaagaacgagtgggagaagatgcagctggggaagaccgccgtcgccggcgtcggcgccaccaaggaggaggcgatggacatggccacctcgcacacgcactcccactcccaatcacactcgcactcgcactcgtggggcgagacgcgcacgccagagtcggagatcgtggacaacgacccgttcccggagctggactcgttcccggcgttccaggacccggcgatgatgatgacggtgcccaaggaggagcacgtggacggctgcagcgccaagagcggcaacctgttcgtggacctcagctacgacgacat

SEQ ID NO: 15267 - DNA, 234 bp, Zea mays
  Clone ID: LIB36-016-Q2-E2-C4
cggaactctcaactccggcgatcaccgtttagctcgtacataacaaatgacaaaattaatagcatagtttttgttcaaacacattatcatttatggttagaatatctgtgtatatgtagtggtatagtcaatggggaaatcgttcctgcctctaaattcctttttttcaagttaaggtgtttcttttgtcgcaagttaatctgcctggttattaagatattattgtttacaaaa

SEQ ID NO: 15268 - DNA, 143 bp, Zea mays
  Clone ID: LIB36-016-Q2-E2-D1
cccaagcgtccgcagacgcgtgggccagttttctctgctggatgtgatgtatccattgttgcaagcatggccttgcattggctacctctatacctgctgctacaaaaaaaacaaaacacaaaaaagaacaaaaaaaccaaaca

SEQ ID NO: 15269 - DNA, 315 bp, Zea mays
  Clone ID: LIB36-016-Q2-E2-D12
atagtgagtcgtattagacagtactactcactatagtgagtcgtatgatgcatcgagcttcgcaacagcgttcttttctctctcgtatctcttcacagtgcttcttcactccgagaccgggaattcacggatggtggatccggtactactgggtttgcccactggcttggacaatgtctgggctcatcgtgacacagtttggacacctataacaactcatcttactcggtgcagaaagtgagtacgacgagatgctgctatgtaatacatgattttggataccataacgattttctgccactcactccgccggtt

SEQ ID NO: 15270 - DNA, 460 bp, Zea mays
  unsure (1)..(460): unsure at all n locations; Clone ID: LIB36-016-Q2-E2-D9
aagcaagcaagctcgatctactactactactagctggtacacatactagccagcctgccagccagcttgccatggcgcccaccgtgatgatggcctcgtcggcaaccgccgtcgccccgttccagggtctcaagtccgccgccagcctccccgtcgcccgccgcagcaccaggagcctcggcaacgtcagcaacggcggaaggatccggtgcatgcaggtgtggccggcctacggcaacaagaagttcgagacgctgtcgtacctgccgccgctgtcgacggacgacctgctgaagcaggtggactacctgctgcgcaacggctggataccctgcctcgagttcagcaagctcgggttcgtgtaccgcgagaactccacctccccgtgctactacgacggccgctactggaccatgtggaagctgcccatgttcggctgcancgacgccacgcaggtgtt

SEQ ID NO: 15271 - DNA, 458 bp, Zea mays
  unsure (1)..(458): unsure at all n locations; Clone ID: LIB36-016-Q2-E2-E11
taagaaggataaaaaggccaaagaaaaggatggatcggaaccaaagggtgacaaggatgaagatggtaagaagaaagaggccgatggcgatgaagacgaagaaggtaagaaggaggacaaggaaaagaaagagaagaagaggaaacacaagggtgcaaaggagaagacgattgatccggtgaagctgaaggcaaaactggagaagattgatgccaaattgcatgacctacaggccaagagagaagacatcctgaggcagctgaaagagctggaagaaggcggcaagggaaacgcgaatgaagaggagcctgcacatgtgcangaggacaaagggaaggatgttgtgcctgcacagatactggaacaggttggagagagcaaggtcgangaacagaatcctgttgccacagcctgatcttgtggagattctgtancggttcatgtaacaataactctga

SEQ ID NO: 15272 - DNA, 228 bp, Zea mays
  Clone ID: LIB36-016-Q2-E2-E12
cggacgcgtgggcggacgcgtgggcttcttcttctagttcttatattaataattaagctagctgctggatgcatggtttgatctaaatatatgtggacatggatgtgtaattttagtaatttcttggtgaccgtggaggcgcagcgtgggactctatgtacatgtgcatctgctcctcatgtctatgcatatgacaacgttgccataacacctgaatctttcaataaa

SEQ ID NO: 15273 - DNA, 374 bp, Zea mays
  Clone ID: LIB36-016-Q2-E2-F12
gcgggtcgacgcacgcgtctacatcgactacgtctcagaccccgtcgccaacaacgcctgggcatacgccacgaacttcgtccccggcaactaactgactgagcaacgccgtacatgtgtactaccatcagatccatccattcgttcgtccgtccgtcgagtgaacagtgtggtcttctctgtactctacttgttcagatcgtaggcgtgtagtagttgcaccagccggcgtatgctcatgatcgatgtgtgctcatcaatcaatgtcaatggctgcctgctgtaagcggtcgatgtaaactaagcacagacgcatgtatcgtcatcagtggatgaatcaatctatcgatggcctgtgccattcatttttgaaa

SEQ ID NO: 15274 - DNA, 62 bp, Zea mays
  Clone ID: LIB36-016-Q2-E2-F8
cccacgcgtccgcccacgcgtccgcccacgcgtccgcggacgcgtgggcggacgcgtgggcg

SEQ ID NO: 15275 - DNA, 120 bp, Zea mays
  Clone ID: LIB36-016-Q2-E2-G12
ttaatttgaacaagtggtgcaactgcgcgtgtacatggatttgctcttcctctatgtctctgtctctctgtctccggttactttccctgtttcactatgccatgcacatagacattgcca

SEQ ID NO: 15276 - DNA, 474 bp, Zea mays
  Clone ID: LIB36-016-Q2-E2-G3
cgcgtccgccctagcgtccgcccacgcgtccgcggacgcgtgggcggacgcgtgggagaacatgaaggaaacaccgccgccgccgcgccttccattccagtactcgcggaggaaatgaacaccagccagcgccatggtcacgtcgacgaccgccgccgccgtgctgtccccgccgtccgtggccgggcttcgcctggcgccgtctccccgggcgcgcgtggcgttccgcgcggcgcgggcgcggcggtccgtggcggcgcgcgcggagctgagcccgtcgctggtgatcagcctgagcacgggcgtgtcgctcttcctgggccgcttcgtcttcttcaacttccagcgagaacgtggcgaagcaggtgcccgagcagaacggcaagacgcacttcgacgccggcgacgagcgcgccaatgagttctcgggcctgctcaagttcaacgaccccgtgggcttcaacctcgtcgacg

SEQ ID NO: 15277 - DNA, 471 bp, Zea mays
  unsure (1)..(471): unsure at all n locations; Clone ID: LIB36-016-Q2-E2-G5
gtcgacccacgcgaccgggcactctgaatctggttctatgcagtctgttgatgatatcctaccacgtagggggattatgggtcttccgaagctctctattggtgaaatgggtcagaattctgctgaccctgagcttgtttgctttgactatgctgattcagaagagagattaagtgatatatcagatagtggtctttccatgggtacagagacggatgtttcagtaagcagtatagttgagttgacacgttttcaggagcaggaaaacatacctagcactctgaaagaacaagagagtgcacgaaaaattccaaatgatcagttgtccaaggtggccacccgagttcagaagacaacagtacccaaactagctcaaacttccttgtggcctaaactaagagatcctccagcccttagatccccagggagaatcacaacacanacaatatctgtaccaaggacgtccatgac

SEQ ID NO: 15278 - DNA, 453 bp, Zea mays
  Clone ID: LIB36-016-Q2-E2-G7
cctggacgtactagtccggaattcgcgggtcgacccacgcgaccgagcacaccgcccccggtgtgctctccatggccaacgccgggcccaacaccaacggctcccagttcttcatctgcaccgtcgcgaccccttggctcgacggcaagcacgtcgtcttcggccaggtcgtcgagggcatggacgtcgtcaaggccatcgagaaggtgggcacccgcaacggctccacctccaaggtggtcaaggtcgctgactgcggacagctctcctagatctctctgatctggtctgttcggccgccctccctccgtcatcgtcgactccccctgcgtccgttcctttggatctgaataagatggtggtgatctgagtggtggtcttaggttatcatgtatcgctcgcagtttaatttagcggtttacgtgtggatctgtaaccccatggcgcctctgc

SEQ ID NO: 15279 - DNA, 450 bp, Zea mays
  Clone ID: LIB36-016-Q2-E2-H3
tgctcgatctccatctcgaccgtcgctcaccgggaagctacgctacgacgaagcatggcgtccgtcaccgcccgcgccccggtcgcggccctgcgcccgtcggcgtctctcaagtcgtcgtcgtcgtcggcggcggccttccttggccactctagccgcctcggccgcactgctaccgcgtcgccgacgaggcgcagcctaaaggcggaggccaagggcgagtggctcccgggccttccctcccccgcctacctcgacggcagcctgccgggtgacaatggcttcgacccgttgggcctggcggaggacccggagaacctgaggtggtacgtgcaggcggagctggtgaacgggcggtgggcgatgctgggcgtggccgggatgctgatcccggaggtgctgaccaaggccgggctgatcaacgcgccgcagtggtacgacgccggcaag

SEQ ID NO: 15280 - DNA, 408 bp, Zea mays
  Clone ID: LIB36-016-Q2-E2-H5
gggtcgacccacgcaaccgcgccgcaccagcgccagcccgcgccgtggtcagaaggaggtccttcaccgtgcgcgcctctctccgcaaggccaccggcaccgccgccgtggcaatggctgccagcgccctgcttgccggcggtgccatggcccaggacgtgctgctgggcgcaggcgacggcgggctcgtcttcgagcccagccagttcaccgtcaaggccggcgacaccatcacattcaggaacaacgccggcttcccgcacaacgtcgtcttcgacgaagacgaggtgccgagcggcgtcgacgccaccaagatctcgcaggaggagtacctcaacgcgccagccgagacctactccgtcaccctcaccgtgccgggaacctacggcttctactgcgacccgcatc

SEQ ID NO: 15281 - DNA, 465 bp, Zea mays
  Clone ID: LIB36-017-Q1-E1-A1
acaggtccaggactcgcgggtcgacgcacgcgtctacacacgcgttctggcatcacggccgacgacgtgaacgcggcgttccgcaaggccgccgccggcccgctgcagggcatcctggatgtctgcgacgtgccgctcgtgtccgtcgacttcaggtgctccgacgtgtcctgcaccatcgacgcgtcgctcagcatggtcatgggcgacgacatggtcaaggtcgtcgcctggtacgacaacgagtgggggtacagccaacgcgtggttgatctggcgcacctggtggcggccaagtggcccggcgcggcggcggccggcagcggcgaccctctggaggacttctgcaaggacaaccccgagaccgacgagtgcaaggtgtacgaagcatgaggccacggttctttccacgacgggacgtacagcacgggcgcgaggggtttcttcatagagaataatatacag

SEQ ID NO: 15282 - DNA, 446 bp, Zea mays
  Clone ID: LIB36-017-Q1-E1-A11
actcgcgggtcgacgcacgcgtctagtattcgtcgctgaaggacgactgaaccaccgacagacaacatggccgcctccgcctccaccgtctccggcctcgccggcgcctccctggccagccgcccggcgttctccaccagcttcacgcggggcagccgggtgtcggcgaggaaccccctgatgagcaggaacctggagaggaatggcaggatcacctgcatgacgtttccccgggactggctgcggagggacctgagcgtcatcggcttcgggctcatcggctggatggggccgtccagcgtcccggccatcaacggcaacagcctcacggggctcttcttctccagcatcggccaggagctggcccacttccccacgcccccgcccgtcacctcccagttctggctgtggctagtgacgtggcacctgggcctgttcatcgtgct

SEQ ID NO: 15283 - DNA, 413 bp, Zea mays
  Clone ID: LIB36-017-Q1-E1-A4
cccgggtcgacgcacgcgtccggaagaagagacaccgcaaccgcattaccatgagagagagttaggggggcctggcctgctgcccctgcatcgtctgaccctgaagatggcggcagcagcatccatggcggcccgtagccgcgcgctcgttgcgagcaggaggaggatgggtggcccgccgcgtctcttggtcgtcagctgcgacgccaggacagcggatgcctactgctccctggccgcaaagattttgggacctcccacgaccttcaatgcagcgaagctcaaggtggagttcgccggggaggagctccggcctcctttccccagagcctacactctgacccactgcgacttgacggcgaacctgacgctgggcgtgatgagtagcgagcagctgcgcaagtccacgctgc

SEQ ID NO: 15284 - DNA, 408 bp, Zea mays
  Clone ID: LIB36-017-Q1-E1-A7
cgggtcgacgcacgcgtccaaaaacgctttctgaaagatgtacttgatgttccttttgccttcaaaagagtagacgtaatgttgtacagagcaaactttggcgctgaagtgaattatttaaagaaatcttttggaacgctagaggcagcttgtacagatttaaggagcagcaagctattcctgaagttgctagacgcagtgctcaagactgggaaccgcatgaacgacggaactaaccgaggcgaggcgagggccttcaaactcgacacccttctaaagcttgcagacatcaagtcgacggatggaaaaacgacagtgctccatttcgtggttcaagagatcatccgatccgaaggcttgggttccgatcaagcagcagcagcagcagcgaatcctggaagcaacagc

SEQ ID NO: 15285 - DNA, 410 bp, Zea mays
  Clone ID: LIB36-017-Q1-E1-A9
tcgcgggtcgacgcacgcgtctacgttcatcctatcttggtgcactttcataatctcgttccttctcctactgactggggccgccctgaacgaccagagaggcgaggagaacatgtacttcggtagcttctgctacgtggtgaagccgggtgtcttctccgggggagcggtgctggccctcgccagcgtggcgctagccatagtctactacgtcgcgctgtcatcatccaagggccctccgccggcgttcgcagccccgcagaaccagggcatcgcgatgggccagcccgtgatcatcccgcagcagagcagcgagccggtgttcgtccacgaggacacgtacaatcggcggcaacaggtcccgtgacctgacctgaccacacagaggtctgtggttggttgtgcttggt

SEQ ID NO: 15286 - DNA, 425 bp, Zea mays
  Clone ID: LIB36-017-Q1-E1-B1
tcctcgctcggcggattcaaacacttgtcttcaaggctggcatggccaagtccattcaccatgctcgtgtcttgatcaagcagcgtcacatcagggttggcaggcaaattgtcaacgtcccatcattcatggtgagggtggagtctgagaagcacattgacttttcactgtcaagcccattcggtggaggccccgcaggaagggtgaagagaaagaatcagaagaaggcaagcggtggcggggatgctggtgatgaggatgaggagtgaggatggacaagtagtgttacaccaatataataatattatctagttttcttgaacttgttcgaatgatgagtgcttagctgtgtgatctgacgcagagtcccctgtgctgactctgtgtcagggatggtccattttatcctgtggtattatcaccct

SEQ ID NO: 15287 - DNA, 453 bp, Zea mays
  Clone ID: LIB36-017-Q1-E1-B12
cgcgggtcgacgcacgcgtctacccacgcgttccgcaatacgagaacgctcgagccttcgacccctggagatggcagcagagcaagaaggagggagtactagtagtagggcaggacgcgcagcagggggccagggccagcgtgttcactcccttcggcggggggcctcgcctgtgcccgggccacgagcttgcccgcgtggtggtctccgttttcctccaccgtctggtgacgcgcttcagctgggaagaggctgaggaggacagggtcgtcttcttccccaccacccgcaccctctcaaagggtaccccatcatcctgcggcggcgaccgggttgggatgtctgacctcatcatgttacaatagagtcgatccatctatagttgttaccctcatctctctctctctctgtctgtttgtaataacactactatctaatataaacaagcatctc

SEQ ID NO: 15288 - DNA, 456 bp, Zea mays
  Clone ID: LIB36-017-Q1-E1-B8
ccggtccaggattcgcgggtcgacgcacgcgtccggcaagctcgatctactactactactagctggtacacatactagccagcctgccagccagcttgccatggcgcccaccgtgatgatggcctcgtcggcaaccgccgtcgccccgttccagggtctcaagtccgccgccagcctccccgtcgcccgccgcagcaccaggagcctcggcaacgtcagcaacggcggaaggatccggtgcatgcaggtgtggccggcctacggcaacaagaagttcgagacgctgtcgtacctgccgccgctgtcgacggacgacctgctgaagcaggtggactacctgctgcgcaacggctggataccctgcctcgagttcagcaagctcgggttcgtggtacgcgagaactccacctcccgtgctactacgacggccgctactggaccatgtggaagctgccc

SEQ ID NO: 15289 - DNA, 341 bp, Zea mays
  Clone ID: LIB36-017-Q1-E1-C10
cgcgggtcgacgcacgcgtccaaagaaacattcccggaatacgaacagtttttgcaagcccttcgacgagcttagagtataggaaacatgtgcagatttttctctttttgttatatgtttatatttttttgtgtcatttttggtttgcttctaccttgagcgttgttccgagatgtgtttctttttgtcagatatggtgtttattttcccttgatgtgggtggcaagatatgggtgatgatgtacgtacgatggttacaagtatgttgtgagcataattgttatggcaacaaaaaacgggagcgaaggaagctgagacgggaggaagacgcggtatggaat

SEQ ID NO: 15290 - DNA, 414 bp, Zea mays
  Clone ID: LIB36-017-Q1-E1-C12
tcctcagggacctctggcccaacaaggagtactactaccggatcgggcacgagctcccggacgggtcggtggtgtggggcaagccctactcgttccgcgcgccgccgtcgccggggcagccgtctctgcagcgcgtgatcgtgttcggcgacatggggaaggcggagcgggacgggtcgaacgagtacgcggcgtaccagcccgggtcgctcaacaccacggacgcgctgatcgcggacctggacaactacgacatcgtgttccacatcggggacatgccctacgccaacggctacatctcgcagtgggaccagttcacggcgcaggtggcgcccatcaccgcccgcaagccctacatggtgggcagcggcaaccacgagcgggactggcccgacacggcggcgttctgggacg

SEQ ID NO: 15291 - DNA, 164 bp, Zea mays
  Clone ID: LIB36-017-Q1-E1-C2
tcgcgggtcgacacaagactctaaatagactctgcatatttccatttacgttgttggttttatccggtgaccctcacacgattcatcaaggtggtgagcctggctattaaatcgggtgctgttttttttttgggtaaacattggcaatggccttactgtcaaaa

SEQ ID NO: 15292 - DNA, 368 bp, Zea mays
  Clone ID: LIB36-017-Q1-E1-C5
accacgcgtccgcccacgcgtccgtatgactcaaaatctcgggtgatcacacttccagaagcatcaaatgcataaacataggtgactctacatttacgccagtaactataaatggatgctctttggtctatattccaaatgtgggagacatcacaccagctttgaagtattgcccgtctccattgtgaacactctgcagcatatgtagcagataaatgagtgaaactatttgtactgcctgctctgcaaattagtatgaacacccctcaaaaagatttggcccacactctggtctctctgtttgcagctgggaacagggagctccagagcttgtgaattctatagaagtaaggtgggtgtccgcacag

SEQ ID NO: 15293 - DNA, 427 bp, Zea mays
  unsure (1)..(427): unsure at all n locations; Clone ID: LIB36-017-Q1-E1-C7
tgcttggtcaaaaattgcatcaaactcgtagaaaggatgagatccatgagctgaggcaaaaaaatccacttcatacttctcatggttttgcactttctcaagcatgtccagggaacttatctggtgtcattttgacgccacttgacctttgcgatggaccttcgaactcggatgcactttctattggttatacaggatccaacacaagtgggttaggtcttccaaacaataactgctctgttggtgctactcttcctacatcaaatatgaacttaagattaccaggttctcctggtatggttttgggaagcaattcaccattgcctttgaatgctcnctctagggatgttcagaggtatggtgtgcctaggacaacctcgatacagggtgacgagcaatcaagaattcattataaccagatggtaaa

SEQ ID NO: 15294 - DNA, 256 bp, Zea mays
  Clone ID: LIB36-017-Q1-E1-C8
ctcgtgggtcgacgcaagcctctaaactgacgtcctgagcatgaggatgatccgaaaccagcggtgctcagtgctcacacatgagacctacgtatgcctccgttccttgtgatgaggaaatatgcttgcgttcgttctccgtgggcgttgttcctacaaattcacttgctttctgtctctctctctatatacacactgtataaaacaagaacagctgtttatcatctcttcttatataaccttttgaacactctga

SEQ ID NO: 15295 - DNA, 442 bp, Zea mays
  Clone ID: LIB36-017-Q1-E1-D11
ttcgcgggtcgacacacgcgtccacatagttgcatgtcaaacatgtcaggaacaccttgccccatattcaagtatttatagggcatggtccagtaaagaatactccttgccctcgagctctaatcaataaccactgcaaggggtcatccaagtgcccacctcgccgcggtcaagcaatcacaagcgattccccagctgtacagtgcatgtttcgtgttctccttagaacacctaaacgaggtggtatttgaagaagtctactccaatgcctgctcctcaagtggatgaagccatctaactgggtattggatagagggatctagaaccacttcactgcaacaaaggatataactttgtgctgctgtgatggtgttaagtgccggtgggctcggccttcttatataagtataccccgtctttatcttcttactgaggatggtca

SEQ ID NO: 15296 - DNA, 412 bp, Zea mays
  Clone ID: LIB36-017-Q1-E1-D5
ttcgcgggtcgacgcacgcgtctacccacgcgttctgagacaacgcaacccccaaacccaaaaccctaccacggcgcccatggcttcgccgccgccgccgcctcctcctcctgcccggcaccccacctccgcagcaactgccgctgcggcgggcaatggccacgacacctccgcagcaaccgccgctgcggcgggcaatggccacgacacctccgcttcgccggtggacgccctcttcctccagaacctcatgacccgcgtccagctccgcccgcccttcctcgacaccaactcattcctcactcaggaccttgacgacttcctcctcaacgagttcgccgcgctatccgccgctgcaggggcgtcggatgatgacgaagacgtggaggatgaggatggtgggctcgctggc

SEQ ID NO: 15297 - DNA, 388 bp, Zea mays
  Clone ID: LIB36-017-Q1-E1-E1
tcgcgggtcgacgcaagcctctacacatgacgtcctgaggagactgatgacgaaccagagcgagcctaagctattatcactggaagggtgcaggacctgctgctctctactctattcggcgactgatgacgaaccagagcgagcctaagctattatcactggaagggtggaggtccacgaagaccagcgcggcggtccagaacacctctagtaaggtgcagagttgatgtgggcgtgatgtatctttctaagttattgtaagccggtctctgtcttcacaactgacgatctgtgtgtggtacgcaccacgcacgcaagtcgcggttgtgcgtgtacgtctgaactctggagcattggtttgttgtaccaacataatgagtcacaaaag

SEQ ID NO: 15298 - DNA, 448 bp, Zea mays
  Clone ID: LIB36-017-Q1-E1-E12
actcgcgggtcgacgcacgcgtccaccgcgtctcctacaacctcgccaaaacccgccaccccaggctcatcaggaacgccgccgccgtcttcaccacaaccccctccacccttgtggccatgggcgacgccgtggagcacctcaagagcgggttccagaagttcaagaccgaggtgtatgacaagaagccggagctgttcgagcctctcaaggccggtcaggcccccaagtacatggtgttcgcctgctccgactcccgcgtgtgcccgtcggtgaccctgggcctgcagcccggcgaggccttcaccgtgcgcaacatcgccgccatggtcccggcctacgacaagaccaagtacaccggcatcgggtccgccatcgagtacgccgtgtgcgccctcaaggtggaggtcctcgtggtcatcggccacagctgctgcggtggcatccg

SEQ ID NO: 15299 - DNA, 386 bp, Zea mays
  Clone ID: LIB36-017-Q1-E1-E2
ttttgggagctgtgtgtgattaagcaaaacaaggttactggacaaatatgcgtaactcaacattggaaatagaagcgcgcacagagagagagagagacgatggcagggcggtgtctgaaaactccacgcttacatgaactgcgctcaaatgaaacccaagcagtacgtacgcgcgtactcaaattacacacaacgacacacagagatatatagagagagagatggatgggcatgattatgcgccggtgagctcctcctccttgtgcgtctcgatgacgacgtcagaagtggggtacgcgtggcaagtgagcacccagccgtcggggatctggccgtcgtccaggtagctctggtcggactggtccacggacccgggacgacctgcc

SEQ ID NO: 15300 - DNA, 298 bp, Zea mays
  Clone ID: LIB36-017-Q1-E1-E6
caatgtgtgtctatactgaactgtacaagcttatcgagcaagatcactgcaagtctacaacaatccacgcccaacacaggcggtggacacaacccatccaataatctttcatgagtacagtgtcggagtcatcggccaatttcttcaaaattatcattaatttatgatgttcatgtaactatagtcgtaggataaggcagggccggtttggtttcatcacgcggatgggagcaacttcttgacgatctcatcactgagcgaggcgatctgggcgtccagcgccttgacagcctcctcc

SEQ ID NO: 15301 - DNA, 455 bp, Zea mays
  unsure (1)..(455): unsure at all n locations; Clone ID: LIB36-017-Q1-E1-E7
ctcgcgggtcgacgcacgcgtctaaacacgcgttctgacaaactcttccttgatatcgagaagggagtcaatagaaggccgttatatgaaagtcatcctctatcatcattttcatggacccgaactgacagtatggatatgggggattggtcaaagaaatgcaaggaagcattaagcaagtttgagctgctgaaggaagggaagagtaaagaggacattgtttatgaaaaggctgttcagatattacacggtacaaaggatgaggtgcatgacattgttcaaagtgctcttaagtccagtgatttgaagggtctccatgtccaatgtcttacagatatatggataggcagagagaggtttgcttttgttgatctgagtgcanggccatttgcctgggggccttctgttggtggtgatggtgtccgtacagaacttagtctgccaaatgttgcaaa

SEQ ID NO: 15302 - DNA, 450 bp, Zea mays
  unsure (1)..(450): unsure at all n locations; Clone ID: LIB36-017-Q1-E1-E8
ctcgtgggtcgtcgcaagcctctataatgagtcgtattagaggtctatgatgagacagcaagattcctcagagagctagaattggatgatgatgcactcacaaaagctattattggaaccataggcgatgttgacgcctaccagctaccagatgctaaaggttacagcagcctaatgagatatttgctgggcatcacggatgaggaacgccaacaaagacgtgaagagatactagcaacaagcccgaaggatttcaaggagttcgctgatgctgttgaaaccatcaaggacaatggggtcgtggttgccgttgcctcgatagatgatgttgaagctgcgaataaggaaaacccgctattccctgaagtaaagaagtgtctgtgaggtcnaccaccacttgataaggattctagtcgggaggtgttttttntacagtgaatgcggagtgtg

SEQ ID NO: 15303 - DNA, 371 bp, Zea mays
  Clone ID: LIB36-017-Q1-E1-F12
acgcgtaggacgtcgcaacaccctatagtgagtcgtagtaagctggcacacgccatggcgtccatgaccggcctctcgcagggcgttctgcccagcaggcgcgccgccaacagggccaggacggccgccgtcgtcagggcgtccgccgaggcgcaggcgcaggcgggccgccgcgccgtgctcgggctggtggccactggcatcgtcggcggcgccttgtcgcaggcggtgcacgccgagaccgtcaagaccatcaagatcggagccccgccgccgccctccggtggactcaccgggactctgaactctgaccaggcgagggacttcgacctccccttgaaggagcggttctacctgcagccgctgccgcc

SEQ ID NO: 15304 - DNA, 426 bp, Zea mays
  Clone ID: LIB36-017-Q1-E1-F2
tcgcgggtcgacgcacgcgtccagttcgagtcatatcatgcagtggtgtgagggattcatgtgtattgcaagccaaagctcctctcccgctgccactaagttggcactgtccagagctgtgtgcgctgtcttcctgtgtttgtgatgaccacagccaccaaattcaccacaccatagctagaacattctagggagttgctggcccgtatgaagcttgttccgtaatcatctcagaacgcgaagaagaagtggaagtcactgaagagaagacaccaccaccctcggattctcgggcaggaaactgcttctactttgatatttgtggatccgagcctgactcacctactaacaaaggtgaggaagcgacaaatttttgttgcttttgctcccaagtggtatcaaatgaagaaaaataagatgaagatg

SEQ ID NO: 15305 - DNA, 332 bp, Zea mays
  Clone ID: LIB36-017-Q1-E1-F4
gtcgacgcaagcctctaaacagacgtcctggtacaagagagttcataaaccttacaaagaaagtacaattacaaagaagcatatggctagtacttggaaagaggacagcctcacctgaacgtttttgtattggctagtacttgggaagaagcatatggatgaatgtagtcatgaactaggagctacaaaatcccatgttttagatattagaagtcatggaggggacctaattatcactgtgcaattctttattactatactaccacttccatttgtaacgcaaaattgttatgataggatggcaaatatacctgcatcgaatacttcctaaa

SEQ ID NO: 15306 - DNA, 436 bp, Zea mays
  Clone ID: LIB36-017-Q1-E1-G1
cgcgggtcgacacacgcgtccgccccaacatcaagctcaccggcaccgacgtcgggtaccctggtggcctgtggtttgacccgctcggctggggctccggctcgccggagaagatcaaggagctgcgcaccaaggagatcaagaacggacgcctcgccatgctcgccgtcatgggcgcttggttccaggccgagtacaccggcaccggccccatcgacaacctcttcgcccacctcgccgaccctggccacgccaccatcttccaggccttcacccccaaatgaggagctctgatgaacttggcagttcgaggagtgctaccacacatgcatgcattgttaggtttgatggccgatatggaactttttctctttgttgggggcggactactgggtagactgtcaacgatgatgatgatgatgatgaaaatgtcgtg

SEQ ID NO: 15307 - DNA, 447 bp, Zea mays
  Clone ID: LIB36-017-Q1-E1-G11
ctcgtaggtcgtcgcaacaccctaaagtgagtcgtattagcccatggcatccatctcggagcccgctgctagggagaagcccatcgtcgtccgggtcaagcgcaaaccttcgcagaaccgcccggacgctttctggctagagattaacgagaggccggcaaagaaggcggcgattgatttctcccgcctttccatctccgaaccctcctcgtcctctgccagtgtcaaagcttcagaggaaccacgggttaagaaaattcttgtccagcacatcgagacagtacaccactctgaagctgtcgaagatgttttacaatctcttttgcttgttgactcaaattccaaggagacaaagagcaagacaaaggagtggaatgacagaatcaagcaagacaaaggaccagagcaactacgatcagctgccagacagaggcatgaggatatggg

SEQ ID NO: 15308 - DNA, 449 bp, Zea mays
  Clone ID: LIB36-017-Q1-E1-G4
tcgtaggtcgtcgcaacactctatagtgagtcatattatacgcatgattgtcagcaaggacaataatatcttggaggcatttgacgcccaggatcaagcatcaactcttcagtttcccagctatgctttggagggttcagtttttcaaaggtttgacactgacctcatcaagaaagtcagcaccaactgtcttgtcatgcaaaatcacagatatggtatatcaccaaggcgatatcgagagaacgatgcactatcaagtttcttcaaaatcttgactacatcacctgatgaaaacggcaaggtctatgtctcaactgtacaagccaataattatccaatcacttgcacgcaatggcatcctgagaaagccatttttgagtggaagaaaccaatgattccacacagttaagatgcagtacaagttactcaacattttgccaatcatttta

SEQ ID NO: 15309 - DNA, 418 bp, Zea mays
  Clone ID: LIB36-017-Q1-E1-G5
ctcgtaggtcgacgcaacaccctagagtgagtcgtatgtacctcttcaggcttcaaggcagatccgcagcagatggaggcgaagagcaggctgccggaggtgaccatcgtcccggcggcacggccgttggctggcgacggcacagtcgacgcggcaaaggcggcggcaggcaaggagcccgtaagcccgggcactccgtcctcggtggccgccggccgcagcagctgtgaggagaggcgcgcggtggacggcgtcgccctgcctgggtggaagctcgacgccctctgccaggagtcctgcccgtcgccggccatgagggcgcgcttcccctactacttctgaagcttcccgttgcagtcctgcgtgatcgagttcttgagcggcgacatctggtgcatgctcttgaccactgatggcg

SEQ ID NO: 15310 - DNA, 454 bp, Zea mays
  Clone ID: LIB36-017-Q1-E1-G6
actcgcgggtcgacgcaagcctctatattgagtcgtattagctgaaactgaagtatctgtgttacatgtgtatgttcacagcagatgaacttttactagcagatgaactttacagcgttacatgtgtatgttcacggcagcaccctgtgtgtgtgtatgtgtatgcgtatgcgcctgcgcaacctactacttcgcggcctcctcctccccctcctcttccttccagaccggaaggatgccttgcccagccagcctcttgtagacccagaacaccacgtacttggccgttatcctcttctcatcgatcaggaacggctcgatggtgctcacttcgttgctgtaggacgatagcgcaaagcccttcggtcctgtgaggtctccttttggaaagaaagcccacaaataataagggacgtcgttctttatgaacgatccctccagcgtgttgttttgg

SEQ ID NO: 15311 - DNA, 446 bp, Zea mays
  Clone ID: LIB36-017-Q1-E1-G7
gactcgcgggtcgacgcacgcgtccggcgacatggcgcccgccgcccggtggtccacgtcccctgtgctcttcctcctgctgctgctcgcggcggccacggcgacgacgacgacgacgaccactacagcaaagcatgagcatccgtcgccgacgccgtggccggagcgtttccacgcggtgctgttcacgaacctgaccaactacacggaagcctccacgggcccgccgctgcgcgtgacggacctctactacgactggccgcggcggcggaacctgaacctggtgcggcaccagctgtcggccgacccgctgtacgacgtggagtggaacaacggcaccggcttctacttcgactccaaggcgtgccgcgtggagcagttccccgtgggcgtgctgccgccgtggtgggtctccggcggcggcgccgagtacgtgggccgccgcg

SEQ ID NO: 15312 - DNA, 364 bp, Zea mays
  Clone ID: LIB36-017-Q1-E1-G9
cgcaacactctaaagtgagtcgtattacatggtcgccttcctcggcttcgccgtgcacgccgccgccaccggcaaggggccgctcaacaactgggccacccacctgagcgacccgctccagagcaccatcttcgacacgttcggagggtcctcttaagcccgccattgctccgccccgtccatcgaccggccggaacgtgttcttggattaattaactacgatctctatgagcctggggatggatcaacccgtcgtgcgtggtctcgttttgtgatgagtgggagagagaggatggcacgatggatcctttgttaatggagatctcgttcattaggagagctaccgctgggacttggtggtttg

SEQ ID NO: 15313 - DNA, 458 bp, Zea mays
  Clone ID: LIB36-017-Q1-E1-H1
cccgggtcgacgcacgcgtctgcccacgcgtccgcgactccggtatctactaccagctggctcttatgtggccaggagcatactgcgagcagaccagcgctgggtgctgcaagccgaccaccggcgtctcgccggcgcgcgacttctacataacgggcttcaccgtccttaacgcgaccaccgacgctgcagtgacgggatgcagcaacaaagttccttacgaccctaacctgattaccggcatccaaggcctgaatcagtactggagcaacatcaggtgccccagcaacaacgggcagagcagctggaagaacgcctggaagaaggccggcgcctgctccggcctcagcgagaaagactacttcgagactgccctctccttccgtagccggattaacccactcgttcgcctcaaagccaaaggtatcgagccggacttcgggctctacggcctcaag

SEQ ID NO: 15314 - DNA, 385 bp, Zea mays
  unsure (1)..(385): unsure at all n locations; Clone ID: LIB36-017-Q1-E1-H3
aacaaatgctaaagcatgcagacttcccaggtagcaacaacgggacaggtctcttccagaccatcattggactgaagattagagacctctatgaacagattgttgctgagagggctggtgtaccagcggaagcagcaaaagtttaacgatctatgcattcagatgtcctaaaactacagctctccgaactcaatgggagtaacaaccttcgcatctgttgggatatatggcgagctaggaggtatagaaatgtcattgcagaactcaggaaaacgtgcaatggaatttcttgaaatcnctcttgaagagagtgagaactcgatagatcaagaatcaccacacgttgtattaatcgtatggtataatatttatacatgtacaggaa

SEQ ID NO: 15315 - DNA, 400 bp, Zea mays
  Clone ID: LIB36-017-Q1-E1-H5
attcgcgggtcgacgcacgcgtccggcacaccatcccagcacatggccaaggcagctcctcctctcctcgccgccggcagccgcactgccatcacagcgcagcagccatcgtcgaggaaaggcgccgctggcgcaggtttgttctgcagtcgcgtcatcgtcagcaagcgcgccagggtaacagcgaagctcggagacggagagctgaagcctgcaggcaagcggaagttcatcaccaaggaagaggagccagaacagtactggcagaccgcgggggagagggagggcgataaccccatgatgacacccctgccctacatcatcatcttcggcatgtccacccccttcgtcatcctcgccatcgccttcgccaatggctggatcaaggtccctgtgcgat

SEQ ID NO: 15316 - DNA, 451 bp, Zea mays
  Clone ID: LIB36-018-Q1-E1-A2
gggtcgacccacacgtccgcgatcaagacacatacagagtttcgtcgacaacacgactactcacatggggaaacctgcgaagatcggatagtcgggtggagaccccggcgatcggcaggatctgagggctactccggacaggatgatcgacgtgaacgtcactgcggacaaccagcaggctgcaaccgctccatctccttcatcaacatcggagccgacgccaaagcctacgaagaagggccaaagggtttcagccaagctgcaacacggtacaacatagatctgtgcaagttccactatagcttgacggagatctccgggaccacgggccaaacccacaatattgacgatctagtcaagtctcagaaatgcgtcaccacaaaagcggctacggaacgtatagcaaggaccaaggcagcccgttccgtgtcaaagaaatgaacaacgggca

SEQ ID NO: 15317 - DNA, 390 bp, Zea mays
  Clone ID: LIB36-018-Q1-E1-A5
ccggggcgacccacacgtccacccaagcgtccgacggtggctacggccacgggtatggtggccacggcaagttcaagcatggtcacggccaccacggcaagttcaagcacgggcacggcaagttcaggcatggcagacacgggcacggcatgttcggcggcggcaagttcacgaagtggaagtgatgtgccctccatggttgatcgtagctgaactcaggcttccaggacatgtgttgccagtaataccttttcagcgttactcatccttcatctgtatttccagtaatccagcttgtggcgagtgacataatgctaataagtgacataaataaccatttgctgatatgctgtatatgttggtcttgtggatggagcgctctgaagatta

SEQ ID NO: 15318 - DNA, 60 bp, Zea mays
  Clone ID: LIB36-018-Q1-E1-A9
gggtcgatcgacgcgtccgggcgaaatctgaggaaaaataatttctatatatgcatgttt

SEQ ID NO: 15319 - DNA, 458 bp, Zea mays
  Clone ID: LIB36-018-Q1-E1-B10
acggtacggttatccgggtcgaccacgcgtccggcgaaggccctcctcccgggctccacctcccgcccactcttcctcgccgtttcagcttcctcagggcgcattcaaccatccaggaagggactggacttccgccgcggccgattcaccgtctgcaatgtcgccgctcccaccgccgccgaacaggaggcgacggcgacggcgtcggccgcgaaggagacccagcgccccgtgtacccattcgcggccatcgtggggcacgacgagatgaagctctgcctgctgctcaacgtcatcgaccccaagatcggcggcgtcatgatcatgggcgacaggggcactgggaagtccaccaccgtccgctcgctcgtcgacctgctcccggacatccgcgtcctcgtcggcgaccccttcaactccgacccggacgaccccgaagtcatgggccccgaggtccg

SEQ ID NO: 15320 - DNA, 292 bp, Zea mays
  Clone ID: LIB36-018-Q1-E1-B4
ggtcgacccatgcgtccgcatgcacgtatggccggcctacggcatcaagaagttcgagacgctgtcttatctgccgccgctgtcgacggaagacttgttgaagcatgtggactagctgctgcgcaactgctggataccctgcctcgagttcagcatggtcagcttcgtgttacgcgtgaactccacctccccgtgctactacgacggccgctactggaccatgtggaagctgcccatgttctggtgcaacgacgccacgcaggtgtatagggtgctgcatgaagccatcaaa

SEQ ID NO: 15321 - DNA, 416 bp, Zea mays
  Clone ID: LIB36-018-Q1-E1-C1
gtcgacccacacgtccggtaatacgcttttcataacaataggacctgtggatttcttggttcatcatgctattgctctaggtttgcatacaactacattgattttagtaaagggtgctttagatgcacgcggttccaaattaatgccggataaaaaggatttcgggtatagttttccttgcgacggcccacggcgcggcggtacttgtgatatttctgcttgggacgcgttttatttggcagttttctggatgttaaataccattggatgggttactttttattggcattggaaacacattacattatggcagggcaacgtttcacaatttaatgaatcctccacttatttgatgggatggttaagagaatacctatggttaaactcttcaaaacttattaatggatataatcctt

SEQ ID NO: 15322 - DNA, 455 bp, Zea mays
  Clone ID: LIB36-018-Q1-E1-C3
ggtcgacccaggcgtccgggtgaggacatgtttcattggcaagcaacaattatgggaccacctgacagtccctatgctggtggtgttttcttagtgaacattcatttcccgccagattaccccttcaaacctccaaaggtttctttcaagacaaaggtcttccatcctaatatcaacagcaatggaagtatatgccttgacattctcaaagagcagtggagccctgctttgacaatttctaaggtcctgctctccatctgctccctgctgaccgaccccaacccggacgaccctcttgtcccggagattgcccacatgtacaagacggaccggccgaagtacgagtccacggcccgcagctggacgcagaagtacgcgatgggctgacgaacgctttcctgctcgtctgggcgctattgttcccttggatttgttgttggtcgtatgtatccctg

SEQ ID NO: 15323 - DNA, 265 bp, Zea mays
  Clone ID: LIB36-018-Q1-E1-D2
gtcgacccatgcgtccgacgcatactgcatacacaacacagatcatcagaacgatctgcgatctgatcgacatggctgccgccaccatggctatcacctctcgtgcgctcatctgcaagctcgcggatggcacaacggacgtcttcggcgagggccgcatcaccatgcgcaacaccgccgcaaatcccaagccggctgcgttcagcagcccctgtttcggtgccgaccgcgtcctgtagctgggcacgctgtccggctcgcccca

SEQ ID NO: 15324 - DNA, 207 bp, Zea mays
  Clone ID: LIB36-018-Q1-E1-D5
cccacgcgtccgcccacgcgtccgggaccatgcatggtgctctggtcgatgccgtacgtgtgtccctgatacaatactattttagtactgatgctagtcatcatatatatcgatcgagctcgccactgcgaagtctgagataatgcatgtatgcttgacggcgagatctgaggaaaaataatttctatatatgcatgtttcgagaaa

SEQ ID NO: 15325 - DNA, 280 bp, Zea mays
  Clone ID: LIB36-018-Q1-E1-D6
tacaggtcagggactcgcgggtcgacccacgcctccacagtgagtacgtatgagaatgccttcacggaaggtacggcacagcaaaatgcacatagtatttttgtgtcacttgctttaaaacttttggaatagcgagttcatgtcgcatgcaaagaaattattacgttggagaaacaggtgcttagtacacctctagataaaattaacatgaggttgacgtgatcgtacttgtcaacatcaaacggtggctgaagttattgcagagcaaacttcttgagga

SEQ ID NO: 15326 - DNA, 230 bp, Zea mays
  Clone ID: LIB36-018-Q1-E1-D7
cccacgcgtccgcccacgcgtccgcccacgcgtccgcggacgcgtgggtttagaccttccattctctttccttgtgttgctgagcttctatcatcgtgtcttattgtgaagagggaactcttcactaatgttttgttatgtacttgttgtgttcaaaagttcttgtactgtaggctactgttatgatgcgcctagctcaatttgtcgatgcaattcgaaattttgtctaa

SEQ ID NO: 15327 - DNA, 189 bp, Zea mays
  Clone ID: LIB36-018-Q1-E1-D8
cccacgcgtccgcccacgcgtccgcccacgcgtccgtatcaccaaaggattgctaccgagacattcacctggcttgagctggcttttgctatagcgtgcaaggggttgctgggtgtcgtacctacctgacttatcattatctgtggttacattctggaccctgtattttctatgctttcatgtctctct

SEQ ID NO: 15328 - DNA, 435 bp, Zea mays
  Clone ID: LIB36-018-Q1-E1-E7
agctagtagtaatttatatataagctcttgtttctacaagcagacaacccaacgcgacaccctaccttcgaggtctcatcacgaataattgatacacagcaaagcacttacgcgcgcgcaccgagacgcacagtcacaggtaaaagtaaacgcacacgactcatgtccgaggccagcagcagcagccagcagcctattcctcttcctcgccgatgatgaacctgccattgccggggttgatggcggcgatgaagaagaagaggacgttgaagatgacgagcggctctatctcgttgatgggcacccccgtctcgatgttgagctgcgccagcgcgcccttccccgtgatgatctcgccgatgatggagaaggccacgcccagctgcgccatccgccccaggaacagctcgttcgacttggtgagaccgaacagcg

SEQ ID NO: 15329 - DNA, 82 bp, Zea mays
  Clone ID: LIB36-018-Q1-E1-E8
gagctttgggagccagagattgtaccgctagtgtatttgtatgcatgctgtggagctgaacaataaaatatgctgtaaataa

SEQ ID NO: 15330 - DNA, 121 bp, Zea mays
  Clone ID: LIB36-018-Q1-E1-E9
gggctcgacccacgcgttccggtctgatcgattatccggaattctgaattcactgatttgtatgtagggatgtagttcagctgaaccataaactatgccgtgtgttggatttaaagctggt

SEQ ID NO: 15331 - DNA, 297 bp, Zea mays
  Clone ID: LIB36-018-Q1-E1-F1
ggtcgacccacacgtccgcccatacgtccgtccacgcgtccgcggacacgtgggctgcatggctacgatcatctgctacacatgccgtgggagggggcacatgtcgtatgagtgcgcttcgggaacaatattcgggctccgcaagctctgaagagcttttcgccaacagctccgctttgttcagatggctgagaattcgccaggatgtatcacctgtttctgacagtattggaacagttttccatctgccgttgtagttgaggaatgattctgtaggatgtgttgcaggtgaaaacg

SEQ ID NO: 15332 - DNA, 409 bp, Zea mays
  Clone ID: LIB36-018-Q1-E1-F2
cccacacgtccgcccacgcgtccgaagctgctctcgtccctagaaataaagcagctcctccgcggggcggcgaactgctactcatcgccaaaaccctagccccgatccggtcgaggagcactacttcttggcatggcgggcacccctagccaggcaagcctcctgctccagaagcagctcaaggatcttgcgaagaaccccgtggatgggttctccgcagggcttgtagacgatagcaacgtcttcgagtggcaggtcaccatcatcggcccgcccgacaccctatatgatggaggctacttcaatgcaataatgacctttccccagaactatcccaacagcccgccatcagtaagatttacttctgggatgtggcatccgaatgtttaaccggatgggccgtgtttgc

SEQ ID NO: 15333 - DNA, 366 bp, Zea mays
  Clone ID: LIB36-018-Q1-E1-F3
tacacacatacatagtttcttctactacacgacgacaaacatggggaagcctgcgaagatcggagagtggggtggatacgccggcgatcgtcgggatctgagggctactccggaccggctgatcgaggtgaacgtcacggcggacaacagcagctgcatccgctccatctccttcatctacatcggagccgatggcaaaccgtacgatgaggggccatggggtttcggccatgctggcacggagtacaagattgatctgtgcacgttccacgagagcttgaccgagatctccgggaccacgggcccagcctacaacattgacagtctggtcaagtctctcaaattcctcaccaacaaacgcgccta

SEQ ID NO: 15334 - DNA, 379 bp, Zea mays
  unsure (1)..(379): unsure at all n locations; Clone ID: LIB36-018-Q1-E1-G3
ccttgattccaaactgtacaggtacgtttacctcctacatgattgtgagtgccttcactctcgtgttcgtaatcgtttgggtgccagagacaaagggaagaaccctcgaagagatacaatggtcgttccgctgagcaccaacatcgtcaaaatgcgaaatggttcttcgagttttgtcgctttagatactcaaatcactcgacgaaggccacacattctttctgttcataaaaggtcttgtacatgagattgcatacaccgttgttataactttacccccaatagacttgtaaatgcttgtgcagtaactcttatattacttttgcttcaacattgtaagatanaagacttgccaaaataaaatctgaaccttggggtc

SEQ ID NO: 15335 - DNA, 460 bp, Zea mays
  Clone ID: LIB36-018-Q1-E1-G4
ttttattttttttttgatcataaaaggtgcaatttatttgtattaattgcttgtacaacggttgcatgaaatcacattaaaaacttagacatatgagatataggaatacaggagaagtgataaataaaacaacaaaaacaccctatgtcattcaatacactagtgacacaaacacacaaaaaacatacatacaaagttttctacacaaatagtagcatgtgataataataagcgagatagtgagaaacaatacacttcacaggtgaattgctttctcgatggataggacaataatagcatgcttggttttctcattctcaaggtgtttggcaacacggcgagcgtagtctttgaataacttatcgagaatgggttctccaaattggcttgcgactagcggctgcataactgctcgtaggcacttagcaacattttcaccgctcctaatactgttatgcac

SEQ ID NO: 15336 - DNA, 286 bp, Zea mays
  Clone ID: LIB36-018-Q1-E1-H5
tgatccactcccgctgggccatgctggaggtgatccactcccgctgggccatgctgggcgcgctcggctgcgtcttccccgagctgctcgcccgcaacggtgtcaagttcggcgaggccgtgtggttcagggccggctcccagatcttcagcgagggcgggctggactacctcgggaacccgagcctcatcgacacgcagagcatccttgctatctgggcctgacaggtcgtgctcatgggcgccgtcgagggctagcgcatcgccggcgggccgctcggcgaggg

SEQ ID NO: 15337 - DNA, 430 bp, Zea mays
  Clone ID: LIB36-019-Q1-E1-A11
gtgggtcgtcgcaagactctatagtgagtcggataacaagaacggccggctcgccatgttctccatgttcgccttcttcatccaggcctacgtcaccggcgaaggccccgtcgagaacctcgccaagcacctcagcgaccccttcggcaacaacctgctcaccgtcatctccggcgccgccgagaggacgcccagcctgtgaggacgcgccacaagccggcagcgatgccaagtcatgcgctgctgccgtccttgattttaccggggaaagagctgtgtgtgagggtctgaagtgaagaacgtgccatgcccatgcgtgtacattatcgagagggggaagaaaccttctcattctgatctctgatatgactgctgcttcagattgcgcctgagatatgctaagtttttgaaagccaattagttcgtgcac

SEQ ID NO: 15338 - DNA, 119 bp, Zea mays
  Clone ID: LIB36-019-Q1-E1-A3
tcgtagtacaccgcaacaccctataatgagtcgtattacaccacactacggcccgaggtcaggcgcatgaggttctccggggtacggtttcgtaggtgagcggatccagatggcggcgt

SEQ ID NO: 15339 - DNA, 445 bp, Zea mays
  Clone ID: LIB36-019-Q1-E1-C5
caggtccagaactcgcgggtcgacgcacgcgtccggctggggccatcccaccgcgcagcgcagccacaaattaaacggagcccggcctgggcatccattattcgttgcagtagtcgcagctgacggacgactgaaccaccgacagacaacatggccgcctccgcctccaccgtctccggcctcgccggcgcctccctggccagccgcccggcgttctccaccagcttcacgcggggcagccgggtgtcggcgaggaaccccctgatgagcaggaacctggagaggaatggcaggatcacctgcatgacgtttccccgggactggctgcggagggacctgagcgtcatcggcttcgggctcatcggctggatggggccgtccagcgtcgcggccatcaacggcaacagcctcacggggctcttcttctccagcattcggcaggagc

SEQ ID NO: 15340 - DNA, 384 bp, Zea mays
  Clone ID: LIB36-019-Q1-E1-C7
acgcgtaggacgtcgcaacaccctaaagtgagtcgtattacgtcaagaactacagctactaattaatcgcccggccatcacccgggataccgccgcccctccgagagatacgtgtgtactgatcatggttaagcacgtactccgatccattcccatcccatgaagccatgataatgatgatatgatccatggaccatgcatggtgctctggtcgatgccgtacgtgtgtcgctgatacagtactattttagtactgatgctagtcatcatatagatcgatcgagctcgccactgcgaagtctgagatcatgcatgtatgcttgacggcgagatctgaggagaaataagttctagatatgcatgtctcgagatggccctccctta

SEQ ID NO: 15341 - DNA, 366 bp, Zea mays
  Clone ID: LIB36-019-Q1-E1-D11
cgtgggacgacgcaagactctagaatgagtcatattacgatgctgatggacgaagctaaagtggatgaatcaaccaagtgccaggatgggagatactcaccaagtgatcgtcatttaacaacactaacatagtgttatcccaggttataagtttgttctgttgtggatggtgctaagtgccggtgggctcggccttcttatataactatatcccatctttagcttctttattgaggactgtcacttaagctagcatgtattttaaaacttataaatgttttatacattcaaattgtaatctttttggatcaatttcgtttgtaataaactccgatgatatatattgtaatcttgttataacttgta

SEQ ID NO: 15342 - DNA, 416 bp, Zea mays
  Clone ID: LIB36-019-Q1-E1-D12
tcgtgggtcgtcgcaagactctatactgagtcgtattagaggggtaccgcgtcgccggcggcccgctcggagaggtcgtcgacccgctctaccccggcggcagcttcgacccgctcggcctcgccgacgatcccgaggccttcgcggagctcaaggtgaaggagctcaagaacggccgcctcgccatgttctccatgttcgggttcttcgtccaggccatcgtcaccggcaagggcccgctcgagaacctcgccgaccacctcgccgaccccgtcaacaacaacgcatgggcctacgccaccaagttcgtgcccggcaagtgagggggtcggacgcgccaccgcccaccgccaccggccaccgctgccgatatctaggtgttcggatgcacgtgagcgcgcactggttccagtttg

SEQ ID NO: 15343 - DNA, 441 bp, Zea mays
  Clone ID: LIB36-019-Q1-E1-E7
caggtctaggactcgtgggtcgacacacgcgtccgtaatgtcatacggagatcaagaacggccgcctcgccatgttctccatgttcggcttcttcgtgcaggccatcgtcaccggcaagggtcccgttgagaacctcgccgaccacctcgctgaccctgtcaacaacaacgcctgggcctacgctaccaacttcgtccccggcaagtgagcgagggcatatacatacttgtatgcgtgtaccgtagacatacgtattcgtatatgtactgcaggagatgtaccagtatttgtgaagaagggagcatgggctcagagattgtaccagtagtgtacgtatttgcatgcatgctttggtccttgtggacattatcaatgaaatatgctgtaaattatacatacgtctttaataatgcatactgtacatgatttgctctggcaaa

SEQ ID NO: 15344 - DNA, 56 bp, Zea mays
  Clone ID: LIB36-019-Q1-E1-E8
aatactctatagtgagtcttattatagcaacctccgtggtccctcggtccccaagt

SEQ ID NO: 15345 - DNA, 392 bp, Zea mays
  Clone ID: LIB36-019-Q1-E1-F11
cgtgggtcgacccaagcgtctacacaaacgttctgaaacatttcactgtcaaacccaacctcgcattctgaatgcactgctgaacaagcatatacctggagtcagggccgttcaatctttgccagtggcagtccatttgcccccgtggagtacgaaggaaagacttttgtgcctgggcagtcgaacaatgcctacattttccctggactcggcctcggtcttgtgatctctggagccgtccgtgtccacgaggacatgcttctcgccgcctcgaaagcgctagctgatcaggccacacaggacaacttcgagaagggctccatcttcccacccttcaccagcatcagaaagatctctgcgcacatcgctgcagccgtggctgcaaaagccta

SEQ ID NO: 15346 - DNA, 407 bp, Zea mays
  Clone ID: LIB36-019-Q1-E1-F6
ctcgtgggtcgacgcaagactctagagtgagtcgtactagtcaatggcttcatttggacaaaggagagctcatccgaattttgttgcccccgccgaatttgcacatgcatggctccaggtgtgtgcagtgattcttccctttatgaaagttcccgcttcggcgcatgacctatgggcaaaaggtttcacaccactggtttatgagagcagagaaattttggtacaagtagttctgtatttgttatttattgcattcgccacgcatcgtccaaatgagacggatgctatatttcagttctgatgatggccactggttaactagagtcacctgtcttgtatggatccccacttttcagacgccggtaaatttgtatgatttgcgaaaaaaaactagatggatgtgagcg

SEQ ID NO: 15347 - DNA, 335 bp, Zea mays
  Clone ID: LIB36-019-Q1-E1-G12
tcgtgggtcgtcgcaagactctaaactgacgtcgtattaagcgtccgaagaaggaagcggaaagcatggtggtcgagccctagagcacacagttctgggcttctggcaaactatttcctgagacgttcatcatttccatcacagaaaaataaagctcgggtgccttctgttgatttcgacgtacatttccctgccgatggtgtccagcccactgttgtcgctggagaacacgtcgtttttagacttgtgatgttttactactgttttgacactcgttgtatttctgtatatcgcgtcagactgtgaaataaaagcagtacagtgtgtttcttgca

SEQ ID NO: 15348 - DNA, 146 bp, Zea mays
  Clone ID: LIB36-019-Q1-E1-G5
cgaaaaaataaaaaatgaactaggagagaggaaagacgtaaaggggaaggggggacgaaaagaaaaaagaaaaaggcgagaataaaggggcgggccccccagaggttggaagcttaggtgggcgtggatgcaagttcagaggtgtt

SEQ ID NO: 15349 - DNA, 430 bp, Zea mays
  Clone ID: LIB36-019-Q1-E1-G6
actcgtgggtcgacgcaagactctagagtgagtcgtattatggcggcgctcgctccatccaagattctgggcacccagctcaacttcgcgggctcctcccgctacgccaccgcagcgcccaccgcgggggctcagaagattgtctcccttttcagcaagaagcctgcccagaagcccaagcccgctgcggtatcgtcgtcttctccagacatcagcgacgagctcgccaagtggtatggtcctgacaggaggatctacctgccggatgggctgttggaccggtcggaggtgccggagtacctcaccggagaggtccctggagactatggctacgacccttttggcctgggcaagaagccagaggacttcgccaagtaccaggcctacgagctgatccatgccagatgggccatgctcggtgccgctggcg

SEQ ID NO: 15350 - DNA, 436 bp, Zea mays
  Clone ID: LIB36-019-Q1-E1-G8
cgtaactctctatagtgagtcgtattatgcctaagccagagcataaacctgagccaaagccagagcctaaacccaaaccgaaaccagagccaaagccagagccacaaccaaaaccagagcctaagccagagcctaaacccgaaccgaaaccggagccaaagccagagccccaacctaagccagagcctaagcctgagccgaaaccagaaccaaagccagagccacaaccaaagcctgagcctaaaccagaaccaaaaccagagccaaagccagagcctaagcccgaaccaaaaccagagccaaagcctgagcctaaacccgaaccaaggccagaacctaagccagagccaaagcctgagcctaaaccgaaaccagatccaaagccagagccacaagcagagccagagcctaagccagaaccaaaaccagagccaaa

SEQ ID NO: 15351 - DNA, 364 bp, Zea mays
  Clone ID: LIB36-019-Q1-E1-H10
gtaggacgtcgcaacaccctagagtgagtcgtattacgctgggccatgctgggcgcgttgggctgcgtgtttccggagctgctcgcccgcaacggcgtcaagttcggcgaggccgtgtggttcaaggccgggtcgcagatcttcagcgagggtgggctggactacctcggcaacccgagcctgatccacgcgcagagcatcctcgccatctgggcctgccaggtcgtgctcatgggcgccatcgaggggtaccgcgtcgccggcggcccgctcggagaggtcgtcgacccgctctaccccggcggcagcttcgacccgctcggcctcgccgacgaccctgacgccttcgcggagctcaaggtga

SEQ ID NO: 15352 - DNA, 444 bp, Zea mays
  Clone ID: LIB36-020-Q1-E1-A12
acgcatgggtcgacgcaacaccctatagtgacgtcgtattaacgcgtgggcggacgcgtgggcggacgcgtgggcggacgcgtgggcggacgcgtgggcggacgcgtgggcacaaacgcgcctccgtaccatccgtcgccgccggcgcaccgcgatggctgcctccgccacggccgcgaggcctctcgccgggaccgccgtcccgctcgcgctctcgacacggacgcggcctgccagggtcgccttgctctccctgattcctcctgctccggcccagcgccttgctctcaggcgtggcgcgtggctctcacccccggagcgcagccggtcggtgcggtgcctggcggctatgaacccggagatgcgggcaacgctggacaaggtcgtaggctctagcaagggggtgctgttcatgaatgggcacaaggacttcccgcaatgcgg

SEQ ID NO: 15353 - DNA, 371 bp, Zea mays
  Clone ID: LIB36-020-Q1-E1-A5
aattggtattaactcaaagtctcaaacgtgcctcttgttgcattgacacacatgtacaatacaatcgtacatatagtacgttttattcgacaagcagcctctgcatgcaataatagtacaacccccgatttaattaattggactaatgcatgctgaggatggatcagatggagatgctgctggggatgcccctcccggtgactcccggcttggagaagggcttgagcagctcgtacggcacgatcccggcgccgcagcggttcttgaggtccaggttgttgttgcactcgtcgatgaacccctcgatctccttcatcctgccgccgaacttctcgaacgccgccttcaccatgggctccgccagccacgac

SEQ ID NO: 15354 - DNA, 447 bp, Zea mays
  Clone ID: LIB36-020-Q1-E1-A7
gggtcgacccacgtgtccgcacacacgtctgctcacgcgtccggagccaccaagcgacgtgagaggaacgtttagggaaagagagaaataactaaccttaatttttgcctatgtataccatcttacgaattgcactctatgaggactctaggcccaaatatatacatcgatgcaggatagaggatagagagacagaccgtgtacaacaaagactatatgagaccaaatacaacaaggatacatgcatagacatctaataattaacagtgtatacttgcaaaaaaaggtgtcaacactttatattatccttgtcttaatcatattgattatgacaaaaggttgattgtaacactatcttgagttgtttttcgcagtggcatatgaatttggggtgcctgtgttatttgagccagtctcagtggtgaagtgtcgaataattgcaccagt

SEQ ID NO: 15355 - DNA, 362 bp, Zea mays
  unsure (1)..(362): unsure at all n locations; Clone ID: LIB36-020-Q1-E1-A9
gggtcgacctacgcgtccagatgatgtcataaagctcaaggtcctggctaacgccgatacccctgatgatgcattgactgcgcgaaacaatggggcacaaggaattggattatgccggacagagcacatgttctttgcttcagacgagaggattaaggctgtcaggcagatgattatggctcccacgcttgagctgaggcagcaggcgctcgaccgtctcttgccgtatcagaggtctgacttcgaaggcattttccgtgctatggatggactcccggtgaccatccgactcctggaccctcncctccacgagttccttccagaagggaacatcgaggacattgtaagtgaattatgtgctg

SEQ ID NO: 15356 - DNA, 447 bp, Zea mays
  Clone ID: LIB36-020-Q1-E1-B1
cgggtcgacgcacgcgtccgcacacgacgtccgcttggacagcaagttcccttctctctgtccaaggataaactgagtagccgctgcgctgaagaagggctccagagctttgatagtgtgagcaaatgagactgcaacagcagcgaaggacacattgctagtgatgtgaccaataccatggcacagggcgactggaaagagaagcttgaggagcgtgccattgataggcgctcgcttggggagaccgacactccagctgatgaggcagtatacgacacccactactagatggatcaaggacacaaagtatgggtatgggaagtagttgtagatcttcttgttgaggatgttgaatatgacgttgaggaagtaccacatgaagaagaagaagccggtgaccagggccgggtacttctccaggaaacccacagacttggcctcccctgc

SEQ ID NO: 15357 - DNA, 442 bp, Zea mays
  Clone ID: LIB36-020-Q1-E1-B12
ggtcgacgcacgcgtccgcacaagatgagtgggaggtttcctatctctatctcgcgtttgtcctgcggaagcgaggccaaccgcctacccaacgaagagccagcaacgcaaacagagggaaaatgtttctcaccgagggtgacatcgaggttctcggtgtataagcatgagtatattctggaagggcttgctaacagcttaccgattatatgctccacagaccacatagcataaaagaaagttgtaacattagtggctcacctgctactccatccgtttataaataaatgacaacgttgacttttttttaaaaaaaattgaccactagtcttatttaaaaaagttatcatttactttttgtaatttgttttatcacttaagttagtttgtgcttgacttaaaattttacattttgaataaatattttaaaatgaatattttg

SEQ ID NO: 15358 - DNA, 430 bp, Zea mays
  Clone ID: LIB36-020-Q1-E1-B5
ctcgcgggtcgacgcacgcgtctaaatggcatcatctcatcagccactggctcaacacccacgccgtgatggagccgttcgtgatcgccaccaaccggcagctcagcgtgacgcaccccgtgcacaagctcctcctgccgcactaccgtgacaccatgaacatcaactccaacgcgcgccagatgctcgtcaacgccggcggcatcttcgagaccagcgtcttcccgcgccagtacgcgttcgatatgtccgccgtcatctacaaggactggaacttcacagagcaggctctccctgacgacctaatcaagagaggcatggcggttgccgacccgtcgagcccgtacaatgtacggctgctggtggaggactacccgtacgcgtcggacgggctggccatctggcacgccatcgagcagtgggtgacgga

SEQ ID NO: 15359 - DNA, 453 bp, Zea mays
  Clone ID: LIB36-020-Q1-E1-B7
actcgcgggtcgacgcacgcgtccgagaacgctgccaccgccatcgctaagccgtcgctgtccaagaagccctcgccgtcgttccgcctccggaacggcagcctcaacgcactgcgcctgcgccgcgtgttcgacctcttcgaccgcaacggcgacggcgagatcaccctcgacgagatggcctcggcgctcgacgcgctcggcctcggcgccgaccgctccggcctggaggccgcggttggcgggtacatcccggccggcgccgcggggctccgcttcgacgacttcgaatccctccaccgcgcgctcggggacgcgctgttcggccccatgccggtggctgtgaccgaggacgacgacgacgagggggacatgaaggaggcgttccgggtgttcgatgaggacggcgacggcttcatctcggccgccgagctgcaggccgtgctcaagaag

SEQ ID NO: 15360 - DNA, 416 bp, Zea mays
  Clone ID: LIB36-020-Q1-E1-C12
acgcgtccgatcgggggcgtggcccgggaactgctccctcctcagctacgacgacctccgcgcctacctcgagtcgcaggagacggcggcccaggcagacgatcagcgcggcgtggcgctcctgagcgagaccatgtcgacacccgtgctggtggccacagcagaccagaccctggaggacgtcgagtgccacttcgaggccgtgtcggggcttccggtcgtcgacagcggcctcagatgcgtcggggtgatcgtcaagaacgaccgggcaagagcctctcatgggtccacgacgaatatatcggaagtgatgacatctccagctatcacactatcgtctgacaaaaccgtgatggacgctgctgttctcatgctcaagaagaacattcacagattaccagttgtaaaccaggacg

SEQ ID NO: 15361 - DNA, 426 bp, Zea mays
  Clone ID: LIB36-020-Q1-E1-C2
gcgggtcgacgcacgcgtccgcactcagtcctcgtcgaaaatcttctgtcgtaataaaggggtcatccgtccaccgtccacgtgggcggcggttgcggctacggcggcggcggcggcggcgtcagcgggcgccggagatgtgagagcctccgtgccgttggagatggctgcggcgggggcagggaccgggagcgaggggaagaagcggggcgcgtcgcggagctggatcctgctcgacgcggccggggaggagcagctgctggacgccgataagtacgccatcatgcgccgcgtcgacatcaacgcgcgcgacctccgcatcctcgacccgctgctatcctacccctccacaatcctcgggcgcgagcgtgccatcgtcctcaatctcgagcatataaaggcgatcatcacttccaacgaggttct

SEQ ID NO: 15362 - DNA, 429 bp, Zea mays
  Clone ID: LIB36-020-Q1-E1-C5
actcgcgggtcgacgcacgcgtccggtgagattgcacaaaccatggcgtccatgaccggcctctcgcagggcgttctgcccagcaggcgcgccgccaacagggccaggacggccgccgtcgtcagggcgtccgccgaggcgcaggcgcaggcgggccgccgcgccgtgctcgggctggtgggcactggcatcgtcggcggcgccttgtcgcaggcggtgcacgccgagaccgtcaagaccatcaagatcggagccccgccgccgccctccggtggactccccgggactctgaactctgaccaggcgagggacttcgacctccccttgaaggagcggttctacctgcagccgctgccgccggcggaggcggtggcgagggtgaagacgtcggcgcaggacatcatcaacctcaagccgctcatcgacaag

SEQ ID NO: 15363 - DNA, 432 bp, Zea mays
  Clone ID: LIB36-020-Q1-E1-C9
gggtcgacgcacgcgtccggcatccagttctctgtcaaggagttgccggacaacaccgtggagttctccaccctctactacggtgttcccgggcacctacccaagcctgacgacgaagcctccgagtccattctcttccgggtgaagatggtatgccggatccacgggtcaggcgacgtggttctcgactacgaggtaaaccccaggagcgacctccctccccttccccgggtgggcgtcgtgttcagcgccgggaggtccctgagccacgtcacgtggtacgggcgcgggcccttcgagtgctacccggaccgcaaggcggcggcgcacgtcggcgtgtacgagagcagcgtggaggagctgcacgtgccgtacattgcccccgtggagtgcggcgggcgggcggacgtcaggtgggtggcactccgcgac

SEQ ID NO: 15364 - DNA, 443 bp, Zea mays
  Clone ID: LIB36-020-Q1-E1-D10
ctcacgggtcgacgcacgcgtccgcagacacttgggcggctgcaaccgcgagatgaggaggatgaaggcggaggccgacgacgggctccggctggacgtcctcgaccacaactacctccccagggtgatgccccacttcctcgcctggaagcagcagtacagtaggttttcgttccaacgtcgcgcaggggagccattcctgtactggatgggtccgcggccccgggtctgcctcttcgactacgagtcggtaaggcaagttcttttcaacaagtccggccatttcttcaaggacgacgcccacccgactatcctggcaatgatgggcaaagggctggtcctggtggaaggcaccgactgggtgcgccatcggagggtggtcaacccagccttcgccatggacaagctcaagatgatgacggagacgatggtcagctgtgctg

SEQ ID NO: 15365 - DNA, 81 bp, Zea mays
  Clone ID: LIB36-020-Q1-E1-D11
gtccgaacgctaggacatggaggtttgtaatatatgatccaaccagtgatgaatcaatgcattcacttgtgtacacaaaaa

SEQ ID NO: 15366 - DNA, 445 bp, Zea mays
  Clone ID: LIB36-020-Q1-E1-D2
cgggtcgacgcacgcgtccgggtcaatgagagctcaaccagaagacagcagctgccaaggaatagtagcgtaagtatgcaaaagaacaaaaattccactagcccaaaattactacagagaaaacttgatccagagcggagggctagaccacctattccttctgctgagtctaacaaaagcgaaaggcaatctggagataggaacaattcagaaacagtgtcaccccgaagcaaattcagaaggaaacttgtgcgcccacaaggtgatgatggcatgcccattggattgaacaacaggacaaggagcctgtatcagcatgacaatgatatgtccataaggtcagatggcagtataagtgttgcttcagagctggatattataagcaatgacagatctacaggagttaatatttctaactttgagcaaggcattggaactccatctg

SEQ ID NO: 15367 - DNA, 202 bp, Zea mays
  Clone ID: LIB36-020-Q1-E1-D3
acgcaagactctacagtgacgtcgtattgaagcgtgggcaacaatataccaactttggttgtcttggttgttttttcccctactgcacacggtgacgctgttgtgagcattagatgtttggccactcggccgttttgccgtggtgagttttggcttaattcattattaggtaacaggcctgtaagctgtatagtaagaataa

SEQ ID NO: 15368 - DNA, 445 bp, Zea mays
  Clone ID: LIB36-020-Q1-E1-D8
ctcgcgggtcgacgcacgcgtctggatcgcgtcctctcactctctccgtatctcgcttcgccaccgccggcgagagctagggtttcgtgcgccaccgtcacttccgcccgccatggccgagacctccacgtatcagattctggtgcgtctcctcgacgggcgtaccagatgtctccgcttctccacgcccaccgtttccggcgccgtgctcctcgacgccgtcgcgtcgatctctcgcgttcccgccgccgctctctgcctcgtcaccggcggcatcgacgtatcgccctcttccgtcctcgcctcagcagctgatggccagttcccctatgcgtcagcgctcctccgccttcgaggaggcaagggtggattcggctccctcttcagaggggctgcctccaaagcgggtcagaagaagacagcaactttgacgcctgccgcgaca

SEQ ID NO: 15369 - DNA, 424 bp, Zea mays
  Clone ID: LIB36-020-Q1-E1-D9
actcacgggtcgacgcacgcgtctgaaaagacgtccgctcacgcgtccgcccacgcgtccgggcgcgggtcgcatgggcggcaccacccagtacacggtgaacaaccagatggtcaacgccaccctgatgaacatcgccgacaaccccaccaacgtgcagctcccggggatgtacaacaaggaggacaacccccgcgtgcccatcatcgtcaccggcaacgacttctccacgctctacgcgccgctcatccgcgacggccgcatggagaagttctactgggcgcccacccgcgaggaccgcatcggcgtctgcaagggcatcttccgcaccgacggcgtcgacgaggagcacgtcgtccagctggtcgacaccttccctggccagtccatcgacttcctcggcgcgctgcgtgcccgggtctac

SEQ ID NO: 15370 - DNA, 445 bp, Zea mays
  Clone ID: LIB36-020-Q1-E1-E10
ctcacgggtcgacgcacgcgtctacacttctgctggtcagccaagaggaggaaaggaaggaggagcaagtagagatggcttgccctgcgcagtccatgctctccgccagcggctgcatcttcctgaggagcaagcctcaggcggcatcccaagtgcgagggggcatcatcggcggtggccgcagcagcaggccgttcctgctcacctgcaacgcttcctcttctccgtccccttcctcgccggcgccggcgcaggaagaccccgactgcaacgaggaggagtgcgccccggagaaggaggtcgggagcctgagcgccgagtggctggccgaggagaggacccaggtcgtcggcactttccctcccaagaagaaagggtggaccggcttagtggagaaggacaccgccggccagaccaacatctactccgtcgagccgatggtgta

SEQ ID NO: 15371 - DNA, 442 bp, Zea mays
  Clone ID: LIB36-020-Q1-E1-E11
gggtcgacgcacgcgtccgggcagactccaagaacctgggccgcctgggcctagcacgttatcctcgtcaccagctcgctcgcgtgcccagcttcctgttttccctcttcctcccgcgctcggacatcgccagtgaaggcccgcgcgcgccgtcgtttgaatcctggttttctccctactcgctgcgctcacgtcgtcgtcttcctgctcgttccgcgacgtcgctcccagtccacagctcgttggcttccctgtgcgcggttgcggatgccgtcgcccgatccttgtaccttggcccgatccttgtgccttgctgagctcatcaacgccgcgagactctgcatcgctgtgctcagccacgcctccctagtcgtcttgcacatactcatctgcaaacaggagcaccctgccgactattgatcccgtcgttgcctcgcagcgc

SEQ ID NO: 15372 - DNA, 466 bp, Zea mays
  Clone ID: LIB36-020-Q1-E1-E5
acaggactgaggactcgcgggtcgacgcacgcgtccgcaatcgatcggcatcaaaggttgacaaagaaggagatttgacgctcgaagacttggatgatgctactgcagaagctgtagatcaagacaaaacgaccagcaaaaagaagaagagctcccacaagaaacatacgaatagtcatgataatgacaatatagacaagaatggagaggccgatgtgggagatcatccggggagtagtaacacagaaaacgaacagatgcccgaatcaagacctaaaagatcaaaaaggctgatgaagagcattactgatgacaaggaactagctgctgctgcggatcatgagaaaccggtaaatgaagcggaaaatcactgagcccatgattatgatagagaagaggttcaaggtgatgagaacactccagcctaatccactgacagaagatgagaacaccaagatgctaaatg

SEQ ID NO: 15373 - DNA, 352 bp, Zea mays
  Clone ID: LIB36-020-Q1-E1-E9
gtcctgaattcacgggtcgacgcacgcgtccgagcataacgaggaggtttttagggtggtggtggtgttgtgaggagctgctgccgctgctctccagtctccaccgatggcgatcaagaacatgacggtggcggcgacgacgcggtcgctggacgcggacatgacggtggacgagttcaaggagtggctgcggcggttcgacacggaccaggacgggcgcatcagccgcgacgagctgcggcgcgccctgcgtgccatccgctcccggttcactgggtggacgagcacgcagggcatcagttacgccgacgctgaccgcgaccgctacgccgacgacggccaggtcgatggc

SEQ ID NO: 15374 - DNA, 408 bp, Zea mays
  Clone ID: LIB36-020-Q1-E1-F1
gggacgacgcaacactctagagtgagtcgtattagtcggaaatccctgtaacactaatgcgctgatttgtttgaaaaatgccccaaacataccggcaaaaaactttcatgcattgacgaggttggatgaaaatagagcaaagtgccagctggcactaaaagcaggtgtattttatgacaaagtatcaaacgtgactatttgggggaaccattcgacgactcaggttcctgatttcttgaatgccaaaattgatggaagaccagtgaaagaagtcattaaggataccaactggttagaggaagagttcaccctcacagttcaaaagcgtggatgtgtgctcatccaaaaatggggcagatcatcagctgcatcgaccgctgtttccatagtggatgctaatagatccct

SEQ ID NO: 15375 - DNA, 435 bp, Zea mays
  Clone ID: LIB36-020-Q1-E1-F10
gggtcgacgcacgcgtccgaagcaagctagcagcagagtacatacatactaggcagccaggcagccatggcgcccaccgtgatgatggcctcgtcggccaccgccgtcgctccgttccaggggctcaagtccaccgccagcctccccatcgcccgccgctcctccagaagcctcggcaacgtcagcaacggcggaaggatccggtgcatgcaggtgtggccggcctacggcaacaagaagttcgagacgctgtcgtacctgccgccgttgtcgacggacgacctgctgaagcaggtggactacctgctgcgcaacggctggataccctgcctcgagttcagcaaggtcggcttcgtgtaccgcgagaactccacctccccgtgctactacgacggccgctactggaccatgtggaagctgcccatgttccgctgc

SEQ ID NO: 15376 - DNA, 442 bp, Zea mays
  Clone ID: LIB36-020-Q1-E1-F11
gggtcgacgcacgcgtccggctacgcgctgcttctaatcacgatcgcagtcctggttgctgccatcatcgtcacatggatttggtccgagaagaaggagttgggggacaagtggaggtgagcgaggtctcaaagttgttacgcggaagaaaatttcgggccccagtcagctagctcctttgttttggtcccccccttttttcattttagtgctagagttcacttcacctttgactataggcattttatttatgtaaccattcgacaagaagaaagcctatctgctgtgaaccgacacactgccgaagcagccacctgtgcagctgaaaatttctggagatggcatcacaggatattagcagagcgcagatggcgagagaatggtttgcttataatgtgtaagctgtgtacccgactgcaaccgaactctttagcagattata

SEQ ID NO: 15377 - DNA, 422 bp, Zea mays
  Clone ID: LIB36-020-Q1-E1-F2
gcaacaccctagagtgagtcgtattagcctcttcctcacctgcgtgggcatggaccggttccgggtcgtcgagaccgtcaggacgaagccctacgcggtcgcacgggtccaggtctttcgggaccgtgaccacagccaccaccaccaccatcgcgacctgatgcagcaggtggagcggcacctcgggaacgtggccgcgctcgcggacaagctgggccagaagccgccgccgctgccgtaccgccagggcgaccggcggctgcacaccgccgcctcgctctcgttcctcgtcgcgcgcctgttcgtcgacgaccgccgggagcagcatgcgctgctgcggatggacgacgccgcgcagcggctggcgcgagatggggagtacctggagcgcaggaacaagtacctggcggccttggccgcga

SEQ ID NO: 15378 - DNA, 448 bp, Zea mays
  Clone ID: LIB36-020-Q1-E1-F3
gggtccacacacgcgtccgatctgtgtctcaatggcatcccttactgagctctcattcaactggactggcttcatcaatgccatgatatcaaacatctcattcacctacaggagcatttattccaagaaagccatgactgacatggatagcaccaacgtgtatgcttacatttcaataattgctctcattgtttgcattccgcctgcagtgatctttgaagggccccggctaatgcagcatggattcagtgatgccattgcaaaagtaggcttgacaaagtttgttagtgacctattcttggttggactgttctaccatctgtacaaccagattgctacgaacaccttggagcgagtggctcctctgacacatgctgtgggcaatgtgttgaagcgtgtgtttgtcattggcttctcaatcgttgtttttggcaacaaaattagcaca

SEQ ID NO: 15379 - DNA, 390 bp, Zea mays
  Clone ID: LIB36-020-Q1-E1-G10
acgcgtccgaacacgcatccgctaacgcgtccgcccacgcgtccgccgtcactcaatacagcacaggcagctcgatagagagagagagacatagatgtcgtggttcgggcaccaccatcgcgagcagccggctcccccggcgtcgggccgcaagcaggtgttcaagatgttctgctgcgcgaacgagaactactgcctggccgtccgcgacggcgccgtcgtgctggccccggtcaataccaaggacgaccaggagcactggtataaggacatgcgcttcagcaatcgggtccaggacgacgaaggcataccggcgttcgcgctcgtctgcagtgccacggggctcgcactcaagcattccctcagccagtcccacgcggtcaagctcgc

SEQ ID NO: 15380 - DNA, 113 bp, Zea mays
  Clone ID: LIB36-020-Q1-E1-G11
gacgcgtccgcatacgcagtccgagacagtgaaggtcgccctccctgccttgagttccacctatagaccactgcagggtgtggatctacttgtgttcaacttggtggatcctc

SEQ ID NO: 15381 - DNA, 433 bp, Zea mays
  Clone ID: LIB36-020-Q1-E1-G12
ggtcgacgcacgcgtctgcactgacgttgtgtcatagccgcacttaaaagccgagtactctaccattgagttagcaacccggataaaataggatctcttagatacgatcaaaatctagaaatcgatgaaattatacgacattgaattagcaagacatcaaaagaaagattttctaatccattaaaaagactcaaatacaaaaatgaacagatccggttaaatttcactaaggctaagggtaacaaaaaaaaagcagccccaatcacaatggcaaaattgtgatttttttggcaatttaaagaagtaaaataatcttgtatgtgtatgagagtacatgcaagaggggcaaccctatcatttgaatgaagtgtagacagaaatacctaatatggagtgacaataaagagagccatctatctacaaagtcgatttg

SEQ ID NO: 15382 - DNA, 458 bp, Zea mays
  Clone ID: LIB36-020-Q1-E1-G2
gggtcgacgcacgcgtccgggcgtcatcgtctgacgccgccgtggcggccaccatagcgatgccaagcagcagcggtgggagagggcgccgtctcagggtcgcgtccatggccacccagaagggccagaagccgacgcccaagaccgtctccggcacgagaagatcgggcacgacgacggtgttcccggtgggcgagccgggcccgcggccggcgacgacgagcggcaaagcgccggttaagctgctgacgaacgtggagaagctgcggctgctgaccaaggcggagcgcgcgggcctcctgtcggcggcggagcgcgcggggctgtcgctgtcggcgatggagcggctgggcctactgtccaagctggaggagctgggcgcgctgtcggcggccacggaccccggcacgcccggcgcgctgcttgcgctcgcgctcccgctgctggccgccggcccc

SEQ ID NO: 15383 - DNA, 450 bp, Zea mays
  Clone ID: LIB36-020-Q1-E1-G8
actcgcgggtcgacgcacgcgtccggtgacatgcacgagaagagagtctcggtgtagtgtctccgtctgagtcgattaaggatcgtctcgatgtaggcttgatgatcgaggaccctttagctggtcacatgcctcgtcatgggtaagccttgcctcgggcagactaaggccggaataagataacacgaaatgggcgtggagcggtggcgagagtagcgtgtaccctccgtggcaagaggctggacggtggtgtagctgtgctctcggtttgcgtgaacctgatccggtcttaagaaccccggtggcgggttgacatatgcaagggttaagtgctacatatgtcgtgtgattggagatcctcagctgagtacaatcgattcggatcgccgtaccttcgcggttatgaagacttggtcactgccctacacgtagcattccactaaagatgat

SEQ ID NO: 15384 - DNA, 450 bp, Zea mays
  Clone ID: LIB36-020-Q1-E1-H3
cgggtcgagccacgcgtccgcaccgcgccgtcgcgcgatgagggcatcctcgcgcagcaccctcgcgccgccccctcgagcgcatccgcctcgcacccggccttcgcccttatcgaggagcgcctcgtagcccgggaccaggacatccaggagctcctcgtcgacaaccagcggttcgccgccacgcacgtcgcgcttcagcagcagcttatcgcggcgcagcacgagctccgggcggtctccgtcgctgccaccagggcgcgcgccgagcgggaggtcgaggtgcgagcgctggccgaccaggcgggccacatagaggccgaggcgcgggccgtcgccgctgcgcgcgcggaggtcgaccaggttcacgccgacgtccaggtgctcgtcgcggcgcgcactgaccttgtcaaccggctccagggcctacgggagaagctcgcgcacaag

SEQ ID NO: 15385 - DNA, 83 bp, Zea mays
  Clone ID: LIB36-020-Q1-E1-H5
cggacgcgtgggttaccctagtccagagtgtttatcttcgttcgtctcgtgtttgttgttgcccatctgtgtttttgattgaa

SEQ ID NO: 15386 - DNA, 359 bp, Zea mays
  Clone ID: LIB36-020-Q1-E1-H8
gtaacaccctaaggtgagtcgtattaaaccacaggtgccgccacaggcagtaggagtcaccgagtagagctcatcatcaatcaactacaccgtggcgctgatcaagaacacctcggactcaccacaagggcgagcgcgacactaggctaccttcatgagccgacgtctacatcggtacccgacactaccaccagaggtcgacagcacatccatcacagtcgactccagctaggacccgctcaaccacgcagagcgtgagctcggcaatgacaacggcatcgagggcaccggagtcatcgtagacatgccccagccccggcaagcacatccacgtcggcgcgaacaacgtgatcatcaac

SEQ ID NO: 15387 - DNA, 401 bp, Zea mays
  Clone ID: LIB36-021-Q1-E1-A1
caccggtcctagactcacgggtcgacgcacgcgtccagaatgccacggcgtattcggcggcgggtgggagcgccccgggaacgtgtttgcggcggcgaagaacttcgccaggagactggagagggagaagcagcgggaggagctggaacgggatcagccctccgggggcctcgacggggacgcaggccgcgaggcggagacggaggcccaggccgaggcgaggcgcagcgcgtgggaggagctcaggtggaagcccctgcttgatccttggaatgggctgataggtggccgttgaccctgcaggaggttgaagagaacctcaccgctggaaactgaacccgtaacatctgcagctgcagaaataatggatgtccaaggacaaaataccacctttgtggccg

SEQ ID NO: 15388 - DNA, 421 bp, Zea mays
  Clone ID: LIB36-021-Q1-E1-A11
gggtcgacgcacgcgtctacagctcatgcttcggagccaccacgctgcgctccggcctgcacgcgctgctgccggcgctccgcccgctgctcatcaacaagaaggatctgcgcttcccgcacttccccgccatcgacgaactctacagcgacggcatcccgctgccgccgcagaccgggttcgacgccatccgcaccgtcgtcccgcgcatggtcaagctggtggaggacaccaccgaccacgtcctccgcttcgaggtgccggagatgatagagagggaccggttctcgtggttcaaggacgaggagttcgcgaggcagacgatcgcggggctcaacccgctgtgcatccagctgctgactgagttccccatcaagagcaagctggacccggaggtgtacgggccagcggagtccgccat

SEQ ID NO: 15389 - DNA, 312 bp, Zea mays
  Clone ID: LIB36-021-Q1-E1-A5
gggtcgacgcacgcgtccgcagtgtcacagctcacaagagcccgtcgtcagtcgtcagtcgtcacactagctcgtcacaacctagaaggacgcggcagtagtacacgtacgtacgcatggctccctccgtgatggcgacatggcgccgtcggccaccgccgccgtcactactccattccaaaggttcgtgtccgccaccggactccccgtcgcctggtcctggtgctgctgctccaccgccggcggcttccgcgacgtcgtccgcagcggcgaaaggatcatcaggcgcatgcaggacacgtgtggccgggt

SEQ ID NO: 15390 - DNA, 425 bp, Zea mays
  Clone ID: LIB36-021-Q1-E1-A9
ccgggtcgacccaaacgtccgggataaaatgctcatcacgtgcagtcaatgcaccgttgtccagttgtcacagaagatatttcgtgcagtgctggtacaagatgggaattttgtatgaggtgagttgaaggagtaattgactctttatgataactgggtagcttcaacaggaacgccggggcttggtggcattttgttcgtctgttttcttctagaagagaaacaaggggaggcaagaaaacatttaggaaacaccttttcgttaatttgattttttatttccatttttagatttagctagtctgtacactgttgttgggaatgggtccgctgttgttggtcgatgcttgtggtggccaataatattacacccaactataccaggctctgcaatggcgaatcatggtgcacattatggtgctctg

SEQ ID NO: 15391 - DNA, 420 bp, Zea mays
  Clone ID: LIB36-021-Q1-E1-B1
gggtcgacgcacgcgtccggcaaccggtccaacactttcacgctcaggcgctcagctctagcaatggctgcctccaccatggcgatctcctccacggcgatggccggtacccccatcaaggtgggctccttcggcgagggccgcatcaccatgcgcaagaccgtgggcaagcccaaggtggcggcgtccggcagcccctggtacggccccgaccgcgtcaagtacctcggccccttctccggcgagcccccgagctacctcaccggcgagttccccggcgactacggctgggacaccgccgggctgtccgccgaccccgagaccttcgccaagaaccgcgagctggaggtgatccactcccgctgggccatgctcggcgcgctccgctgcgtcttcccccagctgctctcccgcaacggc

SEQ ID NO: 15392 - DNA, 448 bp, Zea mays
  unsure (1)..(448): unsure at all n locations; Clone ID: LIB36-021-Q1-E1-B11
ctcccgggtcgacgcacgcgtccaacattcctcgcgcggcgaccacccgattcgaagcgtgcggagagaccgaagaagcgggagagatggctcgtaccaagcagactgctcgcaagtccacgggagggaaggctcccaggaagcagcttgccaccaaggctgcccgtaagtctgcccccaccactggtggagtgaagaagcctcaccgctaccgccctggaactgttgccctccgtgagatccgcaagtatcagaagagcactgagctgctgatcaggaagctgcccttccagaggctcgtcagggaaattgcacaggacttcaaaactgatttgcgtttccagagccatgcggtgcttgccctccaggaggctgctgaggcataccttgttggcctgtttgaggacacaaacctgtgcgccatccatgctaagcgtgtgnacatcat

SEQ ID NO: 15393 - DNA, 455 bp, Zea mays
  Clone ID: LIB36-021-Q1-E1-B3
cgggtccacgcacgcgtccgcaatcgccggctcgacgcccctcttcccgacgccgcacgccttcactgtcctcggcagccgatcttccagagcggttcgacaccgtgctcgccacggtcgacatcactgccgccgccgccggaaagttggcatcgttgtcgacctctttctccccttcttccacccaggaggcaacatgtcgtcgctcgccgctgcgagagcggataacttctactatccgccggaatggagccccaagaacggtgggctgaacaagttccatggccagcatgcgctcagggagcgagcgaggaagctcgaccagggcatcctgattataaggtttgagatgccttttaacatttggtgtggtggatgcaattccatgatagcgaagggagtaagagttaatgctgagaagaaacaagtgggaaattattactctaccaagatat

SEQ ID NO: 15394 - DNA, 400 bp, Zea mays
  Clone ID: LIB36-021-Q1-E1-B4
gggtcgacgcacgcgtccgctgtgattggactaccgggagaaccaatttggaatcaagatttccatatgcttgtcgcaaatcctcgcaaacagaagttgaccattcaagtgaaggattcaattggtctaactgacatcactattggcaccggagaggtggagctagggtcacttaaagatacagtacctacggacaaaatcgtgactctatatggaggatggggtttgtttgggaagcgagaggctggggaagttctacttcggctgacatacaaggcatatgtcgaggatgaagaggaagaagacgaggcggtgagaagcgagattggtgcgggttacgcctcagacgaagatgtgctggactacgttagtggcatgagcaacgggactgatttcgtgg

SEQ ID NO: 15395 - DNA, 433 bp, Zea mays
  Clone ID: LIB36-021-Q1-E1-B6
ttgagaaaaaagaacagaaggagagggagctacgtgtccaaataattgctgaagccgaagaattcaagaaagccttttttgagaagaggatacagaactgtgcgtcaaacatggtgaacaacagagagagggagaagatttttgtagccagccaggagaaattccacgccggcgcagacaagcagtactggaaatcgatttcggatctcatcccacatgaaatagccaccatcgagaagcgggggaagaaagacaaggacaagaagccatccatcacagttgtccagggccccaagcctggcaagcccaccgacctctcccggatgcgccatatcttggtgaagctgaagcatgctccgccgccacatatgatgcagcctccaccaccagcacctgctgctaaagagggcacaaaggatggcagcgccaaggt

SEQ ID NO: 15396 - DNA, 463 bp, Zea mays
  Clone ID: LIB36-021-Q1-E1-B8
caggtcctggactcgcgggtcgacgcacgcgtccgcaccgcgccagctgaggacggtacagcggcacagaggtgcgacgtacgacgacgacgacgcaggcgccacacatggcatcccagctctccgccgccgtgccccggttccacggcctccggggctacgccgcgcccaggtccgcggtggcagcgctgccgtccgtgagggtgggcaggaagaggtcgtcgtcgcagggcatccgctgcgactacatcggctccgccaccaacctggtagatcatggtgacgacgacgacgctgatgctgttcgcggggcggttcgggctggcgccgtccgcgaaccgcaaggcgacggcggggctgaagctggaggcgcgcgactccggcctgcagacgggtgaccccgccgggttcaccctcgccgacacgctggcctgcggcgccgtcggccacatcctcggcgtcg

SEQ ID NO: 15397 - DNA, 442 bp, Zea mays
  Clone ID: LIB36-021-Q1-E1-C10
cgggtcgacgcacgagtccgaccacgcgtccgggtgaatccactggactgcagggtgttcccgggcgaggcgtgcgacgacctcggcggcgagttctgcgaggcgccgtaccaggacggcgtctccagggagctggcgcacgcctgaagaccctgatccatccatgtctgtccaccacgctatgtacgtatgtgtagcagatggtttacatctacgtgttagaccaactccagcagcactccgcatgcggctccggatccctattttgcggagcctagctcactattcatcagtccagcaggctccgcatccggctccgtaaaacgcacggcctgtacctgcactccccatttccacgctttctctctcctctccgcagctctctgcgtgcgcgcgcggctgctcgcgggccccaagtgtcatacactgcatgcggagtggg

SEQ ID NO: 15398 - DNA, 198 bp, Zea mays
  Clone ID: LIB36-021-Q1-E1-C3
cgggtcgacgcacgcgtctgcacacgacgtctgcggacgcgtggggggagctgtgggagccagaagagattgtaccgctagtgtatttttgtatgcacgctgtggagtggagctgatcaatgaaatatgctgtaaatatattatgtcttcatttatgcatactgtacatgattgttctcacgatcatgttgtgagctt

SEQ ID NO: 15399 - DNA, 441 bp, Zea mays
  Clone ID: LIB36-021-Q1-E1-C4
gggtcctcgcaagactctagagtgagtcgtattaagtcgaggagctcgagagggcaccaataatggccggcgtgaactccagcgtcgtcgggctcaagcccgccgcggcagtgccgcaggccgccgccgcctcatcgccggcgaagcgggtgcagctggccgcgcccgagggccgccgcgccgctctgctcggcctggcggccgtcttcgccgtcacggccaccaccgggtcggccaaggccacgatcttcgatgagtacctcgagaagagcaaggccaacaaggagctgaacgacaagaagaggctggccaccagtggagccaactttgcgcgcgcctacaccgtggagttcggcagctgccagttcccctacaacttcactgggtgccaggacctcgccaagcagaagagagtccccttcatcagccacgacctcgaga

SEQ ID NO: 15400 - DNA, 455 bp, Zea mays
  Clone ID: LIB36-021-Q1-E1-D5
ctcgcgggtcgacgcacgcgtctgcacacgacgttctgctacgtcgtgctggaggcgcagtaccagtcgtccgtaaccgccgccgtgcagcagctcaacgccgacccgcgccgcgccgccgcgttcgaggtcgtgggctacctcgtcgaggagctccgcgacgaggacacctacgccaccttctgcgccgacctcgccgacgccaacgtcttcatcgactcgcttcccgtcggctcctacatcgacgtcaagggcccgcttggccacgtggagtacaccggccgcggcagcttcgtcatcaacggcaagcagcgccatgcgagccgcctcgccatgatctgcggcggaagtgggatcacgcccatgtaccagatcatccaggcggtgctgcgcgagcagccggaggaccacacggagatgcacctcgtgtacgcgaaccggacggaggacgacat

SEQ ID NO: 15401 - DNA, 368 bp, Zea mays
  Clone ID: LIB36-021-Q1-E1-D7
gtcgcaactccctatactgagtcgtagtaccaggacgtacgtacgtacgtagatcgatccatcgatcgctagctagctgacgaccatggcgtccctctcctctgccgccatcaccgccccttccttcacggccgcgcccgctcgcgcagtggtcagcaggaggtccttcaccgtgcgtgcctctctccgcaaggccactgccaccgccgccgtggccgttgccgccagcgtcctgcttgccggcggcggcgccatggcccatgaggtgctgctgggcgcaggcgacggcgggctcgtcttcgagcccagccagttcaccgtcaaggccggcgacaccatcaccttcaagaacagtgccggcttcccgc

SEQ ID NO: 15402 - DNA, 201 bp, Zea mays
  Clone ID: LIB36-021-Q1-E1-E10
agattttatccaattaccaatctttcgtgtatttgtgtagtttttactcttttattatccatttttgttttcccgtgtaataccaacaaaaacttgtgtagttgtgttattttctgaggacaaatttgtttcaaagatgtgtttacgctgttattaagagtttcctttatgttatatactgttttcaacacacaaaacaaa

SEQ ID NO: 15403 - DNA, 248 bp, Zea mays
  Clone ID: LIB36-021-Q1-E1-E11
cccgggtcgacgcaagcgtctacgatacgcccgtcaaccgcggggacaggggggagctcagggtgtttgtcatcgcgtgacctgatcgcgcttgcggcgccgttctgctggtccgtgagattgccatccttcttcctccctgttgctccagtagatttgttggtttcttcgtctgaccaatgtataccgttctgttcttccgtgaactgaatctgcgattaacttagtaactatcttgtgtggtttac

SEQ ID NO: 15404 - DNA, 366 bp, Zea mays
  Clone ID: LIB36-021-Q1-E1-E2
tgggtcgacgcaagactctaaagtgagtcgtattacacttgaaaacagtgggatcatcccaaacgcagcggtttttcagaccaagccagcttctctgcaccgtgttgctagcctggagaacctgcagaagaggatcgtcggggatgcaatgtattccgggaccgcgtcaacgacattctcagatcctgaagctcttgccgataggtaaaggttgctcctgttctgtcctgtgatgaacagccgtgtgatgctctagcggcctaagtgcttctggtaatggaagttgtagcacccatgcgcctgagtggggtctacacagtgatttgtacactagtttgaaggttaataataattgttgagaaatga

SEQ ID NO: 15405 - DNA, 365 bp, Zea mays
  Clone ID: LIB36-021-Q1-E1-E3
gggtcgacgcacgcgtctgggctgagtcgagatatggcgagccccgagagcgggtttagttagaggctacgggcggtcgggcgcggcggcggcggcggccatgagcagcgggagcgagagcactaccgccagcaggtggcccgagctggccacgctgcgcgccctggcgcgcgacgccgcggagcagctgcggctgccgcgggccggcacgtcggcgtcggcgtcggcgtcgtcgtcgccgtggcgcgggcgcgaggaccacctccacggccacggcaagacggccaaggtgatgcacctgctgctctggggaaccaagtgaagcggcgagaggccaccgtaccgcccggcgttgctcgtttttg

SEQ ID NO: 15406 - DNA, 319 bp, Zea mays
  Clone ID: LIB36-021-Q1-E1-E7
aacacgcgtccggcctccttgaaggccccggacttcgccaccattatcaactcagtgaccgccaagaaagttgcagcctgatggaccaccctgtgaagaaataagaggccatcaccgtgtcgcctcatctgccacgccttaaagcctgtaggaggcgtcacctcctgtttttgctgatttgcagcacggggacagaaaataatgttttgctctcgtggatctgcacgtgacgaggagagttcagttgtcgtgagcgatgtacgttgggaatattgttatgtggtccttttctaaagaaaaaaaatgttgacagtcaagg

SEQ ID NO: 15407 - DNA, 337 bp, Zea mays
  Clone ID: LIB36-021-Q1-E1-F4
gggtcgacgcacgcgtctgcagacacttggggtgcatgttttgaaggctatggtccttgacacaaagcttattcagaacatgcacacgttacaaggtgtagtagagaagggatagagcacagtgctagtagcgttttgatatgcgtggcatggagcacttctgcttcctgtcatggaggatccccaagatgacagcagctgtttcctcgatagcttttccagtgaccgcaatgactggccacgatggattctgagcaaagatttgattaagctttgtgtcaaggaccatagccttcatgtaatttttttttgttggaccaccttctatgtggtgccg

SEQ ID NO: 15408 - DNA, 367 bp, Zea mays
  Clone ID: LIB36-021-Q1-E1-F5
tcgcgggtcgacgcacgcgtctgcacatgagttcgtctcggtctcctctcctgtaccgcaagtccacgcgcttcctcccctctcctctctgcctcttttctccctcctcggtgctcctccaccagaaccctagctgccgtctcccactctcgtcgggcagctctctcagcagcacctgaggccgttgtctctccttgcgcggtctgccccagccctgacccccggagatccggggctgttctcggttctttacgcggaggcggacgttggtttctgatctggggatcggttcgtgcggggatgaatacgatgccggtggtgctcgtcttcctcctgctcgtgctcgtcatcacgtcgcagttcgagt

SEQ ID NO: 15409 - DNA, 456 bp, Zea mays
  Clone ID: LIB36-021-Q1-E1-F8
ctcgcgggtcgacgcacgcgtctgcacgctgtcgcatgatctcctccccgaaggccgaatccgatagccagcgccaacaaaacccctctccgcgcccgctccccaccggtgacagcgcgcccatggctgctttactccgaacggccgcggccctcgtgcccccgccctcgtcgcccctgtccgcacgggagccgcgtgggcggtgcctgcggctagcctgctcccggcgcgcgccggtccgacagcttcgggcgtggccactgccgactccgcacgtcttcggtcgctctgggggccggttccggcgcctgagcgtcaccgaggccgaggaggccgcgcagacggcgacgcaggaggatccagaaaccaaagttactggagagagtgctgcagatgacagtgctggaagcacagaccaaactccatctattattgtgacaacactgcagtcataca

SEQ ID NO: 15410 - DNA, 364 bp, Zea mays
  Clone ID: LIB36-021-Q1-E1-G2
aattctctatactgagtcgtattaatgcgtccgccattcgcgagtctccagccaacggcatccagtccactcccatccccctcgaacccgacaaacccgacccgattgcgcccaatggcgataagaagccagcgcgagaagaagccggcggccgaagataatgcggagaagacgaccgcaggttataagcccaagtctgagaagcgcctgccggcctctaagtcctccggcaaggatggcggcgagaagaatgggaagaagaaagccaagaagagcgtgtagacctacaaaatctacatcttcaaggtcctgaagcatgtgcaccccgacattcggatctcctccaagggcatttcaatcatga

SEQ ID NO: 15411 - DNA, 446 bp, Zea mays
  Clone ID: LIB36-021-Q1-E1-H11
cccgggtcgacccacgagtccgaccattcctcgcgcggcgaccacccgattcgaagcgtgcggagagaccgaagaagcgggagagatggctcgtaccaagcagactgctcgcaagtccacgggagggaaggctcccaggaagcagcttgccaccaaggctgcccgtaagtctgcccccaccactggtggagtgaagaagcctcaccgctaccgccctggaactgttgccctccgtgagatccgcaagtatcagaagagcactgagctgctgatcaggaagctgcccttccagaggctcgtcagggaaattgcacaggacttcaaaactgatttgcgtttccagagccatgcggtgcttgccctctaggaggctgctgaggcataccttgttggcctgtttgaggacaccaacctgtgcgccatccatgctaagcgtgtgaccatca

SEQ ID NO: 15412 - DNA, 431 bp, Zea mays
  Clone ID: LIB36-021-Q1-E1-H2
gggtcgacgcacgcgtccgaccacacgtccggttgttctttgttggaaaattatcatttcaaataatgaatggttttggaatgacagtgccctctcaattcatagaaagaaatgcagttaaggaagtactacaaattattcaagttgctagggataggaatattcctatttattatccaacagatctctggtgcttgaaaaatggcaacagtgaaatatcaggggtcatcaactctaccggacaattggctggctggacaccagctgatataggaccatcgacattggagaagatttcttctataattacatcatacaagaagatactgtggattggccctacaaactacggtttaacagaaaaaaattcagttggtggaacacagttgggtgaaatactggaaagtgcaagctctgatggctgtgatgtt

SEQ ID NO: 15413 - DNA, 305 bp, Zea mays
  Clone ID: LIB36-022-Q1-E1-A12
accggtcggattccgggtcgaccacgcgtccggacaaaaatagtgtatacctattagcctgcatggtatattgttggtgatatatgttggagtagttttgatgccaaaagaaaaaaaataaaaaaaacaaaaaaaaacaaacaaaaaaaaaaaaaacaaagtaaaagaacacataaaaaaaaacaaaagaaacgcaaaagacatatgcactcataacagaaagaaggtaatgcaaaaggaatggagggcgaccccagacgtgaccgccggatgtaccacacaagccacggaattggcctcaacaa

SEQ ID NO: 15414 - DNA, 421 bp, Zea mays
  Clone ID: LIB36-022-Q1-E1-A6
ctcgcgggtcgacgcacgcgtctaaacacgcttctggcaaccggtccagcactttcacgctcagctccagcaatggctgcctccaccatggcgatctcctccacggcgatggccggcacccccatcaaggtgggctccttcggcgagggccgcatcaccatgcgcaagaccgtgggcaagcccaaggtggcggcgtccggcagcccctggtacggccccgaccgcgtcaagtacctcggccccttctccggcgagcccccgagctacctcaccggcgagttccccggcgactacggctgggacaccgccgggctgtccgccgaccccgagaccttcgccaagaaccgcgagctggaggtgatccactcccgctgggccatgctcggcgcgctcggctgcgtcttccccgagctgctctccc

SEQ ID NO: 15415 - DNA, 445 bp, Zea mays
  unsure (1)..(445): unsure at all n locations; Clone ID: LIB36-022-Q1-E1-B8
cgcgggtcgacacacgcgtctaggctattgttcataatatgggcaatctcttcaccaacatgagccttgggaaagttgcagtgtcatttacgcacaccatcaaggctatggagcctttcttttctgttattctttctgcaattttccttggcgagctacctactatttgggtagtatcttctcttcttccaattgttggtggtgttgcattggcatctcttactgaggcatcctttaactgggctggcttttggagtgcaatggcttcaaatgttacctttcaatcccgaaatgtattgagcaagaagctcatggttaagaaagaggaatccttggacaaccttaatctcttctctatcattacagtgatgtcatttttccttttggcncctgttaccttctttacagaaggtgtcaaaattactcctacatttttgcaatctgc

SEQ ID NO: 15416 - DNA, 330 bp, Zea mays
  Clone ID: LIB36-022-Q1-E1-C2
gtaggtcgtcccaagactctacactaagtcgtactacatcatccaggcctacgtcaccggcgaaggccccgtggagaacctcgccaagcacctcagcgaccccttcggcaacaacctgctcaccgtcatctccggcgccgccgagaggacgcctagcctgtaaggacggacgccacgccgcctagcaatgccaagtcatgcgctgctgcatgccgtctttgattttaccgggataaaaagctgtatgtgagggtctgaagaatgtgcaatgcccatgcgtgtaaattatcgagagggagaacaaaccttttcattctgactgtgataaac

SEQ ID NO: 15417 - DNA, 380 bp, Zea mays
  Clone ID: LIB36-022-Q1-E1-C9
caggtcgtatctcgcgggtcgacacaagcgtctataatttgtcgttacaggagatctgcagtgatggtatcttgtctggattatggatacctcgtgaatttaaagtacttggttggcgtctcagttaacatgttttgtgctctgggattgcagtttgtatgaaatttgcagaattgatcctgagatttattttggctggttagctgtcaaaaagactttggtcttgacgacttgcctgatcaagtagatctggaatgaataaacttaatagaagggttttcaaaaaaaacaaaaaaaatcaaaaacaaaaaaaaacaaaaaaagcagaagagacacaacaaaaagacaaacaatccaacaagccgggtgtgctccttaat

SEQ ID NO: 15418 - DNA, 395 bp, Zea mays
  Clone ID: LIB36-022-Q1-E1-D6
tctagatccgttcatcctggtggttttgtgaggtcgaaagcggcgagcgaattagaagatgctggacaagctgtgggacgacgtggtggccgggcctcgcccggagacgggcctcgagaagctccgcaaggccaccaccgcccgcccgctcgtcatcaacaaagacgcggacggcggcagctacaagcgggcgcagtcgacgccgtcgaccccgacgacgccggtgacgccgtcgtcgtcgacgacgccgcgcggcgccggcaacgtgtggcgcagcgtcttccacccggggagcaacctggccaccaagggcatgggcgccaacctcttcgaccggccgcagcccaactcccccaccgtctacgactggctctacagcgacgagaccaggagca

SEQ ID NO: 15419 - DNA, 400 bp, Zea mays
  Clone ID: LIB36-022-Q1-E1-E10
ctcgtgggtcgacgcaagactctatagtgagtcatattcaacagaacattgaacaattctcgatgtcgcaaatcgaaaaggcgaccgacaacttccactcaagaaatttcatcggaggaggaggttatggcccagtctacaagggaaaagtgggcagcacatcagtggctattaagctgctgaagcctcgtggtagacaaggtttctcagagtatcagcaagaggtggtggtgctgagcaaattggagcacccacacatcgtgaggctgattggcgtgtgcccggagtcgtgcggcctggtgtacgagcacctccccaacggcacgctcaaggacaggctctccaagggcctcctgtggaaggaccgcgtcaggatcctcggcgagctgtcctctgcgct

SEQ ID NO: 15420 - DNA, 386 bp, Zea mays
  Clone ID: LIB36-022-Q1-E1-E11
tcgtgggtcgacgcaagcctctataatgagtcgtattatcgcaactggagcatcgattccggaaactaatacaaaatcagttcatccaggaacccagttcaggagaggcccccaacatgagcaaagtagcagtggtgaacatatgagatggtatctacaggccatgcacggcccgtcgatcgcccagtggctctgtgctgtgctctgtgctagcaggagctacactacatactcgtgagcacgacacctaaacccacatgatcatgattattcaacatgagaatcgaactgatactggaattaaacagacagaagggcctgttggttcttgccggcgatcgacgggaccgggcgggcgagccgaagcggccaggcctactcgtcgt

SEQ ID NO: 15421 - DNA, 409 bp, Zea mays
  Clone ID: LIB36-022-Q1-E1-E4
gtcgacgcaagactctaaagtgagtcgtatcagggaggcgaaaccgaggcgcacccttacgtctccttcaccataaattttgtctgagacaaagtatggttcctagaccgtctgtggcctaggcaatataatacttggaagcagctattggaacgcaagcgcggaacgagcatgtatattactctgttgatttatcggttcatgtggtcctgtagttcatatcacagagagatcagccgacggatgctgtaatttctgaggaacctatggaattcctgtagttcatgtggtcctgtaatttctgaggactacctacctatttccctgcagcactgcaccttgtaaaaagacttaacccgtgtctgtagcagctggctactggatttattacatctacaataacagtcat

SEQ ID NO: 15422 - DNA, 393 bp, Zea mays
  Clone ID: LIB36-022-Q1-E1-E9
tcgcgggtcgacgcacgcgtccgcatacgggctcgggaagcccgtggagtacctgcagttcgaactggactcgctggaccagaacctggccaagaacgaggccggcggcatcatcggcacccggttcgagtcctccgacgtcaagtccaccccgctccagccctacagcgaggtgttcggcctccagcggttccgcgagtgcgagctcatccacggccgatgggccatgctcgccaccctcggcgccctcaccgtcgagtggctcaccggcgtcacctgacacgacgctggcaaggcggagctggtggatgggtcctcctacctgggccagccgctgccgttcaacatctcgacgctcatctggatcgaagtgcttgtgatcggctacatcca

SEQ ID NO: 15423 - DNA, 386 bp, Zea mays
  Clone ID: LIB36-022-Q1-E1-F5
tcgtaggtcgacgcaagactctaaaatgagtcgtatcacatcgtggcaatatttggattggattggttgcttgttgcaatgtggttgtagaagaatggaacaagcatggcagagaggaggccgagcctgtggcagaaatgaagaaccgaagaagcattgcccaagggtcatggctcgagtgccaaagtgagggattgatgctaccttcagtgcttcagtagaatatgttcagcacttaattatggtaaacatgatgattttgactgttttgtgcttcaattttgtaactggcagttgatggttggcattcaaactctataatgttcactacgtgtagctgtgtttttgacaatctgtaacattctgctaacatttggttaagagac

SEQ ID NO: 15424 - DNA, 421 bp, Zea mays
  Clone ID: LIB36-022-Q1-E1-F7
tcgcgggtcgacgcacgcgtccacacacgcgtccgccaacgcgtccgacgagcaccgccgcgcaggccaccgtcgtcctcggcgtggccccggagaagaaggccgcgcccgagttcgtcgaggccgcggcggagtccggcgaggccgcccacggctgcagctgcggtggcaactgcaagtgcgacccctgcaactgctgatcacatcgatcgacgaccatggatatgattattatctatctagcttgtggtggtggttgaacaataataagcgaggccgagctggctgccatacataggtattgtgtggtgtgtgtgagagagagagaaacagagttcttcagtttgctatctctctctgcatgtttggcgtcagtctttgtgctcatgtacgtacgtgtgtccacctgcatggtggttga

SEQ ID NO: 15425 - DNA, 387 bp, Zea mays
  Clone ID: LIB36-022-Q1-E1-F8
ctcgtaggacgtcgcaacactctagagtgagtcgtattacacctatccagcacaagagatcgataggcaggagtcatggccaccgtcagcgccgccgtggtgaccaccatcgttgcccgcgccgcgatcgccaggcccaatgctctacggctgcctgcgctgacggcgaggagcgagagggtgcggtgcagctacgccaatgacacggctccagtcagcagcatgggcgcaggcgcgtcgctgctcgccgcagcgggcgcggtgaccgcgtcggcggggcccgcgctggcactcgtggacgagcgcatgtccactgagggcaacgggctgagccctctgggctcagcatcaacctgctggggtggattctcctgggggtcttcggcc

SEQ ID NO: 15426 - DNA, 408 bp, Zea mays
  Clone ID: LIB36-022-Q1-E1-G1
cgggtcgacccaagcctctataatgagtcgtatgaatccattaaaagtcaatgaaacatgtgattcgaagcggtttcgaaaggtgatgcaggggtgaagtttgcatagcattgataggccggaaatcggatttgaggacccaatgatatgccgctgcatggaaagtttcatcatttcatgcctgtggtcggtttgctcgtgaagattgcttttgtttgctgtggaagcgggtgcaagtattacacagcagcaatatcgggactgttgtgaaggatgaagttgagagtcaacatctgagaaccatggagctcaccatacgccacaaaggaactaaagctgctagtttaggcatggttaagagagtcagtgctggtcctttaagttaaataagaactttgcggggccgca

SEQ ID NO: 15427 - DNA, 177 bp, Zea mays
  Clone ID: LIB36-022-Q1-E1-G10
tcgcaacaccctagagtgagtcgtattatactggaccatcgcgctctgcctggtcatctccgtcctgccctacctggtgctcacggtgagcgcagcaggtgtgctggacagcggtgccttctactcggggctgtagctgcgggcgctgggctgtgcgcagcaccctgtgctgtcgtc

SEQ ID NO: 15428 - DNA, 410 bp, Zea mays
  Clone ID: LIB36-022-Q1-E1-G11
tcgcaacactctatagtgagtcgtattaagcctgatccacgcgcagagcatcctcgccatctgggcctgccaggtcgtgctcatgggtgccgtcgagggctaccgcattgccggcgggccgctcggcgaggtcgtcgacccgctgtaccctggcggcagcttcgaccccctcggcctggccgacgaccccgaggccttcgccgagctcaaggtgaaggagctcaagaacggccgcctcgccatgttttccatgttcggcttcttcgtccaggccatcgtcaccggcaagggcccgctcgagaacctcgctgaccacatcgctgacccagtcaacaacaacgcatgggcctacgccaccaacttcgtccccggcaactaagctcaaaggctatgctatgcaacttcattgt

SEQ ID NO: 15429 - DNA, 392 bp, Zea mays
  Clone ID: LIB36-022-Q1-E1-G12
gcaacaccctatactgagtcgtattatcctagcgccacgcaacagcagcgcatgccatcagcagcgctcccgattcggcgccacctcgatcccccagttcccgtccagaccacccaatcctgcgtgtgtgcttgctgcagccgttggtctcctgctttgttcgggtgctagctgccacgcgcgatgcctcctaacgcccaagacgtgcacgggagcaacggcgggctcgccatgacagccccggcggcgtccaacatggactgcctcctagccgccgtctgcacgccggtcaagctccacttcatcgacgtgtcctgccgtgtgaagcacacggagtggtcctcgaaagccgcccccaggcgggcggcgtatcgcaactccggttcccggcg

SEQ ID NO: 15430 - DNA, 266 bp, Zea mays
  Clone ID: LIB36-022-Q1-E1-G3
atagtgagtcgtattaaacagaacgactcagtagctgcagtcgtcggaacgccctctgggtgttcgatgtgaccagcacgagctggaccgtggtgcccccgccgccggagtgcgccggcttcgtgttctccgttgcgtccgtccggatctgagaaaacctagatcttcttcgtcctgtccgtccctccgcgatcgatcaacagacgtaaaggctactgcgagtgctagtgctagtacgggtgtaccggccgtaggtccgtgcgcca

SEQ ID NO: 15431 - DNA, 416 bp, Zea mays
  Clone ID: LIB36-022-Q1-E1-G4
ggtcgacccaagcgtctaccttgagtccttccaaccgcctctcccccaatccctcccaccaccaccaccattctttccgttctgttgtactaccctgtacaatctgcttctgctccgtgcaggctctagttgagaggcttgtgtgtgttatgagagttgtgctgcttctttggttgttaacgtgcctcacctgatctagattagtagactgttagttctactgctgccttgctgttacatatttacagtgttcgcttctgtgggggttacaattgcttactcgcttactccgggtttggatgctaaatgggcttcaatgtacaaagccattatttcaattattgcactggtaccatataaactaaccacctgtcagttgcacttcccgtagtttcactgtcaagatcactccctgt

SEQ ID NO: 15432 - DNA, 382 bp, Zea mays
  Clone ID: LIB36-022-Q1-E1-G6
ctcgcgggtcgacgcacgcgtccggctgccggcggcagaataggagaggcaggcgatgacgatggcgacgaaggcggcgtgcgtgctggcggtgtgggtgctcgtcgcatcgggcctgtccgacctgggctcagcgcgcgcgcccctgggcagcaagccgcagcgggagttcgactacttcgcgctctccctccagtggcccggcaccatctgcgcctccacccgccactgctgcgccaccaacggctgctgccgctcggagcctctccagacgtgcacgatctgtaagtgctcggcctttcgatttctgttcatatgttccgtcaggtgaatacgggatcggtttcgtctgaatttcgcgactgttgccgctcgagcagac

SEQ ID NO: 15433 - DNA, 392 bp, Zea mays
  Clone ID: LIB36-022-Q1-E1-H1
tcgttggtcgtcgcaagaccctagagtgagtcgtactatcctccatggtgaggacggggaagccgccggacttcgtgctgtgcatcggcgacgaccggtcggacgaggacatgttcgagagcatcgtgtgcccggcctccagcagcggcggcgtgaggctcccggccagcagcgaggtgttcgcgtgcacggtgggcaagaagccgagcatggccaagtactacctggacgacacggtggacgtggtcaagatgctggacggcctggccagcgcgccgtcgccgccgcgacggcccgggccggcggcggcggtgcagctccgggtctcgttcgaaggctcgctctgagggggggaacggaagtaaaacacacagcgcctaccggtaaacagc

SEQ ID NO: 15434 - DNA, 412 bp, Zea mays
  Clone ID: LIB36-022-Q1-E1-H7
tcgcgggtcgacgcacgcgtctaccacgtcgtcctcgacggctcgcaactccttgatggcggccacggcgagtctcactaccactgctccctcccctccagctctcctcaaagcatcagctcctttgcttatctcctttcgccccgtctcccgccactgcaagaacctgtgcatcaagaccaaggccacagaaaatgatcagtctgctaaaaagcatcagaaggtgaagagcattctttgccaggactgcgaaggaaatggggcaatcgtatgcaccaaatgtgaaggaaatggggtaaattctgttgactattttgaaggccgatttaaagctggatctttatgctggttgtgcagaggcaagcgtgaaatcctatgtgggaactgtaatggtgccggcttcttgggtgga

SEQ ID NO: 15435 - DNA, 349 bp, Zea mays
  Clone ID: LIB36-022-Q1-E1-H8
tcgcgggtcgacgcacgcgtctaaacagcggtcatagaaccgccgggcggcggacgcggctgcggcggccgatggcgggctgacgaggctgctcctcctgatgcagagcgggtgctcgccggcggcgagacagatggcgctggagctgctgaagatatacagggtgaacgccaagagctgtctcgccggctacgactccaagaccacccacatcatgccgttctgaggaaccgaagcggacgagagtggtttgccgcgatcctgggtggctgttttgacatgatgaaatggattcaattcagtgaatcaattaaatcgcatggaacatgggaatgtgttcttgttcctg

SEQ ID NO: 15436 - DNA, 279 bp, Zea mays
  Clone ID: LIB36-001-Q1-E1-D11
ggtcgacgcacgcgtccggtggagaaggacctcgcggcaatcgccgccgccgcgcccgccgacgacagccgcggcctcctcctgctcatcgtcgtcgcgcccgccatcggctgggtgctcttcaacatcctccagccggcgctcaaccagctcaaccgcatgcggtccgactgaagctagctagctagcgtccgtttccgtatccgcggcgtgcgttgtagacgtgaagcacgtggttggttgatcaacgtacgtggacgtggcctgtctttccatctt

SEQ ID NO: 15437 - DNA, 189 bp, Zea mays
  Clone ID: LIB36-001-Q1-E1-E11
gggtcgacgcacgcgtccgtgcaagcaccgtgtgtacgtagagagctaggcatggcctggctcgccatgcttgttgtgtgtttctttgattgtacatgagaggacccgtttctgctgccatccaagttgtttgagaaatcttggtactaatattgcttcgtctttttttaaaaaaaaactcttcctgcc

SEQ ID NO: 15438 - DNA, 137 bp, Zea mays
  Clone ID: LIB36-001-Q1-E1-H10
ataaactggtttgttagctgaatcccaaagttatttctgagcctaaccagaggaaatttagctcaaaacggcgaaggtacatacgagacctttgattctcacaagaaaggggagatgagtgcactgtcacgcaaaag

SEQ ID NO: 15439 - DNA, 299 bp, Zea mays
  Clone ID: LIB36-001-Q1-E1-H4
acacggcaaaagattcacagattaaacgctgtttacattgggaagtagtacataggtacaggcggcgtacagcatgcaatgcaacatacaacgctgcatgcatgtgtgcacgtgtagttgattgagctcagcgccgcttgacgggatcgaagttagagacagcgacgacggcgccgacgatggcgacgagcacgacgcctccggagacgatgctgaggaggaagttcttgagcgacggcgagatcccgggcgcggcctccgcgacctccggcagcaccagcgccgccgccacggccgcc

SEQ ID NO: 15440 - DNA, 385 bp, Zea mays
  unsure (1)..(385): unsure at all n locations; Clone ID: LIB36-001-Q1-E1-H6
cacaagcgtccgcaaggtgaaggagatcaagaacggccggctggccatgttctccatgttcgccttcttcatccaggcctacgtcaccggcgaaggccccgtggagaacctcgccaagcacctcagcgaccccttcggcaacaacctgcttaccgtcatctccggcgccgccgagaggacgcctagcctgtaaggacggacgccacgccgccgagcaatgccaagtcatgcgctgctgcatgccgtctttgattttaccgggataaaaagctgtatgtgagggtctgaagaatgtgcaatgcccacgcgtgtaaattatcgagagggagaacacaccttttcattctgattgtgatanatcntcnanagtgtcagcgaaaatcag

SEQ ID NO: 15441 - DNA, 110 bp, Zea mays
  Clone ID: LIB36-002-Q1-E1-E1
cggacgcgaaggcccacgcgtccgcggacgcgtgggcgtcatcagtggatgaatcaatctatcgatggcctgtgccattcatttttgaaaaagaagacaaaacagaaaag

SEQ ID NO: 15442 - DNA, 398 bp, Zea mays
  Clone ID: LIB36-004-Q1-E1-A10
aacacgcgtccgaccacgcgtccgtgcggatagagcagcagaggcagcgacacgatcgcgagcgcacgcacgtaagcacgttgtcggaagctcaagttagaagaagcaccagtgcctgatcgatggcggcccaggctctcctctccggccggcagctgctgggccgccccgtgcagtcggccgtctctaggtcgtcggcgaggaaggcgcccttcgtcgtcagggccagctccagccctccagccaagcaaggtgccgacaggcagctgtggttcgcgtccaagcagtccctctcctacctcgatggcacgctgcccggcgactatggcttcgacccgctgggcctctcggacccggagggcaccgggggcttcatcgagcccaagtggctggcctac

SEQ ID NO: 15443 - DNA, 423 bp, Zea mays
  Clone ID: LIB36-004-Q1-E1-B11
aacacgcgtccgaaaggctgtcaggcagatgattatggctcccacgcttgagctgaggcagcaggcgctcgaccgtctcttgccgtatcagaggtctgacttcgaaggcattttccgtgctatggatggactcccggtgaccatccgactcctggaccctcccctccacgagttccttccagaagggaacatcgaggacattgtaagtgaattatgtgctgagacgggagccaaccaggaggatgccctcgcgcgaattgaaaagctttcagaagtaaacccgatgcttggcttccgtgggtgcaggcttggtatatcgtaccctgaattgacagagatgcaagcccgggccatttttgaagctgctatagcaatgaccaaccagggtgttcaagtgttcccagagataatggttcctcttgt

SEQ ID NO: 15444 - DNA, 421 bp, Zea mays
  Clone ID: LIB36-004-Q1-E1-B9
acacgcgtccgaccgcctacgccctcgccatcatgaagcatccggatccgatcggcgaggggctggctatggaggcgttcgcggaggcagccgggccggagtgcatcgtgcccggacagcaagcgcctctaaggcttatggggctcaaggtctggcccgttgatatagatatgaagttcctagagccatttggacgggaactacattcaatgaaaaaattcatggacaaatcgtgcagtgttatggactcatctatggcaaacaagtaggcacatgacacatcagttccgtccaatacagctgttgttgtatccacctgcttcctgaagttacaagacccgaaaaatagaagagacattggagagaagccacattcttttgcgtatcttgctcaccgtcacctgacgaacaaaatatgaca

SEQ ID NO: 15445 - DNA, 419 bp, Zea mays
  Clone ID: LIB36-004-Q1-E1-D10
accacgcgtccgcaacaaggcagcagcacaagcaagaaccacacctcctcccttcgcctgtgatcatgtcgtcttgctgcggcggcaagtgcgggtgcggctccagctgctcctgcggcagcggatgcaacggctgcggtatgtaccctgacgtggagaccgccgccaccagcagcgtcaagaccacggtcctcgccgcgccgaccaccaaggccagcgccggcggcttcgaggcggccaccgagggcggcggctgcgactgcaacacctgcaagtgcggcaccagctgcggctgctcctgctgcagctgcaactgagctggcccggcccggcgatggcgcacgagagtcgagaggaggaggacgacgacgaggcgtataaatataatagcggcgtccagtaaataagatcctgtcaac

SEQ ID NO: 15446 - DNA, 425 bp, Zea mays
  Clone ID: LIB36-004-Q1-E1-F9
acacgcgtccgatagacattagctacaactgtatcaaggaaattccacacaaaatctctgctcttaaatctctaaataaattgctcctaactgaaaatgatatagttgatgatagcatctgctgggaaggtctatcatgtcttcaaaagctattgaatttatctttaagcgaaaaccgactggttagcttgccaccaactttgggttcactgacttctcttcgtgaactgtgtgttgcaaagaacaggcttgataacttgcctgtagaaataggactgctgaagcacctccaggtcctcatagcaaataacaacaggataacttcattgccttcatcaataggagattgtgaatctctcactgtggttcacctgtcatcaaatctcttaactgaactgccagagacctttgcgaaccttcgtaat

SEQ ID NO: 15447 - DNA, 267 bp, Zea mays
  Clone ID: LIB36-004-Q1-E1-G1
gacccacgggcccgcataattcggaattagatttgtcaaagaggagtgagtgaagttgttcctcgttgtgactgtaccgggcaaggtgtcgtccccgccgtgcttaactttatgatggaatttcttttcagagcacctaccacctgaagatttgtgggatacgtatactcacttcggaaagaatgtagatagcaagcagttgggcaagcacaagattttaatttaaaacatgattttgttctccaaaaaagaaagagatgggggtgg

SEQ ID NO: 15448 - DNA, 104 bp, Zea mays
  Clone ID: LIB36-005-Q1-E1-A12
gggtcgacccacgacgtccaattttttttttttttctgacaaaactggttgtaaaacacatggaaaacaaatacacagaaaatttgagatatacataagctaag

SEQ ID NO: 15449 - DNA, 102 bp, Zea mays
  Clone ID: LIB36-005-Q1-E1-G4
attccagggtcgaccgacccgtccgcaacaataaatgcaacaaattaattgttgtacatgtgaggaaaacaattaatgcaacaaatcaagtacgtacttgag

SEQ ID NO: 15450 - DNA, 212 bp, Zea mays
  Clone ID: LIB36-007-Q1-E1-B7.F1
ggatcattcttttgagaccataggcaacaaatgatgattggacttacatgtttattggtcgacatatgtgtttgtttcctgattaatatagttataaaaagtaagaaatgactagctaccaataccatgcatctaggtgaggcacatgctagctagtgaaggcgcagctagggctccttcaagcttctctgctgacatcatccttcaagctt

SEQ ID NO: 15451 - DNA, 608 bp, Zea mays
  Clone ID: LIB36-007-Q1-E1-B7.F2
ggaatcattcttttgagaccataggcaaacaaatgatgattggacttacatgtttattggtcgacatatgtgtttgtttcctgattaatatagttataaaaagtaagaaatgactagctaccaataccatgcatctatgtgaggcacattgctagctagtgtaggtgcagctagggctccttcaagcttctctgctgacatcatccttcaagcttgctagtaggagtcgagattgcgcttgcgtagcttgcgctcgtcagagagcttcttggcgaagtgagctagcgcctctgcattcgtcccctcgccggagcagggctcgtacacacctgtgtcgatgttcactctggccactggcttcttgagcaggtcctggccgatcccgatcagagactccatgttctccttggtcgcgatgtccactgatgatgtgttcccaatcagagtatcatcctgaatgcgaaggtagttcttctcacagtggagggcctggaagagcacggcagcatggatgtcgaccatgtcggagctggcgtgggagaagatgtcgatgatcggggtgaagccgccgttgtatagccactgaaagaggccccatttcgcgcact

SEQ ID NO: 15452 - DNA, 187 bp, Zea mays
  Clone ID: LIB36-007-Q1-E1-B7.R1
gcacgcgtccgcccacgcgtccggggagcttaaaagaaaacacaactgcaaaagggtggttccgagcactccgatactaaaatccttctgtggattctcttctactcgagagctctgctagtccgatatccagttaagtttcagagacatggagagcaacgcctcgtccaacagcgtcacggtgccg

SEQ ID NO: 15453 - DNA, 656 bp, Zea mays
  Clone ID: LIB36-007-Q1-E1-B7.R2
cccacgcgtccgcggacgcgtggcaagaaacacaactgcaaaagcgaggatcggagcactccgatccttaattccttcttggattctcttctactctagagctctgctagaccgatctccagttaagtttcagacacatggagagcaacgcctcgtccaactgcgccaccgtgccgcagccgccgccgtcgacagggaagctgatcacgattctgagcatcgatggtggcggcatccgcggcctcatcccagccaccatcatcgcgcacctcgaggccaagctgcaggagctggacggcccagatgctcggatcgccgactacttcgacgtgatcgccgggacgagcaccggcgcccttctcacgtcgatgctggcggcgccggaccagaacaaccggccgctgttcttcgcaaaggacctcaacacgttctacctcgagaacgggcccaagatcttccctcagaaaaaggccgggttcctgacgccggtggcgaacctgctgggcctggtgaggggtcccaagtacgacggcgtgttcctgcacgacaagatcaagagcctgacgcacgacgtgagggtggcggacacggtgaccaacgtcatcgtgccggcgttcgacgtcaagtacctgcagcccatcatcttctccacgtac

SEQ ID NO: 15454 - DNA, 106 bp, Zea mays
  Clone ID: LIB36-007-Q1-E1-E7
tttacaagaaaaacacattactggatatcaacaattaaccagcatgaaacataaaccatcactattgcacaaacatggttcatcttagtgtacaacgccaattcga

SEQ ID NO: 15455 - DNA, 389 bp, Zea mays
  Clone ID: LIB36-007-Q1-E1-H1.F1
ggcgccctttttttttttttttttttttttttttttttttttttttttaccaaactgcaaatagatcactaatcaccgttaaatgtctatctaaataaatataatagccaattttcagaccccattagtgtaaaactgtaaacgctaatacaatatacacccgttgctatggttcgtgccactcttgcatattttcatttagtggaaggaggacaatattttgttattgagggggtcggaaagtgttcaaccagtttctgtacagggcccttgcctgtgacagcggtctggatgaaaaacccaaaccatggtatcatgggagggcgtctgttcttgatttccttcaccttgagatttttaaatgctaggggttctttggacaggccaag

SEQ ID NO: 15456 - DNA, 356 bp, Zea mays
  Clone ID: LIB36-007-Q1-E1-H1.F2
accaaactgcaaatagatcactaatcaccggtaaatgtctatctaaataaatataatagccaattttcagaacccattagtgtaaaactgtaaacgctaatacaatatacacccgttgctatggttcgtgccactcttgcatattttcatttagtggaaggaggacaatatattgttatttagtgggtcggacaagtgttcaaccaggttctgtacagggcccttgcctgtgacagccgcctggatgtaaaatccaaaccatgctaccatcgcaaggggaccggtcttgatttctttcaccttgagatcttcaaatgccacgggatccttggacaggcccaagggatcaaaaaggg

SEQ ID NO: 15457 - DNA, 279 bp, Zea mays
  Clone ID: LIB36-007-Q1-E1-H1.R1
cccacgcgtccgcagaatatgcaaggtattgtgggatcgaggcactagaaccattggggaatatatcttcctggtgacataaactacccaggaggacccctttgttgatcccttggggcctgtccaaggatcccggtggcattgtgaagatctcaaggatgaaagaaatcaagaacggtcgccttgcgatgggtagcatggttatggattttacatccaggcggctgtcacaggcaagggccctgtacagaacctggttgagcacttgtccgtcccact

SEQ ID NO: 15458 - DNA, 452 bp, Zea mays
  Clone ID: LIB36-007-Q1-E1-H1.R2
cccacgcgtccgcagaatatgcaaggtattgtgggatcgaggcactagaaccattgggaatatatcttcctggtgacataaactacccaggaggacccctttttgatcccttgggcctgtccaaggatcccgtggcatttgaagatctcaaggtgaaagaaatcaagaacggtcgccttgcgatggtagcatggtttggattttacatccaggcggctgtcacaggcaagggccctgtacagaacctggttgaacacttgtccgacccactaaataacaatatattgtcctccttccactaaatgaaaatatgcaagagtggcacgaaccatagcaacgggtgtatattgtattagcgtttacagttttacactaatgggttctgaaaattggctattatatttatttagatagacatttaacggtgattagtgatctatttgcagtttggt

SEQ ID NO: 15459 - DNA, 61 bp, Zea mays
  Clone ID: LIB36-008-Q1-E1-A3
cgacccacgcctccgtgcatggatatctttttgtactggtgaacattttaactctgagcta

SEQ ID NO: 15460 - DNA, 372 bp, Zea mays
  Clone ID: LIB36-008-Q1-E1-A6
ccccacgcgtccgcccacgcgtccgcggacgcgtccgcccacgcgtccgaccacagaaggaaagcagcggtgaacggcgattgcgacggcgacggcgaccgctactactcctccttctcctccacgtcgtcgtcgacggaggaggccagcgccaaacaaccagaagatgacgaagaagaagtagaagaggagtggcagagcagggtgtggaagatgtgcgtgtacgtcatcaccctgcgcatgctggtggcgctgctgctgggcctgaacatgtcgtggagccccatcaccgccgccctggcgctcatcgtgctggacttcaaggacgcccgcccctgcctggagaaggtgtcgtacccgctgctgctcttc

SEQ ID NO: 15461 - DNA, 514 bp, Zea mays
  unsure (1)..(514): unsure at all n locations; Clone ID: LIB36-008-Q1-E1-A8.F2
gaaacaaatactttgtgatcaaatattcaaatacagagagatcaccatgtgtgcgccattattaacaactaatgaagatgcagcgcacaccatgcgtgtaataatctataagattttacagtacagtacagtgatcgatcatttctggaacaaaatatatatatgcgcagtcctaaattatatatggtatcatcatcgtcatcgacatcgagcacgcatgcatgcatccatgcacgagctgactatccccgatcgaccggcggcgtagcaggcgattgattttgcctcatctacaagcgcgacgggatggcgctgagcttgtcggactcggtgatgatgtgcttgcgggtgatttcggcgagggaggtgcagccgctgagcgccatggtgagctcgaactcgtcccgcagcatgcgcaggacgttggacacgccggcctcgcccgccgncgncagggagaacaccaccggcctcccgacgaatacgccggcggcgccgagcgcgagcgccttga

SEQ ID NO: 15462 - DNA, 54 bp, Zea mays
  Clone ID: LIB36-008-Q1-E1-A8.R1
atcgaactcaccgtcgacacgccgcgccttggctgcagggaagctggcatcaag

SEQ ID NO: 15463 - DNA, 650 bp, Zea mays
  Clone ID: LIB36-008-Q1-E1-A8.R2
atcgagctcaccgtcgacacgccgcgccttggccgcagggaagctgacatcaagaacagatttgtcctgccaccacacctgacgctcaagaacttcgaaggtctggacctcggcaaaatggaccaggctgctgattcagggctggcttcctatgtcgccggccaagtcgaccgcaccctgagctggaaagacgtcaagtggttgcagaccatcaccacgctgccgatcctcgtcaagggagtgctcaccgctgaagacacgaggcttgcggtggcgaacggcgcggcggggatcatcgtgtcgaaccacggcgcgcggcagctggactacgtgccggcgaccatcagcgcgctggaggaggtcgtgaaggccgcccggggccagctccccgtgttcgtcgacggtggcgtccgccgcggcaccgacgtcttcaaggcgctcgcgctcggcgccgccggcgtattcgtcgggaggccggtggtgttctccctggcggcggcgggcgaggccggcgtgtccaacgtcctgcgcatgctgcgggacgagttcgagctcaccatggcgctcagcggctgcacctccctcgccgaaatcacccgcaagcacatcatcaccgagtccgacaagctcagcgccatcccgtcgcgctt

SEQ ID NO: 15464 - DNA, 168 bp, Zea mays
  Clone ID: LIB36-009-D11-F2A
cgacattactgttcagttgcccacatagctagcggaagcggtcaacatggttattttctgtgatgaactgctatacagtgacacattgccacaacatgcgaatgcggacgcatagagtgtcaaacactgaactcatctaatgagatgacctaacttaaattaattaat

SEQ ID NO: 15465 - DNA, 349 bp, Zea mays
  Clone ID: LIB36-009-D11-R2A
ccacacgttcggacacttcgttgtagccaccgcaggtggtgcttatgttcgaccaattaactgtaaatatattaacaggcccctatctgttcgggtagatacacccttggatgctatggctaggcgtatcgatagagtgggtactgcctatcgcactactaaggaccaaccatctgccgatccgcactcaatggccgtacataagctcagcgtgctcacacagacaagggctaatgcttatccaaatccacatgtgacggatcttatggaggagattgcatgcacacagcctcatgatgacgcttgtaagctgacacctactgatagtccgatagagccacttcataac

SEQ ID NO: 15466 - DNA, 464 bp, Zea mays
  Clone ID: LIB36-009-Q1-E1-C1.F2
ggaaataatcatgcctcggtctatggcatctaaagatgcacataaccaaagcctttattgcattcttttacgtctcatgactacatatatctccgagcataacatacccatgctctttatttcagaaactgtacgagtaaaaaggcgacgagcaagcaagcatcgccttgattatttaaaccctgtcgtctgcatcttgagaaagatgcaaatggagctccgaacggaaattatttattggcaaggttatttgcccacttagattataagtcacgcatcatcatcatcagtacgacgggtgcagcggcgcttgcaaaagttgacgatcttgtccttgcacacaaagaggccgtcggagatggacagggcgcacgccttgcaagccgggtggcagccggtcgtcgacgtgtccctgcactcgcatatcggcggctgcgacctggtgcaaatgccgcactggtcgc

SEQ ID NO: 15467 - DNA, 605 bp, Zea mays
  Clone ID: LIB36-009-Q1-E1-C1.R2
cctacgcgtccgcccacgcgtccgcccacgcgtccgaaacaaacaaaaaaacacccgggaaatccaagcagctgttgcaaccggttccttcgaggagaacgtgagaaagaagcatgaggccccaggtgctgctcgtcgcactggccgtcttcgccgtcctcgtagctctgccactgggcaaagcgcacgaggaggaggaggaggaagggcttgaactcgaagccagcaggaggcggtggccgtgctgcgaccagtgcggcatttgcaccaggtcgcagccgccgatatgcgagtgcagggacacgtcgacgaccggctgccacccggcttgcaaggcgtgcgccctgtccatctccgacggcctcttcgtgtgcaaggacaagatcgtcaacttctgcaagcgccgctgcacccgtcgtactgatgatgatgatgcgtgacttataatctaagtgggcaaataaccttgccaataaataatttccgttcggagctccatttgcatctttctcaagatgcagacgacagggtttaaataatcaaggcgatgcttgcttgctcgtcgcctttttactcgtacagtttctgaaataaagagcatgggt

SEQ ID NO: 15468 - DNA, 78 bp, Zea mays
  Clone ID: LIB36-009-Q1-E1-H8.F1
cggcgcctttttttttttttttttggtcaaagggtggcctttaccattaacaggacttttaccacacaaaagcaaggg

SEQ ID NO: 15469 - DNA, 589 bp, Zea mays
  Clone ID: LIB36-009-Q1-E1-H8.F2
ttggtctaaagtgtggcctttaccattaacaggacttttaccacacaaaagcaagggagatatggatgaaaaaaaagaggcatacttcatgtaaaatcccaccagcacgccctaccaaattctcgatcatgacataaccagtcccacaggcacaaataaggtaggtcagagttctcaacaggtcccttctaatggcatggtttaacaacagcaggcatgtagcaaaatcatgaggactcctttttctcttccgcggcctcctcaaatgtctctccagggacaagctcaggaacgtcatcatcatcgtcctgaacagccccagcgctggcaccagcctctgcaccagaagcaccagaggcctgcttctggaattgctctgcgagcctccgcagattgtccaggttgtcaggaccaagctggttgataatcgacggaagcagatcttgcagcttctttgtctgtggagttccactgaccacccatgtattagcaccaattgacgcttgcactttaggatttacaaactgaataacaacatcatccttaaagatgttgacctcttcaataccaggaatgctgttcactccta

SEQ ID NO: 15470 - DNA, 384 bp, Zea mays
  unsure (1)..(384): unsure at all n locations; Clone ID: LIB36-009-Q1-E1-H8.R1
gctgcaggacggtcggaatgcggggtcgacaacgcgtccgccacgcgtccgcccacgcgtccgggagctntncaccgggggtctccagcattcctatcctctccccgcccgcccgtgccgccgccgcgctttccacttcctctcccgagccaagatgaatgttgaaaagctcaagaagatggcaggtgctgtgcgcaccggaggggaagggtagcgtgcgcaggaagaagaaggcagtccacaagactacaaccacagatgacaaacggcttcaaagcaccttgaaaagaataggagtgaacagcattcctggtattgaagaggtcaacatctttaaggatgatgttgttattcagtttgtaaatcctaaagtgcaagcgtcaa

SEQ ID NO: 15471 - DNA, 628 bp, Zea mays
  Clone ID: LIB36-009-Q1-E1-H8.R2
cccacgcgtccgcccacgcgtccgcggacgcgtgggcactcccgggtctccagcattcctatcctctccccgcccgcccgtgccgccgccgcggcttcccttcctctcccgagccaagatgaatgttgaaaagctcaagaagatggcaggtgctgtgcgcaccggggggaagggtagcgtgcgcaggaagaagaaggcagtccacaagactacaaccacagatgacaaacggcttcaaagcaccttgaaaagaataggagtgaacagcattcctggtattgaagaggtcaacatctttaaggatgatgttgttattcagtttgtaaatcctaaagtgcaagcgtcaattggtgctaatacatgggtggtcagtggaactccacagacaaagaagctgcaagatctgcttccgtcgattatcaaccagcttggtcctgacaacctggacaatctgcggaggctcgcagagcaattccagaagcaggcctctggtgcttctggtgcagaggctggtgccagcgctggggctgttcatgacgatgatgatgacgttcctgagcttgtccctggagagacatttgaggaggccgcggaagagaaaaggagtcctcatgattttgctacatgc

SEQ ID NO: 15472 - DNA, 90 bp, Zea mays
  Clone ID: LIB36-010-Q1-E1-C2
ggtcgaccgacccatccggtggagatattcttgaggcatgagtaatgctacatgcatgtgatgtaaacaaatacaggtgcagctccaaat

SEQ ID NO: 15473 - DNA, 128 bp, Zea mays
  Clone ID: LIB36-010-Q1-E1-H2.F1
tatagagacatgacgcgatgacgcgtacgtaacttggacccaagagggcgcctttttttttttttttataattaaacactccgagcactttattattatatgaattattacagaggcaaaatgggcac

SEQ ID NO: 15474 - DNA, 520 bp, Zea mays
  unsure (1)..(520): unsure at all n locations; Clone ID: LIB36-010-Q1-E1-H2.F2
tataattaatacactccgagcaactttattattatatgtattattacaaggcacaatggcacatacatacagtgatacagctgcaatatacatgaacaccctttgtctcgctcctgctttatctatgcaactgctggcatgcatgcaaaagacgcctcgggagataagacccctgttattctgctagtacgtatgcatgcatgtgcacgatcgatgggcgcgatggtcatatcatccgttggttcagtagtagggctggatcttccagcgctggttgtcgccctcgcaccacttccagagcacgacgttggtgccgtcacggacgccgccgtgccacttgtcgccgtggagggcgtcgaagttgaggtagatgttgttgaccatgcggacgcagcggaaaccgttgccgacgtcgcggttcttcgtccacagcaccgactcgtncaaaaagtccgggttgtagggcaccaggcgcaccgggtgggactgccccancgagtgcttgatggcctccccggtc

SEQ ID NO: 15475 - DNA, 328 bp, Zea mays
  Clone ID: LIB36-010-Q1-E1-H2.R1
tgcaggacggtcggaatgcggggtcgatcacgcgtccgaatcgccagaggagttgttgatcgaggtgagtgaggttgaaaagcacaccatgcgtcagtggacggcaggatactaacggcggtcgcgatcagcgctacagcggcggtgtactacgggcggcggtgtgcatcgcaacgccgtgggatacgctccggcggtacccgtaacgggattgtcgcaggtagaacattgcgagggcaacggtgtgacgggcgaggcgctgccgccgcagccagatccgtagaaggtgtaatggccgcgccaaccccaactaatcgccatgagcgtc

SEQ ID NO: 15476 - DNA, 625 bp, Zea mays
  unsure (1)..(625): unsure at all n locations; Clone ID: LIB36-010-Q1-E1-H2.R2
aatcgccataggagttgttgatcgaggtgagtgaggttgaaaagcacaccatcgtcatggacggcggatactacggcggtcgcgatcagcgctacagcggcgggtactacggcggcggtggcatcgcaacgccggggtacgctccggcggtcccgtacgggatgtcgcaggtgaacatcgagggcaacgggtgcgggcgggcgctgccgccgcagccgaccgtgaaggtgtactgccgcgccaaccccaactacgccatgagcgtccgcgacgggaaggtggtgctggcgccggcgaaccccaaggacgagtaccagcactggatcaaggacatgcggtggagcacgagcatcaaggacgaggaaggttacccggcgttcgcgctggtgaacaaggcgaccggggaggccatcaagcactcgctggggcagtcccacccggtgcgcctggtgccctacaacccggactntntggacgagtcggtgctgtggacggagagccgcgacgtcngcaacggtttccgctgcgtccgcatggtcaacaacatctacctcaacttcgacgccctccacggcgacaagtggcacggcggcgtccgtgacggcaccaactcgtgctctggaag

SEQ ID NO: 15477 - DNA, 342 bp, Zea mays
  Clone ID: LIB36-011-Q1-E1-D12
tcgaggtgaactcactgaggccagtctggtcaaggcgtagttgttggtagacacgccggcgtagttcaccttgttgaaccgcaccaccaccgggtaacgggtgttaggatcctgatcgacggtgacgacgttgccgatcccgttgtaccagtaggactcccgcctcaggatcttcaccttggcgcccctcttgggcccgatcggcggcggcttctcggccttgggcttggtggccacggcgccctccccttccgccgtgggcgccggctctgccggggactcctcatcggcccggaccacaagcctcctgccaagccggttgggcgccgaggcgaagctgac

SEQ ID NO: 15478 - DNA, 599 bp, Zea mays
  unsure (1)..(599): unsure at all n locations; Clone ID: LIB36-012-Q1-E1-A7.F2
agttcaaagggggagccaaattgcattacggaacagaaaaggaccacaggctgcatcacgcgtgcgagctacgcaagatcccgtggaagtagcctccgaccataaccagggatacaagggacacgacgccggcagggaataccttcccggacttcttgaagcgcgaccccatcactgacagtagcgcggccgatatacctaaaccgatcgatgatgcgaggacaggtctcactgggagttgagtgtggacgacgtacaggaccagggctgatatgcctcctgcagccaaggatttctggcttccactcttcatatatcccattacaccaccagctccgacgagcgcggcgtangcgagggtgagtttctgcgacatggacaggccctgccccatcttctcttcctccccgtctccttcctgccctcctcccctcgggtcgctgccgccgccgctccctccggcaccgtcgccggcccccgatccgccgncgncgagctcgggttccttggtcgcgacngccgcgatgatgcngcggtgggagagggagacnggggcgggcgacncgcggcgcgggagcagcancagcgaggactgggag

SEQ ID NO: 15479 - DNA, 215 bp, Zea mays
  Clone ID: LIB36-012-Q1-E1-A7.R1
ctggaacgctgcaggaacgggtcggaattccgggtcgactcacgcgtccgaccgctgagaagtcagtcagcttcagcaccacgagcacgatggccctcgcgctcgccacgaccccactcgcgcatctcgcccttgccccgccctcgatcttcggctcccagtcctcgctgctgttgctcccgcgtcgggttcgcccgccctcgtctcactctgca

SEQ ID NO: 15480 - DNA, 553 bp, Zea mays
  Clone ID: LIB36-012-Q1-E1-A7.R2
accgctgtgaagtcagtcagcttcagcaccacgagcacgatggccctcgcgctcgccacgaccccactcgcgcatctcgcccttgccccgccctcgatcttcggctcccagtcctcgctgctgctgctcccgcgccgcgcgtcgcccgcccccgtctccctctcccaccgccgcatcatcgcggccgtcgcgaccaaggaacccgagctcggcggcggcggatcgggggccggcgacggtgccggagggagcggcggcggcagcgacccgaggggaggagggcaggaaggagacggggaggaagagaagatggggcagggcctgtccatgtcgcagaaactcaccctcgcctacgccgcgctcgttggagctggtggtgtaatgggatatatgaagagtggaagccagaaatccttggctgcaggaggcatatcagccctggtcctgtacgtcgtccacactcaactcccagtgagacctgtcctcgcatcatcgatcggtttaggtatatcggccgcgctactgtcagtgatggggtcgcgcttcaagaagt

SEQ ID NO: 15481 - DNA, 113 bp, Zea mays
  Clone ID: LIB36-012-Q1-E1-C7.F1
gaaaagcaaccatgataaaattatctaagcaagcatgttgtccacagatatccgctcaagctggcagggcatgggttacatgtctaaaagaagggggtggttgacaaaaataa

SEQ ID NO: 15482 - DNA, 576 bp, Zea mays
  Clone ID: LIB36-012-Q1-E1-C7.F2
gaaaaagcaagcatgataaaattatctaagcaagcatgttgtccacagatatccgctcaagctgcatggcatacgatacatgcttaaaagaaaggggtggttgacaaaaataacactaagtagtcagctccataatggcggtgacgatgtctccattagaagctttgagggccttgaccgccctgggcctcgaaacagatgcctgagtcatcaccagctcgacatccttggcctcgacaccagtttcgtcaacctcctcctcctcgttgtcctccaggcccaggccagatgtctcaggcttcgggatcatttggctcaggtcaggagccttgaactgctctgcagcttgggtctgcagctgggagctgaggtcctcgatcttcgcctcgccgaatatgacataggtgtccgagtttgggctcttgaacacatctggcttcgagatgacaaaaagcatattcttgcttttcttcacagtgacccggctgacaccagtgatgggcttcatgccaagcttcagcatggccttgcggctcttcttctcactcctgctttgcttcgacttgccactcccat

SEQ ID NO: 15483 - DNA, 160 bp, Zea mays
  Clone ID: LIB36-012-Q1-E1-C7.R1
gggcggacgctggggttcgtgcttgtatgctctagggtttttgccacgccgccgccgctctgccccttccaccccaccgatataccaagatgcgggcgcaggctgcggaggagctcgccgcccagattagagcagcagaagctcgaaggacagaagaccg

SEQ ID NO: 15484 - DNA, 314 bp, Zea mays
  Clone ID: LIB36-012-Q1-E1-C7.R2
cggacgcgtgggcggacgcgtgggcggacgcgtgggcggacgcgtgggttcgtgcttgtttgctctagggtttttgccacgccgtcgccgctctgccccttccaccccaccgatataccaagatgacggcgcatgctgcggaggagctcgccgcccagatcgagcagcagaagctcgaggagcagaagaccgaggcagaagatgttgtggtggacgaggatgactaggatgatgaggatgacgatgatgatgacaaggatgatgatgaactggatggacaataaggggatgggagtggcaagttgaaacttagc

SEQ ID NO: 15485 - DNA, 74 bp, Zea mays
  Clone ID: LIB36-012-Q1-E1-E12
tgcgagacactacactagatcgaggcgcacgaaggcattaaccatggtcggcgtgaactccagcgtcgtcgggc

SEQ ID NO: 15486 - DNA, 299 bp, Zea mays
  Clone ID: LIB36-012-Q1-E1-F5
aaacgaaccttcctttgttatgtacgtagtagcattgtactttaaagagatctattcgatcggagaaccaatgcaactacttgagtactattattgcccatgtattgtgtgctgtatatcttctgtatacaaaggaaggttcgtttgttatgtacgtagtagcattgtagtttaaatgtatcgtattatctatctgctaaattcttctttttgatttagcaaatttattgtacgtaaacaaaaataagggtaaaacaaatagagtgtgtaatctaaaaggtcagcaaccaccgaacaag

SEQ ID NO: 15487 - DNA, 185 bp, Zea mays
  Clone ID: LIB36-013-Q1-E1-E10
cccacgcgtccgcccacgcgtccgcccacgcgtccgcccacgcgtccgaaaaaaaacaagcgccaggcaattcaaaaaaaacttcatacaggacaaacgggtgtcagagaagaaacctgtgaagaagcaagaacctggaaaaagcaaaaaaaaccccacgcgtccgcaatttcaaattcacgggg

SEQ ID NO: 15488 - DNA, 62 bp, Zea mays
  Clone ID: LIB36-015-Q1-E1-F12
gtcgaccgacgcgtccgcccacgcgtccgcaaccatttacgctatactccgtactgctgtgc

SEQ ID NO: 15489 - DNA, 227 bp, Zea mays
  Clone ID: LIB36-015-Q1-E1-H12
gtcgactgaacgtccgcccacgcgtccggtgctcggccttcttataagtctcagtactcccttatacttcttactgaggatggtcgattgagctagcatatatttcagacctacacttttgttatcactccgataaaataatataaaatttttgtaacttgtaaacaaagtgccaatggacgtagacgcaaaacggagccgcagcgtctcagtatcagggcggatgg

SEQ ID NO: 15490 - DNA, 239 bp, Zea mays
  Clone ID: LIB36-016-Q2-E2-C2
gcttactctgaaaaccgagagggaaaagaagcgtgagaagtacttccccatgaggaagtatgctatcaatgcctatgtcagaactgtgagatgctgtgcttagcatatcatccgctgtgttttaatttttggtttgtatggacatttgttgtgggtcggaagtacgatgtattcctctgtttctataaatggctagattggtttgactggcaaaaaaagaggtggcgacaaaaaagaag

SEQ ID NO: 15491 - DNA, 124 bp, Zea mays
  Clone ID: LIB36-017-Q1-E1-A3
taccagcctacctctcttctacgcgtcgttgaattgatcaccagccagcgccatgggcacgtccatgaccgacttcgctgtgctgtcccatccgtccgctggctcggggatcccctggtgccgt

SEQ ID NO: 15492 - DNA, 248 bp, Zea mays
  Clone ID: LIB36-017-Q1-E1-G10
tactatacaacgttgaagtgatgagtcctagaacagcatctgggtcatgttattggtgatttgaactctataacaggacaggtcaacatcttcggggataagcctggtggactcaaggtggttgattcgtttgtgccacttgctgagatgttccaatacgtcagcaccctccggggcatgaccaaggggcgagcgtcctagacgatgcagctcgccaagtttgacgtcatcccacagcacatccagaa

SEQ ID NO: 15493 - DNA, 80 bp, Zea mays
  Clone ID: LIB36-017-Q1-E1-H7
atcctactcgctaacgtgagtgataacaaatcctcgtgctcgggccgcaagaatgctactgaggcgtgtgaggcacatcg

SEQ ID NO: 15494 - DNA, 303 bp, Zea mays
  Clone ID: LIB36-019-Q1-E1-A12
tgcaacgggagccacatcaccgtagtccgacccctcgataacaatggccaccgtcctaggcagcccccgcgcgccggccttcttcatctcgccgtcctccctccgtgccgcgccggcgcacaccgccgtggcgctgcctgcagccaaggtgggcatcatgggccgtagcgccagcatcaggggcaggctgcgcgcgcaggccacctacaacgttaagctgatcacgccggagggggaggtggagctgcaggtgctcgacgacgtgtacatcctggaccaggccgatgaggacggcatcgacct

SEQ ID NO: 15495 - DNA, 139 bp, Zea mays
  Clone ID: LIB36-019-Q1-E1-B5
acaggtataggactcgcgggtcgacgcaagcctccaaagtcacttggggcacgccactgcgaagtctgagataatgcatgtatgcttgacggcgagatctgaggaaaaataatttctatatatgcatgtttcgagaaaa

SEQ ID NO: 15496 - DNA, 52 bp, Zea mays
  Clone ID: LIB36-019-Q1-E1-C10
gtgggacgtcgcaagactctatagtgagtcgtagtatatgttcgcaaacaaa

SEQ ID NO: 15497 - DNA, 253 bp, Zea mays
  Clone ID: LIB36-019-Q1-E1-D4
tgactctcctcttgtgcttctgctgtccccagtcgagtctcctcaaccctaggcactcgccctctgtcgcctcgcctcggctcgcggctccgatgccgccgctgctcctcgacccgcgcgactacctcggtgccggcgccacctcgtcgtggtgctcgtcgtcctgctcctcgggccgcgagggcgctggggcgctccgcgcgctgctgctcaggcttcaggggtgctatgacgctccctgccgctgcgcgga

SEQ ID NO: 15498 - DNA, 320 bp, Zea mays
  Clone ID: LIB36-019-Q1-E1-D8
aaaaggaggccgacaagctgcagacctccgacggctgggccaagttcaccgggggattcttcttcggcggcatctccggcgtgctctgggcctactttctcctctacgtgctcgacctcccctacttcttcaagtagaaatcatcaaagatgcgtatatatatagctccggccgatcctcctctctagctgcatggtatgtaggtggtgtggtccttgtttcatttcactccagcggtgatcagcgccgtgtagaaatgtaattcctctgctttgcacatggatggattgggatgtgagacacggggaggtgagaagggg

SEQ ID NO: 15499 - DNA, 367 bp, Zea mays
  Clone ID: LIB36-019-Q1-E1-E6
cacctagcaacgcgcagtaagcagcgtgggcaaagctacgagcgcccggctagcttcgccatgaacatgggtggggtgtccccgtcgacagtccggtgcaagcactgcagcacgcagctcaccgtgtgccccggcgagcgcgccatccagtgcacgcaatgctgcggcgtgacgcgtatccggcggcggcgggtccagcggccggcggcggcgccgcccaccacgggcttcgcgcgcgcccgcggcaagaagcgggccctcctgatgggcatcacgtacgccggcacgcgcccgggctgcgggcatctgaggggggccctcaacgacgtcaagtgcatgaggcaactcctcgggcaacgctgcggcc

SEQ ID NO: 15500 - DNA, 361 bp, Zea mays
  Clone ID: LIB36-019-Q1-E1-F12
tcgtgggtcgacgcaagactctatagtgagtcgtattagactgcgctgttgaatccgtctcatacatacatacagatggcatgaaatgaaatttacacattcacgcattaaacactgttttcattgggaagcacacggggagagagatctcagtacataggtacaacaacacacaacgacgcatgcagctcaaccccgcctgacgggatcgaagttagagacggcgacgacggcgccgacgatggcgacgagcacgaccccaccggagacgatgctgaggaggaagttcttgagcgacggggagatccccggcgcggcctccgcgacctccggaagcaccagcgccgccgccacggcagcc

SEQ ID NO: 15501 - DNA, 368 bp, Zea mays
  Clone ID: LIB36-019-Q1-E1-G11
tcctgggcagcccccgcgcgccggccttcttcttttcgtcgtcctccctccgcgccgcgccggcgcctaccgccgtggcgctgcctgcggccaaggtgggcatcatgggccgtagcgccagcagcaggcgcatgctgcgcacgcaggccacctacaacgtgaagctgatcacgccggagggggaggtggagctgcaggtgcccgacgacgtgtacatcctggaccaggccgaggaggacggcatcgacctgccctactcctgccgcgcggggtcctgctcctcctgcgccggcaaggtcgtccccggctccgtggacgagtccgaccagagctacctctacgacgggcagatcgcccaccgctgggtg

SEQ ID NO: 15502 - DNA, 292 bp, Zea mays
  Clone ID: LIB36-020-Q1-E1-A2
cgggtcgacacaagcgtccaaagtcacgtgggcgctgacccagtcaacaacaacgcatgggcctacgccaccaacttcgtccccggcaactaagctcaacggctatgctatgcaacttcattgtctttcggatcggagagggtgtacgtacgtggattgattgatgctgcgagatgcatgtgtgtcttttgtttcacgttgcattgcatacgcaagtcgagatgatgagttggcgttgtacactaagatgaaccatgtttgtgcaatatgcaaaaggcaaggatttgcaaag

SEQ ID NO: 15503 - DNA, 177 bp, Zea mays
  Clone ID: LIB36-020-Q1-E1-D5
ctcgcgggtcgacacacgcgtctaaatagagacatatgagatgttttctgttaaaaagaataaatgatgcaaatcatgaatttttttcgagcagtctgatgtgtactgaattgcaaatgtacaatttgaactgcatggatctgttgaaataaacggagtgcccatttgatcaacaac

SEQ ID NO: 15504 - DNA, 315 bp, Zea mays
  Clone ID: LIB36-020-Q1-E1-F9
agcaatgctcctcgctgaacgtgactgcacggagagcagcaagcgctcgccacggccacaggtgccgacccgaagcatccggcagctcgtgggtgtcggactgacgacctgtacgatctgctgggcgtggagcggtcctcgccgcagtcggagatcaaggcggcgtaccggtcgctgcagaagcggtgccacccggacgtggccggcgccgccggcggccacgacatgggcgtcgtcctcaacgaggtgtatgcgctgctctccgacccggacgcgcgcctggtctacgaccaggagcacgcgcgccgctccgag

SEQ ID NO: 15505 - DNA, 301 bp, Zea mays
  Clone ID: LIB36-020-Q1-E1-G6
atacgtccggccgcggatgcggcagtcgtcgctgccgccgcaggcgccaggaagaggaggaacgcgtggaggctcgttcgtctacgactgcagcgcgttctgagcgacgcacatcgatcgatcgatcagcctcgcggatgaaccagatcggcaggcgtacgtgccaactttctgcaggtgatccacctcagagatccaaggtcgcgatcttctgtgaactcctgaccaggctctcgaacgtgatcgggctatcagggggcgtcatcacgagacagcgatcgagcatatactgggggctcgt

SEQ ID NO: 15506 - DNA, 174 bp, Zea mays
  Clone ID: LIB36-021-Q1-E1-D3
aactatgtgcctgagaatcgggatgtaacatggtgcatgctcacgcatgtcttacaccatgcggatttgacagatcgacagaatgccaatcctgctgagtcggtggcacagtatgaccgttctgcaggagtccgtgaccccaacggccttcttttcatgttcggaatggcgctc

SEQ ID NO: 15507 - DNA, 241 bp, Zea mays
  Clone ID: LIB36-022-Q1-E1-A1
gtccctcttttctttccgcggctctgccccaacttctgcatccgaatctcccacgaagttgtcacggcgatggcagcgaccggcggcgtttcaactgacgatatcccgatcctgcaggcagagaacctcaccagcaacgtcaagtccgtccactacagtcgaacattcttgtcgatcattggtggagttgttgctggaatctggggattcacaggcttgacgggatttgtcttctactttc

SEQ ID NO: 15508 - DNA, 99 bp, Zea mays
  Clone ID: LIB36-022-Q1-E1-A8
aacaatacgactcactatagtgagtcgtattaagtccggggagacacttcggggattcgtgggggagttggtgtaccgtgccgttggctgggggggggg

SEQ ID NO: 15509 - DNA, 208 bp, Zea mays
  Clone ID: LIB36-022-Q1-E1-B6
actcgtgggtcgacgcaagcgtctacacagacgtcgtgactacgcgtccgcggacgcgtgggcatgtctcgtgctgactcaagctgtcacgcccatgtgcttcttgcacacgattatcaattcagtagttgtgattaaccaaatttttatgtgtactggcagaacccagttgcaattgcaatgaagctcgatgttgctctatcaaaaa

SEQ ID NO: 15510 - DNA, 182 bp, Zea mays
  Clone ID: LIB36-022-Q1-E1-C12
taaccttgcaattcgcacgctcgatcctagcttcccttccaagaagcgcagcgcccatggccatggccacacaagcctccgccgccacgcgccacttgcgggccgccgcctgtgcgccggcggcgaagccgcggcagctgagctcgcagctcgcgctgctgtcgtcgtcctcccgcgggccg

SEQ ID NO: 15511 - DNA, 352 bp, Zea mays
  Clone ID: LIB36-022-Q1-E1-C8
aacgctctcgatctcaccgacaccgtcgaagaagagatcaatggcgtccgaccagggagtcgtgatcgcgtgccacagcaaggctgagtttgacgcccacatgaccaaggcccaggaagccggcaagctggtggtcatcgacttcactgccgcctggtgcggtccatgccgcgccatcgccccactgttcgtcgaacacgccaagaagttcactcaggtcgtcttcctgaaggtggacgtggacgaagtgaaggaagtcaccgcggcctacgaggtcgatgcgatgccgaccttccacttcgtcaagaacgggatcaccgtcgcgaccatcgtgggtgccaggaacgacgag

SEQ ID NO: 15512 - DNA, 216 bp, Zea mays
  Clone ID: LIB36-022-Q1-E1-D7
tacagtccaaaccacacaaactaagtcctccaaccaacaggccgcagcacgcacccagcgcacagcgatggcctcgctcacgatgatggcatcggtggccggccgtggcggtggccgcgccttcgcgcggcggcagcttcgccgtggtcaggtcccccaaggtcgatcgcggccagcacccggccacgctagcagcaaccgatgccaggcccgccg

SEQ ID NO: 15513 - DNA, 260 bp, Zea mays
  Clone ID: LIB36-022-Q1-E1-H4
tacaccagcatcatctatacggattgctacatagtcttgcatgttcgtgttgtttgtgcatttccgcgagaacatagtagttttatagtcgaacccgttgtctgaattgtgcttggattttgtcaactgatgctttggcgcatctctgcatctccgcgctgtgctcccacagaacgcgagacctgcccacgaatagcatgcggaaatgggcggccgccctgcaggattcaagcttaattacccgtgcatgcaagcctcgc

SEQ ID NO: 15514 - DNA, 603 bp, Zea mays
  Clone ID: LIB36-007-Q1-E1-C1.F2
tttttctgtgagatcaagtgaatccacatttcatcatatttagaggttcagaacaagtaaatgcagtacaagtcgtatgctactactggaccaaggcactagagtctagagtgataagcctacgaaactaagcacatgggcaagaatactctcgcctcactccatttcgtgaccgcgacccaagacttctgccacgaccagcagaagctgggggacacccctgacccctcagccgccaaatccgtagagggtgcggccctgccgcttgagcgcgtagacgacgtccatggcggtgacggtcttacggcgggcgtgctccgtgtaggtgacagcgtcgcgaatgacgttctcgaggaagatcttgagcacgccgcgggtctcctcgtagatgagccccgagatgcgcttcacgccgccccttctcgccagcctccggatcgccggcttcgtaatgccctggatgttgtcgcggaggaccttgcggtgacgcttcgcgccgccctttcccagccccttcccgccctttccgcgccccgacatggtcactcgaactctgaggagaggttgacaattgggaatttggaggtagggtatggtcgtatg

SEQ ID NO: 15515 - DNA, 635 bp, Zea mays
  unsure (1)..(635): unsure at all n locations; Clone ID: LIB36-007-Q1-E1-C1.R2
cccacgcgtccgcccacgcgtccgctcttccatacgaccataccctacctccaaattcccaattgtcaacctctcctcagagttcgagtgaccatgtcggggcgcggaaagggcgggaaggggctgggaaagggcggcgcgaagcgtcaccgcaaggtcctccgcgacaacatccagggcattacgaagccggcgatccggaggctggcgagaaggggcggcgtgaagcgcatctcggggctcatctacgaggagacccgcggcgtgctcaagatcttcctcgagaacgtcattcgcgacgctgtcacctacacggagcacgcccgccgtaagaccgtcaccgccatggacgtcgtctacgcgctcaagcggcagggccgcaccctctacggatttggcggctgaggggntcaggggtgtcccccagcttctgctggtcgtggcagaagtcttgggtcgcggtcacgaaatggagtgaggcgagagtattcttgcccatgtgcttagtttcgtaggcttatcactctagactctagtgccttggtccagtagtagcatacgacttgtactgcatttacttgttctgaacctctaaatatgatgaatgtggattcactttgatctcacagaaaaan

SEQ ID NO: 15516 - DNA, 543 bp, Zea mays
  Clone ID: LIB83-006-E8-F2A
gtctccgcgtacgccttgcgggacgcgtaccggatcgtcttctcgaaccgcctgctcttgcgcttctcccggtaccgcatcagccgcgcctcccgctccaggcccctgctgaccactgccaccatgggcgccatgccagacgccgcgtcgggcacaaccgctgcctccgacgatgacacactgtggttcacggagtgatcggagtagaagagcttggtgccggcgaggtcgagctctggtggcccgctctgctggacgccgatggtcttgatgtcgtccatggaacgcgcgaagtcgaggtcgaggtacgggtcggagtccgcgaagaacacctccgtcgtggcgccttctttctgcccgtggtcgggctcggggaggagccacgacgccgcctcgtcctcgttgctcccgtcgtcgtcggttgctttgggcggcgccgccgaggcgaaaggcttgggcgcgtcggccagcgcgccgaagaaaggtgccacgtggaggcgctcgtggcggcgcgcgagcgggttcgccgagtggatgtcggcg

SEQ ID NO: 15517 - DNA, 380 bp, Zea mays
  Clone ID: LIB83-001-Q1-E1-C12
cacaatagaagctccggacttctgtattcaaaagttgtttgtcactttacacagttcaacagtttcatgttgaatctaatatttgcattaaaggcatctaatccatttatcaaaactaaaatctacaacggagttgcatatgcctggctatctacagggatcatcagctctccggttgtccagcatcccactgatgatacaacatcccgctactggttcttccttctcgatgacagcggcctcgtagatcttggccaagcttgggactttgaccagaaatggcctgatgaacttggccacgaaatcctcctccgtgatggcagcgatgttgttgaagtccctgccgcgccacagccgccgcgcctgcagcaccctcatca

SEQ ID NO: 15518 - DNA, 352 bp, Zea mays
  Clone ID: LIB83-001-Q1-E1-D10
aaaacaaataaattagattatataatctgaatagattataatcccaaacaaacaacccctaagtcacatctcaactcggtctctcaataggcacatgtatacatttctttttacatatacacatcgggcacggtacaacatttattaattcaattatctttgcaacttaatatcctgattagggataaccacctaatttatgctgacaacattcagagcactgaggtacaccaaaacccaacagttcaacacccgtttggatccacatcaaaacagggagtcaagatacgagtagttgtacaggcggccaaattgtagcaaggctgcatacatcctaaatccacacacaacg

SEQ ID NO: 15519 - DNA, 225 bp, Zea mays
  Clone ID: LIB83-001-Q1-E1-D9
tatagtgagtcatattagtccgctctcgatcggtccgtcgatggaaccatggtagcagcatgtatcggtcaggagctgtctctcgtaggcaacgacgcgtcgtctagatgtctcagagcatggatgaagcgtttcgggctcgccgcagtgagagggaacagtcttctctgcattgtatctggcaccggttcttctggggtgggggcgaaggagaaggatgaagga

SEQ ID NO: 15520 - DNA, 64 bp, Zea mays
  Clone ID: LIB83-001-Q1-E1-E3
atagtgagtcgtattaaacatcgctgcacactatgctgcgtcgacatggccaggctcgctgggg

SEQ ID NO: 15521 - DNA, 241 bp, Zea mays
  Clone ID: LIB83-002-Q1-E1-D6
gtgagtcgtattaaagcgtggggcactcttaactcaggggacacgatcgccatggccgccacatcgaccgccgccgccgtgctgtgcccgccgtccgtggccgggcgccgggtggcgccgtcgcccggccgggcgcgcgtggggtgccgcgccgcgccggcgccggcgcgggggtcggtggcggcgcgggcggagctcggcccggggcgggtgatcggcgggagtgcgggcgtgtcgcgcg

SEQ ID NO: 15522 - DNA, 443 bp, Zea mays
  Clone ID: LIB83-002-Q1-E1-F10
ttggacgtcgcaacaccctatagtgacgtcgtattaacgcgtgggtcggctcggacagtcggactcgatcagcaattaagcgaacctcgccgcgatcgtatcagccatggcgaccgccgcgcacgagggcgtgacccagcgcgtcgctgccagtggcagcagggacgacggcgccagcggcggcatcgcggcggtctcgggtcacaacaagaagccgggcggcggcaggaggcggcgcggcctccgttcggtcgccgccgcggtgtcgatccccgcggcgctcgtggctctgtccttcttcgccgcgggccactcgacgccgccgccgagttccgccacggtggccgtggtgccggccgggtcggtggcggtcggagcggtgccggcgctggcggcgtggatggcgtgggcacgagggcgggctgcacgcgcgtccggccgcc

SEQ ID NO: 15523 - DNA, 71 bp, Zea mays
  Clone ID: LIB83-002-Q1-E1-F2
atagtgagtcgtattaaaccctccgccgccgcgtcgccccgggcgcagcgagcacagctcacgttccggtg

SEQ ID NO: 15524 - DNA, 435 bp, Zea mays
  Clone ID: LIB83-003-Q1-E1-B12
gcaacaccctaaggtgagtcgtattatccgcctgtaggattttggcagggtttctctcaactgttgaacaaccaaggcaatacaagggagccatcccctaatttacagaatactaatggaactttgcgcaaagaagaagcaaatgaggatgccaaatgattcagacccctaccattgtttcggggacaatttatcagtagatcacggcgttacaatttaccagatagtcccagggctttgtttctttgccctcacatctgctgtaaaaattataactttggccacagacaaactgcataactttgtacataaactgaatgcttcctaaatatttgttcccttatatagttatatgtgaattgtatgaagctcaaggaaagatgtttcattccacagaatgtgatagttgaaaacatccgcatttcaaaaagataa

SEQ ID NO: 15525 - DNA, 166 bp, Zea mays
  Clone ID: LIB83-004-Q1-E1-D10
acacaacagcctatagtgagtcgtattaaactccgtagtagctagcgtacgtacgtgtgaccgattcagcgaggtcaccgtttgtgtgtcgatatatacggcgaagtcccagtttgttccgatggatcacgggaaacagcaaggcgccagacgacgagcggccggc

SEQ ID NO: 15526 - DNA, 204 bp, Zea mays
  unsure (1)..(204): unsure at all n locations; Clone ID: LIB83-004-Q1-E1-E11
tatagtgagtcgtattatanccatccgctgagggcgtcggccttctggcccttctccccccggccgactccgcctctccggcgctccgtccgcttcctgaactcgtctccctcagggccgttcgcgtccctccgcgcgtcgcgcctcagctcgtgtatgacaccgccgttctgtcggtcgccacgtggggcccagcgtcctcgt

SEQ ID NO: 15527 - DNA, 143 bp, Zea mays
  unsure (1)..(143): unsure at all n locations; Clone ID: LIB83-004-Q1-E1-F11
atagtgagtcgtattatacantccgcgacaggtgcagcacgtccgagacaggccagcacagacaggggaccggcgggcggccggccggggccccacaccgcggggcgcgtgcgcggtaagctgacgaggccccggtcgctcgt

SEQ ID NO: 15528 - DNA, 429 bp, Zea mays
  Clone ID: LIB83-004-Q1-E1-G11
acgcgttggtcaacgcaactccctaaagtgagtcgtagtactccaccgtgcgtgcctctctccgcaaggccactgccaccgccgccgtggccgttgccgccagcgtcctgcttgccggcggcggcgccatggcccaggaggtgctgctgggcgcaggcgacggcgggctcgtcttcgagcccagccagttcaccgtcaaggccggcgacaccatcaccttcaagaacaacgccggcttcccgcacaacgtcgtgttcgacgaagacgaggtgccgagcggcgtcgacgcctccaagatctcgcacgaggagtacctcaacgcgccaggcgagacctactccgtcaccctcaccgtgccgggcacctacggcttccactgcgagccgcaccaatgagcaggaatggtcggcacgatcacagtcaactaaa

SEQ ID NO: 15529 - DNA, 417 bp, Zea mays
  Clone ID: LIB83-004-Q1-E2-A5
cccacgcgtccgtagaccttcaagtctcgctacgtagcagtgcaataaaaaaagcagccgcaatggcgagcagcaccatggccctctcctccacggccttcgccggcaaggccgtgaacgtgccgtcgtcgtccgccttcggcgaggcccgcgtgacgatgcgcaagacggcggctaaggccaagccagcggcggcgtccgggagcccgtggtacggccccgaccgcgtgctgtacctgagcccactgtccggcgagccaccgagctacctgacgggcgagttcccgggcgactacggctgggacaccgcggggctgtcggcggacccggagacgttcgccaataaccgggagctggaggtgatccactcgcgctgggccatgccgggcgcgctcggctgcgtcgtccccgagctgc

SEQ ID NO: 15530 - DNA, 342 bp, Zea mays
  Clone ID: LIB83-004-Q1-E2-B5
attaggagtaactgcaatgctcaagctcaacaccagggacaccgtgtcaattgtgggacacgattgctggtaaatacattctctacagttgttacgcggtactgcactacactctgggtatccactcgtgcccctgtatgaagctggcgacgctgtacgcgtcgacgtggaccttgggaacctggctgctccacgccaccctccggcccgcggcgctgccggggccggcgctgtcgtactcgccgtagtagagcgtctggagcgcgaagtccccgttccacggcatccacccctgcggctgcacgatctccgcgagcgtgcacccgacgtacacggtgcggg

SEQ ID NO: 15531 - DNA, 119 bp, Zea mays
  Clone ID: LIB83-004-Q1-E2-E10
tatagtgagtcgtattagggtggctgtaataaactgaccccgaacaagagacacggatgtaagaaagactgactgccgcacgtttggcacgaagtagcaagacagatagcttggggcgg

SEQ ID NO: 15532 - DNA, 94 bp, Zea mays
  Clone ID: LIB83-004-Q1-E2-F10
gcaacactctatagtgagtcgtattagggtcggggaagggcggactggcgtcggtctgctagcggctctgctcggtctcggtgcgtgtaggggc

SEQ ID NO: 15533 - DNA, 319 bp, Zea mays
  Clone ID: LIB83-004-Q1-E2-F9
acaacaccctagagtgagtcgtattagaagtctcagaaagtatgtctgctgataaacgtgaggtccaatctctttctgcacaatatgatgagagatgcacgaaggttggccatgtggcaccaaagctaacaatggatgaggctactttccgtgacatcgacgagaagaagttggaaatttatatcgcgagagttaagctgcagagaggggatgatagcgatgagaagtttcaggagcgggctaataggagacagtcagatcctgaagagcttgtgacatcattgactgagcagtgcaagagatgtgggttgagagctaa

SEQ ID NO: 15534 - DNA, 344 bp, Zea mays
  Clone ID: LIB83-005-Q1-E1-A12
gggggcccatgatcaacaagaccctatctcgtgaagtagtaattgtacatttccattccgaacattaaccgaacacctggagagcaatgcgaacagacagagtctcaattccattcaagagggcaaatgtaaactggaccggtgaccacgcaccgggtgaggaagacggggagccatcaatcagttgtccccctcgggctcgaactccgggtcgccgtctgggtgcatctccctccactggtcctcgggccagtactccttgatgtggccccacttcttgcggaacttctcgatctggctgtccatgaccacgagcgccgaggtgtcgccgacgtagtaggggt

SEQ ID NO: 15535 - DNA, 246 bp, Zea mays
  Clone ID: LIB83-006-Q1-E1-A1
gtgagtcgtattaaacgacaccaggtcgaggagctcgagggcaccaatcatggccggcgtgaactccagcgtcgtcgggctcaagcccgccgcggcattgccgcaggccgccgccggctcagcgggggcgaagcgggtggagcgggccgcgcccgatggcgtccgcgccgctctggtgcggcctggcggccgtctgcgccggcatggagaggaacgggtcagcgaaagccacgatcttcgacgagt

SEQ ID NO: 15536 - DNA, 427 bp, Zea mays
  Clone ID: LIB83-006-Q1-E1-D11
tcgcaacaccctagactgagtcgtattacactccgccatggaaggtgcagccggccaaatgctcgtcccgatcctcggcatcgttgccgtggccgccgtgaccttctacaccgtcagcttcatggagatgcgagacaaatccttcgaggagctcgacgagaagtactcggacttcgacgagtcaggcgggcggcagcggcggtctcgccgcagggccgagcgcgacaggaagaagtccaaatgattggccacgccgccatttgtgtccctgctggtttgagaggggactgacgggggatgaagacgcagctgctacttacaaatttttgggtttcaagtcatgggtgagtgtgagtgtgtgtggttatgaacatctgcctatttcctagctattagccactgaagcagctaaaacgatggatttatt

SEQ ID NO: 15537 - DNA, 317 bp, Zea mays
  Clone ID: LIB83-008-Q1-E1-D2
ggaatcaagaacatcacatcaggaagcaccacatgtgcatgtagataattattgagattatatacaggaagatctagagtttacatctcaacattctgcctatgtgattgaaatgatccaaaagtgaaggaatctctatcacagcagtagtgaaaaagaataatattacagaaagctagtcctagaacaagcagaaataataataaaagaaaaagaaacttacaacaatatgtgcaggcttccttaaacaagttgagcaacttcgatttctgcaatagtaacctcagttcaagtgcttcggttttgtttcagtgccc

SEQ ID NO: 15538 - DNA, 60 bp, Zea mays
  Clone ID: LIB83-009-Q1-E1-B10
atagtgagtcgtattaagccgagagcgccggcggccgtcggcggttgaacatggcgcaag

SEQ ID NO: 15539 - DNA, 94 bp, Zea mays
  unsure (1)..(94): unsure at all n locations; Clone ID: LIB83-009-Q1-E1-B11
atagtgagtcgtattaaacatngaggccctacccggtcgatggccgacggcggcaaccgccggccgggcggcggcaaagcagcggtgcccgtgt

SEQ ID NO: 15540 - DNA, 319 bp, Zea mays
  Clone ID: LIB83-009-Q1-E1-B4
gacgcaagtctctatagtgagtcgtactatggctacacgattcaagcagcaacgcaggatggtggcgccggtggtgattgcgtctgccgggctgggcatgctggccggcgtaggcatggccaaccggtccctcgggaacgggctcccggcggcctccaggtggaacgcgcgcccgcgctgcgccacgtgcggcggctcaggccgcatgacgtgcatctgcaaccgctggtcagaccgacactctggctgccagtcatgcgactggtcgttgaggataccctgccgcacctgcagcggctccggcatggtccgtccgctc

SEQ ID NO: 15541 - DNA, 408 bp, Zea mays
  Clone ID: LIB83-009-Q1-E1-B5
gcgttgttcgtcgcaacaccctatagtgagtcgtactaatgaggacatcaacatgcgcgcatgggtgaaacgccggcgcgcatgctgatgaggacatcaacactaacacgagtatatctacaccagcagcaccttctccagaccaggcaccatcttccccagtccaggcgccaccccttccacctgggccagtgactcgggcccttgcaagagaattgaactacatcatgttgttaaaaaacgaaggcccagaagattagaagatggcccaacaggaaggcccagatggggcgcctagggaagtcgtgaacagtaaccgcggtactatagcgccggccctactgttcacgtctcttctctatttagtcagagtcatgtttcatttagaacttgagttttgttttacat

SEQ ID NO: 15542 - DNA, 220 bp, Zea mays
  Clone ID: LIB83-009-Q1-E1-B6
atagtgagtcgtattaatgcgtccgcccacgcgtccgcccacgcgtccgcggatgcatcggcatcgtctcatccccggcaaacggcacgaagccggatttcgggccggcccctcagggggtcgagcatgcgcgcgcggtcggctaaaagttccggaatgagcttggcgagattggcgtgcccgtgggttcagtcaagatttgtgaactcgccgtcctcat

SEQ ID NO: 15543 - DNA, 190 bp, Zea mays
  Clone ID: LIB83-009-Q1-E1-B8
atagtgagtcgtattatatcgatctccacggagcttgcgcaggagctgggcgtttacgcgttgtccttcgatcgccccgggtatgccgacagcgacctgcgcccggccaggaccgaggagagcattgccctcggacgtcgcggaggtcgtggatagcctgcaggtgggtcgcatgttctaccttgctggc

SEQ ID NO: 15544 - DNA, 381 bp, Zea mays
  unsure (1)..(381): unsure at all n locations; Clone ID: LIB83-009-Q1-E1-B9
cacaacatcctatagtgagtcgtattaaanccggtcgtgtcggcgcccgcggcggcaggtcgattccgtgttggtcgcagacttgtaggcaccttcggctcccctcctgccggatgccaatggcctggtcaagcctgttaaaaggcatgtgtggtacgtaatgagaaactatttatgattggtggacatgagggagactttatgactaaaccaggatcacctgtttttaaatgttggtggaactacagaaaagcatgccatcaccaagaagatgaatcttgttggtgaagtcttcccttttgatttggaaccattgacctggtcagtcattgggcgcatgcctttccgaatcaagacatccttatccaggtactgaactac

SEQ ID NO: 15545 - DNA, 268 bp, Zea mays
  Clone ID: LIB83-009-Q1-E1-C10
cacaagatcctatagtgagtcgtattatccttggaccatggtgtcaccgacgtcggctacggcacatacaactgcaaggactactggatcgtgaagaactcttggggcatcagctggggcgagtccggctacgtcaggatggaacgcaacatcaaagcgtccagcggcaagtgtggtatacccgttgatccgtcgtaccctccgaagaatggcgccaaccccccaaatcctgggcccatcccggcatcgtccataccacctgcctacc

SEQ ID NO: 15546 - DNA, 388 bp, Zea mays
  Clone ID: LIB83-009-Q1-E1-D1
gggtcgacgcaagtctctatactgagtcgtattaatggcctgggcctgtcgcgcgaggaggcctgccagaacctcctcttcgccaccaccttcaacagctacggcggcctcaaggtgctgttcccgggcctgctggccaacgtggccagcggtggcgagaagctccacgagcggctggtggccgatatccgcggcgccgtggccgacgccggcggcaacgtcaccctcgcggcggtggagacgatggagctggccaagtcggtggtgtgggagtcgctgcgcctggacccgcccgtcaagttccagtacgggcacgccaagaaggacctgctggtggagagccacgacgcggtgttccatgttaggaaaggcgagatgctgttcggct

SEQ ID NO: 15547 - DNA, 190 bp, Zea mays
  Clone ID: LIB83-009-Q1-E1-D5
tagtgagtcgtattaaagcgtggccatgatgggggaggctccaagacgtaaccttacgattgggaattgcagtgatacgttgtgtgtacatgtgtcgcgtcagtgaatcttttatgatcccgaggaggggtctcagcgtttccatgctcacagggtccgcagccaggagggggtatgccatctgcgtagc

SEQ ID NO: 15548 - DNA, 269 bp, Zea mays
  Clone ID: LIB83-009-Q1-E1-D8
atagtgagtcgtatgtaagcagctggatatcccggagcgcttcgtcgtttgtccattttaggtcggatgagctgtgtttccttgactataggtatcctgtccttgttgaatacttgtggacacacacgcaagacgactgcgccatagttcagagagagcgcaaataccattggctcagtcagcgatacgcatctcataggaacagggagagacgatcagctgttgatcatgtcatgcgaaggctcgatctcggaactgggttgaagttc

SEQ ID NO: 15549 - DNA, 410 bp, Zea mays
  Clone ID: LIB83-009-Q1-E1-E4
ttgttcgtcgcaactccctatagtgagtcgtatctatcagagagctagaattggatgatgatgcactcacaaaagctattattggaaccataggcgatgttgacgcctaccagctaccagatgctaaaggttacagcagcctaatgagatatttgctgggcatcacggatgaggaacgccaacaaagacgtgaagagatactagcaacaagcccgaaggatttcaaggagttcgctgatgctgttgaaaccatcaaggacaatggggtcgtggttgccgttgcctcgatagatgatgttgaagctgcgaataaggaaaacccgctattccctgaagtaaagaagtgtctgtgaggtccaccaccacttgataaggattctagtcgggaggtgtttttttaccagtgaatg

SEQ ID NO: 15550 - DNA, 351 bp, Zea mays
  Clone ID: LIB83-009-Q1-E1-E5
atagtgagtcgtataaagcgctgacaagcaccggataaatgggcctatagctcggttgctgaatacttgcaccgctaacggggcaggcaatcgaacaaccagcatcaccgacactgatggacctagtgaggaggacgtctccactttgacatattctatacataaacagttgtgaacaatccacgcatctgttagatcatatagccggaccacctgtttgattagaatttcaccattgaagttcccaagcgcggcaaagggcgcggtcattgtggtagacggcatgggcgtggcaatcatcaatagaacaatcatcatcaacagaatcatcagcactagaacatccacccg

SEQ ID NO: 15551 - DNA, 228 bp, Zea mays
  Clone ID: LIB83-009-Q1-E1-E6
atagtgagtcgtataaacgctggcgggtctggcggagctcgctggggtcctggtcgttcccctgcacggaccgctgcaggggggggagatctggggtcgaccgtgagattgggatgtcatccaaggcacatggagaccacgcagagtcatgcgaggtgaagattgagttggggaaaccgcagctagggctacactagacggactactgggggaggaatgagctagaag

SEQ ID NO: 15552 - DNA, 352 bp, Zea mays
  Clone ID: LIB83-009-Q1-E1-F1
gtcgacgcaagtctctatagtgagtcgtattaacgcgtgggcgccgtcgaggggtaccgcgtcgccggcgggccgctcggagaggtggtcgacccgctgtaccctggcggcagcttcgacccgctcgggctcgccgacgacccggaggcgttcgccgagctcaaggtgaaggagatcaagaacggccgcctcgccatgttctccatgttcggcttcttcgtgcaggctatcgtcaccggcaagggccccctcgagaacctcgccgaccacatcgccgacgccgtcaacaacaacgcctgggcttacgccaccaacttcgtccccggcaattgaccgagggcatgatgcttgc

SEQ ID NO: 15553 - DNA, 236 bp, Zea mays
  Clone ID: LIB83-009-Q1-E1-F5
tagtgagtcgtatatacgcagtatcacgtgtggtctgcagacctcgggctgcagcgcgcgcggtgtcagtgtctcagtcccggcgccttcgcgcgtgagcggttggggcgcgcggtcacggggcggccgtgggtccgtgtcagtgcgcagcacggtgtgtgacttcgtgggcggtgacctgttgcggcgcggcctggggagctggctgcaccacgtggagaaccacagggcgctgg

SEQ ID NO: 15554 - DNA, 268 bp, Zea mays
  Clone ID: LIB83-009-Q1-E1-F6
acacaacaccatatagtgagtcgtagaaactctttttttttttttttttgaaaattagaatttttttaatttcaatatatcttatcataatatgttcaagccgtatcaacccacgggtatttacctagtaaatagataccttagaattggacaactcgcatgacaacatgaacatgtaaaagccaagttctgtctccagttatctgaaacagtgattcatcaccaactagtggtacatcaaagtgatagtagggcagcagcacgtgat

SEQ ID NO: 15555 - DNA, 343 bp, Zea mays
  Clone ID: LIB83-009-Q1-E1-F9
tatagtgagtcatattaaacgaggatgtcgcgtggtacgctggcaagcgcatggcgtacatctacaacgccaagaccaagagcaatgagacgcgctacaggtgcatctggggcaaggtcacccgtccgcacggaaactcgggcgtcgtccgtgccaagttcaagtccaacctcccgcctgagtccatggggcgcaaggtcagagtgttcatgtaccccagcagcatctaaggttttgttggaataaagatggactacaaatggccatgtgtttatttctcacttttctccgaacttaaaatgccttgtgttggtaacttagattgttcaagtgctgaacctgt

SEQ ID NO: 15556 - DNA, 353 bp, Zea mays
  Clone ID: LIB83-009-Q1-E1-G2
ctcacgggtcgacgcaagactctatagtgagtcatattattacgacgtaccaagtggtggcataatacaatcatcatcatctagtggacagatttcagtttttggttctattccaacgctaacgttatactgcattacacactgtttcactcagcctgtcatattcacatggtaaaaacatgtcactgagcagaagaacttttggacgtgcatcacgtgtatacactatctcaacggttgcttcactatctgttcatacaacgtcaatcgaatcatcattcacattacttaagcagcttgacagaactattcggtcacctacatcatcaccactacggctgagactcacatta

SEQ ID NO: 15557 - DNA, 347 bp, Zea mays
  Clone ID: LIB83-012-Q1-E1-C2
atcacaacatcgtatagtgagtcgtattaagccgtacctgcccatcgatgatctcgtcaactggtcaggcagttcgcgacaacatgagctccacagattgctgatgcggcagtcgttgcgccagcaggtcgatgcctgacgtggtcgaacttcgcgtggaggacgccaagaatgtgattctcaaagacaacccggacgccgctatctctggtgctgcccgtcgggctcagttgcgacagcggattatcgccctaaccgtgtccggatcttcgtcgacatcgtcgcccagacgcgccacatacgctgataatatataagctaacggctatttcctttccttgccccag

SEQ ID NO: 15558 - DNA, 399 bp, Zea mays
  Clone ID: LIB83-012-Q1-E1-E12
actcgtggttcgacacaagcccctacagtgagtcgtataacacgtcgtccaacgtccaggcttttctgttttctttctctcacgcaagtcgcaaagcgtcccccaccatggcttccacgacaacggcggcgtccaacaacctggcgggcgtgtggctcggcgagctctcgtcggcgctgcatgggacgtggcaggcggtggccgtggccgccacccacgggctcggcgaggacgacgacccgcggctgccgtgccagcagcagcagaggccgtggcgaggcgacgacaggagcagcagcaacaccaaggcgttgcgaggagccgcggcggccgggacagtcatgcgggagggggacgtcgcgaggtgcggcggcgccatgtccgacaccacgctcgacc

SEQ ID NO: 15559 - DNA, 314 bp, Zea mays
  Clone ID: LIB83-014-Q1-E1-H11
agcaccattgttagttcaatgggcagcagagtcctcggtccacaggctataagcttggatcagggccggtaaccgatcgacacatgaacacacattattgggcgcaagacacttacggcacacattatgacatatcatcacagctgagataaatccgtctggtttatgagtccatcacggtaagttacatagacagtccacacgggaatctgtggtattccgcacaggcaatttgcaaggagacgacgttcagaacacaaaggggttgccgtagacctcgaacatcttcgagcaagaccagttacgttccggca

SEQ ID NO: 15560 - DNA, 313 bp, Zea mays
  Clone ID: LIB83-008-Q1-E1-B10
accacgcgtccgcccacgcgtccgagtggacaaggtggagaaattcttgacatcacacctacagagatccaccaaagagtgcctctgtacattgggagcgtggaggaagtggacaaggtggagaaattcctggcttgaatgtccctgcttcatgccagagctctctcatcagatggactccccaagacatcaagtttagggagggaatatgtactctctctttcccaccccaaataagtcttcttcgtctcatatttcgataaatcaaacaatctcaattttgatctaatatatacacacaacattaatattt

SEQ ID NO: 15561 - DNA, 403 bp, Zea mays
  Clone ID: LIB83-007-Q1-E1-C11
atgtatgcatatttcgcagtccgtcctttgagagaagttccagagatacagatgccactagacaccataatcgagatacaaatgggcgtcactggtgtggaagagaagaggtacaaactcatggactgaatgaatacataaaagcagctggttggctgtttcatagagcaagtacacataacatagaagccttttcccttctcactctctctccacacggtgttcattgtaatttctttggaaaaaagacatgttgaacaatgtaaacaaacaactaataacgaactgtacgaatggcatgcttactgtaacgaataacgaatacatactgggggtcaccaatgcgtagtcagaaacatattccgtcaaagaacatagcgaaatgctgcagaagaaacgcccg

SEQ ID NO: 15562 - DNA, 183 bp, Zea mays
  Clone ID: LIB83-010-Q1-E1-G9
cctgctgctggtggatgtggtgatcaacagtattattacagagccatgctatgtgaacattactagtagcagtgctcataaaagctacaatcccatgtccttttttttccccagtcatgtaaaacttccaaactgctccatggttcaaaactctgttcttcaatacatcatcaattatcgatt

SEQ ID NO: 15563 - DNA, 356 bp, Zea mays
  Clone ID: LIB83-005-Q1-E1-F4
gctttgatcatgggggagttaagatcaagaggaatcttaaatagtcacactttggcgtaccaggtaaatgctattaaaatttggtaggtaattgtttcactaacaacggagttgtgcccttatgttttaatgatcaccttgtaagaacactaggaatggaaactgccaagttatataggcttcaggagttaccagttccttaattttccaggtcaccattaactagtgttaacatttattgtacacgcagagtcgggtggggccagttcaatggctgaagccatatactgatgaagttttagtagaacttggtcaaaagggtgttaagagcctcctggctgttccagtaagctttg

SEQ ID NO: 15564 - DNA, 403 bp, Zea mays
  unsure (1)..(403): unsure at all n locations; Clone ID: LIB83-005-Q1-E1-B11
aatgggatccacacgctcaagcggctgacagagcccggcacctacgagtacttggacaagatcaccggcgaactcgtccgtgggatactggacgtcggtgcgaaagcagggcatgagatgtgcggaggacatatcagaggaatgtttggcttcttcttcaccggcgggcccgtccacaacttcggggacgccaagaagagcgacaccgagaagttcgggaggttctaccgtggcatgctggaggagggcgtgtacttcgctccctcgcagttcgaggcggggttcaccagcttggcgcacacctcccaggacatcgagaagaccgtcgaggccgctgagaaggttctgaagcggatatanggggtccgcttcaagcaagcatgcagagagcatttcctcgtat

SEQ ID NO: 15565 - DNA, 419 bp, Zea mays
  Clone ID: LIB83-008-Q1-E1-E4
aagtcattgagcatccaatcaaacatccggaactatttgagagccttggaattgcccaaccaaagggtgtcctcctttatggacctccaggcacaggaaagacattgctggcacgtgcggttgctcatcacactgactgcaccttcatcagggtgtctggttctgaattgggtcacaagtatattggtgaacgttcccggatggttcgggaactctttgttatggccagcgaacatgcgccatccattatatttatggatgaaattgactctatcggatctgctagaatggagtctggaactggcaacggtgatagtgaaatgcagcgtaccatgcttgaacttctaaaccagcttgatggttttgaagcttcaaacaaaattaacgttttgatggcaacaaacagaatatacattttg

SEQ ID NO: 15566 - DNA, 414 bp, Zea mays
  Clone ID: LIB83-013-Q1-E1-E7
agatacttctgctgttgcggagagttctgcagcttcagctcttatgcccgagagtttacagcctacctatccgatgattgttccagcttatttctcaccgttcttgcaattctcagttcctttctggccaaatcaggaagatggaggtgatctgcctcaagaaacgcacgagattgtcaagcctgttgcagttcattccaagaatccaattaatgttgatgaacttgtgagcatgtcaaagctaagcataggggagcctggtcaggaaacggtgtctacttctctgtcgttaaatctgctggtgggtcaaaataggcagtcggccttccatgcaaatcctcaaacgagggctcaagcttgatcccgcttccgcacagaaactgcattaagaaggattccctctctttttttttt

SEQ ID NO: 15567 - DNA, 418 bp, Zea mays
  Clone ID: LIB83-005-Q1-E1-D9
atagccttctcgtcgctcctgttcttctcgcatccccagcccaagtggtgtcccctgtcgcgttgatgcatgctccctcggcggtggccttgagctgaggcggcggagcgatgccggactccgacaacgactccggcgggccgagcaacgccgggggcgagctgtcgtcgccgcgggagcaggaccggttcctgcccatcgccaacgtgagccggatcatgaagaaggcgctcccggccaacgccaagatcagcaaggacgccaaggagacggtgcaggagtgcgtgtccgagttcatctccttcatcaccggcgaggcctccgacaagtgccagcgcgagaagcgcaagaccatcaacggcgacgacctgctgtgggccatgaccacgctcggcttcgaggactacgtccagccgct

SEQ ID NO: 15568 - DNA, 406 bp, Zea mays
  Clone ID: LIB83-016-Q1-E1-E1
cagacgcgtgggctgaattcttcaggctgcttagatgattcagggtacgtcccgccatgttcggataattctgaccaagtgaaccgaccaccagcaacctttgtgaaggtttacaaatctggaacctacggaaggtcgcttgatatcaccaggtttagtagctatcacgagctccgtagggaactagggcgcctatttggccttgagggccagttggaagaccctctgagatcaggctggcagcttgtattcgtcgaccgcgaggaggacgtccttctcgtgggcgacgacccttggcaggaattcgcgagcacggtgtcctgcataaagatactctcgccgcaggaggtgcagcagatgggcaagcagggcctggagctcctgagctcggcccccgcggcgcgga

SEQ ID NO: 15569 - DNA, 428 bp, Zea mays
  Clone ID: LIB83-002-Q1-E1-A11
agagctacaaaaagctagaggcaccccaacgcagtgatgatatggaacagtgccatatctgcctaactgaatatgaggatggagaccagatacgaattcttccttgcaagcacgagttccacctgcaatgtgttgacaaatggctgaaagaaatacacagggtgtgccctctgtgccgcggagacgtctgcgaagtcgcctcgtgaagaccttggcgctgccatccctttcctcacggcaccggcagatagcgcatcccccgcctgctccgttgttgaagctggtttggtcaggcaacggcgatcacgtcccgtcaatctgggcgtccctgccgaagagcgtggccagatcctgcgaccaatgcgtcgctgttcctgccatcaactttttaagataccgagactgtatatagctcttgtagcctctcc

SEQ ID NO: 15570 - DNA, 407 bp, Zea mays
  Clone ID: LIB83-015-Q1-E1-F2
cagacttctgctgcagcgcctccgccgccgccgccgcatctaacgcagttccctccgccgcagcccgaggcaagatggttctccagaacgacattgatctgctcaacccgccggcagaactcgagaagctcaagcacaagaaaaagagactcgtccagtcgcccaactccttcttcatggatgttaagtgccaggggtgcttcagcataaccactgttttcagccactcccagactgttgttgtgtgccctggctgccaaactgtcctctgccaacctacaggaggaaaggcaaggctcactgagggctgctctttccgcaggaagggagactagagcggatgtggtcttcaagttttgctctatgccagatactagcgtcatgaactgcctttagctaagattttc

SEQ ID NO: 15571 - DNA, 428 bp, Zea mays
  Clone ID: LIB83-016-Q1-E1-H7
cacacgcgtccggggaggacccaacttctgcaaattctgaggttgaaggagcatttggggataatgatcctgttgatgttgttgagataggtgaaagacgtgccaatgtcggggacgttcttaaggttaagccattggcagctttagcaatgattgatgagggagagcttgactggaaaattgtggccatttctttggatgacccgaaagcatctcttgtgaacgacgtggatgatgttgagaagcattttccggggacactgactgccatcagagactggttcagagactacaagatacctgatggaaagcctgccaacaaatttggtctcggcaacaagcccgcaagcaaggaatacgccctgaaggtcattcaagagaccaacgaatcatgggagaaattggtaaagagaaatattcccgctgga

SEQ ID NO: 15572 - DNA, 417 bp, Zea mays
  unsure (1)..(417): unsure at all n locations; Clone ID: LIB83-006-Q1-E1-C7
cccacgcgtccgcccacgcgtccggcttggtatatcgtaccctgaattgacagagatgcaagcccgggccatttttgaagctgctatagcaatgaccaaccagggtgttcaagtgttcccagagataatggttcctcttgttggaacaccacaggaactggggcatcaagtgactcttatccgccaagttgctgagaaagtgttcgccaatgtgggcaagactatcgggtacaaagttggaacaatgattgagatccccagggcagctctggtggctgatgagatagcggagcaggctgaattcttctccttcggaacgaacgacctgacgcagatgacctttgggtacagcagggatgatgtggggaagttcattcncgtctatcttgctcagggcatcctccaaacatgaccctt

SEQ ID NO: 15573 - DNA, 408 bp, Zea mays
  Clone ID: LIB83-003-Q1-E1-G2
agttcctcttgttggaacaccacaggaactggggcatcaagtgactcttatccgccaagttgctgagaaagtgttcgccaatgtgggcaagactatcgggtacaaagttggaacaatgattgagatccccagggcagctctggtggctgatgagatagcggagcaggctgaattcttctccttcggaacgaacgacctgacgcagatgacctttgggtacagcagggatgatgtgggaaagttcattcccgtctatcttgctcagggcattctccaacatgaccccttcgaggtcctggaccagaggggagtgggcgagctggtgaagcttgctacagagaggggccgcaaagctaggcctaacttgaaggtgggcatttgtggagaacacggtggagagccttcctc

SEQ ID NO: 15574 - DNA, 247 bp, Zea mays
  Clone ID: LIB83-013-Q1-E1-E12
cacaactaccggtagtgctgcggggatcaattttgcagtaataaaaaatctactatcaacgcggatggtactctgttgtttatagtccctgctgctaaccacccttgttgctggtgctgctggagaggcattgtacctgtccatgcatatatgatatatatatgttgtaacgttgtgaaagcacacaatcttgggtaccaaaaaaaaatcatttaagatcaatattgacaaaataaccgtgcgagag

SEQ ID NO: 15575 - DNA, 416 bp, Zea mays
  Clone ID: LIB83-005-Q1-E1-A7
acggttctgggtttggacaggtccctggaacgtggcacttcaggtgcacgatactgccgcaggaggacaagatacctgcgatagtatccaggctcaaggagttccacgagaagttcatggatgaattccgtgattgagctgagtatccatcgccctggcgtgatttttatctgttcaaaataataatgctgccaattggttgcccccgctccctcgtcgtcccatggatgctacagccaaacaccatcccaaattgtgttacaggcagatccctatcgaaaaacctacagaatctcgggcactgcaatgccatggttctgtttgccttgtgagaagtgtatcaggctaggctctgagccctgatgtgtacaaacatacccgaactttgaaggcaatttgagttgtcccggggcatg

SEQ ID NO: 15576 - DNA, 134 bp, Zea mays
  Clone ID: LIB83-005-Q1-E1-A6
atcactcttgttgtcaagtccaagtggaaaatcttggcatattatacatattgtaataataagcatcgtacaatctgcatgctgttttgtaataattaattaatatcccagcccattggatggacttgtttacc

SEQ ID NO: 15577 - DNA, 232 bp, Zea mays
  Clone ID: LIB83-007-Q1-E1-G12
gcagagtgcaccgcaataatcagcttccggatggtggcgttttgtcagttttggatggaaatgccgaactggcagcgtctgttttccctatgcatatgtaatttcctgcctctttatattcactcttgttgtcaagtccaagtggaaaatcttggcatattatacatattgtaataataagcatcgtacaatctgcatgctgttttgtaataattaattaatatcccagccc

SEQ ID NO: 15578 - DNA, 422 bp, Zea mays
  Clone ID: LIB83-006-Q1-E1-H8
gtccgtggtggacctggtgatcaacaccgtgaagactggcatcacggccgacgacgtgaacgcggcgttccgcaaggccgccgccggcccgctgcagggcatcctggatgtctgcgacgtgccgctcgtgtccgtcgacttcaggtgctccgacgtgtcctgcaccatcgacgcgtcgctcagcatggtcatgggcgacgacatggtcaaggtcgtcgcctggtacgacaacgagtgggggtacagccaacgcgtggttgatctggcgcacctggtggcggccaagtggcccggcgccgcggcggccggcagcggcgaccctctggaggacttctgcaaggacaaccccgagaccgacgagtgcaaggtgtacgaagcatgatgccagggttctttccacgacgaaacgtacagcacgggcg

SEQ ID NO: 15579 - DNA, 172 bp, Zea mays
  Clone ID: LIB83-001-Q1-E1-E4
ttcaccccgaaatgactcactttcggtgaaattcacccgtttcggcgaggtcgtccgaatataccggccaaatgtttccattggatttcaattattagtcaactctagagttgaaacaaacatacaagttcttcattcaataatcaatatagaagtgcatatctgtttcctc

SEQ ID NO: 15580 - DNA, 395 bp, Zea mays
  Clone ID: LIB83-003-Q1-E1-A11
cccacgcgtccggttgaaacaaacagatatgcacttctatattgattattgaatgaagaacttgtatgtttgtttcaaccggacgcgtgggttctggttttgccaatagctccaatgggcggcaaataggttcttacttcaatagtagttcaaacagattaggcagtccaattggttatgttggccttaatgatgaaattagttggggaaaccttacttctgttcatgggatgggcaacatttcaagccttggaccgggaaaccttggccgtggaaccggagataacaactttggattgccttctggaacctacgtgaggagcaactcaactggtacaattggcgagccattttctgcatcagccaatccatatgaatcgaacaatctaagtgca

SEQ ID NO: 15581 - DNA, 178 bp, Zea mays
  Clone ID: LIB83-007-Q1-E1-C2
atgggatgtgtcacgtgcctataaataggtgaacagtacccccgtactgcgggggctgacttggcatttgctttagcgtcacgcttgtactttcgccttctttcaagccgaaggtacatttgtaatttgatattatttctaattttctataataataatacagaaacgagttgataat

SEQ ID NO: 15582 - DNA, 424 bp, Zea mays
  Clone ID: LIB83-006-Q1-E1-F2
ggaaaatctctcgtggaagaggataaacttgagctcgcaacttctcttattgagaaggcgaaggcaaagggggtttctcttttgcttcccactgatattgtagtagcggacaagtttgcagctgatgctgagagcaagattgtccctgccactgctatccctgatgactggatgggtcttgatgttggccctgatgccaccaaaacattcaacgaagcattggacaccaccaagactgttatttggaacggccccatgggagtgtttgagttcgagaagtttgcagctggcactgaggcgattgccaagaagctagctgagcttacaaccacgaagggtgtcactaccatcatcggcggcggcgactctgttgctgctgtcgagaaggctgggctggccgacaagatgagccacatttcgaccg

SEQ ID NO: 15583 - DNA, 273 bp, Zea mays
  Clone ID: LIB83-005-Q1-E1-B2
gtagagaccgtggctagatcgacccatggccatgcctctgcctgttgatcggatcaccttcttgcattggttcctctctctctctccctccttttttttccctttatctcatcatttcttttctcctgcatgcaatggttccttttgcttccaacaattctcctgctgatgtatccagcatggcatcatccatctacaattacgtacgtagtgcaacgactgtcgattcgttgggtgaggaacatatatgtgaatgcaagctccggctaccat

SEQ ID NO: 15584 - DNA, 399 bp, Zea mays
  Clone ID: LIB83-005-Q1-E1-B3
agcaagctcgatctactactactactagctggtacacatactagccagcctgccagccagcttgccatggcgcccaccgtgatgatggcctcgtcggcaaccgccgtcgccccgttccagggtctcaagtccgccgccagcctccccgtcgcccgccgcagcaccaggagcctcggcaacgtcagcaacggcggaaggatccggtgcatgcaggtgtggccggcctacggcaacaagaagttcgagacgctgtcgtacctgccgccgctgtcgacggacgacctgctgaagcaggtggactacctgctgcgcaacggctggataccctgcctcgagttcagcaagctcgggttcgtgtaccgcgagaactccacctccccgtgctactacgacggccgc

SEQ ID NO: 15585 - DNA, 434 bp, Zea mays
  Clone ID: LIB83-015-Q1-E1-B8
cccacgcgtccggcaagcaagcaagcagcgagtacatacatactaggcagccatgcagccatggcgcccaccgtgatgatggcctcgtcggccaccgccgtcgctccgttccaggggctcaagtccaccgccagcctccccatcgcccgccgctcctccagaagcctcggcaacgtcagcaacggcggaaggatccggtgcatgcaggtgtggccggcctacggcaacaagaagttcgagacgctgtcgtacctgccgccgctgtcgacggacgacctgctgaagcaggtggactacctgctgcgcaacggctggataccctgcctcgagttcagcaaggtcggcttcgtgtaccgcgagaactccacctccccgtgctactacgacggccgctactggaccatgtggaagctgcccatgttcggctgcaacga

SEQ ID NO: 15586 - DNA, 414 bp, Zea mays
  Clone ID: LIB83-007-Q1-E1-C9
agcaagcaagcagcgagtacatacatactaggcagccaggcagccatggcgcccaccgtgatgatggcctcgtcggccaccgccgtcgctccgttccaggggctcaagtccaccgccagcctccccatcgcccgccgctcctccagaagcctcggcaacgtcagcaacggcggaaggatccggtgcatgcaggtgtggccggcctacggcaacaagaagttcgagacgctgtcgtacctgccgccgctgtcgacggacgacctgctgaagcaggtggactacctgctgcgcaacggctggataccctgcctcgagttcagcaaggtcggcttcgtgtaccgcgagaactccacctccccgtgctactacgacggccgctactggaccatgtggaagctgcccatgttcggctgc

SEQ ID NO: 15587 - DNA, 418 bp, Zea mays
  Clone ID: LIB83-001-Q1-E1-A1
acgcgtccggttcgactgtgggttcctatggcggaacaagggatgcggtgaggccaaggacggcacaactgacgatcttctacgccggttccgtcaatgtgttcaagaccttctcagctgagaaggctcaggagctcatgttcttagccagcagaggatctattccaagctcatctcccgtggcctgtaaggcatacgctcctcctaatgtccctccagccatggtcacagcgcctgaggttcttctgcctgcgaagcagatgctgtttcaaaaaccacagcatctctcgccgcctccatccagtgtccctggcatcttgcagtctgcagctctccccaggagcgcctcatctagctctaaccttgactccccagctccaaaatcttcggttccgttagctgttcctcctgtaagcca

SEQ ID NO: 15588 - DNA, 423 bp, Zea mays
  Clone ID: LIB83-001-Q1-E1-A10
aaccaaaaaatggaccaaatggctggacggttaaaaaatgtaagacagaacctctacaacagtttgtctgccaaggacaaaaccggcaaggactggtctttcattctgaggcagattggcatgttctcctacaccggcttgaacaaagcgcagagtgacaacatgacggataaatggcatatttacatgaccaaggatgggcggatctcgttagctgggctgtccctggctaagtgtgattatcttgccgacgccatcatcgattccttccataatgtgaactaagctgaggtacgatagttgagggtcaagctattgatgtttagttccgtggacgctaggctgggatttttgggtccttccagctatacagctcttcccgttgtgctcaatctggtgtaacttggataaataaaattttgt

SEQ ID NO: 15589 - DNA, 423 bp, Zea mays
  Clone ID: LIB83-001-Q1-E1-A11
gagagctgcgtcaagctgcgctagcctcctagcacaaaggaggtgctactccgtggccgcggtcgtggtgaagggatgcgggcggaaggccgtggagaaggtggccaagcgcatcatgggcaaggaggtgaacaccgcggctgcctccggggagaagacgccgtgggtgccggacccggtcaccggctactaccgcccggcgggtggcgccaaggaggtggacgcggcggagcttcgcgccaggctgctcaccaagaggatcgccaactaaatcaatctagcagcagagcagtgcggctgagattatttagcgccagttgatctcttgggcctagagcatgacggtgctgtaacttttgaggcataatatatatagatagatagatgggaagagctcgaacgtatctccgttctagaaagaat

SEQ ID NO: 15590 - DNA, 266 bp, Zea mays
  Clone ID: LIB83-001-Q1-E1-A12
accacccgtccgacaatttcaaaattggaaatggcttgataacggccaacggcatcaaaggttatccactaatcaggttacagctaggaaagcatgtttttctaagtgcaggggatttttatctggctagtcgatcctaatttttgtgtgcagcatcccaattttgactgattcacccatcattttgccgcaatcggcttaaacagcttggttccatttatgcattcagattcacttgttaaaggtgaaaaatcccaatttatgat

SEQ ID NO: 15591 - DNA, 167 bp, Zea mays
  Clone ID: LIB83-001-Q1-E1-A2
gggtccacacacgcctccaaaataattcactggagatatttgccatggaatgaagtctctaaatgactaccactctgaattgtttggttgtacacctgtggtcggttccctttacctttgggcacctttgactaatcagtatatgtggtagaacttgcagttactct

SEQ ID NO: 15592 - DNA, 384 bp, Zea mays
  Clone ID: LIB83-001-Q1-E1-A3
agcttcggccaacgcttcggcgtccctcttcatgtcggcctccgcttcggccgcggcggccctcaacccgcattgcttcggccgcggcctcccggttgacggcttcgtcccctgctcgctcttcagcttctatggccgaacgggacacccttcttgcaacccccgcagggtgttcaacaagatggagggtcccccggacctggcctcctgcaacgcactgctcgacgcgctgtgccacgccggggacctggacggtgccggggacttctttgagcggatggcggtgagggaacccgtgtcgtggacgacgctcgtgtctgggctgtcgcggggcggacgccaccggtgcgctctcgaggtgttcaagggatttttgctgggtaa

SEQ ID NO: 15593 - DNA, 437 bp, Zea mays
  Clone ID: LIB83-001-Q1-E1-A4
ggggccacccacgcgtccgcggacgcgtgggtacctgtgccgctccctcgtccgggctcctccgctcaagtcgaggagtgcagtgcgctgtccaagcgccgccccgccaggagccagcggtgccacctccacctccaagacacaagatccagttgaaaaccagaagctatgtgcctatttggttgagaaggcagtcaacagacttccgccaggagcagagaatatacttgggatctttgatctgcgaggctttcgggtagaaaatggtgatctccaattcctaaagtttttggttgttaaacctctgttgaaatcatatgcctccctgattttgtgataccgagactgtgaggaaggaatacttcaaagaagaaactgtgcatcctgatttccgcgattaggtgacatgattatttcttcagtaattgcaaaaatgt

SEQ ID NO: 15594 - DNA, 235 bp, Zea mays
  Clone ID: LIB83-001-Q1-E1-A5
tgtgggttcctatggcggaacaagggatgcggtgaggccaaggacggcacaactgacgatcttctacgccggttccgtcaatgtgttcaacaacgtctcagctgagaaggctcaggagctcatgttcttagccagcagaggatctattccaagctcatctcccgtggcctgtaaggcatacgctcctcctactcgccctccagccatggtcacagcgaatgaagttcttcagcct

SEQ ID NO: 15595 - DNA, 429 bp, Zea mays
  Clone ID: LIB83-001-Q1-E1-A6
attggatttccagaaggccccgatcgatcgaccgaggcggcgaatcatccgtccactcgctggcctcatcacctccccgtgcgcagccgtcgtcgtcctctcctcccttatcgatcgggttccggttccggccgctcaactcttctagtcttcttccttcctttccttcctttctcccccgtcccgctctggcctcctgcgtcctgctgccctgtgattgaagcaggcaacggccggctgttgggacggtagataaatagtaaatcggttgatactactgctgctgctgctattaaccgctcgggctggccggggcccccctcctcctcctgttgcttcgattccatcacacatcagcttggtgcattcgtcttcctgcttcctccttgcttcgtctctcttcagttcagttctcccttggagcgagga

SEQ ID NO: 15596 - DNA, 200 bp, Zea mays
  Clone ID: LIB83-001-Q1-E1-A7
gaccctagatatgtccaaactgcagggaaattaaatcttcatgtgtaattgtgctcattctgtttcaatcatctcaacatccgatcatgaacctcttgcattattaactggctcgatcgtcttctcagtttaagacattggaggctgctttgtttgtttcagaggtccttcttaagatgatgctatattttgtcatggtt

SEQ ID NO: 15597 - DNA, 435 bp, Zea mays
  Clone ID: LIB83-001-Q1-E1-A8
cggacgcgtgggcggacgcgtgggtatgcatattataatcttagtaacatgagcattggttctcctttggtattctaccgtatgtttttaatttatagatgataaaataccatgaagacaatgttataccaatacgtccattttattctgtaatggattaacagtcatcagatcaggcgcaaacgtgatactagttgtgttctttgctacatatcgtcaccttgcttttgtctgcagaggttggtccatgagttgctggataaacagcagaatccgaccgtaaaatcaaggctggcaactgcgttccataaccttacaagttcaaacaatctctcaagctcactcgaccggccaaacaggcagagattcaggaaaaacctccttagcttcatggcggatgtatcgggcttcatgcagataaagtagatgcgatgg

SEQ ID NO: 15598 - DNA, 428 bp, Zea mays
  Clone ID: LIB83-001-Q1-E1-A9
cagacgcgtgggcggcggaggccttcttccgcgcggcgccgccgctccgtttgacgcgacgtctcgccgccagcctcgccgatttcctcgcccgccactccgccgggggtggtggagtggtgtgcgtcacctccggcggcactacggtgcccctggagcagcgttgcgtgcgctacatcgacaattttagctccggccagcgcggtgccgcctccaccgagtattttcttaaggccggctacgctgtcatcttcatccatcgccgtgggagcaagcagccttactgtaggtttcttccagaggattcctttctcgatctttttgagctcggggaagactcagagatccaagttccacagtctcattcatcggtggtcaaggcagcaattagcaatttacggaaggcaatcgatgaatgcttcctctca

SEQ ID NO: 15599 - DNA, 230 bp, Zea mays
  Clone ID: LIB83-001-Q1-E1-B1
gggtcgacgcaagcctctacactgagtcctgtcacgtcttcaaagcctccgccacttgactcccatcccctctcgcgtggtccttctcctgctcccgctcccgctgctcctcatcttctcgcgccgcggcccccagcctttgcccgccgctacctctctctaattggggggagggcatccggtccgatggcgttcaactaccacgaccacgcgctggcgatggaccccgc

SEQ ID NO: 15600 - DNA, 427 bp, Zea mays
  Clone ID: LIB83-001-Q1-E1-B10
ccaggtccaccacgcgttcggaagccgaacaacaagtttctcccaattcccttattggctgaccacatttttccttgtacaatttttttaaattgatagcactgaagaactagggctagtgtaagaatgaaacccagattataatttcttggggcttttgatgtaaatgaaggcctattgtctcattaagaattattaagagatggctatgagcaaacatcttggattgagttttgcaaccaaatttggtcaaacataagtgcaagccttcaagaaaggaatatcaatgaatgttttggggaaacaaatccttggcaataatgtaggtagaaagaacaattggtgtatttgcatccctacaccctactgtttgtgtacatactgaattggttgaacatgaatttccattctgttatatcttatattg

SEQ ID NO: 15601 - DNA, 437 bp, Zea mays
  Clone ID: LIB83-001-Q1-E1-B11
cacacgcgtccgcccacgcgtccgatctccgaccggatccgcccgccgtggccgctgccggagattctcaccttcgtcgcgcgcttcgcgcccacggcggccatcgtgcccaccgccgacctcatcgagaagtccgtcaaggtgcccgccaagcgcatcgttgcagcgcgcaaccctgtgcgctacaacggccgtcccaggctcggcaccgtcgtcgagctgttgcgtgccaccgacgagctggccaagcgcctcggcgaagtcagcatcccgttccttgtcgtgcacggcagcaccgacgaggttaccgacccggaagtcagccgcgccctgtacgccgccgccgccagcaaggataagactatcaagatatacgacgggatgctccactccttgctatttggggaaccggacgagaacatcgagcgtgtccgtgg

SEQ ID NO: 15602 - DNA, 295 bp, Zea mays
  Clone ID: LIB83-001-Q1-E1-B12
cagacgcgtgggtttttttttttttttttttttttttttttttttttttttttttttttttttttttttttttttttttttttttttttataataagaagtccggttttagtatatatatagtatcaaatcatatcatcgtggaccaattaatatatggttacagcagatgcaatcggattaaccaacatgcaggtagacacacgtacgtacatgagcacaaagactgacgccaaacatgcagagagagatagcaaactgaagaactctgtttctctctctctcacacacaccac

SEQ ID NO: 15603 - DNA, 417 bp, Zea mays
  Clone ID: LIB83-001-Q1-E1-B3
cagacacgtgggcggacgcgtgggcggacgcgtggggttaaagattacgaagcgctttgaatttgaataagaccactctccattttcataaaaagggtggtttggttgaaaatcaaatcaagaatttcattatatccctttcttctaccttcaattttatatcatatttcataaggataaacaatagggataggctctggaacagaagtaataaagtacataaaaatcggcaatctaaatattcctacctaatatatcaggacggtcttattaataattctaatgagttatcttggaattttgaatcgaatcaaaaaatctatattatgctcactcaaggaaagtagatgtagataggggcttataccctcagaaaaaaaatacaccagcttcttaaattaaaacgtaaaaaaagat

SEQ ID NO: 15604 - DNA, 438 bp, Zea mays
  Clone ID: LIB83-001-Q1-E1-B4
cacacgcgtccgaatggaggtgatgacttggatgaggatattgccagtccagctagtggagcaagaaagaagagggcgtgcaacactagtactgcaacaagtccattgaagagaggacaaagccctatgttgaagattatgaggggcatgtggggaactttgcagtctaatagtgttgctgcaaaaagggtcctagagggagaattaaggacagagtcaatcaagaaggcgatgaatctggttaaggaatgtggtgcacctgaaggaagtgttgagcattacatggctacaaaattgttcgtgaaagctgaaaaccgagatatgttctttacttttgaatcaaatgaaggaagattgtcttggttaaagagaaattgtcaggactatgggttgtcttgagttggtagtagtcatgagtgtgtctgcctatctactgtc

SEQ ID NO: 15605 - DNA, 398 bp, Zea mays
  unsure (1)..(398): unsure at all n locations; Clone ID: LIB83-001-Q1-E1-B5
cttatccgcggaggaagaaccttggcccgacaccatgctcccaatggccgtccaccccaccaccacgccggccttgtccccgcgcgcccgcgtctcgccgcacaggcctcccatctcctccctggcggacccctcgtcctccccctgccatcgcatcgtcagtttcaaaagcaggaggctgccacttcgctctctccacatcgccgctgccgctgccgccggggcagaggaagaagaggcgcaactaggtggaagtgtgaacgcggtcgacgaggaggaagcggaggtaatggcctttcgtacccaatagctaggattcgagcaacttacccggctcagtcgctgtcntgtctgtataaccggaaattacgcagttcagatttaaaatggttatgttt

SEQ ID NO: 15606 - DNA, 432 bp, Zea mays
  Clone ID: LIB83-001-Q1-E1-B6
accacgcgtccgcccacgcgtccggtttagaccagaagttttagtgtgtttttttcaaacaaacaaaaaaaaactccagaacgcatgtgcatcattgtacaatgatcaggattcatggtcctatcatcctctgcaaatctcggtgaggtcatcaaggccgtcggactcggcggcgatcttggacgccgcggccgacaggaagcggaagccggcgtcgctggcgctcttcctgacggaggcaagctgctgggacttcttgcagtaggcgatgaacccctggatggggttctccacctcggagctggcgctgctgctcctcctgagcgccggccccgcgcagtcggactcgctcgaggacggcggcggcgggagcggcggcggcagcgcagggactggggacgtcttgttcgacgaggagtaccggacgatgac

SEQ ID NO: 15607 - DNA, 416 bp, Zea mays
  Clone ID: LIB83-001-Q1-E1-B7
cgtttagttacagcagtactgattgcacttgctgttctctgtgagtttcttttttccattggtcatctgttctttttaagcatttaaatatgatgattgatcacgttgttttggaacaaaagggttaaatcaacaaaagaaattaaggcatttgtttttttgcttaagatctgaagaaagatgtagaacagaacaccatcagttgtaacttatggtgttcctgaaaacttgattgctgcaaatgaaaggtccagggacaactctttaataccatcggtattcattttgcatatgattcataacacactgctagttatttcttttgactaaggacatgtttggataccaagggctaattgttaggccgtggctgatccaaacaggccccaagacaacatggaactgtagaatgccat

SEQ ID NO: 15608 - DNA, 431 bp, Zea mays
  Clone ID: LIB83-001-Q1-E1-B8
gcttaatcaacaacctgacaagttagctacccgcgcagcgccgcgcgccatggccacgatgaaccaccgcattgtgcccctcctgctggtcgcagccacactgctcgcgcaggccgcggcctgcccctactgcccgacgccgaagccgccgccgcctccgccgccgtcgtcgtcgtccacgccgtgccctcccccgccctactcgccgtcgccgtccacgccgacgggtaagtgccccgtgaacacgctcaagctgctcgcgtgcgtggacgcgctcaacggcctcgtgcacgccgtcatcgggaccaaggccagcgacacctgctgcccgctgctctccggcgtggccgacctcgacgccgcgctctgcctctgcaccaccatcaaggccaaggcgctcagcgtcagcctcgtgctccccgtcgccatct

SEQ ID NO: 15609 - DNA, 144 bp, Zea mays
  Clone ID: LIB83-001-Q1-E1-B9
tagacggacgcgtgggcggacgcgtgggatttgttcccaactaatggtacctagtactcacaattagttgggaacaaattgtgagtactaggtaccatttcctgatttttgagtcacaacaggacctctgagttctcccggatg

SEQ ID NO: 15610 - DNA, 348 bp, Zea mays
  Clone ID: LIB83-001-Q1-E1-C1
gggtccacacaagcctctacattgattcatattacgagcggccgaggcgctggcggagttccgggcgacgttggaggacgtcgcgggcaacatcgacaggcggaacgcggaccctgcgctgaagaaccggacggggcacgtggaggtgccctatacgctgctcaagccgatcgaccatgacggagaggggcgccctctgagttcctcaacgatgtacatctacaaatgctactacaggctgaacactgcataattcatccatagcaccatcacatggtagtcagttacgttactctaactcttctacttcacgtttaacaaagggtttttttatgtatcttcttgtta

SEQ ID NO: 15611 - DNA, 431 bp, Zea mays
  unsure (1)..(431): unsure at all n locations; Clone ID: LIB83-001-Q1-E1-C2
aaacgaaccgaggaacaatccgggttctgcaggaacccactccaactgtgcggcgcgtccaaaaatacaaaaggcaagcgagcgagctccaagttcggctgctccaatttcactcggcatggctcctcaggcgtgggtcgtggcggagaacggcgaggacctccaacaacccagggaattcctgccgctctctaagcttgaagatgttggcgtgttgtattggcatttggaccctaagaagtctgaaagcgaggaggaactagcaaaaatccgcagagacagaggctacagttacatggatcttattgagatatgtcccgacaaactggaaaactatgaggagaaggtgaagaacttcttctgtgagcacatgcacgctgacgaagagatccgctattgcttgganggcagcgggtactttgacgtccgcg

SEQ ID NO: 15612 - DNA, 393 bp, Zea mays
  Clone ID: LIB83-001-Q1-E1-C3
aacagaatcccactaacgcgtgggcggacgcgtggggtcctactggtacaacgggatcggcaacgtcgtcaccgtcgatcaggatcccaacacccgctacccggtggttgtgcggttcaacaaggtgaactacgccggcgtgtccaccaacaactacgccttggacgaggtctcagaggtgaaatgagtggggccggccggctcaagggctccgcgctagctaacgtgtgattgatttgtagtagttgtgaaatgatgctgtgaagctgcatgctgtgccgggtagcgtcacaacatcgatccgatgtgtaatagcataatccacataatcatatcatgtaattgcctgctctattcaccgtgtacgcaataatctctcttgctctctaaaaa

SEQ ID NO: 15613 - DNA, 415 bp, Zea mays
  Clone ID: LIB83-001-Q1-E1-C4
ggtccacacacgcgtctacactgacttcctgaaaaatcccccaaccaaaccaaaccctcgccgtgccgccgcctccgactcctgctccgtccgagcctaccaccacagggcaagggcttcatccagccgcgtgcgagcctgaccgcccagttagacgatgagccgcagcctcggtatcccggtgaagctgctgcatgaggcggcgggccacgtcgtcacggtcgagctcaagaccggcgaggtctaccgcggctccatggtcgagtgcgaggacaactggaactgccagctcgaaaacatcaccttcacggcaaaggacggcaaggtgtcgcagctggagcacgtcttcatcagggggagcagggtcaggttcatgattatacccgacatgctcaagaacgccccaatgttcaag

SEQ ID NO: 15614 - DNA, 393 bp, Zea mays
  Clone ID: LIB83-001-Q1-E1-C5
ggccagcaagcgggcttgggattggattggagctctcgtcagctcctatcttatcaccagagccagacagacagtcgtcatcgtctccgatccatctccgtcttcgtcctcctcgctcgacaacccaccaaggagcaagagaagaagatcgacgacgacgacgacggctgccctctgcgttcctcaaggctgtacaactactaatgctactacaggctgaacactggataattcagccacaacaccaccacatgtcattcagttactttactctaagtcttctacttcacgtttagcaaaggctttttttatgtatcttcttgttaattgaattgttaactttagttttcttttagacatagatggattaaggatctttaacatatgtttttt

SEQ ID NO: 15615 - DNA, 432 bp, Zea mays
  Clone ID: LIB83-001-Q1-E1-C6
ggcaagtacagcggcttcggcgtcgagacatgggccagaggtagccggtaccggggccagtaccggcagggactcaggcatggctacggcgtgtacaggttctacactggggatgtgtatgccggggagtggtcaaacggccagagccatgggtatggtgtgcacacctgtgaggacggtagccggtatataggggagtttaagaggggcgtcaagcatggtctcggccactaccatttcaggaatggtgacacctacgctggagagtactttgctgatacgatgcacggctttggcatctacagctttgccaatggccatagatatgagggagcatggcatgagggtagaacgcagggtttaggcatgtatagtttcaggaatggagagacacaagctgggcactggcaaaatggagttcttgatacttta

SEQ ID NO: 15616 - DNA, 431 bp, Zea mays
  unsure (1)..(431): unsure at all n locations; Clone ID: LIB83-001-Q1-E1-C7
ccagaatttgctgatgcagacgaagaaaagctgtatgattttcttaatattgagctagaaagtgatttaaatctgaaaagaatgcggcactatgaagtagtttatctaattcatgaggaccgtgttgaagaagttgaaaatgttgtatcaaaagtacaagattttatcagggagaagaaaggaaggatatggaggcttaacaattgggggctgcgcaggcttgcttacaaaataaagaaagcaacacatgccaattacattttaatgaactttgagatagagtcaagatacatcaatgacttcaagaccctgctagacaaggatgagaggatcatcagacatctggttatganacgggatgaggcaattactgaagaatgccctcccncacaagttattcacactctgcgagctcaacaatattttgatga

SEQ ID NO: 15617 - DNA, 126 bp, Zea mays
  Clone ID: LIB83-001-Q1-E1-C9
gtatgataagagcaccttctatacctctgatccggtggttgggtacacagattatccatttctcgatcaactctaagatgattggcttataaacaatttccccacctggagtactatcttgacctt

SEQ ID NO: 15618 - DNA, 384 bp, Zea mays
  unsure (1)..(384): unsure at all n locations; Clone ID: LIB83-001-Q1-E1-D11
gaagctagcgcttatagcttgtcagccatggccaccgccgccgcgtctagcctcctcaagtcctccttcgcgggctcncggctcccggccgccacgcggaccacaccggcgtccctcgtggtggccaccggcccgcgcggcgccggcgcggggcccatctgcgcgtccatgtccatgtcctcctccaacccgccctacgacctgacgtccttccggttcagccccatcaaggagtccatcgtgtcncgcgagatgacncgtcgctacatgacggacatgatcacctacgccgacaccgacgtcgtcatcgtgggcgccggctccgcggggctgtcctgcgcgtacgagctctccaaaggaccccgccgtgagcatcgccatcgt

SEQ ID NO: 15619 - DNA, 381 bp, Zea mays
  unsure (1)..(381): unsure at all n locations; Clone ID: LIB83-001-Q1-E1-D12
cactgacctggtctgtttatttggaaaccatctgtacgtttttcgccgatcatggaggatgagaggaacacccagcagcaccagggcggtgagcaagcccaggaccaggagaacgaggtgaaggacangggactcctggacagcctactcggcaggaacaagcacgacgaccaggagaagaagaaccagcaggcggaggaggagctggcgaccggcatggagaaggtcacggtggccgagcccgaccacaaggaggagggacacgaggccgccgagaagaaggacagccttctcgccaagctgcaccgcaccagctccagttccagctcgtcgagcgacgacgaggaagaggaggtgatcgatgagaacggcgagattgtc

SEQ ID NO: 15620 - DNA, 461 bp, Zea mays
  Clone ID: LIB83-001-Q1-E1-D2
acacgtgggtccacacaagcctctagaatgagtcgttctacggtgagctcggcgatgtcaagggcgcctccgaggaggtgaagcagctggaggaccaggcggcggccatcatgaaggcggcgcgcgccgagatcgcggcggcgcttaacaagatgaagaaggagaccaccgcggagctggaggccaagctggacgaggggcgcagccgtgtggaggccgagctcgtagaggcgctcgccaacctcgaggcgcagaaggaggaggctgttaaggcgctcgacgcccagatcgcctcgctcagtgatgagatcgtcaagaaggtgctcccatccgcgtgatgaaaccaaaccggccctgccttatcctacgactatagttacatgaacatcataaattaatgataattttgaagaaattgccgatgactccgacactgtactcatgaaagattaatggatggg

SEQ ID NO: 15621 - DNA, 111 bp, Zea mays
  Clone ID: LIB83-001-Q1-E1-D3
tgcaagggttcgacacacaagaagaacttgacctccggaattgaactgaaccacaagaaaagcctccaacctccgggcctcctggcccaaattccaaaatccggcaaggtc

SEQ ID NO: 15622 - DNA, 458 bp, Zea mays
  Clone ID: LIB83-001-Q1-E1-D4
gtgggtccacgcacgcgtctgcaatgcgtcgtctatacccgcgagggccgcgtcgtccgcgatgcggcggcgaaaacgaaggggggcctctttctcttctctcctctcctcctgtggtctctgcagcagagacactgctctgctcgattgctccgttgcgcctgcgcctgcgaccgccttgtcgaggagggggaggagtgtttgttcttgggcggagccggtgcagagggggcgagagagaaagaggtcaaaagagccgcatcgcattcgcatggggcagtgcgcgtcccatccggggccggcggccggcggcggaggcggcgttgcgaggagggggtgcctggcggtgccgcgggagcagcggtcccggttctacatcttccggcgctgcgtggccatgctcatctgctggcccaagtacaagaagatctgacctcaccaagccctctccgcctgta

SEQ ID NO: 15623 - DNA, 411 bp, Zea mays
  Clone ID: LIB83-001-Q1-E1-D5
taaattgagccggacgtctgtgaaccaagagggcttgtgtgaggtaggtgaaacaaagtcgtcgagcgctctttccctctctctatacctctctgtctgcgacgcggttggataggctaccgccgctaggtgccgactgccgaggccctcaccggcggcgaagagcgcccgccagcaatggcagcaaggtgtagtagcctttcctcgccatccttgtcggtccatggacccctccgccgcaataaacccagcaagagactcgctccatgcctgccatcgtcgccaagaccaggagccgctgctctgagagcgcgtgctgcgacacttcctccaggggttgaagcgcccagtgtgcaaccgaagctgaccgacccttcgtggggttcacgcagaccgcggagatttggaact

SEQ ID NO: 15624 - DNA, 403 bp, Zea mays
  Clone ID: LIB83-001-Q1-E1-D6
gtcggcatggtgcacgcgcccaacccgaccaacaggtacttccgccacgtcgtgcactgcaagggttgcagggcaaccgtcaaaaagtacacctcgttgaagatcgtgttcgcggccctcgcggcggcggccctatcggccgccatcctggcggcgaccatgcagtggaaggccgtcttggtggcggcgtcggccgtgcaagccgccgcatcctatgcgtgtgacgcggtgctttctttgatgaccaccaacttcatcagaacacacaggatactgtaattaatgtgtcactggccactgacacgggagcgttctctgtacatttgtattaccgtaactgctggcctgcggctgttgtattttgtatatttgcagtaacgttttgcatgtcaaaaatccgaaa

SEQ ID NO: 15625 - DNA, 434 bp, Zea mays
  Clone ID: LIB83-001-Q1-E1-D7
tgcgctgcagtcctatcacggtgacaaaccccgcacccggatcgtccccggccgccgccggaggctccgacgcgccgatcgctacgccggctctccggctcttactgagccggctctccgacacggcgcggcgctcgctgtccgatcgccggccgtggggagagctcctcgaccgttcggcgttctcgaagccggactctctctccgacgccacctcccgtctgcgccgcaacctcgcctacttccgcgtcaactacgccgccgtggtcgccttcgcgctgggggcctcgctgctggcgcaccctttctcgctcctcatcctcctgggcctcctcgccgcctggtgcttcctctagctcttccgcgcgtcggaccagcctgtcgcgctcttcggccgaaccttctccgaccgcgagacgctcgcggggctcgtg

SEQ ID NO: 15626 - DNA, 127 bp, Zea mays
  Clone ID: LIB83-001-Q1-E1-D8
ggatggggtatatatatatagcatccctccctaataattcgttctatctgcgtagcgaggttaattcaaaaaaaattcgtaaaagatggtgaagctaattaagtgaaatataaaatatgtgacatac

SEQ ID NO: 15627 - DNA, 332 bp, Zea mays
  Clone ID: LIB83-001-Q1-E1-E10
ccgatccgatggctccttggcattccttttcctccagcagcggcaaagcctccatctttttgccaaccgacttgaggaatggggtgcatgaaactgcttggagtagacgcaagctttatggaagatttctagtacttcattcccaacaagcaatcagataaaaacaaaaggagcaacttcaacagaacctgcggctccagtgaatgggccgaccgatatttgcaaactggtgaaattgaatccatgggtaaaggaagatgaagagggaagaagctaaccaatgtcaggagccacgaagataaaggtagcaacggcgaaaaaattgtgcctgc

SEQ ID NO: 15628 - DNA, 386 bp, Zea mays
  Clone ID: LIB83-001-Q1-E1-E11
ttggcgtgctgctgctattagtagcttcgcccgcgatcgctgatgacgactccggtatcaactaccagctggctcttatgtggccaggagcatactgcgagcagaccagcgctgggtgctgcaagccgaccaccggcgtctcgccggcgcgcgacttctacataacgggcttcaccgtccttaacgcgaccaccgacgctgcagtgacgggatgcagcaacaaagttccttacgaccctaacctgattaccggcatccaacgcctgaatcagtactggagcaacatcacgtgccccagcaacaacgggcagagcagctggaagaacgcctggaaaaatggcggcgcctgctccgggctcagcgagaaagactacttcgagactgcc

SEQ ID NO: 15629 - DNA, 421 bp, Zea mays
  Clone ID: LIB83-001-Q1-E1-E2
tggcgctttacccgtaaccgtagcgataagagtgagctagctggtgcacaccggcatggcggccacggcgtactccgtggcgctcctcggcggcgcgcgccttcccgccgctccgcgctccgccctcctccctcggcgcagcgtctgccagcttcgcttccaagatgcaccgaggctctccctgctccgtgcgaaggccgcttccgaggacacatcggcctccggcgacgagttgatcgaggacctcaaagcgaagtgggacgccgttgaggacaagcccaccgtcctcttgtacggcggcggcgccgtcgtcgccctttggctgacgtccgtggtcgtgggcgccatcaacgccgtgccgctgctccccaagattctggagctcgttggggtcggctacaccggctggttcgtgtaccgc

SEQ ID NO: 15630 - DNA, 425 bp, Zea mays
  unsure (1)..(425): unsure at all n locations; Clone ID: LIB83-001-Q1-E1-E5
agcatattcccgtggtctccccccttttgctttgcttgccggtgcgcccaaggcggaaagaagacggcgaccatggcgaagcagcagaatcctatccccatcccgatgccgctgtcgctgtcgctgcccctcgtcctcgtcgcgctgctcctgccggccgcccgcggcgccgcggagacgccgcagtacacgacggtgcacgcggagtcggacttcgaggtgcggctgtacggcgacaccgtctggatgtccgcccccaccccggacatcccttccttccacgtcgccaccaagctcggcttccacagattattccagtacctgatgggcgcaaacctcaactcttcgaggatcaggatgaccnaccctgtgctcacgagtgtggttccaggagcagggcctctgcgctcctcggcctactccgt

SEQ ID NO: 15631 - DNA, 432 bp, Zea mays
  Clone ID: LIB83-001-Q1-E1-E6
cgcgagaagcgaagccggaggaggagggtgcgaggagatcgcgagcagccggagccggagccggaggcctagaagatgaagacgttcgacccgtggccggtattcttccgccgggagtggaagcgcaattggcccttcctcacggggttcgccatcaccggcttcatcatcactaagatgacggccaacttcaccgaggaggacctcaagaactccaagttcgttcaggagcacaagaagcgctgaccaaccaggtgttgtccgaattgcctgtctggacagccagttatgttatgatgtttgaatgaaaaattagcttctttttcttcatctaaatgcgtgcagcctatgctccatttgtaatgtaataagaggcatctgacttgatccaaaagcgtacagcttctgattatgagtgatacttcaaagttt

SEQ ID NO: 15632 - DNA, 434 bp, Zea mays
  unsure (1)..(434): unsure at all n locations; Clone ID: LIB83-001-Q1-E1-E7
aggagaggccgagaagcgctttagccgtagccgtagcgataagagtgagctagctggtgcacaccggcatggcggccacggcgtactccgtggcgctcctcggcggcgcgcgcctccccgccgctccgcgctccgccctcctccctcggcgcagcgtctgccagcttcgcttccaagatgcaccgaggctctccctgctccgtgcgaaggccgcttccgaggacacatcggcctccggcgacgagttgatcgaggacctcaaagcgaagtgggacgccgttgaggacaagcccaccgtcctcttgtacggcggcggcgccgtcgtcgccctatggctgacgtccgtggtcgtgggcgccatcaacgccgtgccgctgctncccaagatcctggagctcgttgggctcggctacaccggctggttcgtgtaccgc

SEQ ID NO: 15633 - DNA, 291 bp, Zea mays
  Clone ID: LIB83-001-Q1-E1-E9
cacacgcgtacgcggacgcgtgggtggggaaatgcacctggtgcagcagctaatcgtgtggctttagaagcctgtgtacaagctcgtaacgaagggcgcgatcttgctcgtgaaggtaatgaaattatcaaagcagcttgcaaatggagtgctgaactagccgcagcttgtgaaatatggaaggagatcaaatttgatggtttcaaagcgatggataccatataaaataggcgtcgttttagaacgtcgtgacggggaaaacccggggcgttacgcagcttaatcgcgttg

SEQ ID NO: 15634 - DNA, 381 bp, Zea mays
  Clone ID: LIB83-001-Q1-E1-F1
tgcacacgtctctctcgctccgagccctctccccacgtgctcgtctctctgccgccctccctttcgcctccccactcgtttcaggcgggtacgggacctgggcggcgacttcaatctcgtccgcgggaaggttgagacggcgggggctggaggtggtgtgcgaggccacgaccgggcggcggccggactcggttaagaagagggagcgccagaacgacaagcaccgcatccgcaatcacgcgcgcaaggccgagatgcgcactaggatgaaaaaggtcttaagagctcttgaaaagcttaggaagaaacctgacgcgcagcctgaagaaataattgagatagagaagctgatcgctgaggcatacaaagccatcgacaaga

SEQ ID NO: 15635 - DNA, 446 bp, Zea mays
  Clone ID: LIB83-001-Q1-E1-F10
gtcgacacaggcctctacatggattatgctacagttagcacttcttcatcgactagatggctattcagtgcatgcagatagtgatccagaggctgttcttcttcgccttggatatgtgaagcctgaagttatcagctggacgccaaggataattgttttccataattttcttagttcagaggagtgtgattacctaatggcaattgctagaccaagactccaaatatccactgtagtggatgttgcaacaggaaagggtgtaaaaagtgatgttcggacgagttctggtatgtttgtgaattctgaagaaagaaaatctccagtcgttcaggctatagagaaacgaatatctgtgttctctcaaatacctaaagaaaatggggagctcattcaagtattgaggtatgaagctagtcagtattatagaccacatcatgattacctct

SEQ ID NO: 15636 - DNA, 396 bp, Zea mays
  Clone ID: LIB83-001-Q1-E1-F11
cacacgcgtctgcggacgcgtggggcaacgatgaaatgctaggtgcgttgagaaattttgatttccctcgtccatctcatatccaggctatggcatatgggcctatcttagaggggaggagttgtgttgttgctgatcaaagtggatctggcaagacactggcatatctttgccctataatacaaaacttaaggaacgaagaagttcaagggctccataaatcatcccctaggaaccccagggtgatagtattgacccctactgctgaacttgcttctcaggtccttaacaactgccggttgatatcaaaatctggggttccatttaggtccatggttgcaaccggaggatttcgacaaaaaactcagttagagagccttgaccaagagctcgatg

SEQ ID NO: 15637 - DNA, 348 bp, Zea mays
  Clone ID: LIB83-001-Q1-E1-F12
cacaagcgaggaacccagtccagtcccgggaatggagtgcgtattgggcgtggttggccgcgacttcgtgctggtggcggccgacacctccgccgtgcagagtattctcgtccacaagaccgacgaggacaacgtgatggtgctcgactcgcaaaagctgatgggcgcttcaagggagcctggtgatcgggtgcaatttacggagttcatacagaagaacctccacctgtaccagttccggaacaccatcccgctctcaatcgccgccgccgccaacttcacacgcggcgaactcgccacagcccttcgcaagaatccatatatggtcaatattaatcatggtggtta

SEQ ID NO: 15638 - DNA, 353 bp, Zea mays
  Clone ID: LIB83-001-Q1-E1-F3
gacagaatcgacctacaagtctcgctacgtagcagtgcaataaacaaagcagccgcaatggcgagcagcagcatggccctctcctccacggccttcgccggcaaggccgtgaacgtgccgtcgtcgtccgccttcggcgaggcccgcgtgacgatgcgcaagacggcggcgaaggccaagccagcggcggcgtccgggagcccgtggtacggccccgaccgcgtgctgtacctgggcccactgtccggcgagccaccgagctacctgacgggccagttcccgggcgactacggctggggacacgcgggggctgtcggggggaccggagacgttcgccaagacacgggagctgg

SEQ ID NO: 15639 - DNA, 433 bp, Zea mays
  Clone ID: LIB83-001-Q1-E1-F4
gctgggcatggcacgatcatttcagaaggagcttgaccaaatagctgagaaagcagatacatctactccggctggcttgagctatgtgttgacagagacaacattagcattacttcggcatccggattgttgtatctcagcttactcttcggtggatgtgaaacgtagcgtggatgatggtgagaaacgtttcaatcagctttcaattgaggagaggggcaagtttgatgaagagacacttgtcaacgtgaacagcatcaagaggaataaaggaggcagccaaagatcaagtggttttagcaacgagtacattgtgataaccatattggttgctgctgagggagtacataagcctccggttataaatagcagcaatgaccttaaagacagctctacaaaagatgggtgccataacatcaagcaaaatactggc

SEQ ID NO: 15640 - DNA, 408 bp, Zea mays
  unsure (1)..(408): unsure at all n locations; Clone ID: LIB83-001-Q1-E1-F5
tcgtgggtcgtcacaagcctctacactgacgtcctactaggacgaggcgatgaggaagaggctcatggacaccaaccccaattcgttcaggaagttggtgcagaccttcctggaagccagtggcagaggctactgggagacaacggaggagaacctggacaggctcagggagctctattcggaggttgaagacaagattgaggggattgacaggtaaattgatttgccagatcggtcggccgatcggttccagcattcaacccataacgagcttggaactcttctgcctcattgggactcttgtacaatgtctgggtgtgtgatttatatatatataaaaagttgtaacatgtaatactggaggatacaatatttaacanagagggtggcggttgttccatccaaaac

SEQ ID NO: 15641 - DNA, 424 bp, Zea mays
  Clone ID: LIB83-001-Q1-E1-F6
caggagcatcatttgaaggcactaaaagatcatggaattgggacatttgatgtggttgtggtgaatttgtatcccttttatgacaaagtcacctctggtaacatctcttttgaggatggcattgaaaatattgatattggtgggcccacgatgatcagagctgcagccaagaaccataaggatgttcttattgtggtggatcataatgattatcctgctttactggagtaccttaaaggaaagcgagacgatcagcagttccccaggatgttggcatggaaagccatgcagcatgtcgcctcttatgattctgcagtgtcagaatggttgtggaagcaatcaaataaaggagagatgttccccccaagctttactgtgccactggagctgaagtctacactccggtatggcgaggatcctcatc

SEQ ID NO: 15642 - DNA, 213 bp, Zea mays
  Clone ID: LIB83-001-Q1-E1-F7
tcgcgggtccacacacgcgtctacaatgcattgtactacacccagactgttatttggaacggccccatgggagtgtttgagttcgataagtttgcacctggcactgacgccattgccaagaagctagctgagcttagaaccaccaaaggtgtcactaccatcatccgccgccgccactccgttgctgctgtccagaaagctgggctggcccac

SEQ ID NO: 15643 - DNA, 425 bp, Zea mays
  Clone ID: LIB83-001-Q1-E1-F8
tcgtgggtcgtcgcacgcctctgcacttcgtcgtaccagccccggagctcgccaccgcggccgacccaggcaagacggcgaccaccaccacgacgacgagcgagatcaccacggagactggcgcgctggaggactccgactccctggcgcacctgctgctgcagcccgggacagaggacgcggaggccgtcgcgctcggcctcggcctctccgacttcccctccgccgggaaggcggtgctggacgacgaggactcgttcgtgtggcccgccgcgtcgttcgacatgggcgcgtgctgggccggcgcatggttcgccgacccggaccccgcctgcatcttcctcaacctcgcgtgacagccacacacggtcacggcgccgaggcgtacgtcctcctgctctgctctgctctgcccccgatgatga

SEQ ID NO: 15644 - DNA, 415 bp, Zea mays
  unsure (1)..(415): unsure at all n locations; Clone ID: LIB83-001-Q1-E1-F9
ccacccaggcctccgaattgaangaggatggtgccaggttcttggatgacaaggtcaagaaaatgaagatttggctgatggagttctcgaagcggacggctaatctggagattcaaggaattctgtgaatgttggtggcttttggttgaaggatttaatagctgcttcgcactctggtttttggagttactttctgcatcgagtgaatccagttcctgtttacgctggctgtctgagcttgcttggctgctggtgttcccagagatttataaaaacagggttttcctccgtcattccgccgcagctagtatataatagatggttcttggttgttcatgtactgtgttgctgtatataataaaaacattgcaggatcagtgagtaattctgtgggcgaataaagtgcaattgtgga

SEQ ID NO: 15645 - DNA, 273 bp, Zea mays
  Clone ID: LIB83-001-Q1-E1-G10
ctcgcgagtcgacacaagcctctaaagtgagtcatattaaaaccacgaaaagcaagaacagccgagccctcaatctgttcttgatgtgttcttcctcgacggtgagttgcacaaagatatcttgaggacacgcgacaacaccacaggggatggttcagaccaatggattttctgggaggacaagcatccgatgttatgttacataaaggaactgctagagctgtcagaattgtgtgcaaaccagaaattagaggtatgggatctagaacatga

SEQ ID NO: 15646 - DNA, 152 bp, Zea mays
  Clone ID: LIB83-001-Q1-E1-G11
gtcggggtacggctgcatcggatcagacgcatgcaacaaaatgggggagtttttttcttcttcttcttcttcccagtatgtaccatgtagtgtatagtaatctggtcatggaaccaattaaggcagaatgagtgagcgagggacatttcgtt

SEQ ID NO: 15647 - DNA, 419 bp, Zea mays
  Clone ID: LIB83-001-Q1-E1-G12
gaggaactaatagtacatactcccgctgaagcgctgagaagtagataagaataatatggggttcagtgaggcacaggaagagctcgtcctccgttcatggaaagccatgaagagcgactccgagtcgactgctcttaagttcttcctcacgatctttgagatcgcgccgggtgccaagcagatgttctccttcctgcgcgacgccggcgacgcgccgctggagaaacaccccaagctcaaggcccacgccgtcaccgtcttcgttatggcatgcgagtcggcgacgcagctgagaagcaccggcgacgtgaacgtgacggaggccaccctgaagcggctgggcgcgacgcacgccaaggcgggcgtcgctgacgcgcatttcgatgtcgtcaagacggcgctgctggacaacatcacgg

SEQ ID NO: 15648 - DNA, 444 bp, Zea mays
  unsure (1)..(444): unsure at all n locations; Clone ID: LIB83-001-Q1-E1-G2
gtcgacacaagcctctagaaatgtctaatacatgtagagaagggcaagctttatgctgcaatttgcgctgcaccagcaatgactctangaacttggggtttgctcaatggcttaaaggcaacatgttatccttcgttcattgataaacttccttcagaggtacatgctgtggaatcaagagtgcagattgatgggaagtgtatgaccagtcgtggaccgggaacagccatggagtattctgttattttggttgagcaactatatggaaaggaaaaagctaaagaagttgctgggccaatggttatgcgtcctcagcatggtgtggaattctctatgaaagaggtgaattcaactagttggaatgtttgtggaacaccaaatattctagtaccgatcgctaatgggacagangagatggaagcaactatgataattgacattttg

SEQ ID NO: 15649 - DNA, 397 bp, Zea mays
  Clone ID: LIB83-001-Q1-E1-G3
gcgggtcgacacaagcctctacattgactcgtaggacggagtcggcgacgagcacatggccggaggcggccccgccgcgtcggcgctttcaagcccctggagggctctgctccagcgagcgctggacgccaacgcccacctcacgcactccaactacttccaactcgccacggtgggcgccgccggcaagcccggcaaccgcaccgtcctgttcaagggttttcaagaaatctgtgataagattcagattaacaccgacgccccaaccaacaagattggtgagattaaagagctgccccctttggttagatttgttggtacttcacagaaaactgggaaccaatccgtatcagtggcaccatagatgttaatgatgcttctactacagaccctgcca

SEQ ID NO: 15650 - DNA, 51 bp, Zea mays
  Clone ID: LIB83-001-Q1-E1-G4
tggacatgttccaataatcagtgctactcttcattacataattttgatgct

SEQ ID NO: 15651 - DNA, 427 bp, Zea mays
  unsure (1)..(427): unsure at all n locations; Clone ID: LIB83-001-Q1-E1-G5
cccacgcgtccggcaccgtcgtcgtcgtccccgcgggtgccggcgacgacgccgccgtggccggaccagttccacgcggtggtggtgacgaacctgagcgcgcgcggcggcgggctgcagctgatcgacctgtactacgactggccgcgagggcgcgacctgaacatcgtccgcgaccagctgtccggcgagcggcgctggagctggaacgtggagtggagcaacggcaccgccttcctgttcgactccgcgtcctgccgcaccttccagttcgccgtgggcctcctgccgcccgactggaaggcccgcggcgccgcctacctgnggcgcgaccgcgtcgacggcttcgactgccacgtctggtccaacttcgtcttcggccgctactacgaggacgtcgccaccggacgccccgtcagctggaact

SEQ ID NO: 15652 - DNA, 410 bp, Zea mays
  Clone ID: LIB83-001-Q1-E1-G6
ctctaagataattcgcgctctcttggcgttggtcttggagccttttggagcctatggagatggcgaattcaagtggaattacggatatccttacattgccgctgtcataaacttcagccagacatgggcgttgtattgccttgtgaagttttacaacgcgacgcatgaaaggctacaggcgataaggccactagccaagttcataagctttaaggccatcgtgtttgccacttggtggcagggagtcggcattgcgatcgtctgccaaactggactcctgcccaaagagggcaaagtgcagaacgcgctacaggacttcctcatctgcatccagatggctatcgcagcggtatcgcatgcctacgtcttcaccgtggagccgtaccaacacgttcctgctctaactcctg

SEQ ID NO: 15653 - DNA, 369 bp, Zea mays
  Clone ID: LIB83-001-Q1-E1-G7
cccacgcgtccgcttccccgaacgcgttgcgatggagacctcggtcaccgcgtaaaacccctgaatgcctccggtgcaccgtcagccgaactttctcgacatctccaggaccgcatcaacgatgacatgtcactcgctccccgagccaaggccggtgatgatctcgcgctggaactgaatccaccagcaatgggcgggccgaggatcgatttccgacagcaggaggggtgcagcatgtaaagggggaacagatgagatcatgtttgggttggtcccccgttgtatatgtagttatgtaatcagccaatcctttgtttgtaaattaccagtatttacaaataataagaaaatgggggtttacgtgttaaa

SEQ ID NO: 15654 - DNA, 427 bp, Zea mays
  Clone ID: LIB83-001-Q1-E1-G8
gtgatgattgatttagataactcgctaaatcaactaattaagttacacagtttagagagttaataaaaagctaagaataaaaatagattttctagtgtaatatgtcaatttgattaatggatatagtcgatgtcctgctgtgatatccatggtgcttaatgcttggttttaagtgtttcatgctttttagcgtagattatctatattatactcgttatacatgtgctcatacatgtgcatcatgcatctcatgaggtacgataaataatcgtgtgacgcggaagaagaaccaagccgaccccaagcgtgggctaatctgcaagctgaagctgatgaatcaacctgaagacggttaaatcaagcaagtgctcggtcgaaggatactcgtcaagcggacgtcacctaataacactaaactagtgttact

SEQ ID NO: 15655 - DNA, 262 bp, Zea mays
  Clone ID: LIB83-001-Q1-E1-H1
ctcgcgggtcgacacaagcctctaaactgactcgcacgatcgaataccgttaccgtgtcgccatggccgccaccgcgtctctatcagccgtcggggcgccgctgtcggtgcccgggctcaggaagccgctcggcgtgtcgtcgctccggcccctgcagccgagggcggcgaggatgacgacgacggccgtgcgggcgtcggcgtcgccctcgtccacgtccatcaaggagaaggctgcggccgggctgaccgcggcggccct

SEQ ID NO: 15656 - DNA, 414 bp, Zea mays
  Clone ID: LIB83-001-Q1-E1-H10
accgcctacttaactctcacatgtcatgatcctcccaccgtgtctctcacccatgcagcacgccggagtggcagtagcggtagagctcggcatcagctcccctgctactcgctccacagtagctcatcggctccctggtagcgctctgcaccgcggtcgaactcgcacaagtccagtcgtcctccaccttcggtctcttctcgcctctgcaatcatcaccggccgttgtttcccggcgccgtcagcctctcacgcagccgctgatcatcgctcgctcgcttctactgatgctccctgttgctgttccatccaagccacatctgggttcctccctcatcgaatcagttcgggctcatcaacacatgtcggtcctcagtctaccatgtcgcgccctgatgacctcaaactccccga

SEQ ID NO: 15657 - DNA, 440 bp, Zea mays
  unsure (1)..(440): unsure at all n locations; Clone ID: LIB83-001-Q1-E1-H11
tcgaccaggcgtccgcccacgcgtacgggtctccaagaggagggtaggggagccgagcgctcagctctaattttctccatctattgctaacagctcagacctcagaggcaagggaggtacaatgccaagagcaaatgagatgttgagggcagattcaagaatgatggtggtctttggtgccttgacatcgaaaccagagcaactgacatttgaagaatccctcatatttgtcaagaaagttaaagcccgtgactacatgctgtacctgtcattattcgacgttctcggcagaacggaattaccccagctcgacgcctaccgagagttacagcagatgtttcaaaaccacccagatctgcgcgaagagctcgagaggttcagaccgccgccgccgccggtgcctaccacanagcaagcagcanacaacaacatctggccct

SEQ ID NO: 15658 - DNA, 399 bp, Zea mays
  unsure (1)..(399): unsure at all n locations; Clone ID: LIB83-001-Q1-E1-H2
caaatacattggagaaagtgctcgtttgattagagaaatgtttggctatgcacgtgaccaccaaccatgcatcatcttcatggatgaaattgatgctattggtggtcgaagatttagtgagggaactagtgctgatcgtgagattcagcggacgttgatggagctccttaaccaattagatggatttgatgagctaggaaaggtaaaaatgatcatggccacaaatcgacctgatgttctggacccggcgctcctgcgtcctgnacgtttagataggaagattgaaattccgctacccaacgagcaatcaagaatggaagttctaaaaatccatgcagccggtatcgccaagcatggggagattgaatatgaagcagtcgtgaaactagctgaaggttc

SEQ ID NO: 15659 - DNA, 340 bp, Zea mays
  Clone ID: LIB83-001-Q1-E1-H3
caacggcgctccaactgcactactgcagccaggctttttgcttgcttccgcgggctccgcgtccgcgtgcgataggctcaatatcctcgccagcggatcccttccttgcgaggccggaactgagctgccgccggcgctatggtgagcggcggcctggcggctgcgtcggaagtcgccgtcgttttcctcatccgccctgtccttgccatcgccttcgtcttcaccctcatcctcctcagctggtacgtggcgtggaggacggtgctggtgcacgtgccgctggtgcaggagatcgccggcctgcgcccgaaaaagccctctaaacccaagccagccaacc

SEQ ID NO: 15660 - DNA, 399 bp, Zea mays
  Clone ID: LIB83-001-Q1-E1-H5
cgtgggtcgtcgcaagcctctacactgagtcgtcagtaatccactcgtctctccgtccccatggccacttatctcaacgcaccgccggcagccaccacgacgactgcaagctgccgccatgccttctccggtggcagcctccgtctactccggccgagccgaccgacgctgcacgtgacgtgccaagccgccgcctcctcccagcagccgtcgtccccgtccaggaggtcagcctgcctcctcggcatcgcgtgcgccgtcctgctccgcccacgtgccgcctccgccgccgaaaccgacgacgagccggccatcaacggctggtggctgaccgagttccccttgcccgtgcccaagatcgtcaaccaggagatcaactacgcggacacgggcacgcgc

SEQ ID NO: 15661 - DNA, 425 bp, Zea mays
  Clone ID: LIB83-001-Q1-E1-H6
cgaagaagaagaagacggcgaggcgaggcgcccgaggcagccccgcgtcgcccctcgactacagcggcgcgtccactagcggcggcgaggacggcgccttctgctcccggccagagccagcgctcccgccggccgccgcgtgccagcagctcgcggcgcccacgcctcccagcaaggtgggtggcctcgccggacggcggacgacccccccggtgccggtgccagtgccactgccaccacctcggcccgccggacagcgggcgcggaagaagatgaggctcccggagatccagcagatggtgcggtcgctgtcggtggagaacgacgccctccgcaaggagatgagagcgttgcggagggattgcacggcgctgtcccaagagaacggcaagctagagacaaggctccatcagtccgttacgctg

SEQ ID NO: 15662 - DNA, 371 bp, Zea mays
  Clone ID: LIB83-001-Q1-E1-H7
cccacgcgtccgcaagtagagagcgattgcctgatgaatggtgacgatggatggatggatgcagacgctggttcctctgggtctggggatgtaagtctggagaacggggggcatgaaacgatctccatgatctttcctgtggtagattttcacgtcaatttatgaagtgagacatagagttgctgtcatgttagaagtaagcattccattgttgcgttggttcttccgtattgaattgaatttacagtacatgtatcatgtatgtacgattgtacgcaggattggactctgaactccgaggtgaatatatgtgtgtttgtttggtgtccaaaaaaaaagacgaacaacaagatcaaaacttacctacacct

SEQ ID NO: 15663 - DNA, 284 bp, Zea mays
  Clone ID: LIB83-001-Q1-E1-H9
cgcacgacacgggactaagtcgaagagctcgagggcaccaatcatgggcggtatgaaccccagcgtcgtcgggctcaaactcgtcgcgggagtggcgtaggtcgccgtcgtctcatcgccggagaggccggtgcatctggtcgcgcccgagggcagcctctctgctctgctcaggttgtcggccgtcgtcgccgtcacgggttatgcacgggtcggtcagggccacgatgttcgatgagtatttcgacacgagcatggtcggagagggggctgggcgacaggaa

SEQ ID NO: 15664 - DNA, 403 bp, Zea mays
  Clone ID: LIB83-002-Q1-E1-A1
atttcattgaggaagaagacagaacaatggggcatcagagaaacccaaaaggcacacacccaagatacaactctcacgggtaacaactaacaacatcagcaagcttgatgcagcaagcaaccagacgacagaaaagctagtctaatgtaatggctaatgccctgggggtgcctttgctccagcaagcagcagcacaccaaaggatggaatatagatgccccggcaagtaactcctggagtcattttggtccagctgggagcagcacaccagagtatggactatgaactctatttgcagcacttttgatatataaggatttaccccattgaagatacagttgttgcaacggttctaaattttccatgccacaagaataatgaaataataagccctttcttgacc

SEQ ID NO: 15665 - DNA, 415 bp, Zea mays
  Clone ID: LIB83-002-Q1-E1-A10
ggtgaacatctacccgttcatcagcctgttcctgaacgacgacttccccgtggacttcgccttcttcgacggcggcgccgcgccgctggtggacccgggcagcggcgtgtcgtacaccaacgtgttcgacgccaacttcgacaccctggtggcggcgctcaagtcggtggggcacggcgacatgcccgtcgtggtgggcgaggtcggctggcccaccgacggcgacaagcacgccaccaacgcgtacgcgcagcggttctacaacggcctgctgaggcggctggcggcgaacgccggcacgcccgcgcggccgaaccagtacattgaggtgtacctgttcgggctcctggacgaggacgtcaagagcgtggcgccgggcaacttcgagcggcactggggcatcctccggtacgac

SEQ ID NO: 15666 - DNA, 412 bp, Zea mays
  Clone ID: LIB83-002-Q1-E1-A12
cttaatggcagggattgaagaacttgctcaatccctccgaaaagtagttgacaatcagaatgtgtcatttttggatgctgcagaatctgctggctataagttgaatctagaggacctgcatagcgtatttttaaagacagacaaatactctgcttttatagaactgcacattgagcagggtcccatcttagaaaaggagggtatccctattggcattgttactgcaattgctgctcctgcaagtcttaaggtggactttgaagggaatggcggtcatgctggagcagtgctgatgcctgcaagaaatgatgctggactggcagcagctgaattagcattagcagtcgagaaacatgtcctggaatcaggatcaattgatacggttggcaccgttggtattctgcagttacat

SEQ ID NO: 15667 - DNA, 407 bp, Zea mays
  Clone ID: LIB83-002-Q1-E1-A2
acggcatccagcatgtcctcggcaccatggacccgtcgacgcacaacgtgacgcgccacctgtggccgtggacgaagtcccaggaggctggcttcgcgcactgcgctctgagggcccgggagagctgcgagtgggtggggttcatcgacgtcgacgagttcctccacttccccggcaaccagacgaccctgccagacatcctgcggagctactcgaacaggccgcgggtgggcgagctgaggacagcctgccacagcttcgggccctcggggcggaccagaatccccaagcaaggcgtgacgacgggctacacctgccggctcgcggcgccggagcgccacaagtcgatcgtgaggcccgacgcgctgaacccgtcgctcgtcaacgtggtgcaccacttccacctg

SEQ ID NO: 15668 - DNA, 409 bp, Zea mays
  Clone ID: LIB83-002-Q1-E1-A3
cccacgcgtccgaggagctggaccgccgcttccgcctgtaccgcttctgggagacgccccgcgaggagttcctccgcgcgcacgcgggcgccgtgcgcgccgtcgtcggcaacgccagctacggcgccgacgccgcgctcatcgacgcgctcccggcgctcgagatcgttgcctccttctccgtcggcatcgaccgcgtcgacctcgccaagtgccgcgaccgcgggatccgggtcaccaacacccccgacgtcctcaccgacgacgtcgccgacctcgccgtagggctcgccatcgccgtgctccgcaggatcccgcaggccgaccgatacgtccgcgcggggctctggaagtccaggggagactacaccctaaccacgcggttcagcggcaagcgggtgggcatcat

SEQ ID NO: 15669 - DNA, 422 bp, Zea mays
  Clone ID: LIB83-002-Q1-E1-A5
ggcgaagaccagatgtaggtaccgaagaactgccataccggctctgagccaaagatagaaaacatggaatacggatctcggatcgaggacgtgtccgtcagattgaaaacagatactgggcagcagtcatggttctgtccattggacctagcttttcgggaagcaatgccatcgccccgcggaaacggtaaaataaaaggagaaaaaaaaatgcagtactgtcagttgattgctgcttataaagaagcaaagggggcagagacgacgatttttacaggtaaaattatgtactttgcaaggagggaaacatgtgggaataagtagtgagcctacgtttagctctgtatataaagtgacttgattttatatgtactattacggctggtgaaacacgcttctttaattcaaagctatggagtttt

SEQ ID NO: 15670 - DNA, 419 bp, Zea mays
  Clone ID: LIB83-002-Q1-E1-A7
gaaagagcatattttagcacacgcaaggtgaaacttgatcatgagtacctttcgatggctgttctcgtgcaataagttgtgaatgcagattatgcttttgtcattcataccacaaacccatcgtctggagattcttctgagatatatgctgaagtggtgaaagggcttggcgagaccctcgtgggagcctatcctggtcgtgctatgagctttgtttgcaaaaaagatgaccttgactctcccaagttacttggttacccaagcaagccaattggtctcttcataaggcaatcaatcatcttccgttccgactccaacggtgaggacctggaaggttatgctggagcaggattatatgatagtgtaccgatggatgaggaggatgaggttgtacttgattatacaactgaccctcttat

SEQ ID NO: 15671 - DNA, 387 bp, Zea mays
  Clone ID: LIB83-002-Q1-E1-A8
gcactctggcagctagctattacccccctgctgcgccgcgcagccttctggtctacccccgttggctgcttcttctacctaccctcgccgtcgcctcaacttcccggccgccgtcccctccgatcaccagctgctgcttgtgctgctgagccaagagcagctagcgatgaacatcttgaacctgcagcccatcaacccaggcgggcacccggcgttcccggcggccaaggagagcgggcacctcacgccggcgtcggtgcgcttcgacggcgtgccggtgccggcgcagtcccacgcgcactgtccgaggtggcaggctcagacgctgcgccgggacagcagctacgtcggcgtggagcacgaaggggacaggaccaccgcgtccgt

SEQ ID NO: 15672 - DNA, 409 bp, Zea mays
  Clone ID: LIB83-002-Q1-E1-A9
cccacgcgatccgcccacgcgtccgcccacgcgtccggacggaatgaatagcatgtctcaaatgatgcagcatacttcagcctaatatgggagctttaaggatggcttatccaaataaatatgagatttatcgaagggttgacactctcaatggaaaagagaactatattcttatagctgaattcacgaacaagccaactcctgatgagatcaccagtgctttcaaaggacaaaaaagggaagaaaaggcatcttctggattctggggtttcttaagtggtttattttaagtcaagcgatctgctgtacggcgatgcaatcctccttgtatatttttatctgataagggatgtaatatggttcggaaaatatccgttcggatccggattcgaagatggtgaacactggt

SEQ ID NO: 15673 - DNA, 404 bp, Zea mays
  Clone ID: LIB83-002-Q1-E1-B1
tctaaagtgagtcatatcattttctgcgataaatagggcaatcgattatgagatctcccggcagattctgctccataaagaaggccaggctgatcaaattgtacaagaaacccgcctgtgggatgaatcttctcagaaaacttttacaatgcgaaaaaaggagggacttgccgactatagatattttccagaacctgatcttcctgaagtagttatcactagtgactatattaatgaaatcagcaagtcaatgccggagcttccagaagcaaagcgtacgcgttatgagaatatgggactcagcatgcaagatgttctgttccttgctaatgatgataatattggtcatttctttgattctactcttgagcatggtgctgatgcaaagctggctgccaactgga

SEQ ID NO: 15674 - DNA, 451 bp, Zea mays
  Clone ID: LIB83-002-Q1-E1-B10
ctcgcgggtcgacacaagcctctacagatgacgtcctgactaacgcgtccgcccacgcgtccgcccacgcgtccgggatttttttaaccaagtctgaaaattcgctcccgataggaatggaacccaggatttggaggtgctactcggaagtccttaaccgctaggctagaggccctttcgctggacaaagaataatgcgacatctttagtatgctgtgctgtgccttagctaactcgttaaaatgagcaatgcagacctgaggcaccgttgattcttaaatggctattgttgattgactgttctaaattttacttccatgattcttgtgagttcttaaatttggcattttttccttgcttccctgtagactccaagatgtggctgggtatggagttgccttggcagtaaaggatatctacgctgatgcctttggagaaagaaatttggact

SEQ ID NO: 15675 - DNA, 396 bp, Zea mays
  Clone ID: LIB83-002-Q1-E1-B11
cacatcgacgaggcgatccggctgacacggggccggctcaggaggcgcttggctgggggatctggaccaccgcaaaattagcgtcgatcaagatttccatctcacacgagttgcaccacactggtctggttcttggtgattgactgagaagagggggaatgctgagttggttgaacagagtttgggtttcctcgcatgcgttctccgttgtacgaactggaaccggtttggtctcgaattgtgaatagtatcccagaaacagaagtggatgatcaattcaattcacagggtagcgctaggaaatatggttgggaaccatcttctgcaagacgcgcatgcgcgacatgtcatgagcatttagcaacgatgatactactggtcacagtagtgtagtct

SEQ ID NO: 15676 - DNA, 421 bp, Zea mays
  Clone ID: LIB83-002-Q1-E1-B12
cccacgcgtccgcacagaaaaccctagccgccgccaccgaagcggcctcccaggtaagcaagagcgtccaccccgccgccgccatgaagcgcaatccccgcgtcacgagctctcgccggaagtgccgcaaggcgcacttcacggccccgtcctccgtccgccgcgttctcatgtccgccgggctgtcgacggagctccgccacaagtacaacgtgcgctccatcccgatccgcaaggacgacgaggtgcaggtcgtgcgcggcacctacaagggccgtgaggggaaggtggtgcaggtgtaccgccgccgctgggtcatccacgtcgagcggatcacccgcgagaaggtgaacggctccaccgtgaacgtgggcatccacccctccaaagtgatcgtcaccaagctgaagctcgacaaaga

SEQ ID NO: 15677 - DNA, 394 bp, Zea mays
  Clone ID: LIB83-002-Q1-E1-B2
gcaagcctctagattgagtcgtactagccgaaaaggagatgctacgaaatgtggaggccaagatactcacaaaacgagctgaactttccaaatttgagtcagagtatagggaggttttggcgaacttcactgaaatgaccagcagatacacacaagacatgcaagcgattgatggccttctgaaggaaaggaatgagatccatgcttcctataccaacaatccacctctaaaacggagttccagcaggaataaagccaagtcgccttcgaaagtggccaaaactggtacagaaaaacatcatcagaaggaaaagaaggtgaaggatcactgcatggatggatgtggaagtgacagcgataactcaagtgaaaagaaatcaaaagagcggttccc

SEQ ID NO: 15678 - DNA, 410 bp, Zea mays
  Clone ID: LIB83-002-Q1-E1-B3
ctacaacacatgcttaaccctctctgaggtgctgtgtgcagtcaggtctgctcttaactgtttctcctcccagccgtatgttataaaggaaggcagaatccaggggctgctgcgagctgattacgtagcggccaacagcatctcacgctactgtgcctacctgcttgtaaaagaaccagatttgctacctgacagctacttggctgctgatgacctattccgaagcaccatccacgaggctaattcggacgtactgagtggctgtgacaccctgcaaagcatatacagagctctgattatagaaggaggagatcagcggcagcaacaaggcggcagcgacagtaatactacgacacttgagaaagccggccagctagctgggtcactgattcaccagttcacggatgaaa

SEQ ID NO: 15679 - DNA, 428 bp, Zea mays
  Clone ID: LIB83-002-Q1-E1-B4
cccacgcgtccgcccacgcgtccgactccatccactactttactcaaagtctagagctagctttttgctttgctcaccagacaaaccgcagcagatggcgtcgacgatcatggccgccacctcccgcatcgtcgcggccaagacgccgtttcttggccagggtcgcgccgccgccgccgccgccaatgccagccccctccgcgacgtcgccgccgccgctgctggcggccggatcaccatgggcaacgacctgtggtacggcccggaccgcgtcaagtacctgggccccttctccgcccagacgccctcgtacctgaccggcgagttccccggcgactacggctgggacaccgccgggctgtccgcggacccggaggcgttcgcgcggaacagggcgctggaggtgatccacgggcggtgggcgatgc

SEQ ID NO: 15680 - DNA, 412 bp, Zea mays
  unsure (1)..(412): unsure at all n locations; Clone ID: LIB83-002-Q1-E1-B5
cgacgcgtggggaccgacacggaggtaggagaggagggacgagggaggggaaaagagagatggtggaggcatcgccggagtccggcgccgcggcgaccggaggtgcctctagtacggcggcggtgcggaaggggaagtcatgcaagggctgcctctactactcgtcagtgctcaagtcccgcggttacaacccaatctgcgttgggatcccccgctccatcccccaagttcctaactacgtggtggatgaacctaaggaggaggcgacggcgcaggggcatgacctcaggcggttcaggtacgggtgcgcgggttactccatgttcgtggacaacagggacggccagggtggtgagagcgagggcaagacgttgttgccatattgcangggcctcgagttattggtggacag

SEQ ID NO: 15681 - DNA, 420 bp, Zea mays
  Clone ID: LIB83-002-Q1-E1-B6
gcggcacactactacacttacaagcggccaaggcagtggttgtcttcagctggtcttggggctatgggatttggtttgccggctgctgctggtgcttctgtggcaaacccaggtgtcactgttgttgacatcgatggagatggtagctttctcatgaacgttcaggagctagctatgatccgaattgagaacctcccagtgaaggtctttgtgctaaacaaccagcacctggggatggtggtgcagtgggaggacaggttctataaggccaacagagcgcacacatacttgggaaacccagagaatgaaagtgagatatatccagatttcgtgtcgatcgccaaagggttcaacattccagcggtccgtgtgacaaagaagaacgaagtccgcgcagcgataaagaagatgctcgaaact

SEQ ID NO: 15682 - DNA, 430 bp, Zea mays
  Clone ID: LIB83-002-Q1-E1-B7
gggtcgacacacgcctctaaagtgagtctgatcaggctccagcgcgccaccggacttgatgtcgtcacctagtcttgatgcttggggacctggattccgggatgccgtcggcgcttcggtacgcacgcaacctctcatcgcttctcgccaccaaccgtcaccgatgcgtgctcacgtccgtgtacgacgtagctatcattagagtcgcgcagttcgcaatcaaggccgctgtcctaaagtactgacgactgtggatggtagtcaacatggacgagtagtaaagtttagcacaagagctgtgacagacttgacgaccacagtttcagtctagtacaatgctacagagttaccgtctgtaccaaacaggatcattatgccatgggccagtatgacgactactggataagtccgagctggtctcgaatccaat

SEQ ID NO: 15683 - DNA, 419 bp, Zea mays
  Clone ID: LIB83-002-Q1-E1-B8
gtcgtgtagtgtgtagtcgcagcagctagcgcccggccggccagtcgagtgagtccatcctccatcgccatccaatggccgccaccgccctgagcatgagcatcctccgcgcgccgccgccctgcttctcgtccccactcaggctcagggtcgcggttgccaagccgctggcggcccccatgcggcgccagctgctgcgcgcgcaggccacctacaacgtgaagctgatcacgccggagggggaggtggagctgcaggtgcccgacgacgtctacatactggacttcgccgaggaggaaggcatcgacctgcccttctcctgccgcgcggggtcctgctcctcctgcgccggcaaggtcgtctccggctccgtcgaccagtccgaccagagcttcctcaacgacaaccaggtcgccgac

SEQ ID NO: 15684 - DNA, 423 bp, Zea mays
  Clone ID: LIB83-002-Q1-E1-B9
cggacgcgtgggcggacgcgtgggcggacgcgtgggcagtgacccgcaggcgcagctgccaattgcaagcatgtgcgggagtaagaaatccgtagcctacttcgcccacgaccgggcgcaccggctgctccccattgccggcggcgacgacttcacctgcggcgggtgcctggtcgctggcgccggcccgcggtaccggtgcgcccacccgggctgcagctttaccgtccacgaggcgtgcgcgcgccgctccccgaggacgctcaggtccgccgtgcacccgctgcacaggctgaggcggcgcgaggccgcgggagccgacggcagcggcggcggcggcgggtgcgaggtgtgcggcgaggccgtggagcgcgcgtgctacgcctgcgtcgcgtgcggggtcgccgttgcaccgctgtgcgc

SEQ ID NO: 15685 - DNA, 426 bp, Zea mays
  Clone ID: LIB83-002-Q1-E1-C1
cggacgcgtgggtccgggccgccgcggcggcgtctccccgggcgcccctagcacagctcgcgttccggtggaacagagaagagaggcgagaggatggagatccagtcgtctggccgctccatcgaggggctgatggagaaggtgctgtccgtgaacatcctctcctcggactacttcaaggagctcttcaagtacaagacctaccacgaggtcgtcgacgagatctacaaccaggtggaccacgtcgagccctggatgaccggcaactgccgcgggccctcctccgccttctgcctcctctacaagttattcaccatgaagctcaccgtcaagcagatgcacggcctgctcaagcaccaggactccccctacatcagagctattggattcctctacctacgatacgttgcagaaccgaagacactt

SEQ ID NO: 15686 - DNA, 422 bp, Zea mays
  unsure (1)..(422): unsure at all n locations; Clone ID: LIB83-002-Q1-E1-C10
accatactttgaaacatactccatgttcatgtcatgcctatgcaaagcaggtagatcagaggatgggttgcatcttatccacgatatgtcagattgtggtttcattcccagcacagtaaactttatgactgttgtccatggtctaaatgtggagggcaaacatgagcttgctgagtctgttctactgtcaaaatggcacttgcggaagcaaagaaccatctcatattagtttttgcttctctcacgctctcaaaagatttcttggtgtttacatcttggaacgcaaggaacaagcatatggtangggcatgaagtaaaatgaatcatggacacttttgctcnccccccccctccatttgtcaatggtggatggagaagggtacagtaaaaatcgttgtgaggactgactcaatgtggcatgt

SEQ ID NO: 15687 - DNA, 436 bp, Zea mays
  Clone ID: LIB83-002-Q1-E1-C11
cgcgggtcgacacacgcctctacactgcgtcgatagtgacccaccgaccgcacgctcgcgcaggggctcacgggtgactccacgtatttggtggtggagcacgacaagacgcggcacctacgggatcaacgccgtgtgcactcacctcggctgcgtcgtgccgtggaacggcgctgggaacacgttcacctgcccctgccacggatccgactacatcacccatggcaaggtggtccgtggaccggcgccactgtcgccggccctgattcacgccgacgtcgacgacggctaggtcctctgcgtcccgtgggtggagaccgacgtcaggaccggcgatgacccatggcggaaagcattatgatcatccggaaccaccagtgctcagtgctcacacatgagagctatgtatgcctccgttccttgtgatgacgcaata

SEQ ID NO: 15688 - DNA, 404 bp, Zea mays
  Clone ID: LIB83-002-Q1-E1-C12
gtgagatggcacaagccatggcgtccatgaccggcctctcgcagggcgttctgcccagcaggcgcgccgccaacagggccaggacggccgccgtcgtcagggcgtccgccgaggcgcaggcgcaggcgggccgccgcgccgtgctcgggctggtgggcactggcatcgtcggcggcgccttgtcgcaggcggtgcacgccgagaccgtcaagaccatcaagatcggagccccgccgccgccctccggtggactccccgggactctgaactctgaccaggcgagggacttcgacctccccttgaaggagcggttctacctgcagccgctgccgccggcggaggcggtggcgagggtgaagacgtcggcgcaggacatcatcaacctcaagccgctcatcgacaag

SEQ ID NO: 15689 - DNA, 442 bp, Zea mays
  Clone ID: LIB83-002-Q1-E1-C2
gactcgcgggtcgacgcaagcctctacactaattccgcagagacttcaccatccttctctcccacatcgtcctcggctgcaagttcgtcgcctccgccgtcaacaaggccgggctcgcccagctgatcgggctcgccggcgagaccaacgtgcagggagaggagcagaagaagctggacgtcctgtccaacgaggtgttcgtcaaggccctcgtcagcagcggtcgcacctgcgtccttgtgtccgaggaggacgaggaagcaacgttcgtggaccctaagctgcgtggaaggtactgcgtctgctttgatcccctcgacggctcctccaacatcgactgtggcgtctccatcggaacgatctttgggatttacatcatcaaggacaaggacaacgtcactctggaggacgtgctgcaacctggcaagaacatgctcgccgc

SEQ ID NO: 15690 - DNA, 426 bp, Zea mays
  Clone ID: LIB83-002-Q1-E1-C3
ggtcgacacaagactctagaatgattcgtattaagcggtgctcagtgctcacacatgagacctacgtatgcctccgttccttgtgatgaggaaatatgcttgcgttcgttctccgtgggcgttgttcctacaaattcacttgctttctgtctctctctctatatacacactgtataaaacaagaacagctgtttatcaaaaaaaaaaaaaaaaaaagcacagctatatcctgggttacgttcctcacacggcggaggcaaacaaaccctagccgccaggcgcaggcggtcagggagcgagtaccgagcgccccagttcacacgtgagatgtcagaatacaagaacgtcgttggggggaggctaaagctgaagggtaaggcactggatgtgaaggaaggtggagtcaagaagaaaaaaaagaagcat

SEQ ID NO: 15691 - DNA, 392 bp, Zea mays
  Clone ID: LIB83-002-Q1-E1-C4
cgaagcactacactacactacaccacacccacccgacgacgatcacacacgcagaagatcgagttcgttcgatcgtgaccgtgacgcaggaagctataagctagccaagacaggaataataatggcggcgtcgacggtggcgagcctctctgtcccggtgacgacgacgaccttcgcggcggcgggcggcggcgacgtgctgatcgtcgtcccgaggagggcgggcgccaagcgcgtcgtctggttccccgcggcggcgcgccgcggcggcgggcggttggtcgccgtgcggtccagcgggccggccacgccgccggagatctccgacaaggtgtcggagagcatcaagcaggcggaggagacgtgcgcggacgaccagaagggcgacgccg

SEQ ID NO: 15692 - DNA, 444 bp, Zea mays
  Clone ID: LIB83-002-Q1-E1-C5
ctcgcgggtcgacacaagcctctagagtgactcataataccgagagggagaagcgtttctcctgggttgttcgggtgagccgctagcgagagcgagacggagcgaggctttgccgctgcagagcagagcgacatgagctaccggcttggaggcgcggcggaccgcgaggagggggacgaggagctgttcgagacggcgccgtccgtctccggcggcgagggctcgtgcgaccaggagcgccgcgcgttcgtgccgccgctgcggaggatgaactcggacagcatctacgacatggcgtccatggtgtcgcagcagctcccagccaagaaagggctatcgcggtactacgagggcaagtcgcagtcgttcgcgtgcatgtcggaggtgcgctgcctggaggacctgcgcaagaagggcagcccctacaagcacaggaccaacaag

SEQ ID NO: 15693 - DNA, 426 bp, Zea mays
  Clone ID: LIB83-002-Q1-E1-C7
gttccagagccttatctactggatcatcggcgcactcgccaacgactcccaaatcctcagcaggtacgtcgggttctacaagggagtgcagagtgcaggagcggcggtggcatggcaggtggacaggcgccacacgcccctcatgtcccagctgatcgtcaactgggggctcatgaccatcagctaccccttgcttgcgctgctggtgttcctggccgtgaaggacgagagctactcggtttcgtcggtggaggacggccgggagaaggacagcaagctgtccgcgccgaccagcttccactgatgaagaagaagaaggaggaaggatagaccaagatgcatgtcattgtaacacggtgtttccatccaagtaagttttagtagtagaaatcaagaaacaactggagtacctataccaagaatata

SEQ ID NO: 15694 - DNA, 414 bp, Zea mays
  Clone ID: LIB83-002-Q1-E1-C8
atctgcttccagagccccccgccgccgctgcgccctcctctcggtcctgccgtccgtcgaggtaaaaggacagcatggtgagggtcagcgtgctcaatgatgctctcaagtccatgtacaatgctgaaaagatagggaaacgtcaggtcatgatcaggccgtcatccaaggtgatcatcaagttcctgacggtcatgcagcgccatggctacattggcgagttcgagtacgtggatgaccacagagctgggaagatcgtggtggagctgaatggaagactgaataaatgtggtgttattagcccacgttttgatgtaggtgttaaggagatcgagggatggacggcgaggcttcttccatctcgccagtttggctacatcgtcctaacaacttctgctggaattatggaccatg

SEQ ID NO: 15695 - DNA, 446 bp, Zea mays
  Clone ID: LIB83-002-Q1-E1-C9
gtgggtcgtcgcaagcctctacactgagtcctactaggccatctgggcgtgccaggtggtgctcatgggcgccgtcgaggggtaccgcgtcgccggcggcccgctcggagaggtggtcgacccgctgtaccctggcggcagcttcgacccgctcgggctcgccgacgacccggaggcgttcgccgagctcaaggtgaaggagattaagaacggccgcctcgctatgttctccatgttcggcttcttcgtgcaggctatcgtcaccggcaagggccccctcgagaacctcgccgaccacatcgccgaccccgtcaacaacaacgcctgggcttacgccaccaacttcgtccccggcaagtgagcgagggcatgatgcttgcatgcgtgtaccgtagacgctgcaggttgcaccagtatttgtgaagggagctgtgggagccagaaga

SEQ ID NO: 15696 - DNA, 450 bp, Zea mays
  Clone ID: LIB83-002-Q1-E1-D10
ctcgtgggtcgacacaagcctctacagtgagtcggacatatgcctctgtcgcacactagcaatgatgtccgtgcattaagaataagtgatttcatacatgcgcatgaacaggtgtgtgcaagtgtttcctcagattccagtaacatgaacgagcttgtgcaatggaatgatctctatggagaaggcgggtcaaggaaaaagacaacgctaagctacttcatgtagctgatgttgcaagtatatcgggagaagtgccctggcacaaagcagaaatggttggaggcagttgggggtgtgtatcgggtgcagttggaaaagagctaggttcacctgccatccatccattgagagaattgatggctcaggtggagcggaatggagtagtatacacattggttgctgcctccactctgggccatgtatcatgcatctggacatgacggatggtct

SEQ ID NO: 15697 - DNA, 334 bp, Zea mays
  Clone ID: LIB83-002-Q1-E1-D11
tctacaatgactcgttctatagcggccgcagcctcctccggcgtcgtatgtcgtctacccatccctgcattaacactactccgccgccacgccttactacgtgtatcgctaccatatagctcaatgttatattcctgttgttgaaggaatgcctgttaaaatcgctcctcttcgatgttgtggccttggcatgaggtcgtttctgtgaactagtgggtacatctttacaagtactctatggtaaccttgaacgtttgtgcgcagttgtgtgtgagtacctgattaaattgaaacacctctatgtgtatcttgcactaacgctgcctcacttgct

SEQ ID NO: 15698 - DNA, 425 bp, Zea mays
  Clone ID: LIB83-002-Q1-E1-D12
acccacgcgtccgcggacgcgtggggaagaagaggagcttaacaaggaacatgagctcctaaaggaatcatttactatactatcaacggaggaagaacgaagattatatgattggagcttgtcaagaagtggacagcctgagcgatatgtctggccatttgaagttgatccattggagttggcaccagatcctccaaaggaaccagaagatgagttcccaaccaagctcgttggctacttcttactggcgtggttcatactctctgttggcctctcggtggccctcaacaaatgaagattttctccccaaaagaacatgaattgtaatccaataatctctctgccatgtacatcaatgacgctgttgtgtgcacagaagcatatggatgtacatgccatgctcttggcaattagccgaaacatat

SEQ ID NO: 15699 - DNA, 403 bp, Zea mays
  Clone ID: LIB83-002-Q1-E1-D2
gcaagactctagagtgaatgctatcagccttatgccgatgattgatcagggagaggcagatgacaagatcattgcagtgtgcgctgatgatcccgagtacaggcattacaatgatatcaaggagctcccacctcaccgcttggctgaaatcaggcgcttcttcgaggactacaagaagaatgagaacaaggaggttgctgtgaatgactttctaccagcgagcgccgcttatgaagccatacagcactctatggacctgtatgctacatacatcgttgagggcctgaggaggtatgattctgatggctaggaaaggtggggaggatgttgacgaaaaactgggagaccatttaccgcatggaacgagtaccgttattattttatttgtgtcgtgtatactgct

SEQ ID NO: 15700 - DNA, 423 bp, Zea mays
  Clone ID: LIB83-002-Q1-E1-D3
aacacgcgtccgcccacgcgtccgcccacgcgtccgcccacgcgtccgcggcaatggcctagaggttactagcgctggtgcagggaatgacaagtgaacagagaccgtgatttgcagtctacttctgttttatcgtgcaatacctcagcaaaccctgcctacatgatgcgatcgaaaccggagacgttcctggtcaagcttcgttctgtaacataaataaatccgaagcacttcaaagctctacatactcgcccttgcttgtttgagacaagggcttgcgttcttgctgcatctcatccgagatgattgtaatccgaacaatgtctagttaataaagatgtcgctttgccctgaaaatgtttaacgctgtaaacatcgctctgtacgtgattggatttcctacatgacaattggctaatggag

SEQ ID NO: 15701 - DNA, 403 bp, Zea mays
  Clone ID: LIB83-002-Q1-E1-D4
aacacgcgtccggccaaggcgttcggggccaaggtcacggtcatcagcacgtcgcctgggaagaagcaggaggcgctcgaccggcttggcgccgacgccttcgtcgtcagcaaggacgccgaagaaatgaaggcggctgcgagcaccatggacggcatcatcaacacggtgtcggcgaacctcaccttggccccgtacatgggcctgctcaagcctaacggcaagatgataatggtcggcctgcccaccaagcctctcgagatcccgccctttgatctcatcattgggaacaagaccctggccgggagctgcatcggcggcatgagggacacgcaggagatgatcaacgtggcggccaagcacggcgtgacggcggacatagaactggtggccgcggactacg

SEQ ID NO: 15702 - DNA, 416 bp, Zea mays
  Clone ID: LIB83-002-Q1-E1-D7
aaggtgatcgacgaagccaccgtggggcggctgtaccggatccggcgcacggtgatgcagatgctccgtgaccgtggctacctggtggtggaccacgagctcgccaccagccgccgcgacttcctccgcaagttcggcgagtccttccaccgcgaggacctcctcatcaacaagtacaagaagaacgacccatccgaccagatatatgtcttcttccccaacgatgacaaggtagggatgaagcacatcaagaagtacgtcgaaatgatgacgcacgagaacgtctccagagctgtgctggttctccagcagaacctaactccgtttgcgaagtcgtttctcatagagctggagccgaagatccatctggaaattttccaggaggccgagatgcttataaacatcaaggaacatgt

SEQ ID NO: 15703 - DNA, 423 bp, Zea mays
  Clone ID: LIB83-002-Q1-E1-D8
accacgcgtccgaacacacggttcaagcacatcgacacacacgagcacagaagagaaacgggcacacgcaactgatcaaggcaggcaaccaatattcaccgtcggcaatgggcgacctgatccctgggctgccggatgaagtggcgagggagtgcctcgtccgggtgggcttcgaccagctgccggtggtgcgccgcatctcgcgccagtggaagtcggaggtggagtcgccggactaccaccgccagcgccgggcggaggggctggcgcgcccggtgctcgcgctggtccaggcgcagccgacagcgccgccggatgccgacaccgacaccggccccgcgcacaagcgctcgacggcggccaactcgtaccggctggtgctgctggaaccggccgaaggacggtggacgccgctgccgcccc

SEQ ID NO: 15704 - DNA, 427 bp, Zea mays
  Clone ID: LIB83-002-Q1-E1-D9
aaactgacgtcgtattaacgcgtgggcggacgcgtgggtgcgtatccagtcccccctgtagcgatgacttcacctgctcctgttacaggaccaactgcctatgctcctgtgcagaacacaaaggataatcctccctgcaatacccttttcattggtaatctcggtgatactgtagtcgaagaggaattgcgaagtctcttcagtgtgcaacctggattcaagcaaatgaaagtgttacgtcaagataggaacactgtttgctttattgaatttgaggatgtgaatgctgctacatctgtgcaccaaactctgcagggtgctgttattcctagttctggtcgtggtggaatgcgaattcaattttcaaagaatccctttgggcgaaggaaggattcagctgctggccttgcgagcgttctaaatgggg

SEQ ID NO: 15705 - DNA, 418 bp, Zea mays
  Clone ID: LIB83-002-Q1-E1-E1
ggtcgacgcaagcctctagactaactcctagtagccgaagaactcaagccctttgggaagcagctcagggacaaatacgtggagacacagcagcttctcctccagatcgctgggcacaaggatattcttgaaggcgatccattcctgaagcaggggctggtgctgcgcaacccctacatcaccaccctgaacgtgttccaggcctacacgctgaagcggataagggaccccaacttcaaggtgacgccccagccgccgctgtccaaggagttcgccgacgagaacaagcccgccggactggtcaagctgaacccggcgagcgagtacccgcccggcctggaagacacgctcatcctcaccatgaagggcatcgccgccggcatgcagaacactggctaagcggcttctcttcactcac

SEQ ID NO: 15706 - DNA, 424 bp, Zea mays
  Clone ID: LIB83-002-Q1-E1-E10
agatctggattatggtggtacagtggctaggaatgtacttggagttcaatgcttggggaatgagttttcttcgtacctcaggcacacttcagatggttgctgtagttcatatatgcactgtcgacattgttatacaacaatgttacatttgcacggaactgaacacttctattttcatgagcttttattgctttgattcgacgcggcatcatggcttttggaaccaagttgttaaagctgcattttggatattgaatcagttgtttctggaacgttttgcagatcaccagcaagatcgaaatctcctaatgtttctccagcaaatggtgaagcagcaagccccaagaagcagagcccaaacaggagcccatctggctcacgctctcctgatgcgaagcctgaataaaattgctatgctgttaaa

SEQ ID NO: 15707 - DNA, 425 bp, Zea mays
  Clone ID: LIB83-002-Q1-E1-E11
aaagcgtgtccacatcgtctttgaagacgggaaagcttctcttcttccaccacgatactaaaaaggctgcataccttgccgtgatgcgatctgttagcagctcaagcagatacggttttgatgctcgccttataatctacagagaagcatctgaaccacacgagaaatcacgtgtctcatgatccctgactgcatcaccggatcacgacatcgttttggatgcaatgaagttgatgttgacggatgaggtgcggaatcacgattcattctacatccttggtggcattagcatagaaagacgagacattgcatggacctggttgaacgaaaactgcgatcacgtgttgaatacatggaactcgaattcactcatatcacacatcatcgagtcaagtgtcgcacggtttacctccgaagagaatgct

SEQ ID NO: 15708 - DNA, 429 bp, Zea mays
  Clone ID: LIB83-002-Q1-E1-E12
ggatatcacagcagggcatcgactacatccattaaccaaattgacataataacactaaaacatctatttttattcctagctttttattaactgccgacgaggccgtcgccgagttcttcgacaaccccaccgtcccgcgcgaggagaaggccgagctcatcggcgagatcgccaagtcgtccgagctgcagccgcacgtcgtcaacttcctcaacgtcgtcgtcgacaacttccgcgcgtccatcgtgccgcagatcgtcgtcgagttcgagaacgtctacaactcgctcacgggcaccgaggtcgccaccgtcacctccgtcgtgcagctcgagtcgcaggacctcgcgcagatcgcgcagcacgtccagaagatgaccggcgccaagaacgtccgcctcaagacgcagctcgaccaggcgctcatcg

SEQ ID NO: 15709 - DNA, 114 bp, Zea mays
  Clone ID: LIB83-002-Q1-E1-E2
acgcaagcctctacactgacgtcgtaataaaatgaaaatatgcaagagtggcacgaaccatagcaacgggtgtatattgtattagcgtttacagttttacactaatgggttctg

SEQ ID NO: 15710 - DNA, 441 bp, Zea mays
  Clone ID: LIB83-002-Q1-E1-E3
ggtccacgcacgcgtccgcaatactgattggcatgtcagagccatctctgccacaaacttgtatcttcgtgtaaatcacatttatgtcaattctgatgatataaaggagactggctacacttacattatgccaaagaacatattgaagaaattcatatgcatagcagatctgcggacacaaattgctggatttttgtatgggctgagtccacaggacaatcctcaagtcaaagagattaggtgtatagccatccctccacagcatggaacacaccagatggtgactcttccagcaaatcttcctgagcacgagttccttaatgatctagaacccttgggatggatgcatacacagccaaatgaagctccacagctatcgccacagggactgacatcacatgccaagattctggagaacaacaaacaatgggatggtgagaa

SEQ ID NO: 15711 - DNA, 427 bp, Zea mays
  Clone ID: LIB83-002-Q1-E1-E4
cgggtccacgcacgcgtctacacagacgtctggaatttggatcaaaacttaaagaacacatgcagtattgtgtggatcaccctgaagaggttagcaagctggccaaagtgaaggcgcaggtttcagaagtcaagggtgttatgatggaaaacattgaaaaggttctggatcgtggagagaagattgagctgcttgtcgacaagaccgagaatcttcgctcacaggcacaagatttcagacagcagggaacaaatgtcaggagaaagatgtggttacagaacatgaaaatcaagctcatcgtcctgggaataatcatcgcactcattctgatcattatcctctctgtctgtcatggtttcaaatgccattaagcacagaccagaatactgatacattcaactgcacctattatactgctgcttggagc

SEQ ID NO: 15712 - DNA, 383 bp, Zea mays
  Clone ID: LIB83-002-Q1-E1-E5
aacacgcgtccgttattttttttttttttttttttttttttttttttttttttttttttttttttttttttttttttttttttatccttgaaagtaggaaataaattatgtatataattttgttgattacaaactagactgccactgaaagttgtcatgggcaatctgttgggtacgggcggccggccagggcagcagcagtatataaggtcggatctgatctggcatactgccatctggggccataagcccagcccatgacagaagatataattaaatctcaacacatcagtgtgttcaatttatctccatcagaggataaaatgagatctgtaccacagaatcgatcgcaatggatgctccaccttccatctgctcaatgg

SEQ ID NO: 15713 - DNA, 131 bp, Zea mays
  Clone ID: LIB83-002-Q1-E1-E6
cacaagactctaaagtgactcgtactatgttgcggccattgttgtcgtgactctggccatagatccttttatgtacatgcgaaatgtaaccaagggatatggaataagaacatgttcatcctgttgtagac

SEQ ID NO: 15714 - DNA, 420 bp, Zea mays
  Clone ID: LIB83-002-Q1-E1-E7
aagaagacttccagccaaaggtggtcaaaacttcttgatctaaagaaaaccctggataaagcgcctaagtgaattacttagtatgcatcagtcaactgccaatgctgcatgcagagcaagagaatagtgctgtatcatgatgctggaatggaagtggcgacaacttgaacttgttcaaccaagatggaaggttggtggtttgtaactcattggctgttggctatccttttcttttgaacagaagagagaggattgaccatcttatctgaatggtatatacaatgcgactccatgcccagggactggtcatgttgagaacctagatacaggatcatacattataagcacatcatcagagaataaatgtgtgtgtgaacataactactatttgactgtttgtataaagcaattcatcttttt

SEQ ID NO: 15715 - DNA, 401 bp, Zea mays
  Clone ID: LIB83-002-Q1-E1-E8
accacgcgtccgggaaccggtccatcactttcacgctcagctccatgcaatggctgcctccaccatggagatctcctccacggcgatggccggcacccccatcagcgtgggctccttcggcgacggccgcatcaccatgcgcaagaccgtgggcaagcccaatgtggcggtgtctggcagccgctggtacggccccgaccgcgtcaagtacctcgggcccttctccggcgagcccccgagctacctcaccggcgatttccccggcgactacggatgggacaccgcccggctgtccgccgacctcgagaccttcggcaagaaccgcgagctggatgtgatccactcccgctgtgccatgcacggcgcgctcggctgcgtcttacgcgagctgctctctcgca

SEQ ID NO: 15716 - DNA, 350 bp, Zea mays
  Clone ID: LIB83-002-Q1-E1-E9
agtacgcatccgccgcaatcagggacaggtagctcgagcgcgcgctccacctgctccgacgcgatgcgggccaagtggaagaagaagaggatgcggaggctcaagaggaagcgccggaaaatgaggcagagatctaagtaggcgcatcttgtgaccgaggatggcgagcttctcctgcaccatggctgagacgcgttgggatgattgtctccctttgtagacgtgctttgctgtagacgtaggcgatgtaaaccgtcctttttgattaattctagtatgttctgagactgggtttatattgtaatttgaggataattatatgatgctctaagtttattgatattcctgtc

SEQ ID NO: 15717 - DNA, 442 bp, Zea mays
  Clone ID: LIB83-002-Q1-E1-F1
ggtcgacgcaagactctacactgaatcgcatcactctctgctcctccgcctccgcctgatccatccaagacagggatcgccatgtcggactcggaggagcaccacttcgaatcgaaggccgacgctggggcgtccaagacctacccgcagcaggctggcaccgtccgtaagaacggcttcatcgtcatcaagaaccgtccctgcaaggttgtggaggtttctacctccaagactggtaagcatggccacgccaaatgccactttgtcgccatagacatattcaatgggaaaaagcttgaagatattgttccttcatcacacaactgtgacattccgcatgtgaaccgtactgagtatcagctgattgatatttctgaggatggatttgtgagccttcttacttcagatgggaacactaaggatgatcttagactcccaactg

SEQ ID NO: 15718 - DNA, 429 bp, Zea mays
  Clone ID: LIB83-002-Q1-E1-F12
tagagggccacatcgtccccagtgcccgccgccgtcctcgtcgccccctcctccgccgccgtagcagtgaaacctcgtgccgcagcgagtggcggcggaggcagcacagcaggcaggcgcgacgtgcttgccgccggtaccgggctgggcgcggcgctgctgctggcgctggggccggcgcgcgcggcggacgaggagtacgtgagcgagacgaaggaggtgatcgggaaggtgcggtcgacgatcgggctggacaagtcggacccgagcgtggccgacgcggtggcggagctccgggacctgtccaactcgtgggtggccaagtaccggcgggagaagtcgctgctggggcgtccgtcgttccgggagatgtactcggcgctcaacgccgtgtcgggccactacatcagcttcggccccacggcgccc

SEQ ID NO: 15719 - DNA, 404 bp, Zea mays
  Clone ID: LIB83-002-Q1-E1-F3
cacttctttgtgatatgctcctgcgggatgctcctgttgggatatttacccagtcacctaatgtgatggatctagtaaagtgcgatggagctgcattgtattaccagaaccagcttttggtgcttggatcgacaccctccgagtcagagataaagagcattgcaacatggctgcaggataatcatgatggttcaactgggctgagtactgacagcttagtggaagcgggttatcctggtgctgttgcacttcgtgaagttgtgtgtggcatggcggccataaagatctcttccaaagattttatcttctggttccgatcgcacacaacaaaggagatcaagtggggtggggctaagcatgaaccggttgatgcagatgacaatggcaagaggatgcatccacga

SEQ ID NO: 15720 - DNA, 415 bp, Zea mays
  Clone ID: LIB83-002-Q1-E1-F5
tcgcgggacgacacacgcgtccaaacacgacgtctgacccaacgcgtccggtgtgtttcgacatggacgcgaacggcatcctcaacgtgtcagcggaggacaagaccaccggacagaagaataagatcacgatcaccaacgataagggacggctaagtaaggaggagatcgagaagatggtgcaggaggcagagaagtacaaagccgaggacgaggaacaccagaagaaggtgaacgccaagaacacgctcgagaactatgcctacaatatgcgcaacaccatcagagacgacaagatcgcctccaagctaccggtggacgacaagaaaaagatcgatgacgccgtcgagggggccatcaattggctcgacaacaaccagctcgccgaggttgatgagtttgaggacaagatgaa

SEQ ID NO: 15721 - DNA, 426 bp, Zea mays
  unsure (1)..(426): unsure at all n locations; Clone ID: LIB83-002-Q1-E1-F6
gcagcagcttatcatgtcgtcatcatgcatgcatggacgacggcggtcgtcatcttatctgggagcgtgtgtgtcttggcaatgggaagctgcatgcgcctctcggccggacggcgcgtagctgtagggcggcgtgccatagagctgcctcctgccgctcaccttgctgttgaggacgactgatggtggccatggccactcggcgtcggtggcggcggcgccgagttttacctctctactaaggtanggcaacttgtatcctttggcaattgttctcatctatctgggtctatctgttggctgcccggtgacggtatacggtgatgttctaatagtactcaattggtcttggagttcatgctacggctcctctgttatatattacacggctgacggctcctccttattaatgtgtactttgatgat

SEQ ID NO: 15722 - DNA, 428 bp, Zea mays
  Clone ID: LIB83-002-Q1-E1-F7
tcgcgggtcgacacacgcctctaaattgattcgtaccagccgacaacgcactcgatggcgtccgcgacggggggttcctcctcggaaatggcggtggaccacgcgacggggctgggcaccgtggagaagccgcggtttgatgctctgatgccgagtgagatgagcggcgggaggacgcagttccggaaagtgaccgtgccgcagcaccggttcgcgccgctcaagcgatgctggatggaaatctacacatccgtttacgagcacatggtgatcgacatacgcatgaatctcaaggcgacgagggtggagctatcgacaaggcaggacacaccatatgtcagcaaccttcagaaatgtgctgactttgtgcatgcttttatgctcgggttcgacattgctgatgccgtcgccttgccgcgtcctgatga

SEQ ID NO: 15723 - DNA, 408 bp, Zea mays
  Clone ID: LIB83-002-Q1-E1-F8
atggaggacaccaccgaccacgtcctccgcttcgaggtgccggagatgatagagagggaccggttctcgtggttcaaggacgaggagttcgcgaggcagacgatcgcggggctcaacccgctgtgcatccagctgctgactgagttccccatcaagagcaagctggacccggaggtgtacgggccagcggagtccgccatcaccaaggagatcctggagaagcagatgaacggcgcgctgaccgtggagcaggcgctggcggcgaagcggctgttcatcctggactaccacgacgtgttcctgccctacgtgcacaaggtgcgggagctgcaggacgcgacgctctacgcctcgcgcaccatcttcttcctgacggacctgggcacgctgatgccgctggccatcgag

SEQ ID NO: 15724 - DNA, 422 bp, Zea mays
  Clone ID: LIB83-002-Q1-E1-F9
accacgcgtccgcggacgcgtgggcggacgcgtggggcagtgaaagcaaggcagcatgcatgtcgtcgttgaccacaaaagtgtttggagtgccccagccagggtggtacagggtttattacatcattaataatattcaagagttagtaaccgctctgacccaagagcatccggtggtgctgatgttctgggcggactggaaccagccaagcaaggccacgtactgggatctggccatcgctaaaaaggatgaggccgtattctgccagctggactttgataagtttaaagatgtcgtagagaagttcagagtgaaggctctgccgacgttcctcctgatcaaggagggcgaggagcagcgcaaggtcgtcggtgccaaggtcgaggagctcaacatggcattatcagatatcggataatct

SEQ ID NO: 15725 - DNA, 403 bp, Zea mays
  Clone ID: LIB83-002-Q1-E1-G1
gattcatctggaaagaacacctaagcttcgaggcaaggttgtccttgtacagattgttaatcctgcaagaagcatcggaaaagacattgaggaagcgaaatatgaagctgaatctgtagctcaaaggataaatgataaatatggttctgctaattacaagcctgttgtcctcattgactactcaatacctttctatgaaaagatcgcattttatgctgcatctgactgctgtattgtaaatgctgtgagggatggcatgaatttgataccgtatgagtacaccgtatgcaggcagggaaatgaggagcttgataagctcagaggtcttaataagagctcatctcacacaagcacacttattgtgtctgaatttgtgggttgctctccatcacttagtggagca

SEQ ID NO: 15726 - DNA, 433 bp, Zea mays
  Clone ID: LIB83-002-Q1-E1-G10
aaataagtcatatataaaaaaaaaaagaaaaaaaaaaaaaaaaaaaaaaaaaaaaaaaaaaaaaaaaaaaaaaaaaaaaaaaaaagaaaaaaaaaaaaaaagattaaaaagaaaaaaaaaaaaaaaaaaaataaaaaaaaaaaaataaaaaaaagggggggccctcctaggggttcaaattttgcttccccttccatgcaacttaatgccccttcaatggtgtccccaattttcatttcaggggcgttttttttaaatcttgttaccgggaaaacccctgggtttcccaattttaccccctttgaaaaaaacccccttttccaaatcggggttattcgcaaaagggcccctacattttccctttccaaaaatttgccccccttaaaggtcaatgggaccccccctttttccgggcttttaaccccgggggttt

SEQ ID NO: 15727 - DNA, 429 bp, Zea mays
  Clone ID: LIB83-002-Q1-E1-G11
aaggacgcgtggggccagatgggccatgctcggtgccgctggcgctgtcatcccagaggcctgcaacaagttcggcgctaactgtggccctgaggctgtctggttcaagaccggcgcgctgctcctggacggcaacaccctcaactacttcggcaacagcatccccatcaacctggtggtggccgtgatcgcggaggtcatcctcgtcggcggcgccgagtactaccggatcaccaacggactggaccttgaggacaagctgcaccccggtgggcccttcgaccccctgggcctggccagcgaccccgaccaggccgccatcctcaaggtgaaggagatcaagaacggccggctggccatgttctccatgttcgccttcttcatccaggcctacgtcaccggcgaaggccccgtggagaacctcgccaa

SEQ ID NO: 15728 - DNA, 428 bp, Zea mays
  Clone ID: LIB83-002-Q1-E1-G12
cccacgcgtccgcccacgcgtccgccttgctcgtcagcccggataagataacgcccatctgcacgggccacgcgaagcgttcgagctcctcccacggcagccatggtcaccgccaccacctccccgctcttctccctctcctccctccgcgcctccctcccttcccccacccgatttcacacgtctctctcgctccgagccctctccccacgtgctcgtctctctgccgccctccctttcgcctccccactcgtttcaggcgggtacgggacctgggcggcgacttcaatctcgtccgcgggaaggttgagacggcgggggctggaggtggtgtgcgaggccacgaccgggcggcggccggactcggttaagaagagggagcgccagaacgacaagcaccgcatccgcaatcacgcgcgcaaggccga

SEQ ID NO: 15729 - DNA, 154 bp, Zea mays
  Clone ID: LIB83-002-Q1-E1-G2
actagttctagatcgcgagcggccgctcgcgatctacgactagttctagatcgcgagcagcagctcgcgatcttcaaatagtcggcgcgaggatagactagggcactccggcccggtacatgcagctgtaccaacttcccctgaagtgggctct

SEQ ID NO: 15730 - DNA, 241 bp, Zea mays
  Clone ID: LIB83-002-Q1-E1-G3
atcgcaagcggacgacctttttttttttttcccagaaatgttgtgcgagctcgcagttatgcagtagagctgaaagtagctcttggttccaagatatctgaatggtaatttgagtgcttggcagtgtttcttgatggactaaactctggtattagatatgaactagtatgttaatatcacaattgaccagcttatgatatcaacaaacgtcaataaaatagtactgcaaatgatgtaatgc

SEQ ID NO: 15731 - DNA, 451 bp, Zea mays
  unsure (1)..(451): unsure at all n locations; Clone ID: LIB83-002-Q1-E1-G4
gggtccacgcacgcgtccgcaaatgttgaaatgggaagctggccccaaggaatttgatggtatatgggcaccctggtggtatgggagtgtgcacaagtcttcaggtttctctaagcctcgccaatatcctctgactttcccattcgtgttttatgacctgcttgagcaaagcttgcctttctacaacatgctgaagcgccaaataaggaagataagaggaccgcagcaaccaccattatcggaccctcctctgcctgtccctgcaaataaaaacattcttgtttgggttggagatgaacttttgccccgtaacagtgcaaaggtttcagtgtttgattcagttgtacaaggaggagatgctgtttgggaaggtttacgtatatatgatggaaaagtattcanattagatgaacatttggacagattgtttgattctgcaaaagctatgggc

SEQ ID NO: 15732 - DNA, 428 bp, Zea mays
  Clone ID: LIB83-002-Q1-E1-G5
tcgcgggtcgacacaagcctctaaaatgagtcgcagcagccgctccgcctcagcgcatcgcccgccgcgacctcatcgatcaccttcagctttcaatcatggcggacgtcgatgtcgaaccggaggttgccgccggagctcccaagaagaggacgttccgcaagtacagctaccgcggcgtcgacctagatgcgcttctcgacatgtccacggacgaccttgtccagcttttccccgcgcgcgccaggagaaggttccagaggggtctgaagaggaagcccatggcgctcatcaagaagctgcgcaaggcgaaaaaggatgctcctgctggtgagaagcccgagccagtcaagacacatctccgtaacatgatcattgtccctgagatgattggaagcattgttggggtctacaacggcaagaccttc

SEQ ID NO: 15733 - DNA, 396 bp, Zea mays
  Clone ID: LIB83-002-Q1-E1-G6
ggagatgactgagctcaagctcaaggagatcaagaacggcaggctcgccatgctcgccatcctcggttacttcatccaggggctcgtcaccggcgttggcccgttccagaacctgctcgaccacctcgccgaccccgtcaacaacaacgtgctcaccagcctcaagttccactagaacgttggtgcatcagcatacctgctgccgccgccgccagttgtttgctgtggaaagctagatgcatgcgtgttgtaaaggaacctgaagcgttgcatcggtcatgattcatgcatggccagcctgctgcctgtaacaacaaactagtattgatcttattgagaccggaaactgtattgcacatggtaaatcaatgtacaattcctccctagatgcggaca

SEQ ID NO: 15734 - DNA, 403 bp, Zea mays
  Clone ID: LIB83-002-Q1-E1-G7
acaaaccatggcgctcgccctggcctctccaatggcgtctctctccttccactccgggaggatctcggcggcgtctatcggaggcgtcggccgcactcgcagggcggccccggtgggcgtatccgcctcgccgttcctccggagctccttcgtctcgtcctcctccacgtcgtccgcctccgcctccgcctcccccgcttcgctcgcggcggctgtctcggcgtctctggcatttacgtcctcctccgcgtttgcgggttcatctttgggaatcgagttcagctacagtataatgacaacacggagatcccgtggtatgcagattagggctggaaaggctgccctctgcatgaccaagaggtcaaggtctaggaagtcacttgcccgtacacatggtttccgc

SEQ ID NO: 15735 - DNA, 426 bp, Zea mays
  Clone ID: LIB83-002-Q1-E1-G8
aaggtcacttgggcggacgcgtgggcggacgcgtgggcggtaccaaggaggaaccatctgtagttgagtcctactataacaagcggatagttggctgccctggtggtgagggagaggatgaacacgatgttgtatggttctggttgaaaaaagatgagccgcatgagtgtccagtctgctcgcaatactttgtgcttaaggtcattggtgatggtggtgatccagatggtcatgacgatgaagatgatggacatcactaaggatgccttgtggttctgaaaataagaacttggtgaggcagatgaatccattacacttctttttctagaaccagactgctccacggcatccttgtttatgaaaagacagttggccatcaagcaggtggtagttttcagctaggtattttgtccaaacaaaagctgt

SEQ ID NO: 15736 - DNA, 446 bp, Zea mays
  Clone ID: LIB83-002-Q1-E1-G9
tcgtaggacgacacaacaccctaaagtgacgtcgtattagacgaccaaggatgagaagaaagcgaagaaggcggaggtgagcaagtcccagaagacgcagacaaagggtgcggtccagaagggttccaagggccccaagttgggcggcggtggtgggaagcgctgaaagaacttaaggcctgtttggaggctgacgtcgagcgccacaccccgcctaagatgcggcggccaatttggccgccacaactgcggcgcgtggcgtgtggcgcggcgtggtgtttgcggcagcgatccaaacacgcccttagtgtcgtttctcgacattgcagtcgttccttagccaaagccactttcgtagaacctgtgttgaatttgcaagacttattcaagcgttgcttgtgcgtgctaaataccatggcaagagaacggatttatatttatgcctg

SEQ ID NO: 15737 - DNA, 458 bp, Zea mays
  Clone ID: LIB83-002-Q1-E1-H1
ggtcctaaattaccgggctcttataagcatcctaggcatgcagccttgtgagggaactgacgtggtcccaagcaattcaaggtcgcacacttgtctgctctctggtgtgtttattggcaacgtgaaagtcttggtgagactgtcatttggaattagtgcaccgaaggaggtggccatgaagctggcagttagatctgatgatccagagatcagtgacaggatccacgaaattgtcgctaatggctaaaaacaatggtagtatctttttttttactccttttattttggctttcatgctacgggaagtttgaggggattcaattaattagagtatatgtaagtttggtttccagtcgaatctatcattcgttgcaccatcattcttccttgacacagtacaccagttttgggttgttttggatctgtacaattttccttatatactgaggacttaaaaa

SEQ ID NO: 15738 - DNA, 428 bp, Zea mays
  unsure (1)..(428): unsure at all n locations; Clone ID: LIB83-002-Q1-E1-H10
aggcgtctataagaacctcagtgattgccaagcccaagccagcaaatcggtactccatccttcagtcactgtctacaaaggctattctctgcgtaaagaaactgaggaatatcttgctgcacgtgggttaaggaacgctgtctattccattggtgcagcggatgcaagtgacgaattgtttggcgatctggttccctgcccttttcagcaacctgatgagaacacacaatctattttgaaaatgtcacagggacaggagatggaaacaagatcatcagagcatcccaaagttgctgatctggaaccattaccagatagcgaactctcttgtattcttgaatttgatggagcttgtaaaggaaatcctgngaaatcangtgctggagtcattattcggcggttagatggatctgtgattgctgtactac

SEQ ID NO: 15739 - DNA, 374 bp, Zea mays
  Clone ID: LIB83-002-Q1-E1-H11
accacgcgtccgcccacgcgtccggacgtacgtacgtacgtagatcgatccatcgatcgctaactagctgacgaccatggcgtctctctcctctgccgccatcacggccccttcgttcacggtcgctcccggtcgcgcattggtcagcatgaggtccttcaccgtgcttgcctctcgccgcaaggctcagtgctcaccgccgccgtggccgttgccgccagcgtcctgcttgcaggttgcggcgccatggcccaagaggtgctgctgggcgcatgcgacggcaggctcgtcttcgagcctagccagttcatcgtcaatgccggcgacaccagcactctcaagattgacgccggcttcacgcgcaatgtcgtgtt

SEQ ID NO: 15740 - DNA, 404 bp, Zea mays
  Clone ID: LIB83-002-Q1-E1-H12
gttaccgacaagaagtttgacaacaaagttgaatggggaattgatttagcctctgagcatgaaaggtatttaacagaggatatatttaagaagccagttattgtctataactatccgaaaggaataaaggcattttatatgagactcaatgatgatgacaagacggtggctgcaatggatgttcttgtgcctaaggttggtgaattgattggtggaagccaaagggaggaacggttagatgttctgaaacagaggatacttgatgctggcctgcctttggaaccctatgaatggtacttggacctccgtcgctttggatctgtaaagcacagtggttttgggttgggttttgaaaggatgattctatttgcaaccggaatggagaacatcagagatgttatacc

SEQ ID NO: 15741 - DNA, 420 bp, Zea mays
  Clone ID: LIB83-002-Q1-E1-H2
ctactcctatccactgcggcctggacgcgtgcgagagacttgaccaagcagcagcagcagggatggcgcctctgaagctgtacgggatgccgctgtcccccaacgtggtgcgcgtggccaccgtgctcaacgagaagggcctcgacttcgagatcgtccccgtcgacctcaccaccggcgcccacaagcagcccgacttcctcgccctcaaccctttcggccagatcccggctctcgtcgacggagacgaagtcctcttcgagtcccgtgcgatcaaccggtacatcgccagcaagtacgcgtcggagggcacggacctgctccccgcgacggcgtcggcggcgaagctggaggtgtggctagaggtggagtcgcaccacttctacccgaacgcgtcgccgctggtgttccagctgctcc

SEQ ID NO: 15742 - DNA, 411 bp, Zea mays
  Clone ID: LIB83-002-Q1-E1-H3
gggtccacacaagcctctatactgattcgtatgacgaagatgatggttcaagggaacatcaaggggactgatatttacagagacctgcatcactacaaggaggcccaaagagtttctgggttcttgatcttggccattgaagcaccgataaacttcgccaactccaactacctgaatgaaaggattaaaagatggatagaggaagaatcttttgaacaggataaacatactgaactccatttcataatcttggatctgtcagctgttcctgcaattgacacaagtggcatagcgttcctcattgacataaagaaatcaatagagaaacgtggtctggagcttgtgcttgtcaatccaactggagaagtcatggagaaaatacaacgtgcaaacgaagctgaaaactatttt

SEQ ID NO: 15743 - DNA, 444 bp, Zea mays
  Clone ID: LIB83-002-Q1-E1-H4
gggtccacgcacgcgtccgaactgctgcacgcgcggaccgacaaaaatccagcactagccaaagcacaggcgaagcagcagcagcgagaggccaccacaaacatggcgaccacggcgtttctacccccggccaagctgccgctgcaggggcgtcggttcgctagccccaaaacggcgggacgtatcagtgtcagggtccctccggcgcgagcgcagcaagagcagcaggtgaaggaggaggaggccgaggcggcgagcgtgccgccgccgcaggccgcggagaaggaggcgaggaagggggacgcgcagtccctgccgcggcagcctttggcggagagcaagaacatgagccgcgagtacggcgggcagtggctgagcagcaccacgcggcacgtccgcatctacgctgcgtacatcgacccgggtgacaacgcgttcgaccag

SEQ ID NO: 15744 - DNA, 424 bp, Zea mays
  Clone ID: LIB83-002-Q1-E1-H5
acgagtgagtgaacaccagccgtattgtcccgactcctgacccctaccgatcctcgcctgctgcagccatggcgacctccgcggcgctctccaccgccgccaatcccacccagctctaccggtcccgcgcttcgctgggcaagccggtgaaggggcttggcctgagcatgggccgcgagcgcgcccagcggagcattgtgtgccaggcggcgagcagcatctccgccgaccgcgtccccgacatggagaagcggaagctgatgaacctcctcctcctcggcgccatctcgttgcccaccgtcggcatggtcgtcccctacggcgccttcttcgtccctgccggctccgggaacgccggcggcgggacctacgcgaaggacaagctgggcaacgacatcacgggtggagggtggctcaacacgca

SEQ ID NO: 15745 - DNA, 425 bp, Zea mays
  Clone ID: LIB83-002-Q1-E1-H6
agacgactacaagcacatgacggacgcgatgtgccgtgtgtatagcaacgcgcccagggaattcaccatcatcgacaggggcaggaggaactccgtttgcttgcacaggaaggggttcgaggagctgtacgtcttcagcccgggatcccagtaccagtggtacggcaagtatgcctacgtggtcgtagggcctgccatgctggagcctgtgatgctggagcccggagacacgtggcggggggctcagtacctgcgcaaccccaatctttaggcatgctagcagctgggagaattgatgaccctggacacatcacatgttcccgtacgtgtattcagatcatcagatgaggtcaggcgagatgcaaaattggcaaccacaatggtctacagatgttggaaatgctgtccatagcgaaatgctgatg

SEQ ID NO: 15746 - DNA, 402 bp, Zea mays
  Clone ID: LIB83-002-Q1-E1-H7
aggacgcgtgggcggacgcgtgggcgccgagcggctcccaggacatgaagtgtgtggggatgcagtaccttgaagccattcgccgtctccgttctgcaggatttgttccagatcgaaatatctatataacatttgttcctgacgaggagattggtgggcatggcggtgttgaaccatttgtttcatccaaggagttcaaagatatgaacgtggcattagtccttgatgaagggcttgcctctccaggggaggagtaccgtgtgttctatgcagagcgtagcccttggtggcttactataaaagcaacgggcgcaccagggcacggtgcgaagttgtatgatggtagtgcaatggagaatttgatgaagagcgtggaggctattaggagattcagggcatcac

SEQ ID NO: 15747 - DNA, 341 bp, Zea mays
  Clone ID: LIB83-002-Q1-E1-H8
accacgcgtccgcggacgcgtgggaaaaaaaaaaaaaaaaaaaaaaaaaaaaaaataaaaaaaaaaaaaaaaaaaaaaaaaaaaaaaaaaaaaaaaaaaaaaaataaaaaaaaaataaaaaataaaaaaaaaaaatataaaaaataaaaataaaaaaaaaaaaaaataaaaaaaaagggggggcctcttaaaggtttcaaatttaatttacccttgtttggaatttataattttttaaagggtttccccaatttttatttaaggggctttttttttaaaatttgcgtaggggaaaaacctttgttttaccaagtttaatccctttaaagaatacccccttt

SEQ ID NO: 15748 - DNA, 427 bp, Zea mays
  Clone ID: LIB83-002-Q1-E1-H9
agagatcctcgcagttgacactccttcagaaggaggcgacgctgttattgtcagtagcagtgacaattctacatctactccttcagctgtctcgtggcgagcccggttcgttgggcaaggttacaagcaggtttgtgggcgagcggatgtgtggggcgacggcgttgttcctgagatggcagcgcatctggagggagcgctgaacgtaagctttgacggtgtgtaccactctccggtaggttccgatgatgaacaaaggccctggtatggctctccggcgatcctcaagcagtgggtgcatcatcttctcagctgagatagtgacatacaagaggagctagctgccggaacagacagaaactgggatgtgtcctgcagctgacatgacaccattggccaccaaagggcaaaggggaattttctctct

SEQ ID NO: 15749 - DNA, 416 bp, Zea mays
  unsure (1)..(416): unsure at all n locations; Clone ID: LIB83-003-Q1-E1-A1
cactagcgccacagtaatcgagagtgctttcccaggtcgaggtggtgtaggtgtttggcggagcagtcggggcgttggaatctgaggaggagaagatggtggtgctggtggtggccacgacgtcagacccggcgtccattgggcccgccgccgccttcctcgccatgcccggatggtcccccggcccgcccatcgccgaggcgatggagagttttactaatgggaatgttcgattactgaagcatgagcgtagcattgtcgcagaggatgatcttgaccagcgatggcaggaagccactggagagtctgtttctgaggtcatattcctcagcanacacactgcagtctccanacgtccagcactcacagtgcatccaattggtgtggcacatctgaaggaggatggaaacccaccc

SEQ ID NO: 15750 - DNA, 411 bp, Zea mays
  Clone ID: LIB83-003-Q1-E1-A10
ctaaatgtggactaaagcagttccaaggatcacttctgaacgaaagcagaagatcaaaagttggagtgcatactgcttcacctggtatggtcctcacagaccttctgttaagtggttcatcgctcagaaataaacagatgttcaatttaatatgtgaacttccagaaacagtagccagaactttggttccaaggatgagagttgtaaaaggaagtggaaaggcaatcaactacttaacaccaccaaggatcttgcttgctctggttactgcatgggttcgacggggtcgatggtttgacgacgagggaagagcggtgtatgcagctgaagctgatagaattcgcaactgggctgaaagtcgagcacgcttctcgttcaccgacgccatggagatgtacacggaaaacacat

SEQ ID NO: 15751 - DNA, 214 bp, Zea mays
  Clone ID: LIB83-003-Q1-E1-A12
gtctccacagcaaccagcacacatttccctttggcggatcgaaggaaggaaggaaggaagagatggctggaggcacgtccgtacacatcggtcggtggatcaatgagtggcacgccgggagagacaccatctcattcactttcggctggacccgacacacgctgtcctccgtctggttcgtctggctctctgtatccacctacatctagacagc

SEQ ID NO: 15752 - DNA, 415 bp, Zea mays
  Clone ID: LIB83-003-Q1-E1-A2
gacttgtttcattgattcttgaagagatcgagcttcttttgcaccacaaggtcgaggatgtcttgcaactgcggatcaagctgcggctgcggctcaagctgcaagtgcggcaagaagtaccctgacctggaggagacgagcaccgccgcgcaggccaccgtcgtcctcggcgtggccccggagaagaaggccgcgcccgagttcgtcgaggccgcggcggagtccggcgaggccgcccacggctgcagctgcggtggcaactgcaagtgcgacccctgcaactgctgatcacatcgatcgacgaccatggatatgattattatctatctaccttgtggtggtggttgaacaataataagcgacgccgatctggctgccatacataggtattgtgtggtgtgtgtgagagagagag

SEQ ID NO: 15753 - DNA, 421 bp, Zea mays
  unsure (1)..(421): unsure at all n locations; Clone ID: LIB83-003-Q1-E1-A3
gtccacggatccatccgaccttttgaggtgttgccctcacttaagaggttgaagaaacgaattattgcagctggccgggatgattatagtgctgtttttatgtcaggaagtggaagcacaattgttggtattggttcaccggatcctcctgcattcgtgtatgacgatgaagactacaaggatgtttttgtgtcagaggcttgcttgctcactcgcgacgagaacgagtggtacagggaaccaatctcggccaatgccacgtctggcaaagaaggtttgcaagcctcggttgctgactgatttaagtcaggttctgtatcagttttgtgactattatacagatacaggatttgatcaacgcctcgacatggtangaaagaacactacggtataggcggggattgttcacaagacaatctgg

SEQ ID NO: 15754 - DNA, 301 bp, Zea mays
  Clone ID: LIB83-003-Q1-E1-A4
cccacgcgtccgatgcgaaatggttcttcgagttttgtcgctttagatactcaaatcactcgacgaaggccacacattctttctgttcataaaaggtcttgtacatgagattgcatacaccgttgttataactttacccccaatagacttgtaaatgcttgtgcagtaactcttatattacttttgcttcaacattgtaagatagaagacttgccaaaataaaatctgaaccttgggtccaatattccatgtaaacacgagcatgtttcttgatcaatcaaaatctcaagcatttttgttg

SEQ ID NO: 15755 - DNA, 371 bp, Zea mays
  Clone ID: LIB83-003-Q1-E1-A5
accacgcgtccgaaaaaaaaaaaaaaaaaaaaaaaaaaataaaaaaaaaaaaaaaaaaaaaaaaaaaaaaaaaaaaaaaaaaaaaaaaaaaaaaaaaaaaaaaaaaaaaaaaaaaaaaaaaaaaaaaaaaaaaacaaaaaaaaaaaaaaagggggggccccccaaagggttcaagcttaacttacccgtaaatgaaacttaaaacccttccaaagggtcccccaaatttaatttcaggggcgttcttttaaaaacttcgtaatgggaaaaccccggggttacccaatttaaacccctttgaaaaaaacccccttttcgcaaatgggcttaaaacgaaaagggcccgacccattccctcttccaaaaatttg

SEQ ID NO: 15756 - DNA, 402 bp, Zea mays
  Clone ID: LIB83-003-Q1-E1-A6
cacacgcgtccgcggacgcgtgggcggacgcgtgggcggacgcgtgggcctatatagcccttgatccgagcttttactctagatcttcaggacagacatcatcatcagttccatccagggaacctaatactaatatagggtcaaaatatcctcaaaatgatattgggaatgaggagcttgatgagcgccagaacaagcctataagatactcagagatgaacttcaaccagtgaagcatcttgtaaggtgaactgcatctgaataagctggttatggtaatgcacggttttgccgcgtctggaaatgtcaaaattgttgccgcgtctcaagacctggaccggtgctgaagagagcttgataataatggttttcgttgggtgacaaagtttaagagtttttttt

SEQ ID NO: 15757 - DNA, 430 bp, Zea mays
  Clone ID: LIB83-003-Q1-E1-A7
tacagacacttgggttagccatatctcagcatatggatggtgtcgaggtggcccgggcgcatacctagctcagacaaggcgactcggctgctcaagtttgctgcaaatgtgtgcttgactggagcttttctgatgctgtttgccttgcttgatgaaaaggcactggcctatcgtctctttggtttggatgagattattgatcctagtcaactcaaatatcttccggctgttcacttcagtacagcggtagccctgtatttctttcggaagcatcttgctggtgcgttggcaaatttaggggaggagctagggaatctcctatccctccttattgctgcttctccaacagagaagcaagggagaaagagaaggaggaagaagaagacagcaagtacagatgtgagaagacgtcgataatgaagagcagcta

SEQ ID NO: 15758 - DNA, 434 bp, Zea mays
  Clone ID: LIB83-003-Q1-E1-A8
cccacgcgtccggccacccccaatagcagcaataccttctccaaaattggcaccgtccccagttcacacaaaatcagttggtagcaaaacagattataacgaagataatgccagtggtgagacacaacccttcagaggtcaaggtgacgccactgaccaacaaactgatagataccagacctcaggtacattggatgctcttagggaaaggatgaaaagcattcaagttgcagctataggtcattttgacggagctcaggctcggccgttggcaagtatgaacggaagtaatatgctgcatgggggaacacgattggacggtgagccccagcaacaaagtaatattccacccatggatgagcgagctctctctgggctacaagcacgaatggagaggctaaagagcgggtctatggaattactatagattgata

SEQ ID NO: 15759 - DNA, 353 bp, Zea mays
  Clone ID: LIB83-003-Q1-E1-A9
ttctccaaaattggcaccgtccccagttcacacaacatcagttggtagcaaaacagattataacgaagataatgccagtggtgagacacaacccttcagaggtcaaggtgacgccactgaccaacaaactgatagataccagacctcaggtacattggatgctcttagggaaaggatgaaaagcattcaagttgcagctataggtcattttgacggatctcaggctcggccgttggcaagtatgaacggaagtaatatgctgcatgggggaacacgattggacggtgagccccagcaacaaagtaatattccacccatggatgagcgagctctctctgggctacaagcacgaa

SEQ ID NO: 15760 - DNA, 415 bp, Zea mays
  Clone ID: LIB83-003-Q1-E1-B1
gatgcggccaatacataggacgcggggccgcctgcgcgcgcgtgcgcgcggccaaggcgccaagccgagagcgggcggacgcgctgagctcgctgggcgtggccatggcggaaataaattctacaggatacagggaaaatggcgacggccatggcgatgagctgagtcaagcgcgcgcgagcgggaagatggcgatgggcgagcgccgagggacgcgggaagagtgcaacgatttccgcgcgaagatggtagtgggtaggtacgcacgagttagaactcctgtttcttgcacgatgtagcagcaagcaaaaaaaaaaaaaaaaaacaaaacggaagaaatcgaagagagccagcgggcgggcggattggattcggaacatcatgtggttgcggatcgccagagcgacaggggaac

SEQ ID NO: 15761 - DNA, 409 bp, Zea mays
  Clone ID: LIB83-003-Q1-E1-B10
cccacgcgtccgacattacatgctcgggttatctcttgtcaacagccaaagattatcagaaggaataaaatcactggagaagtccttggagcttggaaggggtgcacatcctgcaagctacatggttgaagagatatggcaggagctttctaaagcaaaatacatcgaatgggagagcttatcaagagaccgaacttgtcaactgcaaaagctgaaggtagcatgtaaagaggccctaacgagttacaacagccttgataacccagccgcaggtgcgccagtagaacagctaaatgagctcgaggaagttttcaagaaggctgcaaagactgatactccagcagaagtacctgaccatctcggttgcaaaatcacacttgatatcttcagagacccggtgatcacccga

SEQ ID NO: 15762 - DNA, 426 bp, Zea mays
  unsure (1)..(426): unsure at all n locations; Clone ID: LIB83-003-Q1-E1-B11
ggaaagcactcagtctcggcctgtaggattttggcagggtttctctcaactgttgaacaaccaaggcaatacaagggagccatcccctaatttacagaatactaatggaactttgcgcaaagaagaagcaaatgaggatgccaaatgattcagacccctaccattgtttcggggacaatttatcagtagatcacggcgttacaatttaccagatagtcccagggctttgtttctttgccctcacatctgctgtaaaaattataactttggccacagacaaactgcataactttgtacataaactgaatgcttcctaaatatttgttcccttatatagttatatgtgaattgtatgaagctcaaggaaagatgtttcattccacagaatgtgatagttgaaagcatctgcatttcanaaagataaaa

SEQ ID NO: 15763 - DNA, 430 bp, Zea mays
  Clone ID: LIB83-003-Q1-E1-B2
aaagaagctagcgcttatagcttgtcagccatggccaccgccgccgcgtctagcctcctcaagtcctccttcgcgggctcccggctcccggccgccacgcggaccacaccggcgtccctcgtggtggccaccggcccgcgcggcgccggcgcggggcccatctgcgcgtccatgtccatgtcctcctccaacccgccctacgacctgacgtccttccggttcagccccatcaaggagtccatcgtgtcccgcgagatgacccgtcgctacatgacggacatgatcacctacgccgacaccgacgtcgtcatcgtgggcgccggctccgcggggctgtcctgcgcgtacgagctctccaaggaccccgccgtgagcatcgccatcgtggagcagtcggtgtcgccgggcggcggcgcgtggctgggcgggc

SEQ ID NO: 15764 - DNA, 407 bp, Zea mays
  Clone ID: LIB83-003-Q1-E1-B3
gtccagggtccacgcacgcgtccggacttcggccccccatctcgagcccttcgcccaaatcctcaatccgaacaaaccccaaggagcacaaaaatttcgaatccatcggaaatccggcatggcaatgtcagatctcacagccaccgtgattccgaagccagacggggccgacgacgagtcggtggagatccgggaggtgtgggcggacaacctggaggaggagttcgcgctgatccgcgacatcgtcgacgagtacccgttcgtcgcgatggacacggagttcccgggcatcgtctgccgccccgtaggcgccttccgctcccccgccgactacaactacgccaccctcaaggccaacgtcgacatgctgcacctcatccagctcgggctcaccttctccgggccgc

SEQ ID NO: 15765 - DNA, 446 bp, Zea mays
  Clone ID: LIB83-003-Q1-E1-B4
gtccacacacgcgtccggacagttcctgcacactcgttctgagcactggaactggtgtcaatggcttcacgctccgacccttcaacttggggagttcataactaacccatccagacatcaaagataactaaagaaggggaagatctattcagtcaaccaagggaacgccaagaactgggacgcgcctgttgccaagtttgtggagaagtgcaagtaccccaaagatggctcgccaccaagatctttgagatacattggaagtatggttgctgacgtgcaccgtaccttgctatacggcggtgtgtttttgtaccctgctgacgagaagaacccaaacggaaagctccgtatcctgtacgaagttttccccatgtcgttcccaatggagcaagcacgaagccagtccttcacaggcaaagaacgggctcttgatctgatcccaacca

SEQ ID NO: 15766 - DNA, 430 bp, Zea mays
  unsure (1)..(430): unsure at all n locations; Clone ID: LIB83-003-Q1-E1-B5
ccaacagcagcagcagtctcctcaggcaccacagcaatcacccacatcagcaggattcttccagtcatcagcaggcatggggttcttcccaccagtgcaggtgcaacattctccgtctgcccaacgccaatgactcaacggtggcatggcattcatcgggctataatggcagcactttgtgctaacttctgtacattaaccaataatcacctagcgtcgagcttatacgtggctgatcctgcaagagaggcgcaggaccgttgtcacggttagaaaaaaaaactgtagaataggcttttgtgatgactctcgttttggtcagagttgtttaactcttccttgttctgtgtagtagttagatgttgtgtctctgtcncccgtttgctttgatctcctgaggcaaaagaaagtggcactgaaattgttgccc

SEQ ID NO: 15767 - DNA, 275 bp, Zea mays
  Clone ID: LIB83-003-Q1-E1-B6
cagacgcgtgggccgagctgaaaggccgagactcgaagacagttcgtgtgatgcgttcttaatcgactgagggctaaggaatgtgacgtactggtatatgtacattagttgaagcggaggctataaagggtgtagagattgtttcatcagtatatatcatctgtcccgatgggttttgttttgtgcttttcacggttcatcattgtggaagcacatgtattattagtacaagaactgctagtagatatataggcttataattaagcacgacttct

SEQ ID NO: 15768 - DNA, 409 bp, Zea mays
  unsure (1)..(409): unsure at all n locations; Clone ID: LIB83-003-Q1-E1-B7
ctgcttcttatccaagcggacctccaacaacatttcatcagcctgtatcacctgttcaatatcagcctgttgctccaccagtatcttcttttggtccgagcgctcctgtaccagcaacagtccctacccagatgtttccccattctgctgctgctaactcaacttcaaggttcatgccatcgaacaatcaaagctttgctccgaggccaggtctaagtcccgcacagccctcaagtccaacacaggtgcaggcacagccagctcctcctgcaccgcccccgactgtgcagacagctgatacgacaaaagtgtctgctgagttgagacctgttattggtacactaactagactattcgatgagacgtccaaagctctgggaggatcacaagctactcaagcanaaaagcg

SEQ ID NO: 15769 - DNA, 425 bp, Zea mays
  Clone ID: LIB83-003-Q1-E1-B8
cagtaggagagatcccaggtggtgtaattacaatgcatgtggtagtgcggcctccacaagctgacaaaaacagtgagaagcagcttgccaattcccccaagcagaacagatgtggatgcaccattctctgataaggcgtctgcttggtgctgtacaatctgtgtgtacacataagattttgtatgtgctttgctgtgttcacacaagcatggattcgttttgatatccaattcttgaagccatacaaattccagaagtaagaacccacggaatacgaagatttctggatcgttttgttctagagtgtaggattggatgcttcctgctgtataaattgtgttgtcaaaactgaaaaaaaagtctctttcttttctgctatattgacttattatcgattctttctagctcggttgcttttgattcgt

SEQ ID NO: 15770 - DNA, 441 bp, Zea mays
  Clone ID: LIB83-003-Q1-E1-B9
ggggccacccaagcgtccggcgactacggctgggacaccgcggggctgtcggcggacccggagacgttcgccaagaaccgggagctggaggtgatccactcccgctgggccatgctgggcgcgctcggctgcgtcttccccgagctgctcgcccgcaacggcgtcaagttcggcgaggccgtgtggttcaaggccggctcccagatcttcagcgagggcgggctggactacctcgggaacccgagcctcatccacgcgcagagcatccttgctatctgggcctgccaggtcgtgctcatgggcgccgtcgagggctaccgcatcgccggcggcccgctcggcgaggtcgtcgacccgctctaccccggcggcagcttcgacctgctcggcctcgccgacgaccccgaggccttcgccgagctcaaggtcaaggagctcaag

SEQ ID NO: 15771 - DNA, 414 bp, Zea mays
  Clone ID: LIB83-003-Q1-E1-C1
cgctcatcttgctccgccttccgcgcatcctccaaggatcgtgatggccatggccacgcaagcctccgcggccacgcgccacctggtggccgccgccgcttccgcctgggcgccgtcggcgaagccgcggcagctaagctcacagctcgcgctgccgccgtcgtcctcccgcgcgccggccccgctccgcgcgaccgccggggaggcggtgaccgaggaggcgcccaaggggttcgtggccccgcagctggaccccagcacgccgtccccgatcttcggcggcagcacgggcgggctgctccgcaaggcgcaggtggaggagttctacgtcatcacgtgggtgtcccccaaggagcaggtgttcgagatgcccaccggcggcgccgccatcatgccggaggggccaacctcctg

SEQ ID NO: 15772 - DNA, 416 bp, Zea mays
  Clone ID: LIB83-003-Q1-E1-C10
gtcgaggccatctcggagggcgtgcccatggtctgctgcccgcggcacggggaccagttcggcaacatgaggtacgtgtgcgacgtgtggaaggtaggcacggagctcgtgggggaacagctggagagaggccaggtcaaggccgccatcgacaggctctttggcaccaaggaaggggaggagatcaaggagaggatgaaggaattcaagatcgctgcggccaaaggcatcggcatcggcgtcgacgtcgacgaaactgcgtcgccccgcacggatttaaccgatttggttgatctcataaaatccttctgagctcatgacgatcgatctgttgggtgatgcctactctgtccatcgtgatgtaccactgtctgtgctcacttccacgttcctgacggtgttgtgttctagtgtat

SEQ ID NO: 15773 - DNA, 431 bp, Zea mays
  Clone ID: LIB83-003-Q1-E1-C11
atccccttgcccacatctacagcccctctgctgcagcaagaaggaaagaagctagcgcttatagcttgtcagccatggccaccgccgccgcgtctagcctcctcaagtcctccttcgcgggctcccggctcccggccgccacgcggaccacaccggcgtccctcgtggtggccaccggcccgcgcggcgccggcgcggggcccatctgcgcgtccatgtccatgtcctcctccaacccgccctacgacctgacgtccttccggttcagccccatcaaggagtccatcgtgtcacgcgagatgacccgtcgctacatgacggacatgatcacctacgccgacaccgacgtcgtcatcgtgggcgccggctccgcggggctgtcttgcgcgtacgagctctccaaggaccccgccgtgagcatcgccatcgtg

SEQ ID NO: 15774 - DNA, 422 bp, Zea mays
  Clone ID: LIB83-003-Q1-E1-C12
gacaaaattggtgaagtagtggatggacctggtgaagctgctcaaggccaagttcatgatggtgttcggtatgattttgtttttaatgttgatattggagatggagaacccatacgaaaactaccctataatcgttcagatgacccatacacagtcgcggacaagtggctcctgaaagaaaatctgcctttgacatatcgccaacaggttgtagaatttatactgcagaattctggccagaacaactttgttccagatccatcttttcgggatccctatactggggccaatgcatatgtgcctgggcaaccatcatcatcatccaatggtaatactccggaaccaattttcaagcacataccgaagagtggaatgctgtcatttgagacagctcagtttgatggaatcctaaagaaagttgc

SEQ ID NO: 15775 - DNA, 210 bp, Zea mays
  Clone ID: LIB83-003-Q1-E1-C3
cagacgcgtgggcggacgcgtgggggtgatctgagtggtggtcttagtttatcatgtatcgctcgcagtttaatttagcggtttaggtgtggatctgtgaaccccatggcgcctctgcttgattcgtgtttcacctgttatgttctgagattcatgataatgctatgagaactgaaattcccgtttcatgcttcttaaatctttgacctc

SEQ ID NO: 15776 - DNA, 408 bp, Zea mays
  unsure (1)..(408): unsure at all n locations; Clone ID: LIB83-003-Q1-E1-C4
agggtttcttcggaggctttatttatcgtttatccacggaacttccggggcccggcgggaacaacttgggcaatcaacctcacaagtcgtcggaaaaggagccgcgctcgccgccgtgctcgatgacagcccaaccatatttgacaagatcatcanaaaggaaataccttctactgtggtttacgaggacgagaaggtactggctttcagggacatcaaccctcaagctccaacacacattctcatcatcnccaaagtcaaggatggactaactggcctggcaaaggctgaagagaggcacatagagatacttggctatctcctctatgttgccaaggttgttgcgaagcaggaaggacttgaagatggctatcgcgttgtcatcaatgacggcccaggtggatgtca

SEQ ID NO: 15777 - DNA, 383 bp, Zea mays
  Clone ID: LIB83-003-Q1-E1-C5
ggacgctgaatctccccaagactttggctgcgaatctcgcttccggcacctggcagcagcgccgaccgctcctcttcttcaatgtgtcgcgcccttcctctgctcgctgtaaacagtcgacctccctcggctccctccttgcttctctctccctcagatttgtctgcgccgttggtgcttcgtcttgcccaaccgccctggcctctgctcgaattttgcagcgccgagctcccatgattcccatggtgctcgccctcaagctcgctctctggcgcccctgtgctcgacgcccagcggaggccccttccctgcgccgctctttctctcctggtgttttcttcctgctcgcgcctatctccctcgtgtgagcgcccaaccgtgct

SEQ ID NO: 15778 - DNA, 435 bp, Zea mays
  Clone ID: LIB83-003-Q1-E1-C6
accacgcgtccggagaagacaaacaagaagtttagtgttgccttagctaacactgaagcttctttgcacgcagtgatgaaagaacttgaaagggagaggaaatataaaggaagacttgagaagatctgcaacgagctcatcagaggcattgatgaggacaaagctgtggtgcaggcactgaagagggaaaccgagaaggcacaacaagagctccagaaagagcgtgaaatgcttcaacttgcagatgagtggcgtgaacaaagggttcagatgaagcttttagaagcacgggttcaatttgaggagaaaaatgcagctgttaatcagctgcgcgatgaactccaagcttatctggatactaagaaagagcaggaaccgttgaatgatccaatggaactgtcccatgcatctgaaattgggcgcactgcagctgat

SEQ ID NO: 15779 - DNA, 393 bp, Zea mays
  Clone ID: LIB83-003-Q1-E1-C7
gcgggctctgcgcggcgcacggcacgctggtggcctcgcggcagcgccgcagcggcggcggtggcatgattgggccaggcctcttccgcggcatcgttcggtccgccagcgcggcgaacatgtatagcgagtactcgtcgtcgggcgtgagcacggtgtcggactgcgacggctcgcctgaggcggcgacagggaggcatgagttgatccctccccaggtgctggtcccccactctatgaaatctttgacagcggcagccgtgcagccaccggcgaggagcagagagggaggggtggtcgctgtccccgaggggagggtgcacggcggtggtctgctgtcgttgcttggcgggagcttcaggaacgtcgacgtcgacaagctctgaaaatctg

SEQ ID NO: 15780 - DNA, 445 bp, Zea mays
  Clone ID: LIB83-003-Q1-E1-C8
gggtccacacacgcgtccaaaacgccgccgccgatccgcctcagcgcgtcgcccgccgccacatcctacagcgacctcatcgatcaccttcaactttcaatcatggcggacgtcgatgtcgaaccggaggttgccgccggcgctcccaagaagaggacgttccgcaagtacagctaccgcggcgtcgacctagatgcgcttctcgacatgtccacggacgacctcgtccagctcttccccgcgcgcgccaggagaaggttccagaggggtctgaagaggaagcccatggcactcatcaagaagctgcgcaaggcgaaaaaggatgctcctgctggtgagaagccagagccagtcaagacacatctccgtaacatgatcattgtccctgagatgattggaagcattgttggggtctacaacggcaagacgttcaaccaggttgaga

SEQ ID NO: 15781 - DNA, 433 bp, Zea mays
  Clone ID: LIB83-003-Q1-E1-D1
cacgccggggacagagagagagaccgacgcgccggcagatcccaagctcaccctagagggggaagagggcgaccgaaggcggcgatgggtttcatcatggacttcgcggagaatctgatcctccgtctgatggaggacccggacaagcgcgaccaggttcggcgggagcatgtctacaagatgaaggagcggtgcgagcgcactaaggcggcgtggagcctccctctgcgcccctacggcttctggaccttcgaccgcttcaactcgcagctctcctgggatccccagatcagccaggccgccggccgtcgggacccctacgacgacctcatcgcacgccactctggctcgccgccgtcttcctgaacacccgttccgatctttgcccagaaggtccacttgggcatcaataagaaactctttcccctcaaac

SEQ ID NO: 15782 - DNA, 419 bp, Zea mays
  unsure (1)..(419): unsure at all n locations; Clone ID: LIB83-003-Q1-E1-D10
agataacaagcggccccaccacaccgctgcagtcgccgtgctcgcgcatggagcttggaggcggagggcgaggcggcggcgaccgggtccggcggcagttgcagtcggtggggcggctggcagcgtatctcggcggcggtttcctcctcctctccgccacctcttccgtcgccgtccgcgccctccgcgccatctccgacgccaaccagaggaagttcgcgaagccgtgcggtgcctgcgaggggaagggcagctactcgtgcaggctctgcangggcagcgccaccatcgagtggtctccgatgcacgacccggtgttcgtgaatccgtgcctctgccctacctgcgatgggactcgggtgcagcgctgcttgaactgcctgggaaatggttacgcttgaagaagcgatgtcagtttc

SEQ ID NO: 15783 - DNA, 237 bp, Zea mays
  Clone ID: LIB83-003-Q1-E1-D11
acaacaccctgacgtgagtcgtattaaacatgaccactgcagtcgccttgatcatccacaggtcttcgttgccgggctccaggctcccggcagcaattctggccacactggcgttccctatgggggctagcagctcatctcgcggaggctctgtgcccatctgcgcctccacgtccatctccttctccaccctgcgttacgacgtgaactccttccggttcaacttcatcaaggagt

SEQ ID NO: 15784 - DNA, 449 bp, Zea mays
  unsure (1)..(449): unsure at all n locations; Clone ID: LIB83-003-Q1-E1-D2
cccacgcgtccggattctcacttctcacctccgcccgcctccggttgtcttctcaattcccaacgcagccagcagcgcaaggtccanaagcccaggacaagacgacggacctccgcgccccatcgatccgcgcggccctcccccaacgcgcgtgcgtccgcaactagcgtctgccgccggtcgctttcttccgcaccccccgacgcggcaaggagcccccccgccatgagggtccacccggccccgcggaagcgcaccatcgccgtgcaacgctgcgcctccgcggcggcgggcgcgctcggcgggaagaagctgcgccgcctgccgcacatattcgacaaggtgctggagctcccgttcgcggccgacgcggacgtgtccgtcgaggaggacgcggcggcgctgcggttcgtcgccgccgccgacgagttctccctcgcgggcgcccg

SEQ ID NO: 15785 - DNA, 405 bp, Zea mays
  Clone ID: LIB83-003-Q1-E1-D3
gtccgcacacgcgactggaactttgggtacagcagggatgatgtggggaagttcattcccgtctatcttgctcagggcatcctccaacatgaccccttcgaggtcctggaccagaggggagtgggcgagctggtgaagtttgctacagagaggggccgcaaagctaggcctaacttgaaggtgggcatttgtggagaacacggtggagagccttcctctgtggccttcttcgcgaaggctgggctggattacgtttcttgctcccctttcagggttccgattgctaggctagctgcagctcaggtgcttgtctgaggctgcctcctcattggcaaccggattgcctgctgctggtggatgtggtgatcaacagtattattacagagccatgctaggtgaacatta

SEQ ID NO: 15786 - DNA, 414 bp, Zea mays
  unsure (1)..(414): unsure at all n locations; Clone ID: LIB83-003-Q1-E1-D4
aaggccacctctacggagccggagggcgcgccgcccgcggctaaggggccaaangagangcccaacacgaagggagcaacgaacatggagaagtcggcgcangcagcggcggcggctcgcagaagcggaagaagaaggaggtcttcatctacggcaactacaggaactactatggctaccggattgatcgcaatgttggtgaagatcctcgccttgaggcgttcaagaaacagtggtttgaaaagaaggattgtctcgatattggatgcaaccagggtttggtaacgattggcttagccatgaaatttaaatgtcaaagcattcttggcgttgatattgattcaggtttaattgagactgctaagtggaatctgcgaaggataatgcggcaggataaggtggctacaaacaacg

SEQ ID NO: 15787 - DNA, 180 bp, Zea mays
  Clone ID: LIB83-003-Q1-E1-D7
gacagatatgctgttggcctggtttggtgacagcggctagttttttctttcaaaataaatgctcacgccacatatactatactagccatttgattctggccattacaacataacgactatttgctctttggtatgatgctctatggccattacaacaaaacgactgaggatgtttggttc

SEQ ID NO: 15788 - DNA, 403 bp, Zea mays
  Clone ID: LIB83-003-Q1-E1-D9
cggacgcgtgggctcaccgtccgtccgtccagggagccatggcagcagcctgcatctgtctgcagctctctctcccaagcaaccattcttcctctgcatgtcctccagcatacaggaagcgtgtcgcgctagccccagggagaggaaaccgtcttctctgcactgcatctggcgcctcttcttctgtggtggtgaccaaggagcaggaggaaggatctcctgagcccgaaatctttagctacaaagacgaccccaacttcaggggctgcaagggctgcggcagggacgagcttcagaggggctgcaatggacaaggccggatccagggcggcatagccgccgtcccgggcttcggctggtggcccaatcaagcgtaccggccgtgccccggcttcgtcgcgtc

SEQ ID NO: 15789 - DNA, 388 bp, Zea mays
  Clone ID: LIB83-003-Q1-E1-E1
cggacgcgtggggccgaaacacacgaaccgacgtgaccagatcaaaagcaaggagggaggcagcaactgccaacggcgatgatggggcaggacggcgtcggcggaggggtgatcggggccctgctctacgccgcgctggcggtgctggcgctgcgtctggtgctgtcgtacaagtcggcggcgcacgcggtgcggcgggcgtggcggtgggcggacgagtgggcgcaggcgtaccagtactacgaggtgccgcgcctcgccgtcgacggcgcggagaacccgctgttccggaaggcggcggcgtacgtggcgtcgctgccgtcgctcgaggacgcggacgccgcctgcgtgctgtcgtcggcggccaagagcaacgacttcgcgctgc

SEQ ID NO: 15790 - DNA, 57 bp, Zea mays
  Clone ID: LIB83-003-Q1-E1-E10
agactaggcgtaagaccagatggttctattatcaggatgctatgtgatgtatttcac

SEQ ID NO: 15791 - DNA, 426 bp, Zea mays
  Clone ID: LIB83-003-Q1-E1-E11
atgatattgtctgatgcagttgcaaaagtacatatagtactctaatgctctaagtgtggctccagttgtgcacataacacaacatcatcaggatgtctttggttgattggaacttctcatccttgatgcaacttttgggcaagcttttattgcacataaattgcctctacctgttatggtcattagtggaaaactggctgttgtagttgcttcgtagactgaatatttaaaaagaagctaagatattagtcttcattttttttccaacgaagttacccatgtaggttggactgttgttgctgctggaaatttcacggttagatgaaaaaaaaaaaaaaaaagggcggccggacgacgcaagtccctactcctccaaaccctcgccgactcagatccagcttcctcgcaccgccgtcgccatgccgt

SEQ ID NO: 15792 - DNA, 374 bp, Zea mays
  Clone ID: LIB83-003-Q1-E1-E12
atcatttatttttgtcaggctagtcgatccaaataattccatactataacgtcttgtagtagttattttatgattgcttgtgccaaccttaaatttgctaacagtgccaaacttgacagagggcctatcgaagcatctcacaaactgtgttcactcaaaattgtctttcagccgattcctgcaatttcgggatccacgtgcccagaggcgacatccccttgttgatcccatggtcgtttcagagatccggcgatgcctcaacgaggggattgaattccaaggcgagctgctaaatttccggaaggatggcgctccactttacaacagattaagtctcattccaatgcacggggatgaaggctacgtgacacatg

SEQ ID NO: 15793 - DNA, 450 bp, Zea mays
  Clone ID: LIB83-003-Q1-E1-E2
tccacccgacccgtccggactcctgcctccgcggccgtgccgagccggcatccccttccgtcccccacccccagcagttgggcttcaaagaagttcatgactggatgtgtaattctcttccccatagcaataacgttctacatcacctggtggttcattcattttgttgatggattcttctctccaatctatgctcaactgggaatcaacatattcggtcttggctttgtcacatctgttactttcatatttttgatcggagtctttatgtcatcttggcttggggcatctgtccttagccttggcgagtggattattaagcgcatgcctcttgttcgtcatatctacaatgcatcgaagcaaattagtgctgcaatatcaccagatcagaacaaacaggcgttcaaggaagtggtcatcataaggcatcctcgtgttggagaatatgcg

SEQ ID NO: 15794 - DNA, 406 bp, Zea mays
  Clone ID: LIB83-003-Q1-E1-E3
cacacgcgtccggaaaacgcgagcgctgcggaacaacgatggcgacgatgtctcttgccgcggcgtcacccctcgcctccattccccgcggcatcgccgctcaggctccttgcgcggcattcctgtccatccgcttaggtggcgcgacggcgacgcggttcgctggactggcggtggcctcgcagccagcggagcgtcgcgccgcggcgatggtcacgatggcgaagagggagcaggagctggaggagatccgggccatgacgacggaacagatggaagaggaggtggtagacctcaagggggagcttttcctgctccgccttaagcgctcggcgcgccaggagttcaagaacagcgagttcagccgcatgcgcaagaggattgctcgtatgctaaccgtgaaaag

SEQ ID NO: 15795 - DNA, 88 bp, Zea mays
  Clone ID: LIB83-003-Q1-E1-E4
gtccgacacgcaactgcggactcgtgggctgacgcatcggcagacccgtgggttctcaaatcatgagttgtacggagggacttatgtc

SEQ ID NO: 15796 - DNA, 434 bp, Zea mays
  unsure (1)..(434): unsure at all n locations; Clone ID: LIB83-003-Q1-E1-E5
agcgagtgagtgaacaccagccgtattgtcccgaccccgaccgatcctcgcctgctgcagccatggcgacctccgcggcgctctccaccgccgccaatcccacccagctctaccggtcccgcgctttgctgggcaagccggtgaaggggcttggcctgagcatgggccgcgagcgcgcccagcggagcattgtgtgccaggcggcgagcagcatctccgccgaccgcgtccccgacatggagaagcggaagctgatgaacctcctcctcctcggcgccatctcgttgcccaccgtcggcatggtcgtcncctacggcgccttcttcgtcnctgccggctccgggaacgccggcggcgggacctacgcgaaggacaagctgggcaacgacatcacggtggaggcgtggctcaacacgcacgggtcccaacgacgc

SEQ ID NO: 15797 - DNA, 406 bp, Zea mays
  unsure (1)..(406): unsure at all n locations; Clone ID: LIB83-003-Q1-E1-E6
actaggctaggctgattgagcggcaactcgcgccgtgtgcccgtgtcgcaacgtgaaccttggggggcccggatgctcatcgattgggtacggggaagcggaggagctggggcccttcctggtgcagaagggcaagccggagctcagatggaacaactactcctggaacacagaggccaaccttatgttcctggagtccccggtgggcgtcgggttctcctacacaaacacgagctccgacctgctgcagctcggtgacaagatcaccgctgacgacgcttacaaattcctgctcaactggttcaagaggttcccgcagtacaagtcacacgatttctacatcgccggcgagagctacgccgggcactacgtcncgcagctgtcggagaagatcttcgacggcaac

SEQ ID NO: 15798 - DNA, 423 bp, Zea mays
  Clone ID: LIB83-003-Q1-E1-E7
aggacgcgtgggttttttttttgcaaaactgtctggagtcattcgtgtatacatcaaagtttacacttacacttgaaaatgagtaggccaagctccgtggcagaggaactgaggaaaaaggcagagtagcctatacaaaactgatgattttactagcaattacaacgcatcgcgaatcgctcagtaggtttctcgctcgtgctcagatggagctaggtctccgtggccggtggcggggcgccgggctggatggtcttgaaggactcgtgcaggcggcggagcatggcctcgtcgcggctccactcggcgttgggcgcggtgacgaagtgcgcgtacagcttgttccgtgcgcacgtcaccgatatgaggctgttcgcgctggcgcccgccacctcgtactcgtagtacacctggccggcgccg

SEQ ID NO: 15799 - DNA, 458 bp, Zea mays
  unsure (1)..(458): unsure at all n locations; Clone ID: LIB83-003-Q1-E1-E8
attcccgggcgcgctgttgtattcaccatcctctcctgcaagctggagggatcaccgctcgtggaggcgcagaatgataaattctcagcttccatggcgaatagggttttctgcagcagcaagtcgcaagattcgacccttcaacaacttacatcagatactacaatagaggttgcaattgatataccttttccatttcgagcaataccggttgaagccattgaatcaagtggcaggcaagtgcttgaacagttactcagagtcatgcttccaagatttctgaagcagcttgttaaagactaccaagcttgggcttctggcgatgcttctaggaaaccacttggcactggtgaaatctgaagctgcccagtgtctccattacgcatgatagtttgatcgtagaattcagttattgcnccgttgtgttgtatagcaatcctgccaaaacaatgggcatg

SEQ ID NO: 15800 - DNA, 65 bp, Zea mays
  Clone ID: LIB83-003-Q1-E1-E9
aaaaatccggttgccggtacacagcggtattaattcacctgtaactgaatggaataccgtgatgc

SEQ ID NO: 15801 - DNA, 397 bp, Zea mays
  Clone ID: LIB83-003-Q1-E1-F1
cacacgcaaccggtcaatgcaagcaaatatcttattgctggagggattgctggtgcagcatctcgtactgcaactgctcctctggatcgcctcaaagtgatcatgcaagtacaaacaacacgtacttcagtcatgcatgcaattaaagatatctggactaaaggtggcatgctgggattttttagagggaatggattgaatgttgtaaaagttgctccagaaagtgcaatcagattttatgcctatgaaatgttaaaagaatatattatgaagagaaaaggagaaaataagagtgaagttggtgcttctgaacgtctcattgctggtggtttagcaggtgcagtggctcaaacagcaatttatcctatagagttagtaaagactcgtctacagactt

SEQ ID NO: 15802 - DNA, 423 bp, Zea mays
  Clone ID: LIB83-003-Q1-E1-F10
accacgcgtccgggaaagtccaagcatcatagagttaccactgagcatggtgtcgaggcatcttccatgcatgacatcaaatctagtacttttggtggtactgacagtgggatggtctggcatataccaaaggctcatctaggtagtgtcacaaaggtaacgaccatcccaaataccagcttgttcttaaccggaagcaaagatggagatgtgaaactttgggatgctaaaaactcccagctagtctttcactgaaaaaaggtgtgccgttcatgcatctttgtccagtgaaagactagctggggctttggcggtgttgttagagctgctgtaacagatctccaggtgttgccaaaggtttcgtttcatgtggaggtgatggttctgtgaagcttgttcagataaaagatgatctcgctgcag

SEQ ID NO: 15803 - DNA, 422 bp, Zea mays
  Clone ID: LIB83-003-Q1-E1-F11
atcaacttcgcctcagcgcccaaccggcttggcaggaggctcgtggcccgggccgacaacgaggccgccgcagctgaggcggcggaaggggagggtgccgtggccaccaagcccaaggccgagaagccgccgccgatcgggcccaagaggggcgccaaggtgaagatccttaggagggagtcctactggtacaacgggatcggcaacgtcgtcaccgtcgatcaggatcccaacacccgctacccggtggttgtgcggttcaacaaggtgaactacgccggcgtgtccaccaacaactacgccttggacgaggtctcagaggtgaaatgagtggggccggccggctcaagggctccgcgctagctaccgtgtgattgatttgtagtagttgtgaaatgaggctgtgaagctgcatgctgtgc

SEQ ID NO: 15804 - DNA, 418 bp, Zea mays
  Clone ID: LIB83-003-Q1-E1-F12
aggaaaaatctccgcgtcaccaccaagcacgtccccgttccattacaacaaaagatcgtgctagtaagcaatacgctcaatttgagtttgaggtcgatttctggagcattcgagttcttttccagtaaacttttcaggtttaagcgcggattgatggcagagctgctgtagatttggagcattttggggttggttttttgcgatttgaggatcgaatcgggctggtacaaccgcgctcacgtgcatatataaggcgaattggcggtttgttggctacaattgttcggttcttatcttgaagggtggtgcgaattggaggattcttcccgaaatcaagaaagtgtaggccaaattcgcaaggaagctgcagctatccgcgtgagaaggctgcctctcacaaattctcggtcggtgccat

SEQ ID NO: 15805 - DNA, 436 bp, Zea mays
  unsure (1)..(436): unsure at all n locations; Clone ID: LIB83-003-Q1-E1-F2
gtccacccacccgtccgcggacgcatgggcggacgcgtgggtaagcggacagcctagtagtgtctgtgtcaaagatttcgagggtttatggccacattgttcatttgtctttgatggtggagtacttccttctgggcgtgctggttcaacaatcgttgatctaataacaccaggagtttacaagatattgagggatggaagctcaaggaaggaaacagcagcagtgctcggcaagttcggctttgttgaagcgttgtaactactcggcactttaagaaagtaagcacgatcaaagagtggctgtcttatccacattatatcttgtttaattagtgatacattagagcttttgttgctgtntgtgcttttcttttacatcttcaaacttattgtattattgcgaatgtgatgttgagtagaataacagagttcacat

SEQ ID NO: 15806 - DNA, 431 bp, Zea mays
  Clone ID: LIB83-003-Q1-E1-F3
cacgccgcatccgccgtcgacttccgtcgcccccctatcccgcgtccgggcttacccgatggcacggctgcactggcttgaggccgtcctgccgctggggatcatcggcggcatgctctgcatcatgggcaacgcccagtatttcatccacaaggccgcgcacggcaggccgaagcacatcgggaacgatatgtgggacgtcgccatggagcgccgcgacaagaagctcgtggaacaatcctccggcaactagggtattgatcaacctcaaacttttctggatgttgacgaacctccttcaaaagcacagaagtactgctcttttgtttcctgtacaattggaaccaagacttgtttgttttgctttgaaatatcaacagttcggagaataatctgtatctgacatctgtttaattgaacaaagccaaata

SEQ ID NO: 15807 - DNA, 413 bp, Zea mays
  unsure (1)..(413): unsure at all n locations; Clone ID: LIB83-003-Q1-E1-F4
cacccacccgtccgtattgaaagangatggtgccaggttcttggatgacaaggtcaagaaaatgaagatttggctgatggagttctcgaagcggacggctaatctggagattcaaggaattctgtgaatgttggtggcttttggttgaaggatttaatagctgcttcgcactctggtttttggagttactttctgcatcgagtgaatccagttcctgtttacgctggctgtctgagcttgcttggctgctggtgttcccagagatttataaaaacagggttttcctccgtcattccgccgcagctagtatataatagatggttcttggttgttcatgtactgtgtagctgtatataatagaaacattgcaggatcagtgagtaattctgtggccgagtaaagtgcagtggtgg

SEQ ID NO: 15808 - DNA, 426 bp, Zea mays
  Clone ID: LIB83-003-Q1-E1-F5
cagcgactcagcgagcgagagcagcacacacgcagctagctaggagcagcagcagagcagcggcgatggcggcctccatgatctcctcgtcagctctggcggtggcgcctcagggcctgccgcccctcggccgccgcgcctcctccttcgccgtcgtctgctccaagaagaagatcaagaccgacaagccctacgggattgggggtggcctgaccgtcgacgtcgacgccaacgggagaaagggcaagggcaagggcgtgtaccagttcgtcgacaagtacggcgcgaacgtcgacggatacagcccaatctacaacgaggatgactggtctcccaccggcgacgtctacgtcggtggaaccactgggcttctgatctgggccgtcaccctcgctgggatcctcggcggcggcgccctcctcgtct

SEQ ID NO: 15809 - DNA, 431 bp, Zea mays
  Clone ID: LIB83-003-Q1-E1-F6
aggacgcgtgggcggggtcgaagaggagcttggagcttggaccgacccgagccccaccgagcgagagagaggaaataatgggtgaagaggccagctgcaacgccgtcagcgcgatggaggccgccaccaacgccaggccggccaaggagaacggacgcgcgccggctgtggcggaggtagtggcccaggaggcggccactgacccccggctgcagggcatctccgacgccatccgcgtcgtgccgcacttccccaagcacggcatcatgttcaacgacatcaccacgctgctgctgcgccccagggtgttcaaggacgccgtcgacctgttcgtcgagcgctaccgcgggatgcgcatcgacgccgtcgccgggatcgaggccaggggcttcatatttggcccggcagtcgcattggctattggcgccaag

SEQ ID NO: 15810 - DNA, 436 bp, Zea mays
  Clone ID: LIB83-003-Q1-E1-F7
catgctcgtcgttcctgtgctgctgcttccttgtccctccgccgctcgggcttcctggggcgcgtcgtgctggccgcggtgccagtggccgtggacgccacccggcgccgccgcgtctccgtgtcggtgcggatggcctgggacggtccgctctcgtcggtgcgcctcatcatgcagagcaggaacgcgaagctgagcgagaagctcaaggagcacatcgaggacaaggtgggtcgggcggtgtccaagcactgccacctggtccgggaggtagacgtgcgcctctccgcgcgcggcggcgagctcggccggggccccaagacgtcgcgctgcgagatcaccctcttcaccaagcgccatggcgtcctgcgcgccgaggaggacgccgagtccacctacgccagcatcgacctcgccgccgccatcgtcaagcgca

SEQ ID NO: 15811 - DNA, 202 bp, Zea mays
  Clone ID: LIB83-003-Q1-E1-F8
agcaaagagcttttgccagtcgtaggaatgggcgactctgtggttcgttctgtgttttcagcttcttctcgcttgctattgtcttcatggttcctgcagggtaggtaggtgctgttggatgtgtagatcatgtagaggttggaggttgctaccgatgcagaattcgtggagatttcctattttattgaactgtctttagagc

SEQ ID NO: 15812 - DNA, 285 bp, Zea mays
  Clone ID: LIB83-003-Q1-E1-F9
aggacgcgtgggcgagttttgtacacgatgcaagcaagacgccggtgtcgccgccaccgtacattgatccatacgagctactggaggacgagaggctcagccggccctccccagatgtgttctgaacatgaacagtgcaagaaccagtgcataattgattacaagaaatagtcatacatagcccaaaacttatcttttttactagacgtatagttgtaaatgcaactataaccatagactgttataatcacttaatcagaagttttagcacgtagtattccatcc

SEQ ID NO: 15813 - DNA, 284 bp, Zea mays
  Clone ID: LIB83-003-Q1-E1-G1
gattggttagcagccaagccaggctattagtacgaagaatgtcgtctataaacatgtgttcctacgttgccacatgctgagtcaatctgtatacagctagctctaggtggtcagctgcgtctaccacaatgagcatacatgtatggataaatcttctgtgaaagcattcgatgaataagggttgttttcgtgattcaaaaaaaaaaaaaaaaaaaagaagaaataaaaaaaacaaggaaagaaaaaaaaaggaaagagaaaaaaagaacagatgaggacaagag

SEQ ID NO: 15814 - DNA, 428 bp, Zea mays
  unsure (1)..(428): unsure at all n locations; Clone ID: LIB83-003-Q1-E1-G10
aaaactccacatacagccaccccagctgcgccttcagccacttatgacaaccaggtctgtcctatctgcctcgtgaaccccaaggacatggcgtttggttgtggacaccagacctgctgtgactgcggacagatcctggagtcgtgcccaatctgtcgcactcccatcaccacaaggataaaactatactaccaagtagtggtttggatcattgacaatgggtggtatactggaggagccacccagcgtcacactggaggatcgtgtcagcatgtccatagatcgattgcaatcggaaagctggagcggcactccatagatcgatcgattggatctaatgattgcanggacaaagcatggatcaattggagcgacgattgcagggccgttgattcatcgctcatggttgtcccagtattcatatccac

SEQ ID NO: 15815 - DNA, 407 bp, Zea mays
  Clone ID: LIB83-003-Q1-E1-G12
atctccggttccctcctctcggcggcggctcaggtccctctccatctccggcgtggcgcttggcgtctgacctcaacaagcaagaaagcaaatggcacgcggcagggttgcgcatgccaccctcaagggcccgagtgtggtgaacgagatcttcattggactgaccctgggtctgatcgcgggaggcatgtggaagatgcaccactggaacgagcagaggaagactaggtccttctatgacatgcttgacaagggccagatcagcgttgtcgtcgaagagtaaagagttcttcccagttattttcaaagaactctctcgagagcatgacaaagtgattgcttgctgtggagatttgtcctggaaataagcacaaccatttgggaacaccagattttgtcgaattttc

SEQ ID NO: 15816 - DNA, 438 bp, Zea mays
  Clone ID: LIB83-003-Q1-E1-G3
ccacgcgtccgcaaagtgtgaatgatctactaaggcttgtgcgaatttcaatggagtccatcagctgctgacgtgttcagaatctgagaaagtgccaccgttggaagttcctgttggatgtttaatccaattaacttttcttgatgaagtagcatgaaactgaatagttcaacagtgaacagtgtaaaagcataggtcttctcatttgagcttgctggtcaatttgtacagagactgatcgtggaattcttccttctttcttattttgatggcacccagttagtatacaaagttgcatatccacttggatgatttagttagtgaggccacaggttaagatgagctttgcactgctcaatgctcgtaatagttttgaggaagaaggatgctcttgcgcatgcagttgatgattcatttgagcagtgcaaaatggtgtgt

SEQ ID NO: 15817 - DNA, 432 bp, Zea mays
  Clone ID: LIB83-003-Q1-E1-G4
gtccgcagacgcatgggcggagcgcgtggtgcacgcgcgcggggcctccgccaagggcttcttcgagtgcacccacgacgtgacgtcgctgacgtgcgccgacttcctgcgcgcgcccggcgtgcggacgcccgtgatcgtgcgcttctcgacggtgatccacgagcgggggtccccggagacgatccgcgacccgcgcgggttcgccgtgaagttctacacccgcgagggcaactgggacctgctgggcaacaacttccccgtcttcttcatccgcgacggcatcaagttccccgacgtgatccacgcgttcaagcccaacccgcggtcgcacgtgcaggagtactggcgcgtgttcgacttcctgtcgcacctccccgagagcctgcacaccttcttcttcctcttcgacgacgtgggcgtgccgtccga

SEQ ID NO: 15818 - DNA, 424 bp, Zea mays
  Clone ID: LIB83-003-Q1-E1-G5
agcgccgccgccgccgccgccgtgacggaaggaagaggaggagcaaggagcacgacgcgatgggccactccaacgtgtggaactcgcaccctaagaactacggccctggctcccgcgtctgccgggtctgcgcgaaccctcacggtctgatcaggaagtacgggctcatgtgctgcaggcagtgcttccgcagcaacgccaaggacattggtttcatcaagtaccgttgaagaggccactgtgctgctgtggagaacttcctacatcaaagaaatgggtccttcattagaaggcctaatttatgcgctttagctttttgttcagaacttgagactcatgtgttaaactcgacttgttaaagttttgatggctactttgtgcttgttggaccagctataatcagaagattgaaattttctcactc

SEQ ID NO: 15819 - DNA, 431 bp, Zea mays
  Clone ID: LIB83-003-Q1-E1-G6
aggacgcgtggggccaatttattggctaattcgaattagtatgtagaattcgtataattataactgttgaagccttaaattcaagtctcttggctcttttcacgctttctcacaaacagattacgaaatatattgcattatttgttaaagtttggataaaccattgcttcgtctggtgtctacaatacatctaatttatatagtactaatttcatttttaccagatcgaaaatttttatgttgaaaaggaaaatttagagatccaatgtcacattctgtaaaaatttatgatacatgtataggatgcactcaatgtgtacgagcttgcccaacagatgtattagaaatgataccttgggatggatgtaaagccaagcaaattgcttccgcgccgagaaccgaagattgtgtgggttgtaagagatgcgaat

SEQ ID NO: 15820 - DNA, 394 bp, Zea mays
  Clone ID: LIB83-003-Q1-E1-G7
aagctcaagtgttactcggggaagagggaaaaacaaaaggatctggacttattatgaggatgaggagttaattaaagcactatatgagatatctttagatccaaagtggaaaagtgagggaggttttaagaatgggtattgttctgttctagaaaatgaactcaaagcaaggctaccagggtgtggtctcagtgctattccacacattgagtctagagtgaggcattttaggaccaagtatggttctattgaggtcatgcttgctaagagtggttttaatcagatgacgatgcttttcgcgcttcctgagactcttaggagagaattcatcctgaacatgattgcagatgaagctcaaaggaagtgacttgtcaaattatcaatgaagaatgtc

SEQ ID NO: 15821 - DNA, 88 bp, Zea mays
  Clone ID: LIB83-003-Q1-E1-G8
aaaatatttcgaattgaagtaaggtcccaaatctgagggcatactgttgcttctctgctggaataaatgtgctccttgttcatggaac

SEQ ID NO: 15822 - DNA, 427 bp, Zea mays
  Clone ID: LIB83-003-Q1-E1-G9
agcgtacacccgtacaccgtacgcagccatggcatcagtaggcttcggcacggtcgcgccggccgtggcatcatcgccggcggccaggacgacgagcgtgggccgcccctccgcggtgcacgtccctgcggcgacgaccaaggtcgtcgcggcggcggcgggtaagcgggtggaggagaagggcctgttcgacaccatcttcggcgcgctgtacaaggaggagcagctgctggagacggaccccgtcctgaacaaggtggggagcaagggcaaggccgccgccgccccggcgcccaagaaagccgctgaagagggcggcaacggcgggctcagcctcggcgggttcttctccaggcccaagaaagggtgaacgtacgtacgttatgtagctccgactccgagtgaggatcgttttgcgctgctcctg

SEQ ID NO: 15823 - DNA, 411 bp, Zea mays
  Clone ID: LIB83-003-Q1-E1-H1
cggacgcatgggcggacgcgtggggttttatgtttaatacttaacacagaaaaacttgtcaagctattcactgataaagcaagatcttgcaaaggctgtgccagaggagcacaagaggtttctgcatgatttggtttggatacatgaagaggaaaatgtgccaattgatatggatggaggacaaatcatctgcaatctgattgctgtccatgctggcctagagaggactatagatttgaatgagcaacttagagttttaagaactagagacacaagggtgccaaaggttcaaatgcttagtgggaggcaagatgtttgggacacacccaagggtctggccggcaagcagactattattgtaagtggccaccacgggaagctccacatcgacggcctccgatttataatcga

SEQ ID NO: 15824 - DNA, 225 bp, Zea mays
  Clone ID: LIB83-003-Q1-E1-H10
ccttcaatgcaacttcaaaccccttcaaaattttccccaaatttcatttcactgcccttctttttaaaacttcttaactggaaaaaccctggctttacccaatttaacccccttgcaaaaaatccccttttcccaaattggcttaataccaaaaaggcccccaccttttccctttccaaaaatttgcccaccctaattggcaaatggaaccccccttttaccggc

SEQ ID NO: 15825 - DNA, 419 bp, Zea mays
  Clone ID: LIB83-003-Q1-E1-H11
acaagactctaaggtgagtcgtatgacccgcggcttcggcttcgttaccttctcctccgagaactccatgctcgacgctatcgagaacatgaacggcaaggagctcgacggccgtaacatcaccgttaaccaggcccagtcccgtggcggcggcggcggcggcggcggcggtggctacggcggcagtcacggtggcggcggctatggtggctggcgccgtgacggcggttatggcggtggtggcagctactgcggtcggcgcgacggtggtggctgcggctacggaggcggtggcggctaccgcggtcggcgcgagggtggtggtggcggctactgcggcggcggcggccgctggagggactgatgtgtggccccatcctggcttccgccgagttatcttatcgatctatagtatcgtg

SEQ ID NO: 15826 - DNA, 61 bp, Zea mays
  Clone ID: LIB83-003-Q1-E1-H12
cacacaagcgtctaaacatgacgtcctaataaaaaaaaaaaaaaacataaaagacaacacc

SEQ ID NO: 15827 - DNA, 174 bp, Zea mays
  Clone ID: LIB83-003-Q1-E1-H2
gtccggaaaattaaactattttacactccaatctgcctcaatacacatggattaaggtgaatataggagtatccaaacaagccctaaagttttttactcttaaccatattctacactcggctgtgtttattgtgatatgctgtgatctgcattctgggcagtgcttcatcattt

SEQ ID NO: 15828 - DNA, 444 bp, Zea mays
  Clone ID: LIB83-003-Q1-E1-H3
gtccggggctccagaactactattaggagcaaaggagtattcgactgctatcgatatgtggtcattaggttgcataatggcagaactcttgtcaaaagagccactcttcactgggaagtctgagatagatcaacttgagaagatatttagaatactcggcacacccaatgaggagcggtggcatggttgttccaaattgcctggcttcaaaggcaacttcgtaaagcgaccgtacaatagattaagggacaaatttccagctgtatccttcacgggaggcttgaccttgtcagaagctgggtttgacctgctaaataggttgctggcatatgaccctgagaagcgcatatctgctgctgatgccttgaaccatgagtggttccgtgaagttcctctgcccaagatgaaggaattcatgccaacttttcctgctctgaatgaaaa

SEQ ID NO: 15829 - DNA, 315 bp, Zea mays
  Clone ID: LIB83-003-Q1-E1-H4
atagtcggaaccattgttggggtcaacaacggaaaaactttcaacaaggttgaaataaaccctgaaatgatcggcaacaaccttgctgagttctcaatctcctataagccggtcaagcatggcaggcccggtatcggtgccacccactcctcgcggtttattcctctgaaatgagctgttacccgtctctgtagtctcccaagagtccgttggcaatgtccattcagcttttctacttgttttgaacaagttaaatgcccaagacattttgttttgttccattccagctcaagaattcaaagctaagcattgcac

SEQ ID NO: 15830 - DNA, 417 bp, Zea mays
  Clone ID: LIB83-003-Q1-E1-H5
agagcgcatcccatgcctcccctctcagcatcacagagcacaatcaccaccgttctgaagatccttccaaaacctcctgctgctccggagagcagaagcaataattgtgcttttggggccaaattcgacagtaggagggcacttctatgcggcttggtcgctgctgctgctgctgctggcaccatgctgggcgctgacatcgctggtgctgcttcgaagaggcggcctccaccgccagcgccggcagaggcgaagaaagacccgaacgtcagcggagtgcaggctaaattgcttgctagcaggaagaggaaggaggcaatgaaggaagctgtggccaacctgaggaaaaaaggtaagccggttaataattgaaggccagaaccattgacccttgatcaagaaatgtaacttattgtt

SEQ ID NO: 15831 - DNA, 405 bp, Zea mays
  Clone ID: LIB83-003-Q1-E1-H6
aacagatagaggcactgatatccttgataattgcttggctaatctccatatcaactctggtatgctaaggttcgatgaagctaaagtctgtgtacgagaactggactggaaaatggcatggcctccacctgtgggtacatatgacccttctgatccaagtcggtatttatggtctgcaagtgaagttgaggaggctgagaaagcaacagtcctgtttgctgcagatgttatttacagtgatgatctcacaaatttgttcttcaacacggtgaagaaattgatgtcggtcggtgctaagaaggtgctatacttggccctggagaagagatacaacttcagtgtagacgaactagatgtcgtggccaatggttacacgcacttccgaagtttcttcacagcccaaga

SEQ ID NO: 15832 - DNA, 431 bp, Zea mays
  Clone ID: LIB83-003-Q1-E1-H7
aggacgcgtgggcggaaccggacgcgggaaaggggcgcgcgcgcggggacgccaggaggaggaacttcggcgtcgagatggatcaggcgccggccaatgcgggccggaacgggaacggagcgctcgcggacgcggagtcgaggaagaagtccgaggaggcggagggggacgcgaagcggaaggcggaggaggccgaggcgaggaggaagaaggaggaggaggagagggacgccgagctggctgcgtactaccaggaacagtgggcgaacgaggatgagggagctgccgacgctgccgcggccgagacggccccgctgtatgaggcgtcgggactacggtgcggtgtaaccgataaccccgggtggggtgagttcgctgctctcaaccttgttttgcttcatattccttattccattcagatgtactaacat

SEQ ID NO: 15833 - DNA, 400 bp, Zea mays
  Clone ID: LIB83-003-Q1-E1-H8
agtctttctcacgagccacaggcacaggcaggctctcgagctcagtccacccagcgcaggggatggcgtcgtcgttcgccgtggcaacggtcccgtcgctggcggccccggcggccaagaagcggtccggcggcgtcacgtacgtggagggcatgaacgcctacagcggcctcaaggggctcaacaaggtgaacatgctcggggtgcgcaagaccgccgactactccttcgccaaggtcgtggcgtcgctcagccccgcgggcaggaagcggcgcggcggcgcgttcggcgcccagatgaacgccgccgccgagatcttcaggatcgccgccaccatgaacggcctcgtgctcgtcggcgtcgccgtcgggttcgtgctgctccgggtggaggccgccgt

SEQ ID NO: 15834 - DNA, 407 bp, Zea mays
  Clone ID: LIB83-004-Q1-E1-A10
agatcttttactacccgtcacaaactttatgttcgtaagttccagtgtgagtactgcgccgaacataaagtttgtgacgggtagtaaaagatctatttttcttttgactttgacatagagttcgatcctcaattatttctcgcgctatcttcttacgaagttttgttagggcatctataacagcctctggtttaggcgggcaacccggcaggtagacgtccacaggaattaacttatcaactcctcgaacagtactataggaatctgtactgaacatgccccctgtaatagtacaggctcccatagcaatgacgtatttcggttcaggcatttgctcatataatcgcactaaagatggagccattttcattgttaccgtaccagctgttaaaattaggtccgcttgt

SEQ ID NO: 15835 - DNA, 386 bp, Zea mays
  Clone ID: LIB83-004-Q1-E1-A12
cacactagggcacgaggcaaatctgtggccctctcctagtctcctgaagtctgactcagccgtcgcacatcgcacgctcgctcgaattcgggttggggaggcactgagtcactgacgtcttcgcgttaggcggtgcccctttaccggctcttcatgtaaggtgtagtcaagctgctggccacacgcggtacccccctatccagtacacggccttcgccgagatccactacaaggtcgtctcgtcaaagatctgaccactacgctagtgacgacggaatagtgtgtggactaagtgcgggaggattagcgaggagaggccggtgccgcggcaggagagcccgtggggtctgcctgagggtgacacacggcaggccaatgctcaccgc

SEQ ID NO: 15836 - DNA, 63 bp, Zea mays
  Clone ID: LIB83-004-Q1-E1-A9
caagagatggaacgcgcagggtggaaaaagcaatgtttactttgcaaagacactggatgaaaa

SEQ ID NO: 15837 - DNA, 351 bp, Zea mays
  Clone ID: LIB83-004-Q1-E1-B10
cggaaagcctgagggagtacttgaagaacatgccacgtctaataatgcagcagcagaagccagaatcatcagagtcagattcaagtggatcagaatctggttcggaaagctctagttcaggttccagttctgagtctgagtcagaatcaagccctgataagcgtgacagaaggcgaagtaataagaggaagaggacttgagagcacttccaactatgccttttggaattcatgtatttggttttgtttaaatgtgcttcttcagtatacatgtgcagtatgtgatctagctcttgatgtgttagtggtaatcagaaagccgtaacagtaagatactatccgaacttgtacg

SEQ ID NO: 15838 - DNA, 336 bp, Zea mays
  Clone ID: LIB83-004-Q1-E1-B11
ctcgcgggtcaacacaagcctctacactgacgtcatagtatctcgtgctccccccaggctcctcttcctcgctttccctccaccccgggcgcaaaccctaaccctaccgtcgctcgccccgcggcgtctgccaatggcgcgccccgtgtgagtgtgcgcgagagaggggtagaccttgaggccgctacccggggaggagagcgagaaatgtataaacaggggggagccgggggaagggctggggctgaacggaaacggattaacgacgcgctggataagcaacccgaaaaaggcgtcccctccccgttcaacgtcgaagggggtcggcggccggcg

SEQ ID NO: 15839 - DNA, 416 bp, Zea mays
  Clone ID: LIB83-004-Q1-E1-B12
gcttggtgatgcccagcatgttgaggaggccgagaagatgggacttgactacatggatgttgaggctctcaagaaaatgaacaagaacaagaagcttgttaagaggcttgccaagaagtaccatgctttcttggcatcagaggccatcatcaagcagattccccgtctccttggtcctggtctcaacaaggcaggcaagttcccgaccctggttactcaccaggaatccctcgagtccaaggtgaacgagactaaggcaaccgtcaagttccagctcaagaaggtcctttgcatgggtgtcgccgtcggcaacttggcgatggaggagaagcagatccagcagaacatccagatgagcgtcaacttccttgtttcccttctgaagaagaactggcagaatgtgagatgcctgtacg

SEQ ID NO: 15840 - DNA, 399 bp, Zea mays
  Clone ID: LIB83-004-Q1-E1-B9
acacttcgcaccgccaccgtctcccgaccgcgacgccggcgacctccgcaccgcatcgctccagccgatcgttccgagatttgttgatcaaagaaccatggaaggatcgttccagttgaatcccaacgccagtcctttcatacctggattgctgggttcatctgcacaaaaagccccagaaaaacaaggagggtcatcatcaaagggagagccttctggtagcacctttgatccttctgagtatgaggaaaatgacatggatgaacttgctctagtcaaaatggtcttttcaatgttcccaaatgtctccacggacttcattgatgagttaatcaaggcaaatgattttgacatgaatctgactgttgatatgctttatgagctgaactcacaagatat

SEQ ID NO: 15841 - DNA, 412 bp, Zea mays
  Clone ID: LIB83-004-Q1-E1-C10
gaaccagggtttaatcattttctttgtgaagttcgagccgattataattttagaaggagatttggtgctgaagtcgaagctagcagcccctttattcctcgtcgtcaagccacgccgcgtcgcgacatgcccgtcgatcccgacgatctatctcccagatgtgtgccacttgtgttgagctccaaaacccctgtcgagctcttctcctgaaagccgccttcgagcacaatccctgtcatgtgttcgatgggaattctgaaccaaggctcatcgtcgttctacgattatcaaatcattcgggtcatggtaagtcgatgagttattcagaatagttcaattgttgaaaaaattaatgtgctagtgtgatgctcactagttgctcgataaattacgcgagtcacggaactctcgt

SEQ ID NO: 15842 - DNA, 387 bp, Zea mays
  Clone ID: LIB83-004-Q1-E1-C11
cacacgcgtccggaactttgttaacattagagattaaaaggtagagccgtagcaaaatgaaggcaccatcactactggttcagtgtttccctggcttgcttcccagcaaggccactagttgcgtgccaattgtatctgagaaggatctgcagctaccatcaccagctgttgaaataatcccctcaaagagtgttcatccatacaaatatgctggagagaaggttgatgtgcaaggtcttaatattttcaagggtaaagtcagtgtagcagatatgatagttatctcaccttctgaagtagcatcatcaaaatatgatggaactctgaaatactgggagagttccattacccttgtcgacattcttaaaaatgagattcgtgatgggc

SEQ ID NO: 15843 - DNA, 312 bp, Zea mays
  unsure (1)..(312): unsure at all n locations; Clone ID: LIB83-004-Q1-E1-C12
atcctttgcgcagtttgggcgctgagcaagtccagtgagagagggagagcggcgagaggatggctgggatggcgtcgctgcagggcgccatggcgtcgctctccatctccgcgctaggcgcggcgacggcgagcagcagcagcttctggggcaaccggctcgccacctactccgcgccgcagcctgnggtaaggtttatggtcaagatatgcccaattgaaatgagacttaagagatgggagcgaaagaagtgtaaaccaaacagtcttcctgtgctgcacaagatgcatgttaggattcgggacacggtac

SEQ ID NO: 15844 - DNA, 415 bp, Zea mays
  Clone ID: LIB83-004-Q1-E1-C9
cagacgcgtgggtttttcagcaaatggttatttatgtcacttattagcattatgtcactcgccacaagctggattactggaaatacagatgaaggatgagtaacgctgaaaaggtattacaggcaacacatgtcctggaagcctgagttcagctacgatcaaccatggagggcacatcacttccacttcttgaacttgccgccgccaaacatgccgtgcccgtgcttgccatgcttgaacttgccgtgcccgtgcttgaacttgccgtggtggccgtgaccatgcttgaacttgccgtggccaccatacccgtggccgtaaccaccgtgaccatagcctccaaaggccccatgtccaccgtgtccgctatggccatgagaaagcttgtgtgctccataagcggcagcggccgctc

SEQ ID NO: 15845 - DNA, 434 bp, Zea mays
  Clone ID: LIB83-004-Q1-E1-D11
gtgggtcgacacaaccctctacagtgaggcgtagtatgcaactcaaacttggagatttgcgacttgatcaacacagagaaagttaacagtgtggaacttatacatgggatcaagaagaggatcatgatgaaggatgcgagagttcagtacctctcattggtcctgcttgagactattgttaagaactgtgagaaggccttctcagaagttgcggccgaacgggttcttgatgagatggtcagattgattgatgatcctcagaccgtggtgaataacaggaacaaggcccttatgctgatcgaagcatggggagagtccggtgatgaactccgctatctgccagtctatgaggaaacgtacaagagcttgaaatcaagagtgcggtttcctggacgtgacaatgagagcttggctcccatatttactcccccacg

SEQ ID NO: 15846 - DNA, 309 bp, Zea mays
  Clone ID: LIB83-004-Q1-E1-D12
tggatagctccatccaagattctgggcacccagctcaacttcgcgggctcctcccgctacgccaccgcagcgcccaccgcgggggctcagaagattgtctcccttttcagcaagaagcctgcccagaagcccaagcccgctgcggtatcgtcctcttctccagacatcagcgacgagctcgccaagtggtatggtcctgacaggaggatctacctgccggatgggctgttggaccggtcggaggtgccggagtacctcaccggagaggtccctggagactatggctacgacccttttggcctgggcaag

SEQ ID NO: 15847 - DNA, 342 bp, Zea mays
  Clone ID: LIB83-004-Q1-E1-D9
atacaaattactgtcgagcaaacaacccagagcgtttagagagacagaagccagggagaaggagcggaagagccgccgcggtggaagccaggacacgggaaagctttggacgctaccaattcagcgaataacctacgggggtgcgtggaattgagcaaaccctccgccgccgaaccaccatccgctgtgagcagtgcacgctagcgtccgattcctgggctcggctcaccgccaccggcatcaagcgccggcatcgctagggtttcacgcccccatccccccaaggcgccgtcgattccggtcgggcatctcccggtgcgcacgtggtaactgatcgttaaa

SEQ ID NO: 15848 - DNA, 385 bp, Zea mays
  Clone ID: LIB83-004-Q1-E1-F12
taaacttcatcccgtcaccgccccgcacgatcccctccgccttcttcgccgccggcctccggaccgcgcagctccccggagccgacaaggacccggcgccatggggttctgggaggcttttcttaactggctccgcagcctcttcttcaagcaagagatggagctttccttgatagggctccaaaatgctgggaaaacgtcacttgtgaactctattgctactggaggctttagtgaggatatgatccctactgtaggattcaatatgagaaaagttacgaaaggaaatgtgacgataaagttgtgggatcttggaggccaaccaagattccgcagcatgtgggagagatactgccgtgcggtttctgcaattgtgtatgttgtt

SEQ ID NO: 15849 - DNA, 429 bp, Zea mays
  Clone ID: LIB83-004-Q1-E1-G10
gcacaggtccaggactcgcgggtcaacacaagcctctacaggcattggtgatatcgacgccgcgctctgcctctgcaccaccatcaaggccaaggcgctcagcgtcagcctcgtgctccccgtcgccatctcggtgctcgttaacgagtgcggcaagcatgtgccctccagcttccagtgcccgtaatcacatcagctgcatatatgtgctactatgatgtatcaccaccactaatctatatccgcatgcatgcatcaatgcatgggtgattaagggtttatacgcggtcaaagttatacacgcatatatatgtagcttcatacatggagctgtgggttgtgcattcattttcaaatcatgtaccagtattatattgtagtatcataaaccagtgtgagagttgtggccttggtgggggtgcttgtaag

SEQ ID NO: 15850 - DNA, 400 bp, Zea mays
  Clone ID: LIB83-004-Q1-E1-G12
ggatcatatccggatcttccctgggtttctaccatcggcgccggaccaaatggcagaaccatatcaggtgtgacatacaagtttggtagaaatgaggtaaagatagtatgtgcttgccatggcactcacatgtctccggaggagttcatgcggcatgcaagtgcagatgctccggcccaagataatagtgcaaccctgccagcattccctgctggtaaccaagccacgtctgcagaaaattaggttagcggttcagagaatgcttgactaataatccttgcccctcttgtgtctatatcagccattcactgtaatactcagtgttcatctcgtgttaactttttatcatgcaagtttagattcttgtattttgagctttgtttgaggataaaatctgtgt

SEQ ID NO: 15851 - DNA, 339 bp, Zea mays
  Clone ID: LIB83-004-Q1-E1-G9
ctcgcgggtccacacacgcctctacacagactcctggtaagatttcttctgggacgacgagttccgggtgaagaacagctgggacgacatgcttcttcagtacgagacactggaacagtgcgccaagactggaaccatggttgtccggtgggtcaggaagtttccgttcttctgcagcgacagggagtacatcataggccgcaggatatgggcatctgggaagacgttttactgtgtgaccaagggcgtgcctcgtccctctgttccaagacaaaacaaacctcgtcgtgtggacttgtactactcgaactggtgcatccgtccagttgaatcaagaaa

SEQ ID NO: 15852 - DNA, 417 bp, Zea mays
  Clone ID: LIB83-004-Q1-E1-H11
cacacgcgtccgcggacgcgtgggcgcacgggcccgacgccaccgacgcctggctgtggaagctggccaaggcgcacgtgctgacccacgacacggggtaccaccagctggtgagccactggctgcgcacgcactgctgcgtggagccctacatcatcgccgccaaccggcagctgagccggctgcacccggtgtaccgcctgctgcacccgcacttccgctacaccatggagatcaacgcgctggccagggaggcgctcatcaacgccgacggcatcatcgaggagtccttctggccgggcaagtacgccgtcgagcttagctccgtggcgtacggcgcgacgtggcagttcgacacggaggcgctgcccaacgacctcgtcaagcgcgggctggccgtgcgcggggaagaccggg

SEQ ID NO: 15853 - DNA, 368 bp, Zea mays
  Clone ID: LIB83-004-Q1-E1-H9
caacccgaccgggctgctctgctgcctctccggcgccattgacgagcaagagagtcctcatcctccggcacctggtccgtcgcgtgccgtgcccacccgctaaggccagggcgccccgacttgagctcaccgcgccgaactcgaaccgctgctgttcctcggggcagggtcgtcgaggatgccggagcactcagagaacgcggcgggcggacctgatgggcaccatcatggggaccatcgcggaaaacctcccgaggcaaaattctgtgcggttcgacgagggagagggctcctccatctccgaacaggccaagactctgtccggcggcggagagaccaggaagatctcggtacaccacgtcctgggc

SEQ ID NO: 15854 - DNA, 165 bp, Zea mays
  Clone ID: LIB83-004-Q1-E2-A10
agatcttttactacccgtcacaaactttatgttcgtaagttccagtgtgagtactgcgccgaacataaagtttgtgacgggtagtaaaagatctatttttcttttgactttgacatagagttcgatcctcaattatttctcgcgctatcttcttacgaagttttg

SEQ ID NO: 15855 - DNA, 385 bp, Zea mays
  Clone ID: LIB83-004-Q1-E2-A11
aaataactcaccacgggtcacacctcttgtgcttctgcgtcccaatgtgagtctcgtcaagaccatgcactctgtcactgtgtactcaccactgaccgctactcctgatgctgacgtagcactctcaatccgcagcgtactatctcgcgcgaggttcttacgaagttttgtgatggtacccatgatagtctcgggtttagggcgccaagccggaacgtacacttcgacacgaattaccttagtaagaccacgaacagtactacaggaatctgtactgaaaatgccgcgtgtaatagtagaggctcccatagtaatgacgtatttcggttcaggcatttgctcatataatcgcactaaagatggagctattttcattgttaccgta

SEQ ID NO: 15856 - DNA, 381 bp, Zea mays
  Clone ID: LIB83-004-Q1-E2-A12
cacactagggcacgaggcaaatctgtggccctctcctagtctcctgaagtctgactcagccgtctcacatctcacgctcgctcgaattcgggttggggaggcactgagtcactgacgtcttcacgttaggcggtgcccctttaccggttcttcatctaaggtgtaatcaagctgctggccacacgcggtacccccctatcgagtataaggccttcgccgagatccactacaaggtcgtctcctcaaagatctgaccacgacgctagtgacgagggaatagtgtgtggagtaagtgggggaggattagcgaggagaggccggtgccgcggcaggagagcctgtagggtctgcctgagggcgacacgcgggaggccaatgctc

SEQ ID NO: 15857 - DNA, 300 bp, Zea mays
  Clone ID: LIB83-004-Q1-E2-A2
cccacgcgtccgcgaccacgacgagctgtagatggtggtggggagcggtgacgtggagtgccgggaaccaagccaaattttgtaatggtgtttaggggggaaggtggtggacaaaaaaacaaatcttggtgctgctctgcaaataaacggcctgaccaaaaaactttttcccctccaactcccttgtaatggtcctttttataaaggatccccatgggaatgtaatgtaaaaaaaaaaagaaaaacccccttcaaaaactgtgtacaacatttaaaaagtgaaagggcacatcacagtat

SEQ ID NO: 15858 - DNA, 432 bp, Zea mays
  Clone ID: LIB83-004-Q1-E2-A3
atcagatgatgataaaaaagattatgaagagctggcggaaaatgtcatgaacattgttgatcggcttgttcacaagactgatcaaaagattgaacaatcaactgatgtgctgaaggcaattattagtcctgcaatgcatgaaggagatgtgaagtggccaccaagagatccagatacactcaaattgatggagaaagaaataacacgccgagaacaagaaggacaacttgatgagggatttctgtcagaagttagtgctcagttgaggcaagctaaacaagacggagataagccagggcttcaggctatgctgcaaaaggtgttgcagttatatgcttctaaatctctccaaaaacgtagttatgcatacaaaggggggcaagttgtagttcccgaaaagtttctcgaatgtgtaatacaggctcctgagaa

SEQ ID NO: 15859 - DNA, 344 bp, Zea mays
  Clone ID: LIB83-004-Q1-E2-A4
cacacgcgtccggcgccgtcccgcgcaacatcctggagcagatcatctgggacaaggaggtggaggtggcccagcgcaaggccaggacgccgctgtgcgaggtgaaggcgtccgccgcgctcgcgccgccgcccatggacttcgtcggcgcgctgcgcgccgcgtgccgtcgcaacgccgtccccgcgctcgtcgccgaggtcaagaacgcgtcgcccagcagaggcctcctcagggaccacttctacccggtggagattgctcgcacctacgataagaacggcgcggcgtgcctgagcatcccgaccgacgagaagcacttctaggggagctttgagacccta

SEQ ID NO: 15860 - DNA, 263 bp, Zea mays
  Clone ID: LIB83-004-Q1-E2-A6
cagacgcgtgggcggcggcgccggcgtgcttgtgatctcaacccaagtcgtgcctccgctccggtcacccgtcgctccacgcaaccatgtcgaggaggaagaccagggagcccaaggaggagaacgtcacccttggacccactgtccgtgaaggagagtatgtctttggtgttgctcacatctttgcatccttcaatgacaccttcattcatatcactgatttgtctgggagggaaactccggttcggatcaccggtggcatg

SEQ ID NO: 15861 - DNA, 420 bp, Zea mays
  Clone ID: LIB83-004-Q1-E2-A7
cccacgcgtccgctccaggttcttctccactgttcacgatgggttgaagtacactcagtctcacgaatgggtcaagacgacgggcgacgtcgccaccgttggcatcacggaccatgctcagggccacctgggagaggtggtgttcgtggagctgccggaacccggcacgaaggtcgccgcgggaggacccttcggcaacgtggagagtgtcaaggccaccagcgacgtcaactccccgatctccggcgaggtcgtcgaggtcaatgccaaactgtcagagacgcccggcctgatcaacacgagcccgtacgaggacgggtggatgatcaaggtgaagccgagcagcccgggggaggcggacgccctgctggacgccgccaagtacaccaagcactgcgaggaggaagacgctcactagac

SEQ ID NO: 15862 - DNA, 152 bp, Zea mays
  Clone ID: LIB83-004-Q1-E2-A8
caaacgcgtccgcggacgcgtgggctgcaagcgcctgagcccaagacccatggccatggccgccgccaccgtcgcagcgtcactgcacgttgcgcaagggctcgggaaagccctctgcgccgggagcaaggcgtcgtcgtgccagggccgtc

SEQ ID NO: 15863 - DNA, 433 bp, Zea mays
  Clone ID: LIB83-004-Q1-E2-A9
caagagatggaacgcgcagggtggaaaaagcaatgtttactttgcaaagacactggatgaaaggttcataatcaaacaagtcacgagaacagagctggagtcttttgtagagtttgctcctcagtacttcaagtatttaatggaatccttggcttctggtagcccaacctgcctggccaaaatagtagggttatatcaggttggcgtcaagagcttgaaaactgggaaggaagtgaggatggatctgatggtgatggaaaatgttttctttgaaaggaagatatctcgggtgtatgacctaaagggttcattgcgctcacgctacacggctggggacagcaaagtcctcttggatgcaaacctcatagaggcattgcatacgaagcctatatttttggggagcaaggcaaaacgaagattggaaagagctgtc

SEQ ID NO: 15864 - DNA, 359 bp, Zea mays
  Clone ID: LIB83-004-Q1-E2-B1
gtgactgttgacattttcaggaacttgtcaccccatgttcaagcttgcgtgccagatctcctgaaggttgctctaaattgcattgacaatgttagagatactgatgggaccttgcgcgctgtcaaatcaaagatcgcaaaccttgtagcaagcaacatgagccggaattggccacaggatttgtatcagaaggtggcacagtgcatatgaagtggcttgtgttttgagttgatcaggaatctggactaatctgtatcagaactctgaagctttcaaacaatatggttgtcatcccatcctgtgtttaatgtgtgtcaaatgtaagatgtttatttttaaaaaaagaaatttccactgat

SEQ ID NO: 15865 - DNA, 395 bp, Zea mays
  unsure (1)..(395): unsure at all n locations; Clone ID: LIB83-004-Q1-E2-B10
cggaaagcctgagggagtacttgaagaacatgccacgtctaataatgcagcagcagaagccagaatcatcagagtcagattcaagtggatcagaatctggttcggaaagctctagttcaggttccagttctgagtctgagtcagaatcaagccctgataagcgtgacagaaggcgaagtaataagaggaagaggacttgagagcacttccaactatgccttttggaattcatgtatttggttttgtttaaatgtgcttcttcagtatacatgtgcagtatgtgatctagctcttgatgtgttagtggtaatcagaaagccgtaacagtaagatactatccgaacttgtacgtggcaggttggtagtccagcaaaanaggggcaacagagatcttc

SEQ ID NO: 15866 - DNA, 423 bp, Zea mays
  Clone ID: LIB83-004-Q1-E2-B11
caccatcgcagcgtgtctcgtgctccccccaggctcctcttcctcgctttccctccaccccgggcgcaaaccctaaccctaccgtcgctcgccccgcggcgtctgccaatggcgcgccccgtgtgagtgtgcgcgagagaggggtagaccttgaggccgctacccggggaggagagcgagagatgtataaacaggggggagcggggggaggggctgggctggaccggaagcggatcaacgacgcgctggataagcatctcgagaaggcggtcgcgtcgccgtccacgtcgagggggtcggcgggcggcgggcgcgaccaccaccgcctcgtcgtgccgtcctccgtgtcgtccatccccaagggccgctgctccgaaggggagtctgattctgatagtgaagcatcggatgttagcggctctg

SEQ ID NO: 15867 - DNA, 433 bp, Zea mays
  Clone ID: LIB83-004-Q1-E2-B12
gcttggtgatgcccagcatgttgaggaggccgagaagatgggacttgactacatggatgttgaggctctcaagaaaatgaacaagaacaagaagcttgttaagaggcttgccaagaagtaccatgctttcttggcatcagaggccatcatcaagcagattccccgtctccttggtcctggtctcaacaaggcaggcaagttcccgaccctggttactcaccaggaatccctcgagtccaaggtgaacgagactaaggcaaccgtcaagttccagctcaagaaggtcctttgcatgggtgtcgccgtcggcaacttggcgatggaggagaagcagatccagcagaacatccagatgagcgtcaacttccttgtttcccttctgaagaagaactggcagaatgtgagatgcctgtacgtcaagagcaccatgggg

SEQ ID NO: 15868 - DNA, 383 bp, Zea mays
  Clone ID: LIB83-004-Q1-E2-B2
cggacgcgtgggcgacagggtcgacgaaggcagcatcgttctcaggaaatccaaggcggtcggcttctctagcgacggagtcgtcctgcgagacagaaacgaaagcgtgagaagcgatatcgtgatcctggcgacggggttcagaggagaccagaagcttagggacatcttcactgcgaactggtgcagggagatagtggcagggtcaccggatacagcagctcctctgtacagagaatgcatccatccccggattcctcagctggctatagtgggttactccgagagcctcaccaacatatacgcctcggaaaggatgagcaactgggtagctcaatttctggccggcggcttccagttgccaagcgtgagatgcatggagg

SEQ ID NO: 15869 - DNA, 418 bp, Zea mays
  Clone ID: LIB83-004-Q1-E2-B4
cgaatggacaagtttatgcaatatttgataacagctggaaagaaagcattggagaatgctggaatcactgaagaagtcatgaatgagttggaaaaatcaagatgtggagtcctcattgggtctgctatgggtggcatgaaggttttcagtgatgcaattgaagctttgagggtttcatacaagaagatgaacccattctgtgtaccttttgcaactacaaacatgggttctgcgattcttgctatggatctgggttggatgggcccaaattactctatctctactgcttgtgctactagcaacttctgcattctgaatgcagctaatcatatcagaaaaggggaagctgatgttatgctttgtggtggttctgatgcaacaatcatccctattggatttggatgttttgtggcctgca

SEQ ID NO: 15870 - DNA, 372 bp, Zea mays
  Clone ID: LIB83-004-Q1-E2-B6
gcgcctgcaaggaccatttctcgcgccggcattgggggatcggcttcggcatgagtttcaaggtggtggcccttggcccgaatttccggcgcctctccgtggagcacattgtcccgtcgtatcggaggacggataaccggctgattctcctggactacgacggcaccgtgatgccggagaactccatcgacaggacgccgagcagtgaggtcatctctgtgttgaatcgtctgtgcgaggaccccaagaacagagtgttcatcgtaagcggacgggggaaggacgagctgagcaggtggttcgccccctgcgagaagttgggcatcgccgcggaacacggttacctcacaaggtggagcaaggacgcgccat

SEQ ID NO: 15871 - DNA, 406 bp, Zea mays
  Clone ID: LIB83-004-Q1-E2-B7
ggacgccttcgttgtcgaggagttcgaggaggccttcgcgtcggggcccaagaccagggatttcgtggccgctttgcagcggtgggggcttgacccgaagcagaaagccatgttctttgccacggacttcgacgacaatgtgcggctcagcggcaggaacattggttccctcaagatgctcacacccaggacgctgaacctgtacgacatactcgacgcacgcaagctcttctttactcctgctgctgtagactacctcaactccaggtacggagccagtgtttccgatgactactatactgatgacgaggatgatggcgaagaggaactggtcgagcaagaagcagaagaaggcaccacagcagatgctgctccagatgcaactgaagaaggcgaggcagacagc

SEQ ID NO: 15872 - DNA, 432 bp, Zea mays
  unsure (1)..(432): unsure at all n locations; Clone ID: LIB83-004-Q1-E2-B8
cggacgcgtgggcacgagcagcgcaacggcgttcgttccttcgattcttctaatctcctaacccaggtgcgcatggtatggccggcctgatcagcttgcgcgccggtccgaggagttcaccgtcacttgcccggtcgtcgtccgcctgggcatcaccaccggcttcacatgtggcggttcgtttgccaagcccactgtttcgctgtgccaaacttcgtaggagccgtagtctactggcagcagcactggagatctctaaggacggttccgccgcggttctggccaacagcctgccttcccaaggggctatcgagacgttgcggaatgccgatgcagtgtgtttcgacgttgatagcaccgtcatcctggacgagggcattgacgagcttgctgatttctgcggngcggggaaagctgttgctgaatggactg

SEQ ID NO: 15873 - DNA, 434 bp, Zea mays
  Clone ID: LIB83-004-Q1-E2-B9
ccacttcgcaccgccaccgtctcccgaccgcgacgccggcgacctccgcaccgcatcgctccagccgatcgttccgagatttgttgatcaaagaaccatggaaggatcgttccagttgaatcccaacgccagtcctttcatacctggattgctgggttcatctgcacaaaaagccccagaaaaacaaggagggtcatcatcaaagggagagccttctggtagcacctttgatccttctgagtatgaggaaaatgacatggatgaacttgctctagtcaaaatggtcttttcaatgttcccaaatgtctccacggacttcattgatgagttaatcaaggcaaatgattttgacatgaatctgactgttgatatgctttatgagctgaactcacaagatatggttcatgatgattctgaggttatcaatcattttc

SEQ ID NO: 15874 - DNA, 431 bp, Zea mays
  Clone ID: LIB83-004-Q1-E2-C1
gcgaaccaactattcgtttgcttttcgtcttcgtcctctctttgcccagttgtcggtcgcccgcgccgtcgtctccgctccgccggccggcctgcgaaaccctagcgaggcgagcgagagagaaactagcggccatgttcggctacaggaaggctgacccggacctcgaggccggcgggtcctcgctgctgtacccgggaatgacggagagccccgagcttcggtgggcgttcgtccgcaagatctacgtcatcctagccgtccagctcgccatgacggccgcggtctccgccttcgtcgtcaaggtgcccgccgtctccaacttcttcgtctcctccaacgccggggtcgcactctacatcttcctcatcatcctgcctttcctcgtgctgtgccctctgcgctactaccaccagaagcatccggtcaat

SEQ ID NO: 15875 - DNA, 295 bp, Zea mays
  unsure (1)..(295): unsure at all n locations; Clone ID: LIB83-004-Q1-E2-C10
gaaccagggtttaatcattttctttgtgaagttcgagccgattataattttagaaggagatttggtgctgaagtcgaagctagcagcccctttattcctcgtcgtcaagccacgccgcgtcgcgacatgcccgtcgatcccgacgatctatctcccagatgtgtgccacttgtgttgagctccaaaacccctgtcgagctcttctcctgaaagccgccttcgagcacaatccctgtcatgtgttcgatgggaagtctgaaccaatgctcatcgtcgatctacgattatcanatca

SEQ ID NO: 15876 - DNA, 404 bp, Zea mays
  Clone ID: LIB83-004-Q1-E2-C11
cccacgcgtccggagctttgttaacattagagattaaaaggtagagccgtagcaaaatgaaggcaccatcactactggttcagtgtttccctggcttgcttcccagcaaggccactagttgcgtgccaattgtatctgagaaggatctgcagctaccatcaccaactgttgaaataatcccctcaaagagtgttcatccatacaaatatgctggagaaaaagttgatgtgcaaggtcttaatattttcaagggtaaagtcaatgtaacagatatgatagttaactcaacttctgaagtagcatcatcaaaatatgatggaactctgaaatactgggagaattccattacccttgtcgacattcttaaaaatgagattcgtgatgggcaattgagcttcaagggc

SEQ ID NO: 15877 - DNA, 406 bp, Zea mays
  Clone ID: LIB83-004-Q1-E2-C12
atcctttgagcagtttgggcgctgagcaagtccagtgagagagggagagcggcgagaggatggctgggatggcgtccctgcaaggcgccatggcgtccccccccaaccccgccccaagccccgccaccgcgaacaacaacaacttccggggcaaccggctccccaactactccgcgccgcaacctggggtaaggtttaaggtcaagatatgcccaattgaaatgagacttaagagatgggagcgaaagaagtgtaaaccaaacagtcttcctgtgctgcacaagatgcatgttaggatcggggacacggtacaggttattgcaggccgtgagaaaagaaaggttggagaagtcacacgccttttcaagcacaacagcacggtgatcgtgaaagacctgaacttgaa

SEQ ID NO: 15878 - DNA, 426 bp, Zea mays
  Clone ID: LIB83-004-Q1-E2-C3
cagacgcgtggggttctccctctctcgtgggcgtggcgacgacttggaggccatcgctgccgccctacgccaggtgcccagatcatctgcggcccattcgccggcgacgaccaccatccatcagaaatagggtcaagcgcttgaacttacagcgagatggaaaatgatagaaggcaacttggtcagatcgatccaagaagagcccgctttccttgctgcgtagtatggactccaataccattcatcacttggttggtgccctttatcggtcacattggcatctgcagagaagacggtgtaattctggacttctctggtccacattttgtatcagttgacaattttgcattcggagctgttgcgcgctacattcaagtaaactgcgatgagtgctataagcttattgaacctgaaggagatgccacg

SEQ ID NO: 15879 - DNA, 436 bp, Zea mays
  unsure (1)..(436): unsure at all n locations; Clone ID: LIB83-004-Q1-E2-C4
gaagtttgaagctgatacaaagtattggaaacagctcatttcagaagtatatttcaatgacttcccacttaattggtcaagcatttgcaatgtaatggacatgaatgctgggtttggagggtttgccgcagcactcattgatcaacctttatgggttatgaatgctgtgccaattggtcaaccagataccttgccacttattttcaacagaggtttgattggggcatatcatgactggtgcgaatctttcagcacctaccctcgtacctatgatcttctccacatgagtaatctcattggaaatcttacaaacaggtgtgacctcatcgacgtggtggttgaaatcgacagaatactgagacctggaagatggtttgtgttgaaagacacgttagagatgatanagaagatacgcccaatcctgaagtctctgcac

SEQ ID NO: 15880 - DNA, 423 bp, Zea mays
  Clone ID: LIB83-004-Q1-E2-C5
aaacgggtctgttcaggtgtccaaggatatcaagtatgctgacaatcaaccagtggtgccttggggaccaagattctcccgatcaacagtgaaggacatgcgcataaatatggcagtatcagcagcatttgttgtttggatagctattatgggcaatgcagactggaagcctttgcagttcctttgttttgctttcttctacagaatactacagaagctaagagctactgaaccaccaattactccaatatacaatgaatatggtgaggtcgaaggacgagggataagaatggcaaaaagagtagtccgtgctttgggtttgatatttggatgtgtgttcgctgcatccctgggttatacagcagctattaacttgatcgagctttcaatgcagtacactccccgccttgtgtattactacca

SEQ ID NO: 15881 - DNA, 434 bp, Zea mays
  Clone ID: LIB83-004-Q1-E2-C6
cagacgcgtgggcggacgcgtgggcaacgaagtgcgagcgacccacgtccacacgacacgaaccaccaccaccaaccagcagccgcaccacgcacccagcgcaaagcgatggcgtcgctcaccatgatggcgtccttcgccgccgtggcggtggccgcgccctcgcgccgcggcaccttcgccgtggtcaggtccgccaaggtcgaccgctgccaggagcccgccacgctagcagcaaccgaggccaggcccgccgccgacggacgccgcgccgtcatgctcgcggctgctgcggcggccgtggcagccatcggcggcgccggcgccgccatggcgggccccaagaacgggactcccgaagcgaagaagaagtacgctgccatctgcgtcagcatgcccaccgccaaggtctgccacacctgagcacgcccgcg

SEQ ID NO: 15882 - DNA, 428 bp, Zea mays
  Clone ID: LIB83-004-Q1-E2-C7
cggacgcgtggggcattctcccgagagctcaggtgcagaagagtgggcctttgagaggagggaatatgtgaaggatgatgagaacaatttggtctctcaatccgatgagtctgaggaaaatgtcgaacctatgaatgaggaatatggtgagcatatttcaggctatccaagagacaattccgactccagacccgtacagatgatgggtgatgggagcgacgataatgatgaggatgctgaaggagatgagggtgaggaagatggagaggactatgaagctgaagatcctggtgatgaggatgatgacgttgagatggatggggatgatgatgtcgaggtggatgaggatgatgacattgagatggatgaggatgatgacattgaagatggtgatgacgacgacggtggagatggagcagccaacggag

SEQ ID NO: 15883 - DNA, 416 bp, Zea mays
  Clone ID: LIB83-004-Q1-E2-C9
cggacgcgtgggtttttcagcaaatggttatttatgtcacttattagcattatgtcactcgccacaagctggattactggaaatacagatgaaggatgagtaacgctgaaaaggtattacaggcaacacatgtcctggaagcctgagttcagctacgatcaaccatggagggcacatcacttccacttcttgaacttgccgccgccaaacatgccgtgcccgtgcttgccatgcttgaacttgccgtgcccgtgcttgaacttgccgtggtggccgtgaccatgcttgaacttgccgtggccaccatacccgtggccgtaaccaccgtgaccatagcctccaaaggccccatgtccaccgtgtccgctatggccatgagaaagcttgtgtgctccataagcggcagcggccgctct

SEQ ID NO: 15884 - DNA, 437 bp, Zea mays
  Clone ID: LIB83-004-Q1-E2-D1
agaagatcaccagcaacaccaagcaactactcgtacgcggaaagagaaacccagaagccggtcttgttggattattccgttcgtcagttccgtccggagcggcggagcaaaaatgagtgacaacctgatggacaaggttagcgcctttggtgagcgcttgaagatcaccgggacagaagtcagcaaaaagatgactgccggaatgagctccatgagtttcaagatgaaggagttgttccaggggcagactccagctgacaagattgttgagggtgccacctcagaggatctggacgggcctgactggaactcaaacttggagatttgcgacatgatcaacacagagaaggttgacagtgtggaactcatccgtgggatcaagaagaggatcatgctgaaggatgcgaaggtccagtacctctccttggtcctgcttg

SEQ ID NO: 15885 - DNA, 303 bp, Zea mays
  Clone ID: LIB83-004-Q1-E2-D10
gagtagtactcggagccgtccgtagtagctagcgtacgtacgtgtgaccgattcagcgaggtcgccgtttgtgtgtcgatatatatggcgaggtcgccgtttgttccgatggatcaggggaaagagcaaggcgccggacgaggagcggccggcaataataaggagcggcagcagcaggagcaggagcaggaggaggtgctgctggtgcacagccaggtgcggcggatcaggaaggaggacgaggaggccttcagggagcgcctcctgaagctgcgcctgctggagacccggcccagcgccggc

SEQ ID NO: 15886 - DNA, 268 bp, Zea mays
  Clone ID: LIB83-004-Q1-E2-D11
caggacgggtctgattggaactcaaacttggagatttgcgacttgatcaacacagagaaagttaacagtgtggaacttatacatgggatcaagaagaggatcatgatgaaggatgcgagagttcagtacctctcattggtcctgcttgagactattgttaagaactgtgagaaggccttctcagaagtttcagccgaacgggttcctgatgagatggtcacattgattgatgatcctcagaccgtggtgaataacaggaacaaggccc

SEQ ID NO: 15887 - DNA, 431 bp, Zea mays
  Clone ID: LIB83-004-Q1-E2-D12
gctagctccatccaagattctgggcacccagctcaacttcgcgggctcctcccgctacgccaccgcagcgcccaccgcgggggctcagaagattgtctcccttttcagcaagaagcctgcccagaagcccaagcccgctgcggtatcgtcctcttctccagacatcagcgacgagctcgccaagtggtatggtcctgacaggaggatctacctgccggatgggctgttggaccggtcggaggtgccggagtacctcaccggagaggtccctggagactatggctacgacccttttggcctgggcaagaagccagaggacttcgccaagtaccaggcctacgagctgatccatgccagatgggccatgctcggtgccgctggcgctgtcatcccagaggcctgcaacaagttcggcgctaactgtggccctg

SEQ ID NO: 15888 - DNA, 422 bp, Zea mays
  Clone ID: LIB83-004-Q1-E2-D2
cccacgcgtccggttccgggtcctactcccgccgcctagaggcctcgccctcccccctccggcgaaaaccgattctctccggcgtttcctggtcccttagtgcaagcaaggacaccgctcctctagcgagctccgttctgaagcggcaagaaagatgattaatcttttcaaaataaagggtcaaaagaaagaggaggcagcaagtgctgctggaaaggcccctgttaagaaacagtctgctggggagctccgtcttcataaagatattagtgagctcaacctgccgaagaccacgtcaatttcttttcccaatggcaaggatgatctgatgaattttgagaccaccatccgacctgatgaaggatattacatgggaggcactttcgttttcacctttcaagtgttcccatcttatcctcatg

SEQ ID NO: 15889 - DNA, 265 bp, Zea mays
  Clone ID: LIB83-004-Q1-E2-D3
gatcgagctcaatgtagcaacggtaatccacggaagttcggaagcttggggcggtttagatccacctctctaaattttaagaacactctagctcacattgtatgaggtgggctaaattaaaatgcatatgatcagctaggcgctgattgttctgcgaatgtagtggaacagtcaactagaagttgactgtgttcccacaataaaactacctatattggattggcgcaaattatgcggtcagtatatcattccatatttatagtac

SEQ ID NO: 15890 - DNA, 406 bp, Zea mays
  Clone ID: LIB83-004-Q1-E2-D4
cagacgcgtgggcggacgcgtgggcggacgcgtgggcttccaccttccaccacaagcgccgccgcagccggtgcctgctccttcccgatccccgaggcaaagctgcgactccgcaaccgccgccatggcgttcgagaagatcaaggtctccaacccaatcgtcgagatggacggtgatgagatgaccagggtattctggcagtctatcaaggacaagcttatcctcccatttctggacctggacatcaagtactatgatttggggatactgcaccgtgaagcaactgatgacaaggtcacagtggaggctgcagaggctactctcaagtacaacgtggctattaagtgtgcgaccattactccagatgaaactccggttaaggagttcaatctgaaacacatgtgg

SEQ ID NO: 15891 - DNA, 428 bp, Zea mays
  Clone ID: LIB83-004-Q1-E2-D5
cacacgcgtccggtctggaagtcactcgctgtgcgtttggtgctgttcctaagacgctgcagcctgacgaactcctatgtaaagaccttggtttggctcctccggcaaagaagagaaggctgaaaattaagaagacgtaacgttggtgctgttccaaagatgacgtaacgtttaagatgagcaatgcttcgcctcatgtacagcacactggtagacatttttactatttttcttctcaaaagagacattatcatacagtccggactccggtgggatttctaatggaggtttaatgcttcttttgactatttattactgggacgtgtgaactggggattagcacattgtaaattggtgtgctagcggctagcttagagagctaaggattctttgaatagtgctgtaattgtgtgagccgattaatggat

SEQ ID NO: 15892 - DNA, 426 bp, Zea mays
  Clone ID: LIB83-004-Q1-E2-D8
cccacgcgtccggaagaatcaaccccatcaaatgctggcagtcagttgcttgcatcctctgttgtgggtgatggaggtgccagctggagacttaaagctttgaagcgtgcaaaggagcaagctgctcgcgaaggaagaaaacttgaggaggttgttgaagagagatggagctcattaggcgacttagctgtttcagtatcagcatcaagagctgcccattcacatgctcatttgcatgccattagaggcagaaaatctggtaatgctgacaactcagaagaacgtgttaaaagaaatccagagggtcagctggatggtagcagtggcagacgtgaatatctacgggatgtttcttctcagcaccatgccatgagaaaaccaaaacctgattctgtcccatggaaaaagagaagacagaatatatct

SEQ ID NO: 15893 - DNA, 430 bp, Zea mays
  unsure (1)..(430): unsure at all n locations; Clone ID: LIB83-004-Q1-E2-D9
atacaaattactgtcgagcaaacaacccagagcgtttagagagacagaagccagggagaaggagcggaagagccgccgcggtggaagccaggacacgggaaagctttggacgctaccaattcagcgaataacctacgggggtgcgtggaattgagcaaaccctccgccgccgaaccaccatccgctgtgagcagtgcacgctagcgtccgattcctgggctcggctcaccgccaccggcatcaagcgccggcatcgctagggtttcacgcccccatccccccagggcgccgtcgatcccggtcggccatctcccggtgcgcacgtggtaactgatcgttaatttcatcgatcgatcggtgccatgganggacgcagctccaagcaggcaggcgtgggcgttgtggccgacctccacgaacacctccttgt

SEQ ID NO: 15894 - DNA, 427 bp, Zea mays
  unsure (1)..(427): unsure at all n locations; Clone ID: LIB83-004-Q1-E2-E1
cagacgcgtgggcggacgcgtgggcggacgcgtgggcgcgaggcgagatggagctctcgccggtggggaggtgggccgacctccccgaggacatcgccgtagccgtcgcctcctgcctccaggaggccgacgtctgcgcgctcggcggctgctcgcgctcctggcgcanagcctgcgacgctgactgcatctgggagcgcctcttccgctgccgctggccatctgccgtggcgtcggcgtcccctgtgcagggatggaaagctctctacatcagccagcacagaagaatggctgttgcaatatctaatgtggttgaatttgtgggcagcagcttaaataatgagtcacttgaatccgaatactatctgaaagctattgctgatttggccttgatacctgatataagattcctcgatgtccagttttt

SEQ ID NO: 15895 - DNA, 190 bp, Zea mays
  Clone ID: LIB83-004-Q1-E2-E11
gcgggtcacacaagcgtctacactaagtcgcgatacactcatccgctgagggcgtcggccttctggcccttctccccccggccgacctcgcccctccggcgctccgtccgcttcctgaactcgtctccctcacggacgttctcctccctccgctcaccacgccggaacccggaagaggagagcgtcgctc

SEQ ID NO: 15896 - DNA, 149 bp, Zea mays
  Clone ID: LIB83-004-Q1-E2-E2
gagttgaggtcatcctcgatatatgctggtttagacaaactcagccttttcgctgtcttcttttgcttccaacaaaggcttatttgtctatatatcatataacaaagacgttgaggccatccttgatatatgcgtgaaaccctcgagat

SEQ ID NO: 15897 - DNA, 427 bp, Zea mays
  Clone ID: LIB83-004-Q1-E2-E3
cagacgcgtgggcggacgcgtgggcggacgcgtgggagtgagtgaacaccagccgtattgtcccgaccccgaccgatcctcgcctgctgcagccatggcgacctccgcggcgctctccaccgccgccaatcccacccagctctaccggtcccgcgctttgctgggcaagccggtgaaggggcttggcctgagcatgggccgcgagcgcgcccagcggagcattgtgtgccaggcggcgagcagcatctccgccgaccgcgtccccgacatggagaagcggaagctgatgaacctcctcctcctcggggccatctcgttgcccaccgtcggcatggtcgtcccctacggcgccttcttcgtccctgccggctccgggaacgccggcggcgggacctacgcgaaggacaagcctggcaacgacatcacg

SEQ ID NO: 15898 - DNA, 437 bp, Zea mays
  Clone ID: LIB83-004-Q1-E2-E4
ctagagttgcaacttactcgagcagttgccttaagtgacccatttgtgtatcatcaccaggcccgattaatggaaagcattcctattgggcaggattctgttgaatcggcatctgctcgagttttgatggccgtgctagagttgcaacttactcgagggcacagtcgtcaaaagtggcagcagttgtacaccggaagttatgcagcatttaagatgatggaaatggccaagaatagggcttgtacccaggcacaagaacgacttgaggaaacaaaggttcaagcagaacaggttattggactaaagcatcaggtgatagaacttcagacgcaacaccaagctgatcagaatcgcattaaggcgcttgagcatcagctagctaatgctcattctaaatcaaaagttctgagtcagcaacaagaagaaattcgcttgga

SEQ ID NO: 15899 - DNA, 423 bp, Zea mays
  Clone ID: LIB83-004-Q1-E2-E5
cacacgcgtccgcccacgcgtccgcccacgcgtccgaggaaatgggttttaggcaggtcgatctcaacaaggaaatcctcaggcagaacaattacaatctggagcagtctgtcgatgacctatgtggcgtcaatgaatgggatcctctccttgcagagctggaagagatgggatttgatgacacagagatgaacaaggagctgcttgcgaagaatgagggaagcatcaagcgagctgtgatggagctcattgccagggagaagaaggacaagtgaagatcgtgtgctatctaagtatatattcgtaaataatgagacggctgtgccactgcggtgcagccctggtgcgtctcagagcttgcttatggtgaactcttcgtgttaggtttcttccgtatatctgtcgtgtcagcagtgtcgatga

SEQ ID NO: 15900 - DNA, 435 bp, Zea mays
  Clone ID: LIB83-004-Q1-E2-E6
caccccgcagccgccctagcacccgcgacgagcaggatctgcccagttgctcttgcggtagttcccccaactgtcaccatgcagaacgaggagggtaagactgtggacctttatgtccccaggaagtgctcggccacaaacaggatcatcactgccaaggaccatgcctctgtccagatcaacattggccacttggatgcgaatggcctgtatgatggtcacttcacaacgtttgctctctctgggtttgtccgtgctcagggcgacgcagacagctccttggacaggctgtggcagaagaagaaggctgatatcaagcagtagattttacatctagtttaccaagaattggacactgccttagctatgttttgaattcatgtcactatatgcaattgcagtgttgtgatttcagctggtaccttaaatctgaag

SEQ ID NO: 15901 - DNA, 418 bp, Zea mays
  Clone ID: LIB83-004-Q1-E2-E7
aaaagaagtacttggataagagtggtttgcagaaatatctcgaccagcttggatttcatattgttggctatggttgcacaacctgcattggaaattctggagagcttgatgaatctgtgtctgctgcaattactgagaatgatattgttgctgctgctgtgttgtctggaaacagaaattttgaaggacgtgtgcatcctttaaccagagcaaattaccttgcttcccctcctttagttgtggcttatgcattggctggcacagttaatattgattttgagaaagaacctattggcatctcgaaagatggaaaagaggtttacttccgggatgtttggccatccacagaagagatagccgaggttgtcaagtcaagtgtgctccctgacatgttcaagagcacatatgagtcaatcac

SEQ ID NO: 15902 - DNA, 434 bp, Zea mays
  Clone ID: LIB83-004-Q1-E2-E8
catcctcgcgctcgcgctctcgagtcccgactcacctgcttctagccatggaggcgcctccatcttctcccttcctagtgttgctcctgctgttcttcccttcgagcggccttgccgcccccatggattttaaccatgaagtgcaagtccttatggtgatcaagagcctcctcaaggacccctatggcgcgctgagaaactgggacaggaactccgtcgatccctgtacctggtccttcatctcctgctcgccggagaatctcgtcactgcactggaagctccaagcaagaacctttccggccggctctccccgagcatagggaacctgacaaaacttgagaagcttcagctgcagaacaacaacataattgggccaatcccagcagagatcggcaagttagcaaagctcaagacgctggttctgtccagtaac

SEQ ID NO: 15903 - DNA, 439 bp, Zea mays
  unsure (1)..(439): unsure at all n locations; Clone ID: LIB83-004-Q1-E2-F1
cactcccatccagccgccaccaggtgcagagtctttcgtcatctcttctccggcgaagaacccccagtcgcccaccagatcacttgttaaactttgttgaggggtgatggcggtttctttcgcaaacctcaactccgaggcagggcttaaaaagcttgatgagtaccttctcactcgcagctacatcactggctaccaagcttccaaggatgacttggctgtctacacttcgttttcggctgctccctcgtccaagtatatcaacgtagcaaggtggtttaaccacattgatgcgctcgtgaggctgagcggaattactgcagagggccaaggtgtgaaggttgaatcctcagcagttccttcagccccaactccagatgttgctgaagcacaggccccagttgctgangaggacgacgacgatgatgttgaccttttt

SEQ ID NO: 15904 - DNA, 107 bp, Zea mays
  Clone ID: LIB83-004-Q1-E2-F11
caatactctatactgacgtcgtattaacgcgtccgctagaggtacagcaccaaaaagatatgcaagagagataggggaccggagggcggctggccggtgctcaatac

SEQ ID NO: 15905 - DNA, 436 bp, Zea mays
  Clone ID: LIB83-004-Q1-E2-F12
cacttcaacccgtcgccgccccgcacgatcccctccgccttcttcgccgccggcctccggaccgcgcagctccccggagccgacaaggacccggcgccatggggttctgggaggcttttcttaactggctccgcagcctcttcttcaagcaagagatggagctttccttgatagggctccaaaatgctgggaaaacgtcacttgtgaactctattgctactggaggctttagtgaggatatgatccctactgtaggattcaatatgagaaaagttacgaaaggaaatgtgacgataaagttgtgggatcttggaggccaaccaagattccgcagcatgtgggagagatactgccgtgcggtttctgcaattgtgtatgttgttgacgcggcagatcgagaaaacatggccattgcaaagggggaactccaatgact

SEQ ID NO: 15906 - DNA, 382 bp, Zea mays
  Clone ID: LIB83-004-Q1-E2-F2
cgctcacttcttccttgcagtgcactgcaaaccaaccataaacttgccctcttctctgcttgaaccgcggagcaagaccgctcttgttctcttctctgcttgaactgcggagaaagaccgaatccgaagggacgttgggactttctggctgggaagcctacatatcatttctctaattcgggcgtggtttgtgctgggagggaaggaatccatggggctgcagctcgatccgcgctgagggttgaaggaaccggccttgttgtgtgctccacccaatcgaggaaaaggggcaaggattgctgctttgttgcctttggatccgttacgccattggggattcaaccatcagcagggcgaagtgacggttctgcaccacttttcc

SEQ ID NO: 15907 - DNA, 406 bp, Zea mays
  unsure (1)..(406): unsure at all n locations; Clone ID: LIB83-004-Q1-E2-F4
gacagtatcatcagtggactgaacaacctttcaagcaatgtcagcgaagttctcaagctagatgctggaatgaaggagcttgcctcttcgctgatcgactcagagtcgctcctcgtgttcggaaggggttacaactacgccaccgcgctggagggcgccctgaaggtcaaggaggtggcgctgatgcacagcgagggcatgctcgctggcgagatgaagcacgggccgctggccctcgtggacgagaacctccccatcattgtcattgcgacccgcgacgcgtgcttcagcaagcagcagtcggtgatccaacagctcctctcgcgcaaggggcgcctgatagtgatgtgctctangggagatgccgcggctgtgtgccctagcggtgggtcgttcaaagtcattg

SEQ ID NO: 15908 - DNA, 376 bp, Zea mays
  Clone ID: LIB83-004-Q1-E2-F5
acacgaatccggaaatgacatcctggaaatatcggcaacttctaaaccgttcgctaatggttgtctctgttggagctgctgttgcagttgttggactagctgcttagcgggtttatgcagctcggaaaaactcttcctcttgaagcctcctggacaagtgggaaaataagttgctttcttcctggagattactttgcagcatcatctggatgcatgctggctgaatttcgcagctggggtttttacccggaatgaaaccaacgtttttgtatagacatgtcatcagccataatttatccggtcaattggtgtttcagattcgatataaatggcagacaccactcgggtccattaagtgccgtatctgagaatctgt

SEQ ID NO: 15909 - DNA, 432 bp, Zea mays
  Clone ID: LIB83-004-Q1-E2-F6
cacacgcgtccgagcagctcaaaactctagctagctaccaggggggaaaatggctccacttctcgccgcagccatgaaccacgctacccatccagtccttagaagccatctaggacccaacaatgagagtttctcacgacaccacctatcttcttcaccacaaagcagtaagcgaaggtttaaccttagctttacgccacgatctgcaagggtaggcaatgaaaatggagtccaattgttgagcccctcggaaatccctcgaagggactggttcccctctgacttcatctttggtgccgccacttcagcgtaccaaattgaaggtgcatggaacgaagatggaaagggggaaagcaattgggatcacttctgccacaattttccggaaaggataatggacgggagcaatgcagacattggagcgaattcgta

SEQ ID NO: 15910 - DNA, 422 bp, Zea mays
  Clone ID: LIB83-004-Q1-E2-F8
tcacgcatccggaacaagctctacttcacgccgctaggcaagttcatggatgatcgggacgccaagatccgcggtgagctcggcgatgtcaagggcgcctctgaggaggtgaagcagctggaggaccacgcggcggccatcatgaaggcggcgcgcgccgagatcgcagcggcgcttaacaagatgaacaaggagaccaccgcagagctggaggccaagctggacgagggacgcagccgtgtggaggccgagctcgtataggcgctcgccaacctcgaggcgcagaaggaggacgctgtcaaggcgctcgacgcccacatcgcctcgctcagtgatgagatcctcaggaatgtgctcacatccgcgtgatgataccatatcggccctgccttatcgtaagacgatagtcacatgaacatcat

SEQ ID NO: 15911 - DNA, 439 bp, Zea mays
  Clone ID: LIB83-004-Q1-E2-G1
gtccttcaccgtgcgtgcctctctccgcaaggccactgccaccgccgccgtggccgttgccgccagcgtcctgcttgccggcggcggcgccatggcccaggaggtgctgctgggcgcaggcgacggcgggctcgtcttcgagcccagccagttcaccgtcaaggccggcgacaccatcaccttcaagaacaacgccggcttcccgcacaacgtcgtgttcgacgaagacgaggtgccgagcggcgtcgacgcctccaagatctcgcaggaggagtacctcaacgcgccaggcgagacctactccgtcaccctcaccgtgccgggcacctacggcttctactgcgagccgcaccaaggagcaggaatggtcggcaagatcacagtcaactaaagctagctatccattccatgcatctcgatctgtatgtactccgcccgt

SEQ ID NO: 15912 - DNA, 436 bp, Zea mays
  Clone ID: LIB83-004-Q1-E2-G10
ccggcgtggccgacctcgacgccgcgctctgcctctgcaccaccatcaaggccaaggcgctcagcgtcagcctcgtgctccccgtcgccatctcggtgctcgttaacgagtgcggcaagcatgtgccctccagcttccagtgcccgtaatcacatcagctgcatatatgtgctactatgatgtatcaccaccactaatctatatccgcatgcatgcatcaatgcatgggtgattaagggtttatacgcggtcaaagttatacacgcatatatatgtagcttcatacatggagctgtgggttgtgcattcattttcaaatcatgtaccagtattatattgtagtatcataaaccagtgtgagagttgtggccttggtgggggtgcttgtaagtcatcattaagtaaaaccatgaataaaacgtgtgtaacatataaa

SEQ ID NO: 15913 - DNA, 256 bp, Zea mays
  Clone ID: LIB83-004-Q1-E2-G11
gatcagcacgaggtccttcaccgtgcgtgcctctctccgcaaggccactggcaccgccgccgtggccgttgccgccagcgtcctgcttgccggcggcggcgccatggcccaggaggtgctgctgggcgcaggcgacggcgggctcgtcttcgagcccagccagttcaccgtcaaggccggcgacaccatcaccttcaggaacaacgcctgcgtcccgcatatcgtcgtgttcgatgaagacgaggtgccgagcggc

SEQ ID NO: 15914 - DNA, 428 bp, Zea mays
  Clone ID: LIB83-004-Q1-E2-G12
ggatcatatccggatcttccctgggtttctaccatcggcgccggaccaaatggcagaaccatatcaggtgtgacatacaagtttggtagaaatgaggtaaagatagtatgtgcttgccatggcactcacatgtctccggaggagttcatgcggcatgcaagtgcagatgctccggcccaagataatagtgcaaccctgccagcattccctgctggtaaccaagccacgtctgcagaaaattaggttagcggttcagagaatgcttgactaataatccttgcccctcttgtgtctatatcagccattcactgtaatactcagtgttcatctcgtgttaactttttatcatgcaagtttagattcttgtattttgagctttgtttgaggataaaatctgtgtatttttagcgctatgtaacacatggact

SEQ ID NO: 15915 - DNA, 378 bp, Zea mays
  Clone ID: LIB83-004-Q1-E2-G2
cctggagggaccccgccaggggaaagatctaggttctggaggagctcactgctatcttgatctttcccctggagggaccccgccagggaggaaagatctagggttgtcttgagatcggcatgccatccaagacgcatcgagacgacgcagagtcaaagcgaggtgaagattgagtttgggaaaccacaactagggctacactacacctactactaaagcatgaatgataaagaaggtaaacggattggttcgatcggaatgtgtacatgggtactcaatcggctgtacccctttatattatatggggaggtctagactcgttactaggcgagatccaactgatttccatggatatgttaggataatcatgtgtgggat

SEQ ID NO: 15916 - DNA, 196 bp, Zea mays
  Clone ID: LIB83-004-Q1-E2-G3
gagctccatgccacgcatatcaaaacgatactagcactgtgttctatcccttctctactacaccttgtaacgtgtgcatgttttgaataagctttgtgtcaaggaccatagccttcatgtaattttttttttgttggaccaccttctaggtggtgccgtttgtatcataaacataacttgaagtttagcgcagcag

SEQ ID NO: 15917 - DNA, 412 bp, Zea mays
  Clone ID: LIB83-004-Q1-E2-G4
cccacgcgtccgcccacgcgtccgcaagaagccgttatctgttgatgcaacctttagggagcagtttggtcagcgccttgccgccattggacagtatctggaacagaagtttggaagtgcccaagatgtggaaggttgcctggttggccccgatatatttatagttcagagcaggccacaaccacaataaacaaaaagttttgtgtggttacctggctagctgaataaaaatggatactggctgaagaaatatatggacttcgtagcacgcgtaggagtgatcgagtcttttttaatatgctatctcaggtaaaataataatttattggcacaggtttagccattcactaacttgtatcaattttgtgaactaaagaacttactattacatgtgggagccacatgccattct

SEQ ID NO: 15918 - DNA, 433 bp, Zea mays
  Clone ID: LIB83-004-Q1-E2-G5
gcgtactatgcccaaaatggatattgcagatatggagttgcatgcaaatatgatcactcaatgggtacactaggctacagttcatctgctttgccactatctgacatgccaattgctccctatcctattggcttctctgttgccacattggctccatcttcgtcttccccagaatatatttcaactaaagatccatctataaatcatgtagtatcaccagtggcaggacccgcgcctgttggagcaatcttgccaaaaggggtattccatcatgataccattatgcaaactcagactcctacaagtgccggcagttcgagccctggtggtgggcgctgattttattgagctggtgggagtgatcctctcatcataaattttctatcacttgacacagttctgataggcctctccaatgtgaataagctgtggt

SEQ ID NO: 15919 - DNA, 382 bp, Zea mays
  Clone ID: LIB83-004-Q1-E2-G6
cggcaggaattataagccttggagatgaaagagctagtcctgccgtgatttatggattgtcagctttatcacatcacttccaaaatagctttttcagttttgaggttcttccagggatgatgggtttcctcgcgtacaaggctgcagctttggttcaagtctacagagacaacgaggacctccgcttgatacttcctgatgaagaggccgctgacagtgacagcacttgatttatacgaattagagattatgttaacctagtggttgttgacaaatacaaaacagatctgttcaccaccgagtcaagcttcacttttgaacttttttttgtctttaagagattctgaaattcgtttgcttatcttcttgggaggggggaaac

SEQ ID NO: 15920 - DNA, 416 bp, Zea mays
  Clone ID: LIB83-004-Q1-E2-G7
gtgaccaggaaaagatcaagtacctagcagaagggaagctggtttctttttgtgggcagattttgaaagaggcgtctgttctccagcctagcactggggaggctgccagtgcagacatacatcgtgtattagacttacgggcacctgttattgtaaaggttttgaaaggaatgtgcatcatggatgctcagatcttcagaaggcacctgaaagagttctatccattaattaccaaacttatctgttgtgatcagatggatgttcgtggagcccttggtgatctctttagcaaacagcttactccactcatgccctgaagtctggcagtatttcctcccttgcatagatcttgttggaacatattcttcgtcagcatttttgtgcaaacatggagcaccggttgggtgcttgacatc

SEQ ID NO: 15921 - DNA, 414 bp, Zea mays
  Clone ID: LIB83-004-Q1-E2-G9
cccacgcgtccggagagatttcttctgggacgacgagttccgggtgaagaacagctgggacgacatgcttcttcagtacgagacactggaacagtgcgccaagactggaaccatggttgtccggtgggtcaggaagtttccgttcttctgcagcgacagggagtacatcataggccgcaggatatgggcatctgggaagacgttttactgtgtgaccaagggcgtgcctcgtccctctgttccaagacaaaacaaacctcgtcgtgtggacttgtactactcgagctggtgcatccgtccagttgaatcaagaaaaggcgacggtgcaatgactgcatgtgaggtgctcttattccaccatgaagatatggggattccatgggagattgcgaagctcggtgtccggcaggggat

SEQ ID NO: 15922 - DNA, 433 bp, Zea mays
  Clone ID: LIB83-004-Q1-E2-H1
gacaggttgcctgttttatggatcaaccagctcagcaagctcacaaagttgaatttggaggtaaccagattaatgcaagatgacataagttttcttggcaagctaccaacgctaagcattctgcgcctctgtgtcaatctgcctgaagatggcctgctccgtttttgtgtttttatcaatggatttgagcagcgctcttatcagaagctcaaggtacttgagcttgcttgcaggtccagcttccatgtgacatttggatcagaaacaatgaaaaaccttgatctgctgaaaattgactgctgcagtgggtggttagatcagctttctggcctgcttcatctatctgaactcaaggaagtctggctgaagggctcctacgaggatacactgaagcatggtctggaggaacagcttgcagcccacccaaacaatc

SEQ ID NO: 15923 - DNA, 231 bp, Zea mays
  Clone ID: LIB83-004-Q1-E2-H10
caacaagtcgtccaacgtccaggcttttctgttttctttctctcacgcaagtcgcaaagcgtctccaatgatggcttccatgagaactgaagcggagaagaaccctggaagcgtgttgttcggcattctcgctcaagggctgcatgggatgtggtacgtggtcgcagtggccgcgaggcaggggctcggcactgacgacgactctgggttgctgtgcgagcagtagcatga

SEQ ID NO: 15924 - DNA, 418 bp, Zea mays
  Clone ID: LIB83-004-Q1-E2-H11
cccacgcgtccgcggacgcgtgggcgcacgggcccgacgccaccgacgcctggctgtggaagctggccaaggcgcacgtgctgacccacgacacggggtaccaccagctggtgagccactggctgcgcacgcactgctgcgtggagccctacatcatcgccgccaaccggcagctgagccggctgcacccggtgtaccgcctgctgcacccgcacttccgctacaccatggagatcaacgcgctggccagggaggcgctcatcaacgccgacggcatcatcgaggagtccttctggccgggcaagtacgccgtcgagcttagctccgtggcgtacggcgcgacgtggcagttcgacacggaggcgctgcccaacgacctcgtcaagcgcgggctggcccgtccgcggggaagacgggg

SEQ ID NO: 15925 - DNA, 248 bp, Zea mays
  Clone ID: LIB83-004-Q1-E2-H12
ctctaaactgagtcgtattaacggagtcccagcccctcatgccctctcgatcgcgctcgtcggcgccctgtcgactctagcccgcttcagggccgatcgacagcgagagcgagagtgagcgcagcggcgcgccaaggagagctctttcggtgctgtataatgacgacgacagtacgcggcagatagcacataacggcgcgcgatgtgcgacacggcggctgtcgctgctccgccgtatatgggcgttt

SEQ ID NO: 15926 - DNA, 307 bp, Zea mays
  Clone ID: LIB83-004-Q1-E2-H3
caccatccaaggccctcccaaagtcccaaaggccgccgccgcccgccagcccaccatggccgcgcagtccttcctcctcgccgccactgccgccgccaggtcccccgcggtcttcgccgctccctattcttcggaaggccctttcaattcggtcaacttcgtcgccggcccttggggcgcggccgcggcaagggcgctcgtcgtcccggacgccactaggaaggccgtacccgtcctcaggggcgcgtctgaggtcgagggcgtggtcacgctcacccaggacgactagggccctaaaaggtgtgaa

SEQ ID NO: 15927 - DNA, 434 bp, Zea mays
  unsure (1)..(434): unsure at all n locations; Clone ID: LIB83-004-Q1-E2-H4
ggcatcccttactgagctctcattcaactggactggcttcatcaatgccatgatatcaaacatctcattcacctacaggagcatttattccaagaaagccatgactgacatggatagcaccaacgtgtatgcttacatttcaataattgctctcattgtttgcattccgcctgcagtgatctttgaagggccccggctaatgcagcatggattcagtgatgccattgcaaaagtaggcttgacaaagtttgttagtgacctattcttggttggactgttctaccatctgtacaaccagattgctacgaacaccttggagcgagtggctcctctgacacatgctgtgggcaatgtgttgaagcgtgtgtttgtcattggcttctcaatcgttgtttttggcaacanaattagcacacaaactggaattggcacgt

SEQ ID NO: 15928 - DNA, 398 bp, Zea mays
  Clone ID: LIB83-004-Q1-E2-H5
cccacgcgtccgaaagaaaaaggcagcacaccaactcaccaagatagtgtggagctgctcctgcctgcagcctcctgctcatcgaccctttcgccccacaagctcgattcctcgctcggccatggctgcacccgcggaggagacgcttgccgccgaggatacggcgtcgccaccgccgccggcgaggtctgcggggttctggttccttggcgaggataagtctgtccaaaaggctctcggcgggggtaaaactgctgatgtactttggtggaaagacagaaagactccggcggcggtatttggtgggcaactggtccaaggggtccgttccaaattggtgaataacaacccctgaacctggtttcccaagttccggttgctggaacgaacaacctggt

SEQ ID NO: 15929 - DNA, 431 bp, Zea mays
  Clone ID: LIB83-004-Q1-E2-H6
gtcaaccagcgcaaggtatattgctgtccataagtattcagaagccttggacatccttcaatcaggcgctttggtacaattgaagcatggacaggttacctgtggtggtgaacttgctgtcctctttgttgacatcctcatcacaggagagtttccatatagtgaacaattttttgatcgcatcagaaagatatatgaggcattcccaaggataactgttccacatttccttggagaggactatgatgatgagggacataaattgtctgaagctatttctgctgccaaagtgcgcgcagagagttgttcatcattcctgaaagctgccatcaggtggtctgctgagtttgggacatcaagaaatggttctcctgaactgcacgttatgttagcagaatacatatattcagaatctccagagacggacatga

SEQ ID NO: 15930 - DNA, 315 bp, Zea mays
  Clone ID: LIB83-004-Q1-E2-H7
caagtcacttcttaagaagatatccaggtggatgaaagaggatggcctactattcgttcacctcttctgccacaaagcatttccatatcactttgaggataaaaacgatgatgactggatcacgaggtaattcttcactggaggaacaatgccaactgcaaacctacttcaaaactttcagggaggatgtaccggtggtaaatcattggcttgccattggaacccattaggctaaaactaccaaggattggcaaaaacgtatggccaaaaccatcatttcattagggctgatttccaaggaaacttatggaaagg

SEQ ID NO: 15931 - DNA, 401 bp, Zea mays
  unsure (1)..(401): unsure at all n locations; Clone ID: LIB83-004-Q1-E2-H8
gcaggataagtctaagctcacggggttggccttcggtcctagttatcagcctgccccttcagcaaaaggaaagccatccaagttgcataaaaggaaacatcagattggttctctgtactttgacatgaagtcaaaggagatggagcttgcggagaggcgttctaagggcattcttacgaaagcagaaactcaagcaaaatatggctggtgagganggatgtaaaagaactcaagatacatgtgtgggagctgtagaattgagatgcgtgaatttttgttgcacattttgttgtaagagttacggacttcgtaagttcaatcctgaacaaatagttcaataatgagtcaatatttttaaacttgtgttacccattaagaatcacgctcacattcaattgatg

SEQ ID NO: 15932 - DNA, 383 bp, Zea mays
  Clone ID: LIB83-004-Q1-E2-H9
caacccgaccgggctgctctgctgcctctccggcgccattgacgagcaagagagtcctcatcctccggcacctggtccgtcgcgtgccgtgcccacccgctaaggccagggcgccccgacttgagctcaccgcgccgaactcgaaccgctgctgttcctcggggcagggtcgtcgaggatgccggagcactcagagaacgcggcggcggacctgatgggcaacatcatggagaccatcgcggagaacctcccgaggcagaagtccgtgcggttcgacgacggcgacggctcctccatctccgaacaggccaagaagctgttcggcggcggcgagagcaggaagaagtcggtacaccacgtgctgggcggcgggaaatccgccg

SEQ ID NO: 15933 - DNA, 183 bp, Zea mays
  Clone ID: LIB83-005-Q1-E1-A1
acgcgatctgaagcgactagtcgaaggcggcggccgcggcgatggggagcgacctggagacggagaagaagaagaccccggtggcgctgatgcccatcgcgaagcctctcgctggaaagaagctctgcaagcggaccctcaagctcgtgcgacgagcctctgagggcaaatgcctcaagcgcg

SEQ ID NO: 15934 - DNA, 413 bp, Zea mays
  Clone ID: LIB83-005-Q1-E1-A10
atgtggaactgatgtccgtcccgtctctgctggcatgctacatgttggttccatctatagttcagcaagaggaagaggctatttgattgttccggacatctggttcggacttggagagtcttctctgtatagcaaggtagtcgcaccattgttctgctgactaattgggggttgaatgcaaagtctgaagccgcatgtcatggttcgagatccaattttgttttgatagacatactgtgaaattcattgtgccggtaaagctatatgaagacaaaatggggggatggaatgcaacctgtacataccattctttgctggttggggcaggcgatgtacgaacattcatatgcagcagtgttactgctcgaatctggagttaaacatgggcagtaatgctaggcatttatcaaact

SEQ ID NO: 15935 - DNA, 414 bp, Zea mays
  Clone ID: LIB83-005-Q1-E1-A2
cggacgcgtgggcggacgcgtgggcggacgcgtgggcggacgcgtgggaccgcattgtgcccctcctgctggtcgcagccacactgctcgcgcaggccgcggcctgcccctactgcccgacgccgaagccgccgccgcctccgccgccgtcgtcgtcgtccacgccgtgccctcccccgccctactcgccgtcgccgtccacgccgacgggtaagtgccccgtgaacacgctcaagctgctcgcgtgcgtggacgcgctcaacggcctcgtgcacgccgtcatcgggaccaaggccagcgacacctgctgcccgctgctctccggcgtggccgacctcgacgccgcgctctgcctctgcaccaccatcaaggccaaggcgctcagcgtcagcctcgtgctccccgttcgcatct

SEQ ID NO: 15936 - DNA, 401 bp, Zea mays
  Clone ID: LIB83-005-Q1-E1-A3
cggacgcatgggcgaggaccaaggcggtcaactacctgcaagttagcctcgcaatctttaggaagctatgcattctaaagggtgtctttccacgtcagccaaagaagaaggtggaagggaaccacaagacctactaccacacaaaggatattgcattcctcgctcatgaccctttgatcgagaagttcagggagattaaggtccatcgaaggaaggttaaaaaggctgttgctaagaaaaacagggatcttgcagacaggctgttgaatcggccaccaacttacaagcttgataggcttgtccttgaaaggtatccaacattcgttgatgctcttcgtgacttggatgactgccttacaatggtgcatctgtttgccgcattacctgctgttgacggtgaa

SEQ ID NO: 15937 - DNA, 402 bp, Zea mays
  Clone ID: LIB83-005-Q1-E1-A4
aaagatacgagggagcatcgacgttgtatggcccccacacgttgagcgcctacattcaggagttccagaaacttgctacagccatggtggcaaacaaagaggtcccgacaaattttcagcccccagacatgttggacaagcaaataggactcctcccaggcgttgtgttcgactccacacctcctggggtggagttcggagatgtcagctcagacgtccccgcaagctcaactttcaggaagggcagtgtcgtgaacgctacattctactcggcgtgcccgaggaatgaccttctcacggacggcacgttcgcgctcgttgagaagctggacggcagcaacagctgggttcctgcctacgacgacgacgactggtcactacgcttcaagtggtcgagaccgt

SEQ ID NO: 15938 - DNA, 430 bp, Zea mays
  Clone ID: LIB83-005-Q1-E1-A8
aatcttccaaaacccaacgcggcaaacggctaatgttccttcctgtcaccatggccgtccacaccaccacctcctcctcacatcccctcctcttcctctatcgcggcaccgcaaaccctagccccgcggttctctccttgccttcttctctccgtggcgtgtctctccgctcccgggccaccgccgcaccgcccgcagagaccctctctgacgacggcatccctgacgcgccaccggaaggggagggaacgggaattccgttgccatcgtcgattggggatgatggggagcagctcgcacccaagcagaagatcagaatcaagctgcggtcctactgggtgccgttgatagaggactcatgcaagaagataattgaagctgccaaaacaaccaacgcataggaccatgggtcctgttcctcctgcccact

SEQ ID NO: 15939 - DNA, 398 bp, Zea mays
  Clone ID: LIB83-005-Q1-E1-A9
aacgcaccgtgtgtacgtagagagctaggcatggcctggctcgccatgcttgttgtgtgtttctttgattgtacatgagaggacccgtttctgctgccaaaaaaaaaaaaaaaaaaaaaaaaaaaaaaaaaaaaaaaaaaaaaaaaaaaaaaaaaaaaaaaaaaaaaaaaaaaaaaaaaaaaaaaaaaaaaaaaaaaaaaaaaaaaaaaaaaaaaaaaaaaaaaaaaaaaggggggccccccaaaaggataaaaattaaattacccttgaaggaaacttaaaaccccttcaaaagggcaaccaaaattaaattcacgggccgtcttttaaaaacttcttaacgggaaaaaccctggggtaaccaaattaaacccccttgaaaaaaaaccccctttccc

SEQ ID NO: 15940 - DNA, 380 bp, Zea mays
  Clone ID: LIB83-005-Q1-E1-B1
aaataaaccggaggcttcggcccgccttctcgagcccttcgcccaattcctcaatcggaccaaaccctaggagccacatacatttcgattcgatcggaaatctggcatggcaatgtcagatctcacagccaccgtgatcccgaagccagacggggccgacgacgagtcggtggagatccgggaggtgtgggcggacaacctggaggaggagttcgcgctgatccgcgacatcgtcgacgagtacccgttcgtcgcgatggacacggagttcccgggcatcgtctgccgccccgtaggcgccttccgctcgcccgccgactacaactacgcgaccctcaaggccaacgtcaacatgctggcactcatccagctcggcctca

SEQ ID NO: 15941 - DNA, 285 bp, Zea mays
  Clone ID: LIB83-005-Q1-E1-B10
cggacgcgtgggcggacgcgtgggcggacgcgtgggggctgacggctcctccttattaatgtgtactattagaacatcaccgtatcctttggcaattgttctcatctatctgggtctatctgttggctgcccggtgacggtatacggtgatgttctaatagtactcaattggtcttggagttcatgctacggctcctctgttatatattacacggctgacggctcctccttattaatgtgtactttgatgatgtcattaataatatgaatctgatgatattgaat

SEQ ID NO: 15942 - DNA, 403 bp, Zea mays
  Clone ID: LIB83-005-Q1-E1-B12
ctcacgagccacagcccacagcaggctagctctctagcggtctagccagtccacgcagcgcagggatggcgtcgttcgccgtggcaacggccccgtcgctagcggccccggcagccaagaggaggcccgccgccggcgtcacgtacgtggagggcatgaacgcctacagcggcctcaaggggctcaacaaggtgaccatgctcggggtgcgcaagaccgccgactactccttcgccaaggtcgtggcgtcgctcagccccgcgggcaggaagcggcgcggcggggcgttcggcgcccagatgaatgccgccgccgagatcttcaggatcgccgccaccatgagcggcctcgtgctcgtcggcgtcgccgtcggcttcgtgctgctccgggtggaggccgccgt

SEQ ID NO: 15943 - DNA, 363 bp, Zea mays
  Clone ID: LIB83-005-Q1-E1-B4
accacgcgtccggaaatcaccaatgaattagaggaactacagaggaagctgaaggaaatcgaagctaataaggatttagtggagggagaaaacagtaagcttcagtctgagattctcacagcacaggagaaatatagacagtctgaagcagaggttaagtgcattaaacaagtaatgtgttcagtggtggaggcgaaggaggcagctgcaagggcatctgaagctgagaaggcagaaatcatggaggaaatggacaaccttaagaggacaatcgaggagatcaaggccaacagggatttggtagagagtcagaaccaggagcttcggtcaaagatttcgagtgcagagcaagaacgtagccta

SEQ ID NO: 15944 - DNA, 377 bp, Zea mays
  Clone ID: LIB83-005-Q1-E1-B5
ggcatgcagccatgcaggcttagtagacgaagcactgcgttatttcgaggcaatgcacggagactacagcattaccgctgatgaggctcactatgcctgcatcgttgactgttttggcagagcaggtcagctccaacgggcttatgagttcatcagaggaatgccggtggttccaaatgcttgtgtgtggggtgccctacttagcagttgcaggatacacggaaatataggcctagcagaaattgccgcgaagaagctcgttgagctggaccctcagcattctggatactggatgctgctaaaggatatgtactcaaaagccaagagatggaatgatgtatcgcaacttcgagctgctatgagagataatggcgtta

SEQ ID NO: 15945 - DNA, 399 bp, Zea mays
  Clone ID: LIB83-005-Q1-E1-B7
agcgaggagcaaccaacaacatggcactctcgtttaggctggtcgccggcgttcttctggtcctggcattagctctgctctcttcgagcgcggaggagaggagcgccgggcgcgctgccactgtcagcgcgatgggctcagatcacgatcagacgtcggaagctccggtgccgccgttgaggcctcttggctcgaggaaaccggtggcggctccgccaccgccgaggccggcacatccacgggcgagtataaggccatttcctccacctcgtccgtcacagccgcagccgcagccgcagccgccgccggcaacaccacgctcgtaggtgtaggctgtgtacgtctaggcagccggcaagctctagccctctaggtctacagacgtgagaaaatggtttg

SEQ ID NO: 15946 - DNA, 425 bp, Zea mays
  unsure (1)..(425): unsure at all n locations; Clone ID: LIB83-005-Q1-E1-B8
atcatcttttctcatttttttctgttgggtttcaactgtagcctgatatgacttattgccacaatcaactgttatgtagtctttagtacgaattcttctaggatttttgaaccaggcccgccctattttggggccatgggcagcaacactggtggtgccagtggtggcttctaccagcccttcaacagcaacttagctggtgcaggggctagcactggcatccaaaactttccaggtgtacggctgcgaggtctcccttttgattgcaatgacattgatatctgcaagttctttgtgggactggacatagtggactgcctcctggttaacaagaatggtcgcttcactggtgaggcttttgtggtcttcncaacagctatgcaaacagaatttgctctgcatcgtaacaggcagaacatgggccg

SEQ ID NO: 15947 - DNA, 394 bp, Zea mays
  Clone ID: LIB83-005-Q1-E1-B9
accacgcgtccggttctacctgaagtccacagcgtggatgtggtgatccttatgttcctgctggtgctaaactcctccccagtctccagagtaatatgttccagagctatacacactgtcttccttggtctggtgaccgcacccatagattctcttacctcaccatggccaagtcatctggagcagttgtgcatctggggccatgccaccgtggtctggcgctacggacagcctccacgccggccgagcgactcacgctttctccggccgtcttcacgcgagcaccaaagtcttgccatggcctttaactactaccgaagcacttggtgtgggtctgctgcagctaataagaacaatgaagaaattgaagcatgtgctgttttggttgcaacat

SEQ ID NO: 15948 - DNA, 263 bp, Zea mays
  Clone ID: LIB83-005-Q1-E1-C1
caccaaatggcgctagaccacggcgccgagcatatcttcctctttccctaccgaccgagagggagatgagcggtggcgtgcggagggtcctggaggcgtggaggctcggcgtggtgaagtacggcgaaacgctccaattgcaggagcgtctcgtcgcggaccgcaaagccggccgcgtctgcgaactccttctgtctctgcaacacccgccgaactacaccctgggcaagcggcgccagaaagcggaacgggaactgctcgcg

SEQ ID NO: 15949 - DNA, 410 bp, Zea mays
  Clone ID: LIB83-005-Q1-E1-C10
ggctggtgatgctctgggcgccaagtgtgtacatcttgctcctcgcaaggctcattgatgggttcggtatcggtttggcggtcacacttgttcctctctacatctccgagactgcgccgacagacattcgtgggttgttgaacacgttgccgcagttcagtgggtcaggagggatgttcctctcctactgcatggtgtttgggatgtccctcatgcccaaacctgattggaggctcatgcttggagttctgtcgatcccgtcacttatttactttggactgactgtcttctacttgcctgaatcaccaaggtggcttgtgagcaaaggaaggatggctgaggcgaagagagtgttgcaaaggctgcggggaagagaagatgtctcaggggagatggctcttctagttgaa

SEQ ID NO: 15950 - DNA, 412 bp, Zea mays
  Clone ID: LIB83-005-Q1-E1-C11
gcgaggttcatgatggaggcgccgccgccgcaggtggtgtcggtcatgcggcggaggaaggcgccgaggagcctgagcaccatcgccgaggacgacagggagatgctggcgccgtgcgggtcaccgtcggaccacggccacgtacatacacataactagagcgagtagagataccgtctcttactgtgtgtgtgtgtgtgtgtttatcaactcctcgatgcatggcgaaggcgcaggcgcaggtggcggcgaggttcacgacggaggtggcgccgccgcaggtggtgtcggtcatgcgacgaaggaaggggccgaggagcctggacaccatcgccgaggacgacagggagcagcagctggcgtgcgggtcgccatcggaccacggcctcgcgacggcgtggtcgtcgctcca

SEQ ID NO: 15951 - DNA, 411 bp, Zea mays
  Clone ID: LIB83-005-Q1-E1-C12
gctctactctcattggtggtgagacagaagctctggagaggttgaagaagtttgctgcagaatgctctatgcagccaaacaaagtagacaaaagcaatacccaagatagcatatatggtgctaatttctcttgcaaaatttctccatggcttgctacaggttgcctctctccacggttcatgtatgaggagttgaagaagcatgctactaaagcaattccttttgggtcaacacccaagaataatgatggcacatctgatgctggaacaaattggttaatgtttgagttgctgtggagagatttcttcaggttcatcacaaagaagtacagctctgtacagaagacatctgaagttgccactggctgcactcccgccccagcgcttgcatgaacttacttagacaagctga

SEQ ID NO: 15952 - DNA, 432 bp, Zea mays
  unsure (1)..(432): unsure at all n locations; Clone ID: LIB83-005-Q1-E1-C2
gtgggcgcgaacatctccggcgggcacgtgaaccctgccgtgaccttcggcgccttcgtgggcggcaacatcaccctgttccgggggctcctgtactgggtggcgcagctgctggggtccaccgtggcgtgcttcctgctccgcttctcgacgggcgggcaggccacgggcaccttcgggctgacgggcgtgtcggtgtgggaggcgctggtgctggagatcgtgatgaccttcgggctggtgtacacggtgtacgccacggcggtggacccgaagaagggcagcctgngcaccatcgcccccattgccatcggcttcatcgtgggggccaacatcctggtgggcggcgccttcgacggcgcgtccatgaaccccgccgtgtccttcggccccgccctcgtcacctgggagtggggctaccagtgggtgtac

SEQ ID NO: 15953 - DNA, 328 bp, Zea mays
  Clone ID: LIB83-005-Q1-E1-C3
accacgcatccgcggacgcgtgggcgagtacgtcgtgcaggtcgacaaggtgtccatcgcgccggcgtgactcgtgagggcctgttggggcgaagctacattattcttagaggtgcaaattcacccaaaaatatacaaaatctataaatttagttaagatttcaatacatttacatatgcatctttataataaattcttatgcacgtataaaaaaaaaaaaaaaaaaaaaaaaaaaaaaaaaaaaaaaacaaaaacaaaaaagacgaaaacaataaaaacaaggcaagcctggcgagcaaacaaaaaaaaaaaggggggcccccccaa

SEQ ID NO: 15954 - DNA, 356 bp, Zea mays
  Clone ID: LIB83-005-Q1-E1-C4
cggacgcgtgggcggacgcgtgggtaaagatgaccaaattgctgcagcaaggcgcttgtccttatcttcaaaggaactggacttgagtggccttggagtgaccagtgtaccagctgccgcgtgggagacaagtgatgtggtgaaactggatctttctaaaaattcaatagaagatctaccaaatgagttgtcattatgctcatcacttcaatccttagttttgtctaataacaagataaaaaggtggcctcacacagtggtttcctcccttccctgtctgtcttccttaaagctggacaataaccccttggtagagatatcatccactgatcttgtgcctctgtccaaacttgaag

SEQ ID NO: 15955 - DNA, 374 bp, Zea mays
  Clone ID: LIB83-005-Q1-E1-C5
aggagtggctattagaataggtgggatggctaaaggttctggaatgattcacccaaatatggcaacaatgcttggtgttttgaccacagatgctcaagtcagcagtgatgtctggagagaaatgatccggatgtcagtgagtagaagtttcaaccaaattacagtggatggtgatactagtaccaatgactgtgttattgctatggcaagtgggttgtctggtttatctggaattcaaagtcttgatagcattgaggctcaacagttccaagcatgcctagatgcagtaatgcaaagtcttgcaaaatccatagcatgggatggtgagggtgcaacatgcctaattgagggtactgtaagtggcgccaacaacg

SEQ ID NO: 15956 - DNA, 407 bp, Zea mays
  Clone ID: LIB83-005-Q1-E1-C6
cccacgcgtccgcggacgcgtgggcatcgccatcgtggagcagtcggtgtcgccgggcggcggcgcgtggctgggcgggcagctgttctcggccatggtggtgcgcaagccggcgcacctgttcctggacgagctgggcgtggcgtacgacgaggccgaggactacgtggtcatcaagcacgccgcgctcttcacgtccacggtcatgagcctgctcctggcgcgccccaacgtgaagctgttcaacgccgtggccgtggaggacctcatcgtcaggggagggcgcgtcggcggcgtcgtcaccaactgggcgctcgtgtccatgaaccacgacacgcagtcctgcatggaccccaacgtcatggaggccaaggtcgtggtcagctcctgcggccacgacgggccct

SEQ ID NO: 15957 - DNA, 410 bp, Zea mays
  Clone ID: LIB83-005-Q1-E1-C7
cggacgcgtgggtgccagtgccaccatctcgccgtcggcgtcggctcgtcgcctgagagccgaggccacgcaggcacccgggccgggggatgtcggcgccggcggcacaggccgtggtggcgctggctctcgcggccatcctctcgaccccggcgccccaggcggacaccttctccaacgtcccgcccacgctctccgggggcgacgggaagcaagagcggatcaagcaccccaggtcggccaaggcgttgcagtgcacgaccaagtgcgtcggcacctgcatccgcggcggcggcggcgcgcccggcgaggggcccctcaacgtcaggaggcccctcgtggtgttcaaggacggcttccgcagccggcagtactggtgggtactactactacctgcactacagccccct

SEQ ID NO: 15958 - DNA, 414 bp, Zea mays
  Clone ID: LIB83-005-Q1-E1-C8
gaagtgcgagcgacccacgtccacacgacacgaaccaccaccaccaaccagcagccgcaccacgcacccagcgcaaagcgatggcgtcgctcaccatgatggcgtccttcgccgccgtggcggtggccgcgccctcgcgccgcggcaccttcgccgtggtcaggtccgccaaggtcgaccgctgccaggagcccgccacgctagcagcaaccgaggccaggcccgccgccgacggacgccgcgccgtcatgctcgcggctgctgcggcggccgtggcagccatcggcggcgccggcgccgccatggcgggccccaagaacgggacccccgaggcgaagaagaagtacgcggccatctgcgtcaccatgcccaacgccaaggtctgccacaactgagcacgcccgcgttgcatgc

SEQ ID NO: 15959 - DNA, 411 bp, Zea mays
  Clone ID: LIB83-005-Q1-E1-C9
gtgcgagcgacccacgtccacacgacacgaaccaccaccaccaaccagcagccgcaccacgcacccagcgcaaagcgatggcgtcgctcaccatgatggcgtccttcgccgccgtggcggtggccgcgccctcgcgccgcggcaccttcgccgtggtcaggtccgccaaggtcgaccgctgccaggagcccgccacgctagcagcaaccgaggccaggcccgccgccgacggacgccgcgccgtcatgctcgcggctgctgcggcggccgtggcagccatcggcggcgccggcgccgccatggcgggccccaagaacgggacccccgaggcgaagaagaagtacgcggccatctgcgtcaccatgcccaccgccaaggtctgccacaactgagcacgcccgcgttgcatgc

SEQ ID NO: 15960 - DNA, 384 bp, Zea mays
  Clone ID: LIB83-005-Q1-E1-D1
cccacgcgtccgcgcaagaaaatctcgcgatttcccctcgcagtctctcgcacgcgccggcatggcgacgctcgcgcggtggcatctacaacctcctactgcccgccccctcgctcgccggcggatcccgcgccgggctgcgaccgtggtttccccgcgcgcgttcagccgcgcggacttcgatggcttcgtgcggcgcgcgtggcagggcgccaacgcgggggccgagcgcttcgccttcgaggcacggcaggccgcgcagcggctggacagcaggttctcgatctcccggaggctcgcagacgcttcccgtgccgcccgcgcccgcgcagttgagatcgacgccgagttcggcatccggcggccgtggcgctccttctctgt

SEQ ID NO: 15961 - DNA, 403 bp, Zea mays
  Clone ID: LIB83-005-Q1-E1-D10
cgcgagtgagtgaacaccagccgtattgtcccgactcctgacccctaccgatcctcgcctgctgcagccatggcgacctccgcggcgctctccaccgccgccaatcccacccagctctaccggtcccgcgcttcgctgggcaagccggtgaaggggcttggcctgagcatgggccgcgagcgcgcccagcggagcattgtgtgccaggcggcgagcagcatctccgccgaccgcgtccccgacatggagaagcggaagctgatgaacctcctcctcctcggcgccatctcgttgcccaccgtcggcatggtcgtcccctacggggccttcttcgtccctgccggctccgggaacgccggcggcgggacctacgctaaggacaagctgggcaacgacatcacgg

SEQ ID NO: 15962 - DNA, 419 bp, Zea mays
  Clone ID: LIB83-005-Q1-E1-D11
cgttcgacatcgacaagatgctcttcatggactggcgcgactcgcacctccccgaagggtcggagatcagggagcgcaaccgccgcatccccaccttcctctacgccatgcccttcttcgacctggagccacactactggcatggtttcctgtcatccagactgttcctgccggagctcttgatgttcggcctcgcactgttcgggaacgcctccaactcgtcgaggctggagatcatggccaagggcaccgtgcctcttggcaagatgattggcaacttgatacaggacagagatgggtgaggagggtatgtatacctacatttttcacgtgaagatctgatctccattggatctctgattttggtatccatgattttcactgtatttacgatttgcaaagatggattcacaaaacac

SEQ ID NO: 15963 - DNA, 266 bp, Zea mays
  Clone ID: LIB83-005-Q1-E1-D12
atgaagatgagacagagctgtgtgggagaaacagaaacatgggaccttctcttgtgtgacggcgaaatagtgtagcgctagcgcagcaaccagcaaaaggctcatgtaaagaattgttcacgaaacagaagagcttcacttctaccttctgtaggacatggtcatcgcaagaggcataaatcgcaaaaggcattggtattatttcctgctggaagtaatttctgccgggacggatattcattttcagggtgaatttgaattttttt

SEQ ID NO: 15964 - DNA, 357 bp, Zea mays
  Clone ID: LIB83-005-Q1-E1-D2
cacgggcgttcagggcgccgtcaacgtgcagggcgaggaccagaagaagctcgatgtcgtctccaacgaggtgttctccaactgcctcaagtcgagcgggcgcaccggcgtgatcgcctcggaagaggaggaacttcccgtaaccgttgaacaaaactactcgggaaacaaaacctcctgttcaacctcctcaatggtccttcaaaaatcaaccccgccgtctcaactggctcaatcttcggaatctacaaccccaacaataattgcctcgccgacttcaacaaaattaaaacccttaatccgttgaaccaaagttcaaccttaaacttttgcaacccgggaaccaccctgctggcc

SEQ ID NO: 15965 - DNA, 233 bp, Zea mays
  Clone ID: LIB83-005-Q1-E1-D3
accacgcgtccggttctagatcgcgagcggtcgcccttttttttttttttttttttgagggattgagggggcattcctttaacaaaatccaaacaattcttaatttgcaatacatcactatcagcaagttcaacgaattccacaaaaaattggtaagatacagcatgatgttgctaattgtttcaaaaaaaacactgctttctcatccgcacgtgcatgccaacatgaatttg

SEQ ID NO: 15966 - DNA, 320 bp, Zea mays
  Clone ID: LIB83-005-Q1-E1-D4
gaacgcgtggtgcgacccgggattccctcgcgcttctctgtgtccccttcctccggcctgaggggaggaccccgcagatcccatcgaaattcacggccggcctaacccaagccggtcctccccgactcccggcgacgaccaatttctccctgttctcgcccctccaacccttcatgatgcttagataatatacagtgctgggttttagcactgttttgagtttttaaattgagctaaggcttcagtgttagtcttgaaagatgaacggttcaagtggttcccaagggcatcatgtcagtggagagaagaacaagtgtgtc

SEQ ID NO: 15967 - DNA, 104 bp, Zea mays
  Clone ID: LIB83-005-Q1-E1-D5
aggacaacctcgttgttcatgtataaacctagctatattctgctttatgagcatatatgtgtgtgtaactaaatgaatcctccacacgtgctgtgctgctggat

SEQ ID NO: 15968 - DNA, 196 bp, Zea mays
  Clone ID: LIB83-005-Q1-E1-D6
aggacgcgtgggcgaccgcgaccggtgggcggcggaggcaaggtggggtgggtttctacttctaccacgacacgcgcgcgtgatcttgcggtggtttcatcagctcacacacagagaacaggatcaggatcaggatcaggattaggacagatgggaaccgagaacggtagcaacccctcctcgaacgtcctggatg

SEQ ID NO: 15969 - DNA, 336 bp, Zea mays
  Clone ID: LIB83-005-Q1-E1-D7
accacgcgtccgcaccaaacttgtcgcatcgtcgacttgtgagtctcttccgtcggcgtcgacgagagctgcgctaggtgatctcgactgcttcctcgtcccccatggcgacggcgctcaaatcgttcctgaacagccccgtcggccccaagaccacccacttctggggccctgtcgccaactggggcttcgtcatcgcgggtttggttgacatgaacaagcctcctgaaatgatatctggcaatatgacagcagccatgtgtgtgtattctggactctttatgaggtttgcatggatggtacagccccgaaattatttgcttctagcaatgcatg

SEQ ID NO: 15970 - DNA, 389 bp, Zea mays
  Clone ID: LIB83-005-Q1-E1-D8
agtgccgcaggccgccgccgcctcatcgccggcgaagcgggtgcagctggccgcgcccgagggccgccgcgccgctctgctcggcctggcggccgtcttcgccgtcacggccaccaccgggtcggccaaggccacgatcttcgatgagtacctcgagaagagcaaggccaacaaggagctgaacgacaagaagaggctggccaccagtggagccaactttgcgcgcgcctacaccgtggagttcggcagctgccagttcccctacaacttcactgggtgccaggacctcgccaagcagaagaaagtccccttcatcagcgacgacctcgagattgagtgcgacgggaaggagaagttcacgtgcggctccaacgttttctggaagtggt

SEQ ID NO: 15971 - DNA, 327 bp, Zea mays
  unsure (1)..(327): unsure at all n locations; Clone ID: LIB83-005-Q1-E1-E1
ggcgttactacccccggccaagctgccgctgcaggggcgtcggttcgctagccccaaaacggcgggacgtatcagtgtcagggtccctccggcgcgagcgcagcaagagcagcaggtgaaggangaggaggccgaggcggcgagcgtgccgccgccgcaggccgcggagaaggaggcgaggaagggggacgcgcagtccctgccgcggcagcctttggcggagagcaagaacatgagccgcgagtacggcgggcagtggctgagcagcaccacgcggcacgtccgcatctacgctgcgtacatcgaccccgttgacaacgcgttcga

SEQ ID NO: 15972 - DNA, 409 bp, Zea mays
  Clone ID: LIB83-005-Q1-E1-E10
ggagcagacagcaccgcggacgttctacgacctgctcgggatctcagcggatgggagccccgatgatgttcgggcgtcctacaggcggctggcgctaaagtaccacccagacgtgtcccctccgggcgccgcggccgagaacacgcgccgcttcatcgaggtgcaggaggcctacgagacgctctccgacccaagccgccgctccagctacgaccgtgcactcgcccgcggcgtctgccgcctcgccttctccgggcgccgttcccaatcccaccacgcctactaccaccaccaggagcagggagagagatctgggtggagaaggtcctgggaggaccagatcgcagagctgaagatgaggagcgtggcgaaggattcagaatagaacctgtcgtggggcgctcgcatg

SEQ ID NO: 15973 - DNA, 415 bp, Zea mays
  Clone ID: LIB83-005-Q1-E1-E11
accacgcgtccggtcttccctatagagccaatcgcaagccttgctgccatggaagttgggaggggagcacgtgcccaggtgcccgtccaggatccaccacaaccgccagtgccttttacaggtcatgccgcggacggcactgcttcgccttgctgcagcttcgacgcgcgcgtcctcggctcccgcggcgcggcggctgtactcgtcctcacactcacacggacacggcagcgaggagcacgcgatcactcgggaggatgagcagcttccaccgccgccccacgggccggaccccggcgtgcggcggctgcctcgtcgccgtggagagcatcggtgagcatggatagatagtaagcttgcattcgagcacttctgcagttctgctcatgcgaatacccagtgtttcttttctgca

SEQ ID NO: 15974 - DNA, 410 bp, Zea mays
  unsure (1)..(410): unsure at all n locations; Clone ID: LIB83-005-Q1-E1-E12
gcaagattggtaacaataacatctttgctaataatactctatttgctggtcacgtaattgttgaagattggactcacaacgcanggggcggttgtgtccatcaattttgtcctattgggtcaaaatccttttcttggcggaggccccttggttgcaaagaatttccaaaggtaaataagggttgcaggtaataaacaaaaatcccttggccaaaaaattgaaggcccaaggcccattggattccccaacaaaaaggtccttaggttaaggaaagcttatcanaaattatttatgccaactataactagcaagagtagctttgaagacagactggctgaattggagcaggaagttgagctgtcggaatctcctgctgtgtcctgcatggtcgaatcgatccgcatgtcgtt

SEQ ID NO: 15975 - DNA, 367 bp, Zea mays
  Clone ID: LIB83-005-Q1-E1-E3
gtacgacggcggggaggcgaaagatagccagcagcgagagccagcgaggctaccttgctcccgagtacgccgccatgttcggcaaaccaactgcaggctgcgatgtatacagcttcgggatcatactgctggagcttgcgagcggcagaaggccagtcgagaagtcgggttctggcaaggcttgtggaatccgaagctgggtgctcccgctcgcaaggcagggcaggtacgacgagattgcggactcgaagctgggcgacaagttctctggatctgagctgagaaggatggtgttggtcggtctagcgtgcacacgttcagaacctgaaaagagacccacgatgcttcaagtcgtgccgttgctgaa

SEQ ID NO: 15976 - DNA, 328 bp, Zea mays
  Clone ID: LIB83-005-Q1-E1-E4
cccacgcgtccgattgggtgcgccaagccgctcgcggcgccgctgcaggcatgggctcgcccgccgtctcccgccggtcgccgcctccccccctcgttctgcgcccctgacacctccccagctctcaaccgcgccgtcgagagcccaggccagtctcagtctgacgacgccccgccaacaagccccggttaaggcgcctcgtccctggcgccgcgcgcgagctcgcatctcgaccgatggtcccggtctccggcgctgcggtccggccaacgggcggcgctgaaccgcgcggggctctcctcgggctcggtctctgggccgccggtga

SEQ ID NO: 15977 - DNA, 233 bp, Zea mays
  Clone ID: LIB83-005-Q1-E1-E7
gaccacgcgtccgcccacgcgtccgcccggttccgcgtgcctttccccacctaatctcgcggctctcgccaaccagttcaagggttccggtcccgggttgctaaaccgcccccgccggcaatttcaaaccaagggggaaaggcaaaccccttaaagggcccaaaggccacaagaaagggtttcaacaaacaggtcttggacatctgcagaagaaaaaagattaggaaaaagca

SEQ ID NO: 15978 - DNA, 417 bp, Zea mays
  unsure (1)..(417): unsure at all n locations; Clone ID: LIB83-005-Q1-E1-E8
acggacgcgtgggggcagctgcacgtgctttggcaatcctaggggagaatgagaacttacgtcgagcaataagaggaaggccagttgcaaagaagggtctacgcatcctatcaatggatggtggtggcatgaaaggccttgcaactgttcaaatgcttaaacagatagagcaaggaactgggaaacgcatacatgaaatgtttgacctcatatgtggtacatccactggtggcatgcttgcaatggctcttgggatcaagcagatgactttggatcagtgtgaagaaatatacacaaaacttggaaaacttgtatttactgaacctatcccaaaggatgaagctgctacgtggaaggagaagattgatcaacttttcanaagttcctcacaaagttttagagtgggtgtacatgggt

SEQ ID NO: 15979 - DNA, 402 bp, Zea mays
  Clone ID: LIB83-005-Q1-E1-E9
gttcaactccgtgacccactgcgcaactacgagccagtgggcacaccaatgcttgcattaattcaagttgaaagggtttttgtacccccaaagcccaaaatctacagtactgtctcagacaaaggcaacagcgagcaggatgatgaggaacccaagaccgaaaaggttccagataaggcattggtcacggaagagaaggctgaggaattagaggatcccattccccaattcaaggttacagaagtgcatgtcgctggtttcaagagcgaacctgagaagaagaaaccatggggcaatcaaacgcagcagcagtctggctctagatggttgcttgcagctggaatgggcaagggaaacaagcatcctctgatgaaatccaaagctatagtgaagccaaccaaa

SEQ ID NO: 15980 - DNA, 193 bp, Zea mays
  Clone ID: LIB83-005-Q1-E1-F1
cgcgtccaattttaggcaacacgcagcagtagttacattgggcatagtgttgtaggctttaaagggaaccatcaaaaccctaaattacatgtatgagggattgaacgtgtatataaagtattcagtggtaccactttacaaagctggcccggagattgataatgttcacaaaaaagaggtgtcccttgataat

SEQ ID NO: 15981 - DNA, 418 bp, Zea mays
  Clone ID: LIB83-005-Q1-E1-F10
ctcgtgggtcgacacaagcctctaaactgacgttgtgactaagcgtccgcccacgcgtccgggatagacttagaagctttggagaagggaaagacccaaccacagaagaaaatcaaactgcagaaaagaagtgttcttcacaaatgaatctgaaaaattctgctcgttcatcgtctgtcagtatcgtttgggaaagctgtctgaagcattaacagttttacttaacgtcagatgtgtaggactgatggtcaccaagttcccggtgacactgtatacaatcgcagacgcgatgctatgttggtgattgaacaggtgtagccgaatagttggatccaataacttcacctgtaatgtaatggtccaattttatcatgggaactgtagttctaaatactccagtgaccagtgctattgtggt

SEQ ID NO: 15982 - DNA, 419 bp, Zea mays
  Clone ID: LIB83-005-Q1-E1-F11
cggacgcgtgggcgcttttgctctctccctcccggctctcggcttcttctacacgctaccgtctcacagccgtaaacgcccctcccggatcccgctagttcgccaccgccgcccgcccgcccgccgttcgcctcatcatggccgcctcgtcgaccgccacctccgtccacgacttcatcgtcaaggatgcgagcggcaaagacgttgacctcagcacctacaaggggaaggttcttctcattgttaacgtcgcatcccagtgtggcttaactaactccaactacactgagctggcccagctctacgagaagtacaaggaccaaggctttgaaatcctggctttcccatgcaaccagtttggtgggcaggagcctggtaccaatgaggagattgtccagtttgcctgcacacgcttcaag

SEQ ID NO: 15983 - DNA, 408 bp, Zea mays
  Clone ID: LIB83-005-Q1-E1-F12
taaacagacgttctgccaacgcgtccgcggacgcgtggggtcacttccattttctcaataccttaagcaaggaccaatgtctcaagcccagccccctcgttcccaagcccagtggaaacacgttaaatttcaggataaccaagctaatgccatgaaggaaccaggaaccggtgggtatggctatgggacgaaaaatgacaagaataaggatgtggatacaatagcttcggacttcatcaagctgaagcacaaggcttgggcactccagaagagcacaaccatgtaccaaccttctacctaaaggtgtcaatagttcaagaagttgatactatatacttatgcttgtctctgtatagtctataagtcctaattcaaataacaggtgctgcttgcagccttggatatttg

SEQ ID NO: 15984 - DNA, 408 bp, Zea mays
  Clone ID: LIB83-005-Q1-E1-F2
caccactccgcgctagctgaggacggtacagcggcacagaggtgcgacgtacgacgacgacgacgcaggcgccacacatggcatcccagctctccgccgccgtgccccggttccacggcctccggggctacgccgcgcccaggtccgcggtggcagcgctgccgtccgtgagggtgggcaggaagaggtcgtcgtcgcagggcatccgctgcgactacatcggctccgccaccaacctgatcatggtgacgacgacgacgctgatgctgttcgcggggcggttcgggctggcgccgtccgcgaaccgcaaggcgacggcggggctgaagctggaggcgcgcgactccggcctgcagacgggtgaccccgccgggttcaccctcgccgacacgctggcctgccgcgccg

SEQ ID NO: 15985 - DNA, 436 bp, Zea mays
  Clone ID: LIB83-005-Q1-E1-F3
gcaggacctcgtcgcccatctcccgccgtccatggtggcgcccttcgccaacgttgcagccgaccgggccgccgccgccgctgccgccgcgaacgcgtcggccgcgatggccgaaggcggcaaacgccactgccacggaggcatcaaagggctcatgggcatgggcctcaacaattctatcggcctcgccaacgccaccatgccgctggctcacggcttgtactacacgcccggtgagtcttggaccaatggaggcaatgccgccgtccatgatcatcaggtgagccacggcggcacctcgcctcagacggtggctcaccactcgccgttctcgtctctgctgtctcttgctgctccggggccccagctcgtcttctactcgccggaaggcggccgcttcgccatgaaagaagccaccgatcatcagttcgctgtt

SEQ ID NO: 15986 - DNA, 382 bp, Zea mays
  Clone ID: LIB83-005-Q1-E1-F5
attttactcaccaagcagcagtatagacattgggcatggtgttgtagctatgaaaggaacccagcagacccttaaatacactcagcaagggttgaacctgtgtgttgactattcagttatgccattttacaaagctggaccggtgatggatcttgttcacaaaatagtggggtaccttgattatcgaacaactctgaacaagaggcaaatggaaaatctggttgatgagcttaaaggccgacgtgtaaccgtgattcatcggaggactaatcagaagtacacagtgcaaggcttgacacccttacctgccagccagatgacctttgtggatgctgaatccggacaaacaaaatgtcttgtggagtattatgctcagaaacat

SEQ ID NO: 15987 - DNA, 259 bp, Zea mays
  Clone ID: LIB83-005-Q1-E1-F6
agtaggcttcggcacggtcgcgccggccgtggcatcatcgccggcggccaggacgacgagcgtgggccgcccctccgcggtgcacgttcctgcggcgacgaccaaggtcgtcgccgccgccgccggttaaccggttgaagaaaaaggcctgttccacaacaacctccgggccccgttcaaaggagaaccacctgctgaaaacggcccccttcttaacaaggtggggaaccagggcaaaggcgccgccgcccccgcgccc

SEQ ID NO: 15988 - DNA, 409 bp, Zea mays
  Clone ID: LIB83-005-Q1-E1-F7
cgaacagacctctaaaacctagcagaggcccgcgccgccgccgccaaccgcgacgaggaaggaagcaggaacgcgatgccgaagtcgaagcgcaaccgcccagtgaccttatcgaagaccaagaagaagccaggtttagagcgcaagggcaaagtagtcgccgagataaaagatgctgtcgacaaatacagcagcgcctatgtttttacctacgataacatgaggaatcagaagctcaaggacctcagggagcagctcaagtcttctagcaggatttttctcgctggaaagaaggttatgcagatagcgctggggcgttcgcctgctgatgaagctaaaacaggcctccacaaactttccaagttccttcaaggcaactctggtctgttattcaccaatcttccaaggg

SEQ ID NO: 15989 - DNA, 387 bp, Zea mays
  Clone ID: LIB83-005-Q1-E1-F8
acccacgcgtccggccaccggacgaacacacagatcgctacagcccgcatgaccaacctctccgccatggcagcgagccaatcctacgtgatccgattcgacggccacttcgacgagccgtcgccgagctccgcgggcgccgagccgccgggcccgcagccgccgttcgcagggaggatgatctcgctcgagcgggagcaccaagtcattgtcgccgccctgctgcacgtcgtctccgggtacgccacgccgccgccgcaggtcttcacgccgccgccggcagcggcgcgctgccaggtgtgcgggatggagcggtgcctcggctgcgagttcttcgccgccggggaaggcgcattgggcggcggcgcggagaaggcagccgcgaca

SEQ ID NO: 15990 - DNA, 159 bp, Zea mays
  Clone ID: LIB83-005-Q1-E1-F9
aagtatatttccaacttatactttgaacgcgcttcgagaggaatatacataggccactgggaatcagagcagttcatggctctcacatgcaaactgtgcgcacagatcgtttctcggacactggacagctgaacctatttgacagagtgcccagcagca

SEQ ID NO: 15991 - DNA, 397 bp, Zea mays
  Clone ID: LIB83-005-Q1-E1-G1
cggacgcgtgggcggacgcgtgggcggacgcgtgggcttcgccgcaccagcgccagcccgcgccgtggtcagaaggaggtccttcaccgtgcgcgcctctctccgcaaggccaccggcaccgccgccgtggcaatggctgccagcgccctgcttgccggcggtgccatggcccaggaggtgctgctgggcgcaggcgacggcgggctcgtcttcgagcccagccagttcaccgtcaaggccggcgacaccatcacattcaagaacaacgccggcttcccgcacaacgtcgtcttcgacgaagacgaggtgccgagcggcgtcgacgccaccaagatctcccaggaggagtacctcaacgcgccaggcgagacctactccgtcaccctcaccgtgccg

SEQ ID NO: 15992 - DNA, 405 bp, Zea mays
  Clone ID: LIB83-005-Q1-E1-G10
ctccctctccgaaatcaaggtagcgtacaccgctgcagtttctagagccctctctgccactcgtgatcccactagtcacaatgcctgccctcgccaagcccgcctcccgcaccgccaagcccgccgcggctccgaagccgaagcctgccgccgccaagccgaaggcggccaccgctggtgcctcccaaccgccttacttcgagatgatcaaggaggctatcacggcgctcaaggagaggaccggctccagctcgcaagcgatcgccaagtatgtgggggacaagcacggcgcgtctctgccggccaacttcaagaagatgctttccatccagctccgtgggtccgcagccaatggcaagctcgtgaaggtcaaagcttcgtacaagctctcgggacgccgcaaga

SEQ ID NO: 15993 - DNA, 262 bp, Zea mays
  Clone ID: LIB83-005-Q1-E1-G11
gaagaagagcctcaaggagctcaccggcaagctcttcagcaccatcgacgatcttgaccatgccgcgaagatcaagagcacccctgaggccgagaaatacttcgcagcaaccaaagatgctcttggcgatgttctcgccaagctaggctagacgcaatggctaataatggccatgtaatttcggacttgtgtttgttcatatggacccggcaaggcaatgtaccattttctgttgatattgtatcaggaagcacttaactac

SEQ ID NO: 15994 - DNA, 407 bp, Zea mays
  Clone ID: LIB83-005-Q1-E1-G12
gcgaaatcggagcagaggccagggacgcgccagcgcgagcgataaggcacactgacatggccgccacggcgtactccaccgcgctccccggcggggcgcgcctccccgctgccggagccgccgcaccgccctctgccctcctcctcccgcggcgtaataaactgtctccgctccctctccggctccaagatgcgccgaggctgtcgttgctccgggtgaaggcctcctccgacgactcctcggccgcgagcggggacgagctcatcgccgacttgaaagccaagtgggacgccgtcgagaacaagagcactgtcctcacctacgccggcggcgctgtcgtcgctctctggctgacgtccgtcatcgtcggcgccatcaactccgtgcctctgctccccaagatcatg

SEQ ID NO: 15995 - DNA, 338 bp, Zea mays
  unsure (1)..(338): unsure at all n locations; Clone ID: LIB83-005-Q1-E1-G2
cttcgatggcgtcgaaccggaaagtgcagcggctgctcaacgagttcatggacctcctgttagaatatgaaacggatgtcacactgataccgcaacccggaacagaagggaatggcaatgacaaggtgatgacctcgtagctacccttgacatgctcagtacagttgctggagagttgagactcactccctgggtaggtgtgtaggattagtttggcgcggattctgagtgtccaatctgagaagtgcttatgtgaatcagttagttgtgcatgtagctggtagactatttattaaggtgaccccggcaaaaaaggaaagaaangggggaaaaactgt

SEQ ID NO: 15996 - DNA, 372 bp, Zea mays
  Clone ID: LIB83-005-Q1-E1-G3
aatccaaagaatggcttcgtgctgccgaggcctaagatgtccaacgctgacctgtgcaggatcatcaactctgaccaggtgcagtctgtggtgaagccactcaacacggaagtgaagctcagggagaagaggaataatccactcacgaacatggctgctgtgctcaaactcaacccctacctgtgcaccgcccggtagatggccacccttgctgaggctgctcgtgtgaatgccaagactgtgaagctcgactctaagacgaccaaacttaccccgtgacactgccaacgttatagctgcgggcaacgcatggtacaggaccatggtctcggaaagcgactacaccgagtttgagaacttctcaaagtggct

SEQ ID NO: 15997 - DNA, 399 bp, Zea mays
  Clone ID: LIB83-005-Q1-E1-G4
ggataccattccctcagagagaacgacacacttggggcatcttatgaccgttacttgcgcaatgggatggcctccgtcggtgcaaatgacacttctagggctgccgggatgggtgctggattggctgcagggatgactgcagggatgggtgctggaatggctgcagggatggctggctatggtgttgatggtcagcgtatgatgggtgttgttggtatggacagcagagggatgggatatggtggcagacctgagccacctcttccgcctgatgcatcaagcactctatatattgagggcttacctgcaaactgcacacgacgggaggtttcacatatatttcgcccatttgttggttttcgtgaagttcgtcttgtcaacaaggagtccagacatcct

SEQ ID NO: 15998 - DNA, 394 bp, Zea mays
  Clone ID: LIB83-005-Q1-E1-G5
gggagcttctgtggcatctgaaacgccaggaggcagaaaaagaaaagctgatgcagtgaaggaagaaaatacagagacacctaaaagtgatgctgttgatcatccaaagaaaagaggacgtccaaaaggtgtaagatccagcaatggcacacctagtaactcagctactccgagcacaaaggggaaaactgccggcaagaataccaaagaaacaccaaaaactggccccaatcttataaaggaactcgagaagagctcgaaggacaaagctagtgtatcaactgagacaaaggatgaattgcctaaggatgacaagagtgcaagcagacctaaggaggctattagcaaaggcaaggattcaaaagacgaaggcaagtcccactgaagaaaagct

SEQ ID NO: 15999 - DNA, 412 bp, Zea mays
  Clone ID: LIB83-005-Q1-E1-G6
cccacgcgtccgcccacgcgtccgcccacgcgtccgcccacgcgtccgcggacgcgtgggcgactaggagagagcctggtgacatactacaaccaaccccttattgctggtttgttgtcattcgtggctaggacactgaactcatactggggaacacagcaatgggttgatcttgcgcggtacactgggttacagagaagcgaggaaaagcctcctgctgaggccactatgccacctgattcagcacatttggagggttgtacgacggaaggacatgattttgatgacagcagcaataacaccaacaaatcgactggtccgagctagtgatttgattacttcacagtggctgcagattacatggcctattttcatagacaatgaaagtggctgccttcctgctcctgggatt

SEQ ID NO: 16000 - DNA, 424 bp, Zea mays
  Clone ID: LIB83-005-Q1-E1-G7
atcaaatttgaggaggcttctggtgaccctgctcgtgttcaagttctgtatgagcgagctgtttcagagcttcctgtttcaagtgatatatggatgggatatacaagttacctggatagaaccctgaaggtgccttctgtagtcagaagtgtttattacagagccacaagaaattgtacatgggttggtgagttatgggtccattatttgttgtctttggagcgtattcgtgcttctgaagaagagctgcagcatgtatttgaacgggcaatacaatgtaccttttcaaccatacaagagtatttcaatatttatcttactcgagttcatggtttaagacggaggatttctgatggcttggattttcaactgattaggcagacattaacggatgctgcagaatttctctcatctcaactgagta

SEQ ID NO: 16001 - DNA, 424 bp, Zea mays
  Clone ID: LIB83-005-Q1-E1-G8
cccacgcgtccgagcttactaggatgaagcctgcaacggtggcactgctcattttgttgaacatgatgtgcatagttgcatactttgatcatggaacgatggctgaagaaaccaccttgctggcaaattcgtatggaagaaatgaaggaaccaagggcatacatcatggaagaaagctgatggacaatagtattggttcaaaccgtgagtattcaatcgatgatatgtctcatccaaaggcaccacatactgagctcaagcaaccctcatacttagctcctggttgctcaagcaaccctctcaagcaaccctcatacttagctcctggttgcattccctaaagttcatgcatacatatatagccttccactcatcatatgctggtatccgatctatatatagacacatatgatatggtgcatat

SEQ ID NO: 16002 - DNA, 414 bp, Zea mays
  Clone ID: LIB83-005-Q1-E1-G9
cccacgcgtccgcccacgcgtccggcgtggaggaggctcatcaagcacaagcacgccacgcgatccacacacggcaagcaacgcccagggctcgtgctcgccccgcgacccgcgaaagatctgtgctggttcgctcgctcgctcgcgccgcgccgccgcgtgggggtgccgatgagctgcgcggggcaggccggcgggtggctgctcgactacgcgctggtggaggaggagatccagggctccgagttcatctacatggtcgacgacccggccgtctccagcgtgatactggggtttgatgctcccaggaaagaggacggcgtccaggacaaccccggcgccaagaagagatcccggccggagtccagcgcgccacccggcaccaaggcttgccgtgagaagctccggcgagac

SEQ ID NO: 16003 - DNA, 428 bp, Zea mays
  Clone ID: LIB83-005-Q1-E1-H1
aggaaggccatcagtgaagacagatatctttggttatggtgtcatgctgttagagattgtgacaggagagcgtgcaattgcattccatcctgaccgtatagaagaagcaggcgagatcctgctcactgatcaggtcaagctatggatggaagaagggcgactactcgacctagtggatcgcaatctaggtggcgtctacaaccttgaagagctggagaaggttacccagatagcacttctctgcactcacatggatcctgaacaacgccctacaatgtctgaggtggtgcagatgctggaaggagagattgtcccagcagagcggtgggaggagtggcagctggctgagctccaacgacgacaacagcatgagatgaggcaacacggcagactattcaacttcagtgaaaagtctcagaacatccagg

SEQ ID NO: 16004 - DNA, 410 bp, Zea mays
  Clone ID: LIB83-005-Q1-E1-H10
cccgggcttccccgacggcatcctcggcgccgacctcatggatcgctgccgcgcgcagtcgctcaggttcgggaccaagatcctcaccgagaccgtcaccaccgtggacttctccgcccgccccttccgtgtcgcctccgacgacaccgttgtgcacgccgactccgtcgtcgtcgccacgggcgccgtcgcgcgcaggctgcacttcgccggctccgacgccttctggaaccggggcatctccgcctgcgccgtctgcgacggggctgcgcctatcttccggaacaagcccatcgccgtcgtcggaggcggggactccgccatggaggaggctaacttcctcaccaagtacggctcgcaagtttacatcatccaccgccgcagcgacttccgggcgtccaagatcatgc

SEQ ID NO: 16005 - DNA, 416 bp, Zea mays
  Clone ID: LIB83-005-Q1-E1-H11
gcactccaaggtctgcggcacgcgcgagtaccgctgcgactgcggcacgctcttctcgcggagggatagcttcatcacccacagggctttctgcgacgccctcgcgcaggagagcgcccggctgccgcccccaggcctcaccgccagccacctctacggcgccaccaacgcggccaacatggggctcagcctctcgcaggtcggttctcacctcgcatccacactcggtgcggacgctcacggccaccatcaggacctcctccggctcggtggcagcaacgccgcgagccgctttgagcatcttctggggccgtccaatgcctccgcgttccgccccctgccgcctccaccatcgtcggcattcctcatgggcgctccgcaggagtttggcgcaggcgacggcagccggtcccacg

SEQ ID NO: 16006 - DNA, 402 bp, Zea mays
  Clone ID: LIB83-005-Q1-E1-H12
catcaacgaccgagctcttcatcgtttaataaacaactcttccgtttttttttcaagatcagtctaactgctgagtgcatgtgcttcggccgcgtacgtaggtgaacacggcatgggctctgggtctcattgttggtccagctcttggaggctacctttcgcagccagctgagaaatatcctcacgtgttttccaaagactctgtatttggcagatttccataccttttgccctgtctaagtgtatcagcgtttgctacacttgtcctgataagctgtgagtggcttccggtatgtatcaacactctttagcctacacaaaagccatgatggtttaaattttattcctttggaaatcactaacactgctactcgtctgaatatattacaggacattgtcatt

SEQ ID NO: 16007 - DNA, 404 bp, Zea mays
  Clone ID: LIB83-005-Q1-E1-H2
ctcagattcagaagccttcaacttcaaatccttgcattttgaagttttctgactcttgaggatggaggctattcttgaaagaccgaagtacgagtgcttgctgtttgatcttgatgacactctgtaccccttcagtgctggcatcaatctagcttgtcgcaaaaacatacaagattacatgcggcaccacctgcatattgaagaaagccaagttgcagacatgtgcctggacctgtacaaggaatatggcaccacaatggctggccttaaggcattaggctacgaatttgacaacgatgagttccatgcaactgttcatggtaccttgccatatcacaacctgaggcctgaccctgttttgaggaccctcctactttcaattccacagagaaaaatagtgttca

SEQ ID NO: 16008 - DNA, 393 bp, Zea mays
  Clone ID: LIB83-005-Q1-E1-H3
cttcttgcttctctctctggtctccttcaagccggagcccgatgccaaccccgcgccgccaccggaggacacgagcgagatcgatgtgtacttcaaccccaagccgttcgaagtccgctgcgtgatcctgcttcttccttggctcacgcactcagttttcctggtgccgatgcccatggccgcgccctccctgctccatttctcatgtgcgcgcgctcggctccagtcctgccgcgagcgccctgctcggtctccatcttcggcgcgaagcaccctgtggccgcgcgctactcctctaagtagagctccgtccatggccgccggtcgagctcctcccagccgaagcccctgctcccagcaaacgacaccatgtgcaaatgccttgctgctgct

SEQ ID NO: 16009 - DNA, 400 bp, Zea mays
  Clone ID: LIB83-005-Q1-E1-H4
cccacgcgtccgggcaaagaacgtggcagaggaaattgcagagaagctttgtgaatctgtcgcagctagccttgagggcaagaagctaggatctttcactagaatatcatcaacagtccagacagctatggaggatgcgcttcttcgtatcttgaccccaaggcgctctattgacatactgagggatgtgcacgctgccaaggagcgtgggaggccatatgtcattgtttttgttggggtgaatggagttggcaaatccaccaatcttgcaaaggttgcttattggcttcttcagcataacctcagtgttacacttgcagcatgtgacaccttcagatctggtgctgttgagcagctgagaactcatgcaaggaggcttcaggtatcgatcaaactatct

SEQ ID NO: 16010 - DNA, 426 bp, Zea mays
  Clone ID: LIB83-005-Q1-E1-H5
ctgctatgctacacctcctctgcagttcattccgttcgatctccataaagaccttcctgagctcctcctccaccaccgcgcggtgcatattgtattaggctccagagaaacaaaggacggagagcaatttcgtcgtaggctgttttcccttcgtttcctcctcgatcggccggtgaacgaacggtgataataataatgagatacccggtcgtcctcacggcggcgttctccgcagcggcaattggattcttgatcggaatctccttcccggtgcaaatcacgcccaaggtatacccgtccagcttcgtcgctgacgacgcggacagcagcaccctgggtctgggtgacagcaatttgctcggaagattctccacggcacgcaatagctgtagccgtgctacttctaccgtgggggcatctcctcct

SEQ ID NO: 16011 - DNA, 402 bp, Zea mays
  Clone ID: LIB83-005-Q1-E1-H6
ggtgtccagcacaagagagagaagaggagtggaggaggtgggagcagcaagaatggcgtgctccaccaatctctgcttctcggcgttgattcctcctcttccagcctcttcttcttctggctcctcccccttcctcacgatgaagcgtgtgtcctctgttccgtcgttgtccaggtggacaatccgatacaagcaattgggacatgcattatatcagagaagccacgttctggcctttgctagtgcagatgcatcacaaggcaaaagaagctcaggtgagaatgttgtgatggttgatccactggaagctaagcgtctagctgctaaacaaatgcaagacattagggccaaagaaaagctgaaggtgcattgctgctgtattggagtgtaccattccttaga

SEQ ID NO: 16012 - DNA, 335 bp, Zea mays
  Clone ID: LIB83-005-Q1-E1-H7
ctggaaccaagatggtattccctggactgaaaaagccacaggaacgtgctgatctcattgcatacctgaagaatgccactgtctgacgaggatgctgctgtggctctaaagatgaagagcagcgattctcttttttgcagttaaaataatgacacgaatttactttaatttgacagactggataatcaagaaagctaagaactccaggtagttctgtaacggttttgtctattgctgggggtaaacaccacccttgaagagcttttgattagtggttgaaatgtgacatcaccataatacgtttgacctgacgagcatttaaacacacgtttggg

SEQ ID NO: 16013 - DNA, 418 bp, Zea mays
  Clone ID: LIB83-005-Q1-E1-H9
cagagctctcatcctctctctctctctttctcgcgctcgctttgcttcctcgtcgaggtccaagttcctgcattgatggcgaccgaggtggctgagactcccgcgccgttggcggaggcggtccccgagacccccgcggaggcaccggcggcgcccgccgccgaggcgaagcctgccaaggccaagaaggcctctgcgcccaagaagcgtgccaacccgacccacccgccgtacgccgagatgatctcggaggctgtcacgtcgctcaaggagcggacggggtccagccagtacgcgatcgccaagttcgtcgaggacaagcacaaggacaagctcccgcccaacttccgcaagctcctgctcggccagctcaagaagctcgtcgccggcggcaagctcaccaaggtgaagaactcct

SEQ ID NO: 16014 - DNA, 415 bp, Zea mays
  Clone ID: LIB83-006-Q1-E1-A10
acccgatacgcctgccgacgacaaggccgaggaggttagcgccgcgcctagtggctccgcggaggcgcctatggcagagctggtgccgtcagaggcgtcatcatccccagatgatggcggcctggatgagattctaagcaagttgaacattgaagtgtctccaactttaatcctcactggatttggtgcttttattgctttatggatcctatcttctgttgttgctgcagttgattcagtccccctgctcccaaaattgctggaattaataggaactgcttacacaatttggttcatcgcacggtatctccttttcaaggaaagcagagatgacctgtttgcaaagttcgaagatctcaaacagaggattatttgatctatcgtcgaccttttgccacgtgtttaggctttacag

SEQ ID NO: 16015 - DNA, 443 bp, Zea mays
  unsure (1)..(443): unsure at all n locations; Clone ID: LIB83-006-Q1-E1-A11
tccagaggtccgggacgcgtccgtagaggagtcgccgggccgggccactgcacggtcggcggatatggctgtcgaagcgcacagcctcctcttagcaggagggcacaagcaactcaccagcgcgggatggccttggacgaccggcgacgaagctagatgcgcgacggcgcgaccgagccaccagcaggctttccagctccagcaggcctcgtgtgtgggcgtgggcgtgggcctgccggcggcggctccggtctcgtcggccgcggcggcgccaccagcgccgatgatagcgcagcagtacgctgctggcggacggctgttcgtgggagacgcggcggagagcggcgtcacgttcggaggangaggtgcggtgcagcaggaggcgccccggaagcggaagcgcgccgagcaggggcagacgccgccgccggttcttgggaccg

SEQ ID NO: 16016 - DNA, 385 bp, Zea mays
  Clone ID: LIB83-006-Q1-E1-A2
aggacgcttgggctggaacgagcagaggaagactaggtccttctatgacatgcttgacaagggccagatcagcgttgtcgtcgaggagtaaagagttcttcccagttattttcaaagaactctctcgagagcatgacaaagtgattgcgtgctgtggagatttgtcctggaaataagcacaacgatttgggaacaccagattttgtcgaattttcctttccttttgatgaatatttgagcacgtccatgtcaataccattcttgtggatggcagcaaccgcaaagatctgtagtggagccctgagctgggctcgttgcaaaatatgccagcctctcatcttcaaacagaaggggcggcgactcagaaggatcaacacttattttc

SEQ ID NO: 16017 - DNA, 241 bp, Zea mays
  Clone ID: LIB83-006-Q1-E1-A3
agccattgctccgctccgtccatcgatcgaaacgtggtcttgaattaactatgatctctatgagcctggagatggatcaacccgtcgtgcgttgtttcattttgtgatgaatgggagagagggtatgggacaagattgatcaacccgtcgtgcttacgtctcgttaattaggagagctaccgctcggatttggtgatttgtaatatatgaaccattgatgaataaatgcattcacttgtac

SEQ ID NO: 16018 - DNA, 374 bp, Zea mays
  Clone ID: LIB83-006-Q1-E1-A4
gttcagcttccaaaaaggcaaagcagagcccgcaagcggagaggctacagaagggtatgggtcacctccgcggcctcaccgccgcgcggctcctcgcggcggccttcctgctctccgttgccgtcccggccgccagagcccaggaagaaaccgagcacgaggaggagttcagctacgtcgtcggcgacgagaacgggccggagcactggggcagcatcaaggcggagtggggcaactgcagcgccgggcggatgcagtcccccatcgacctctcccacgagcgcgtctcgctggtgcggtccctcggctacctcacccactcctaccgccccgccgaggccgccatcgccaaccgcggccacgacatcatggtg

SEQ ID NO: 16019 - DNA, 412 bp, Zea mays
  Clone ID: LIB83-006-Q1-E1-A5
accacgcgtccggtctagcctcctcaagtcctccttcgcgggctcccggctcccggccggcaacccggacaaaacggggttcctccttggtggcaacgggcccccccggccccggcccggggccaacctgcccttcaagttcaagttcttcttcaaaccggccttacaacttgacttccttcgggttaaccccattcaaggattcaaccttttccggcaaaatgaccgttcgctacatgacggatatgttcactataccagacacggacttcgacatcgtgggcgccggctccgcggggctgtcgtgcgcgtacaatctctccagggaccccgctgtgcacatcgccatcgtggcacactctgtgtcgccgggcggcggcgcgtggctgggcgggcagctgttctcggccat

SEQ ID NO: 16020 - DNA, 408 bp, Zea mays
  Clone ID: LIB83-006-Q1-E1-A6
aggacgcgtggggtaaatgcagagttgcaggtagatagcaacccctctcccctgagatgccaactccgactcctgtcctactgtatgtactgatctgtacagcaagcaatattcaatcagcagtcaattcctaggatgtcgtaaggagatgagctcgccagacagtccatcacactgcaggcttgattgcatcttcacaggacgtggacttgtgggcacatgctccacgggcaacggttcggcatcctcctggcgttcttgtggctggcagcagccgcgaggatctgtgtggagccctgcgctgggctcgttgcaagatatgccagcctctcatcctcagactggaagacgaggacggggttccctctccaggctttttccatgatgttacagcatttagagtgcatg

SEQ ID NO: 16021 - DNA, 419 bp, Zea mays
  Clone ID: LIB83-006-Q1-E1-A7
accgacgcgaaccgagaaaaatcccacgaaatctcgtggccgcggcgaccggaagaagaggacgacgacggacggagcggcgatggcgtgccgcgcacttgccctccgctccctgctcctccccgacccgctacaccgcctcccggccgcggcgccacctgtttggagagcgtcccgcggtggccgccgtccgcacctccgctgctgctccggcggcgggggcggggagcccgggcagccgccgcaagaagctgtgctcgaggccatatccaatagcaaggtctaaaggaagggttgcactcacaacaaatatggtcatgggtggtactgtgactgacgatgcaagtgatgaatggcttgttctggatcagaaggtaaattcctaccccacagatagaggatttacagcaattggcact

SEQ ID NO: 16022 - DNA, 175 bp, Zea mays
  Clone ID: LIB83-006-Q1-E1-A8
accacgcgtccgccaggactgagattgagcggagagcagcacagtcatggcggggcaggaggtggcgaacaagcgggtggtactgaagcgctacgtgacggggttccccggcgccgacgacatggaggtggtcaccggcaagcgcgcgtggccgtgcccccggggtccacggcat

SEQ ID NO: 16023 - DNA, 416 bp, Zea mays
  Clone ID: LIB83-006-Q1-E1-A9
atagtgttgcctatggtgtatacatgtccatttctagtaacctcaggtatcagcttctggctggtgtgatcgagcagaggatgctggagccgttgctgcataaccagaagctactgctgagtgcaatgtgcttcatcgttcgtacgggcaacacattccttggctctttgctgtgggttgactatgccagatggataggcgtccagaagtctcacgaagaggcctaaagttctagcagcttgcctgcatgttccgctgtcactgcctcactaggcacgttcacaataccatcgatggcttgcctgcctctatagaatgctgatctactcttcactggaggcccccttatatataggacaaaaatcccaattttgtttggaaaaccacaagtagggatatatctgtcgaattctcgt

SEQ ID NO: 16024 - DNA, 236 bp, Zea mays
  Clone ID: LIB83-006-Q1-E1-B10
tacagacacttgtgctaaacccgcacgagacgacaccatgtcgaggagctcgagggcacaagtcatggccggcgtgaactccagcgtcttcgggctcaagccagccgcggcactgcggcaggcttcgtctgctcaacgcccgggaaaccttttcaacttggctggccccatgggcggctacgctccactgctcggcttaacggccttcttcgccttaacggcaactacaggttcgg

SEQ ID NO: 16025 - DNA, 389 bp, Zea mays
  Clone ID: LIB83-006-Q1-E1-B11
agatcggaacgtctcatgttggtggagttggtgtccggagtggtggggtcggcgctgcagcggaagcagcaatcagcgattctgaatatgggaatgaacctgtgtaacgtggcaacctggagctgggatatggacatgaagtcgaagatcaggaggaagatggtacgcaccagctgttctggggctccgtgattggcgatatgaagaagatgaaaatccattgcgacaatatctttggggagcagaatacccatcaacgatacacgcgcatgaagcatgatgtgaggattttggattccctgagttgaacagcttcataggcctacaagtagtgaaacgtccatgtgttggctgtactgttccgtcactaggagcagctatttatccat

SEQ ID NO: 16026 - DNA, 389 bp, Zea mays
  Clone ID: LIB83-006-Q1-E1-B12
acacactcgggtaaagctatctcgagctagctagctgctgtaagccgttgccatggccaaaatggtattgctctgcgtgctcgtctccttcctcctgatgcccttggcctccctagccctgacgcaggacttctgcgtcgccgacctgacctgcagcgacacgccggctgggtacccgtgcaagtccagcgtcaccgccaacgacttctacttccacggcctggccggccagggcaaaataaacccactcatcaaggccgccgtcaccccggccttcgtgggccagttcccgggcgtcaacgggcttggcatctctgccggcaggctcgacatcgaggtgggcggcgtcgtgccgctgcacacccacccggcgggctcagagctcctct

SEQ ID NO: 16027 - DNA, 423 bp, Zea mays
  Clone ID: LIB83-006-Q1-E1-B2
cggacgcgtggggcgccacctctcggcctcgcttgcagggtcgccggcgccttcaccaccccggccgtggcgcattccggcttcctcccccgacaccttgcccgtggtctcctcccttcaaagagatggagcggggtggtgaggatgggggcggtggtcggaggaggaaaggagggagaagatgacgaggagctgagacagaccaaggagcaggctgccgccaggaggcggtgggaagccctgattagggagcagaaaattaaaacccttacaccgagggaagctggctatacgttcaaactgacggacaaggttcttttggatgttaggccttcaaacgagcgtcaaaaggcttgggtgaaaggctctacctggattcctatatttgatgtggatgcatccgttgatctgggcggacttaac

SEQ ID NO: 16028 - DNA, 401 bp, Zea mays
  Clone ID: LIB83-006-Q1-E1-B3
accacgcgtccgcccacgcgtccgcgagcgaagaagaaaggagggtgctctgccggcggcggagcggagatgtccgagaggaggcgcggcgccggcgccggcaccggcacccgcaaggatgaggtggtgacccgcgagtacaccatcaacctccacaagcgcctccacggatgcaccttcaagaagaaggcaccgaatgccatcaaggagatcaggaagttcgcccagaagaccatgggtaccaccgatgtccggatcgatgtgaagctcaacaagcacgtctggagcagcggtatccggagtgtgccgaggcgagtccgtgtcaggattgcccgcaagaggaacgacgaggaagacgccaaggaggggcagtactctctggtcacagtagctgaaatcct

SEQ ID NO: 16029 - DNA, 363 bp, Zea mays
  Clone ID: LIB83-006-Q1-E1-B5
accacgcgtccgcggacgcgtgggcggacgcgtgggcggacgcgtgggcggacgcgtgggcggacgcgtgggcgccaccgccgcgcgccgccggcggcgcaagggacgcacgatggccatgcaggtggtgcgcaacctcgacctggagcggtacgccgggcggtggtaccagattgcgtgcttcccgtcccggttccagcccaagacgggcaccaacacgcgcgccacctacacgctgaacccggacggcactgtgaaagtggtgaacgagacgtgggccgacgggcgccgcggccacatcgaaagcacagtctggcgcgccgaccctgtcagcgacaaggccaagctcacggttctcttcta

SEQ ID NO: 16030 - DNA, 426 bp, Zea mays
  Clone ID: LIB83-006-Q1-E1-B6
ctcgcgggtcgacgcacgcctctacacagacgttctggtaagcgagagcagcacacacgcagctagctaggagcagcagcagagcagcggcgatggcggcctccatgatctcctcgtcagctctggcggtggcgcctcagggcctgccgcccctcggccgccgcgcctcctccttcgccgtcgtctgctccaagaagaagatcaagaccgacaagccctacgggattgggggtggcctgaccgtcgacgtcgacgccaacgggagaaagggcaagggcaagggcgtgtaccagttcgtcgacaagtacggcgcgaacgtcgacggatacagcccaatctacaacgaggatgactggtctcccaccggcgacgtctacgtcggtggaaccactgggcttctgatctgggccgtcaccctcgctggga

SEQ ID NO: 16031 - DNA, 425 bp, Zea mays
  Clone ID: LIB83-006-Q1-E1-B7
ccgaaacgaaacccacccgtaggcaaaccaggactgagattgagcggagagcagcacagtcatggcggggcaggaggtggcgaacaagcgggtggtactgaagcgctacgtgacggggttccccggcgcggacgacatggaggtggtcaccggcaccgcgcgcgtggccgtgccgccggggtcgacggccatggtgctcaagaacctctacgtgtcgtgcgacccttacatgcgcggccgtatgaccaagcacgagaggcccagctacgtcccggacttcgtcgtgggggaggttttggaaaactttggcgtctgcaaggtgatagcatctgggcaccaggatttcaaggttggggatcttgtgtgggggatgaccggatgggaggagtacactctcatccataacccggagtcatttttcaaga

SEQ ID NO: 16032 - DNA, 428 bp, Zea mays
  Clone ID: LIB83-006-Q1-E1-B8
aggacgcgtgggtggtgcgcaagccggcgcacctgttcctggacgagctgggcgtggcgtacgacgaggccgaggactacgtggtcatcaagcacgccgcgctcttcacgtccacggtcatgagcctgctcctggcgcgccccaacgtcaagctgttcaacgccgtggccgtggaggacctcatcgtcaggggagggcgcgtcggcggcgtcgtcaccaactgggcgctcgtgtccatgaaccacgacacgcagtcctgcatggaccccaacgtcatggaggccaaggtcgtggtcagctcctgcggccacgacgggcccttcggcgccaccggcgtcaagaggctccaggacatcggcatgatcagcgccgtgccggggatgaaggcgctcgacatgaacaccgccgaggacgagatcgtgcgcctc

SEQ ID NO: 16033 - DNA, 408 bp, Zea mays
  Clone ID: LIB83-006-Q1-E1-B9
gtcgacggacgcgtccgaccacgcgtccgggccgtgatggagaagctcaagatctttgtcgttaaggagcccgtagtcgcggcctcctgcctcatcgctggattcggtctctttcttccagcagttgtccggccaatcctggattcatggcagaccgcggaacaagttcctccacctcttctaaatgatgtggttgcaggtgtcaccggcaagaaaaagtagtgaacttgcattgttttctcatgccaatgttgccccacattttcttccccgtgttttttctggcgaccagattggaaggcttttcccaagagtcacggtcttgaactctagatggtatccgcggaataatcattgtacctgaatcatatactgcaatgtggcagttttgaaaatgtttcccctcct

SEQ ID NO: 16034 - DNA, 400 bp, Zea mays
  Clone ID: LIB83-006-Q1-E1-C1
gtccattccgcctctcggaagagttgagagaggagtaaggaaggcgaggacctcgcgccccgcgatgggcggcgacctgtacgccctcgacttcgacggcgtcttgtgcgacagctgcggggagagctccctctcagccatcaaggctgcgaaggtgaggtggccgtcgctgtttgagcaggttgacgccgccatggaggagtggatagtggagcagatgtacacccttcgtccagtggtggaaacaggatatgaaaacttattgcttgtaaggttgcttgttgagatccagatacactctgttcgaaaatcatcagttgcagatgggcttagcatccaagaaatattggagaactggtcaaaactgaagcccactctcatggatgagtggcaagaagat

SEQ ID NO: 16035 - DNA, 417 bp, Zea mays
  Clone ID: LIB83-006-Q1-E1-C10
gcggaaatagcagcagaggcagcgacacgatcgcgagcgcacgcacgtaagcacgttgtcggaagctcaagttagaagaagcaccagtgcctgatcgatggcggcccaggctctcctctccggccggcagctgctgggccgccccgtgcagtcggccgtctctaggtcgtcggcgaggaaggcgcccttcgtcgtcagggccagctccagccctccagccaagcaaggtgccgacaggcagctgtggttcgcgtccaagcagtccctctcctacctcgatggcacgctgcccggcgactatggcttcgacccgctgggcctcttcggaccggagggcaccgggggcttcatcgagcccaagtggctggcctacggcgaggtgatcaacgccgctaagccatgctgggcgcggtgggc

SEQ ID NO: 16036 - DNA, 408 bp, Zea mays
  unsure (1)..(408): unsure at all n locations; Clone ID: LIB83-006-Q1-E1-C11
accacgagtccgattcagtaagagctctgacggaggtgcaaagaatgcacctatctcgattagtacggatgatggttcaactggtgaaaatgaggatgttgcagagtcagaagcagaaggctcaaattcttggttggttgcacagcgtgaagacagtgctaagggctcttttgttaacaaaggatctgataggaaaaggtccgccgatgctgctgcagatggttttaaaggaaagagacaaccaagtttctcaggaagtgagtccagctctggaaagttgacacctggaaatcttatatcgatgcaggcatcaaatgtagtggctttgccatatcaagtcncaggtcaagtttctggacctcctgtcttaactaatgcaccaaattttcacccggtatgtactgtgca

SEQ ID NO: 16037 - DNA, 425 bp, Zea mays
  Clone ID: LIB83-006-Q1-E1-C12
gtcgtcgcaacactctatactgacgtctattacgcgtccggccagaagctggaggagatgtttgacatccagggggagctgggttccacactaaagaaatggcgggtcattttcactgatgatgaggatgacatgatgcttgttggagatgatccttgggatgagttttgcaggatggtgaaaaggatttacatttacacatacgaggaggcaaagaagctgacatccaagtcaaagttaccggttagcagtgacagcagcaagctgagcgctgcgaactcactgtctgaatgactatgaacaaaaactgcagagtgctaacgtccctctaattttgttatttccatcatttgattatgggggtgaatgctcacggttgctccgtgggctgaagttgtggttggcattcaactgccttgagtttt

SEQ ID NO: 16038 - DNA, 127 bp, Zea mays
  Clone ID: LIB83-006-Q1-E1-C2
cgaccacgcgtccgaccaaacgtccgttaactcgtgggcggacgcgtgggcgggcgcgtgacgagttgtctgtgaggtatggtgggagcgagttattcttcatcagccgtcatgttgcgatctccaa

SEQ ID NO: 16039 - DNA, 425 bp, Zea mays
  Clone ID: LIB83-006-Q1-E1-C3
ggagaaatgggcttagagttcggttgctgaatacttgcacggtgaagggggcaggcaaaggaaaaaacggaatgaatgaaactgatggaaatagtgaggaggatgtctccactttgaaccattctaacgagaaacagtttgaacaatcctctcaactgttagatgtactgccggaacacttgtttgatgagaatttcaacaaggaagttcccaagcgcggcaaagggcgcggtcgcggtggcagagggcatgggcgtggcaaccatcaatataacaatcaccatcacaataaccagcaccaccagaacaaccagccgcagtacaataaccatggcaacaaccaccttggtgggaaccgtggcagccttcactctgttggaactacaccgcataacctgaaaaccaagcttgagccgcatccgcag

SEQ ID NO: 16040 - DNA, 406 bp, Zea mays
  Clone ID: LIB83-006-Q1-E1-C5
acccacacgtctgcgtgacgcgtgggcctcgccgcctccacccgcaccacaccaccggcgatgtccacagcggcggcgcagggcggcagcgacaagccggcgctccggaggcccgtcttcaccaaggtcgaccagctcaggccgggcaccaacgggcacaccctcaccgtcaaggtcgtcagcgccacccccgtgcctgggcgcgcgcgcccaggcgcacccgccgccgccccatcccgcgcgccgcgcatcgccgagtgcctcgtcggggacgagaccggcgccatcgtcttcaccgcccgcaacgaccaagttgacttgctgaagcccaatgcgacagtgatcttgcgcaatgccaaaatagacatgttcaaaggatcaatgaggcttgcagtggacaagtggg

SEQ ID NO: 16041 - DNA, 410 bp, Zea mays
  Clone ID: LIB83-006-Q1-E1-C6
cctcagtcctggctgagttacagaggcggatactaaaagccgaggccacagtacgtgaaaaggatgaagagaacgagatgcttcatcagcggcttcagcaatatgaaaaccgctggttagagtacgagcagaaaatgaaagctatggaggaaatgtggcagaagcaaatgcgttcgctgcaatcgagcctttccgtagcaaagaagagccttgttttggatgaaacgcctaggatgtcagactcatcagtggatcagagctgggaaagcaatgggaaccaccatgtcagcagcggttctcagctggtgccacacactggtggacgtgaaatgaatgctggcctcagcgtcatcagccgcttggcagaagaattcgagcagcggagccaggttttcgctgatgacccaagt

SEQ ID NO: 16042 - DNA, 419 bp, Zea mays
  Clone ID: LIB83-006-Q1-E1-C9
gccgagatcacgccagtagagatgagggccacgtcgtcccccgtggctgccgccgtcctcgccgccccttcctccgccgccgccgtagtcgtaaagcctctgcctcgtggcgcagcgaatggcggcagcacgggcaggcgcgacgtgcttgccgggaccgggctgggcgcggcgctgctgctggcgctggggcccgtgtgcggcgcggcgcgtgcggcggacgaggaatacgtgagcgagacgaaggaggtgatcgggaaggtgcggtcgacgatcaacctggacaagtcggacccgagcgtggcggacgcggtggcggagctccgggagctgtccaactcgtgggtggccaagtaccggcgggagaagtcgctgctggggcggccgtcgttccgggagatgtactcggcgctcaacgc

SEQ ID NO: 16043 - DNA, 420 bp, Zea mays
  unsure (1)..(420): unsure at all n locations; Clone ID: LIB83-006-Q1-E1-D1
cggacgcgtgggcggacgcgtgggcggacgcgtgggcttgcgccagaaatctcctacagaagcttggttgcacttggaattgcttgggtaaatggtacaccagtgtcctcatttgataggcaggatgcagaccggcttcttttcttttgctctaaccagtgcggagatcaagctattcaaaatggctcatatgctcatgtatccagctggtcagcaccccttaccaaggatagaaccactggaagtctcgagtcaaaacagatgtcatttggtgcaaaaggagttgtaggggataatacgatctccctatcatcattgaaaccaaggttaaagcctgcaacaatgagaccccttcnccactctcgcaagcaacaaatgcatccctttatggggtttcctcagtccatcattcacgatgct

SEQ ID NO: 16044 - DNA, 306 bp, Zea mays
  Clone ID: LIB83-006-Q1-E1-D10
gatcgttactcgtcattctagcccgggaaacacgcccggtcgaccgggggtggaaaatatcctagcctggaccgcaagcgaacgcgaagggcacgcgacttctcgtcggcgtcgatctgctccggcgaccgcttctcatcgacttccaggggtcgagttatgtatgaagtagctccaatctttagaggaagaatgtcttctcaacgggttttatgtacttgttctatcaaagagtgagatgaatcattatctagatctatgatctcgtcatgtttagtacactggaaatgtattcttttgcaactt

SEQ ID NO: 16045 - DNA, 394 bp, Zea mays
  Clone ID: LIB83-006-Q1-E1-D12
tagactgactcgtctcaccggccccatctctaggctctagctccatcactcggagaagataagacccagagtgtcgcctggtccatctccaatccagcaaggcgggcagacgagccgagagtgagacaaccatggcgtctctggccctccgccccgtcatcccggccaccaccgcttcatccaggaccctcacgatcgtcgttggctcccgctcctgccacgctgccacactccaccgtggctttcgctcgcggcgcctcatcacctgcaaggcggagccgagcggcggcaacagcaccctcgagctgggcgcaggggccgcagggctggcatcgagcgcggtcgtggcgtggtccctctacacgctgaacacgaccgcgtgcggcctgcctcc

SEQ ID NO: 16046 - DNA, 420 bp, Zea mays
  Clone ID: LIB83-006-Q1-E1-D2
gaatctagaagtgaaaagactacataacgagcgcaaagaagcattgtccgcacagttcgctgcagaggcaacacttagaaggatccactcttctaaaaaagatgaggaatcagttccattcgacgccatcatagcgcccttggagtcagacataagaaaatacagacatgagattgcagtgctacaagatgacaagaaggcactagaacgacatctaaagttgaaggaggtggcgcttgttcaagcaggcaacattttgcacaccgcgcttgaaagggcactcatagtagaggatgttcagaatcagaacattgaattgaagaagcatatggagatataccatgaagagaataaattgttagagaaggctaacagacagaaggtgctagaggttgagaagctcacacaaacaattaatga

SEQ ID NO: 16047 - DNA, 353 bp, Zea mays
  Clone ID: LIB83-006-Q1-E1-D3
actccatcggcggtggctttggtgctggctccgatgtccgccctggtgaccgggactgctcctgcggcgcacacaacttcgccagacgctccaactgcttcaagtgctccgcctacaatgaagaagctgccggcgcccttgatagtgacatgtcacgctcacacggatacgcccgcttcggcagaggcgctgccgcccgtaccaaacgccccggtttggaatctggagactgggtctgcaccaaatcccgttgtaacgagcacaacttctctaacacgatggaatgtttcaagtggaacacgccacaggactccggtagcgctgccacgacgacctactaaaactacttgcac

SEQ ID NO: 16048 - DNA, 406 bp, Zea mays
  unsure (1)..(406): unsure at all n locations; Clone ID: LIB83-006-Q1-E1-D4
cgaaactagtcttccctcctgctggcggcgtgcggagggccggaggccgggtcgacaagaggagatgacgttggcggcggggctgggttacgccctgatcgcgctgggccctgccttctccctcttctccggcgtcgtcgtcaggaagcccttcctcgtcctcaccctcctctctaggtctaccccttgcgtcgcccgtttcgtgcttctttagccacgttttgatcagatcgtccgttgccctctaataaaagcgaacattcagttaatcgattggcgtaagaggcaggtggcgtttgtttgaggcgttccagggtgtggtttcgtgaggcaaacgcggattattggtttactcgcagttgtgctanggttcagtagtttcttccggatcgatacggatgctgct

SEQ ID NO: 16049 - DNA, 424 bp, Zea mays
  unsure (1)..(424): unsure at all n locations; Clone ID: LIB83-006-Q1-E1-D5
acaggcttaattgttcacatagtgcggcaaagaagaagtctctttcctctttggaaatgctggagcatccaggaaactgaaccaccatacaaagctgttttagcgaaaagggagaacttcagggatatagtggttactccttacatgtttacagatcacttaccatggaggtgccactttgctatgcagaagattgttgaagctcaaacgcctatgagacgtgcgcattccgatccacccgtacaacaacatttggtctgaccaggacaaaactgctgctgcccatgtacagaattgcgtgaaggacagaaaattatgatgatcacatttagcagcatggtctattgcaggctggaccgctggaggtatatttcagtccttcaggcagccagaatatgtccgtgacagnaccaaaatcgtgacg

SEQ ID NO: 16050 - DNA, 431 bp, Zea mays
  Clone ID: LIB83-006-Q1-E1-D6
gaagcagattggttctacacgcccgtatacacgacatgcgatctcacccccaagggtcttcccttgcctttcaagtctcctcgaatgatgcgcagcgcgatccagctgattgctacgaattggccttactggaatagatcagagggcgctgatcatttctttgtcacgccccatgactttggtgcttgctttcattatcaggaagaaaaagcaatcggacggggaatccttcccttgcttcagcgtgctacgctggttcagaccttcggacagaagaaccatgtctgcctgaaggatgggtccatcaccatcccaccatacgcgcctcctcagaagatgcagactcaccttatccctgcagacacccctcgatccatcttcgtgtacttccgaggtctgttctatgacaccggcaatgaccccgagggtgg

SEQ ID NO: 16051 - DNA, 377 bp, Zea mays
  Clone ID: LIB83-006-Q1-E1-D7
ccccgtgactaactcgctggcccctcccaatggccaagcgaagaaaacaagccggcgagatgtgggtttcaaattccgcctttggggagccctcaacctcctccccaaccggctttggctccccggcggcgaacccggcaacaacaagcctttttcggcaaaggaaccggcggcgagaccggacaaagcgggaaacagggaatgtgaagcgcctctcaacgggttcgcagaccccggggcggaagatgtgtggtgtggggcacagtgagaggcggtgtggccggagaggcgagactcgaaacctgtcgtgctcgcgggcggacacaacgcggtggggcggtacaagaccctcacgggcgaagatctcgaggagctca

SEQ ID NO: 16052 - DNA, 426 bp, Zea mays
  Clone ID: LIB83-006-Q1-E1-D8
ccccacgtacctggtggtggagcaggacaagacgctggccacctacgggatcaacgccgtgtgcacccacctcggctgcgtcgtgccgtggaacggcgccgagaacaagttcatctgcccctgccatggatcccagtacaacaaccagggcaaggtggtccgcggaccggcgcctttgtcgctggctctggttcacgccgacgtcgacgacggcaaggtcctcttcgtcccgtgggtggagaccgacttcaggaccggccaggacccgtggtggagtgcatgaggaggatcatccgacacaagcggtgctcagtgctcataggctttctccgagggcgttgttgctacaaattcacttgcctcttgcctccaaattatatatattacacacactgcatgaaacaagaacacagctgtttgtcatct

SEQ ID NO: 16053 - DNA, 418 bp, Zea mays
  unsure (1)..(418): unsure at all n locations; Clone ID: LIB83-006-Q1-E1-D9
cccacgcgtccgcgctgccgtcgctccacacgccgccgtcaggacgaaggcggctgtctccgtcctccgcgcgctgcgcgccgaggcggccaccctccccgtgctctcattcaccggagagaaggtcggggaggtaaccctcgacctcaaatccgcgccaccctccaccgcgcgcgctgtcgtgcaccgcgctatcatcaccgaccgccagaacgcgcgccgaggcacggcctccacgctcacccgcggcgaggtcagaggcggagggaggaagccctatcagcagaagaagacggggaaggcgcggcgggggtcgcagcgtaccccgcttcgtcccggcggtggcgtcgtgttcggccccaagccccgcgactggtccatcaagatcaaccgcnaagagaagcgccttgccatctcc

SEQ ID NO: 16054 - DNA, 416 bp, Zea mays
  Clone ID: LIB83-006-Q1-E1-E1
ctctccttccgctcgaagagaagagaaaaaagaacggtccgtgctcggctgccgtgaatctctctcacctccccgaagcaagcgagcggggcagcgcgccaggaaggatcggaggagacgccatcaatcagcacttgcacgcgcgcggtcggccgcaggtggaggaagaagatgggcctgtgctcgtgctgctgccggtgcctggagctgctgtgctcggtcctcctcccgcccctcggcgtctgcctccgccacggctgctgctccatggagttctggatcagtgtgctgctcaccatcctcggctacctccccggcgtcctctacgccgtgtacgtcatctgctccgtcgacccccaccgccaccgcgacaacgacgactacgtctacgtagcatgacaagatggaccggtccc

SEQ ID NO: 16055 - DNA, 409 bp, Zea mays
  Clone ID: LIB83-006-Q1-E1-E10
cccacgcgtccgggcagccgaagcgactgtcgcgaggcaaggccatcgtccgccatgacgctctccctctccacctctttcctccccatccccgccgccgcgaggaccaccgcccgcaccctacgctccgtcgtcccctcccaggggatgcgctgctcgatgcgcaagaaggggttgcacccggagatctacgaggacgcgaaggtgtactgcaacggcgagctggtgctggtgacggggggcaccaagccggagtacacggtggacgtgtggtccggaaaccacccctactatgtcggcgacacctcggcgctcgtggtcatggacagccagatcgagaagttccgcaagaagtggggccacatcaaggagtactggcccgaggaccagtggagggagatgcaccaga

SEQ ID NO: 16056 - DNA, 399 bp, Zea mays
  Clone ID: LIB83-006-Q1-E1-E11
cgccgccgccgcgccttccattccagtactcgcggaggaaaggaacaccagccagcgccatggtcacgtcgacgaccgccgccgccgtgctgtccccgccgtccgtggccgggcttcgcctggcgccgtctccccgggcgcgcgtggcgttccgcgcggcgcgggcgcggcggtccgtggcggcgcgcgcggagctgagcccgtcgctggcgatcagcctgagcacgggcgtgtcgctcttcctgggccgcttcgtcttcttcaacttccagcgggagaacgtggcgaagcaggtgcccgagcagaacggcaagacgcacttcgacgccggcgacgagcgcgccaaggagttctccggcctgctcaagtccaacgaccccgtgggcttcaacctcgtcg

SEQ ID NO: 16057 - DNA, 440 bp, Zea mays
  Clone ID: LIB83-006-Q1-E1-E12
gggtcgacgcacgactctagagagactcatgttactggcacacttcgtcggcgacgtccaccagccgctgcacgtaggcttcgaagatgacgagggcggtaacaccatcaccgtccactggtaccggaggaaagcaaacctccatcacgtgtgggatgtcagcattattgatacggcaatcaaggacttctacaacaagagcatggataccatggtagaggctctcaagatgaatcttaccgatggatggtctgacgacatcgtccactgggaaaattgcaagaacaaacacgcgacctgcgcgaacgactacgcaattgagagcatccattattcctgcaactacgcctacaaagatgtggagcaagacatcactctaggagatgattattttttcagtaggtacccgattgtggagaagaggttagcgcaggctggaa

SEQ ID NO: 16058 - DNA, 396 bp, Zea mays
  Clone ID: LIB83-006-Q1-E1-E3
cggacgcgtgggcggacgcgtgggggcggcgaggcggcggcgatcaaggaggaggacgcgcgcggggcgctgcggctgaagctcgtcgcggtggcgtccatcctggcgtcgggcgcggcgggggtgctggtcccgctgctgggccgctccgcctcggcgctgcgccccgacggggacgtcttcttcgccgtcaaggcgttcgccgcgggggtcatcctcgccaccggcatggtgcacatcctgcccgcggccttcgacgcgctcgcgcccccctgcggcggcggcgccagggccggcgggttcccctacgcgggactcgtcgccatgtgctctgccatggccaccatgatggtcgactccgccgccgcgggctactaccagcgcgcgcacatccgc

SEQ ID NO: 16059 - DNA, 424 bp, Zea mays
  unsure (1)..(424): unsure at all n locations; Clone ID: LIB83-006-Q1-E1-E4
ggagagtgtagcgagcggcgttcagctcaccgggggctgctgggtgagtgagggagctagcgtcgtcgtgagagcgctccacgatgattacggggacggacttctaccacgtcatgacggccgtggtgccgctgtacgtggcgatgatcctggcctacgggtcggtgcggtggtggcgcatcttctcgccggaccagtgctccgggatcaaccgcttcgtggcgctcttcgcggtgccgttgctgtccttccacttcatctccaccaacaacccctacaccatgaacctgcgcttcatcgccgccgacacgctgcagaagctcatggtgctggccatgctcaccgcgtggagccacctcagccgccggggcagcctggagtggaccatcacgctcttctccctctccacgctgcncaacacgct

SEQ ID NO: 16060 - DNA, 429 bp, Zea mays
  Clone ID: LIB83-006-Q1-E1-E5
atccttcgccgcagaagagattggagctgaagagaggaagcagcgcgtcctcgcctaaagccctcgccgccctctttcggctcctcgcctctcgtccacgcgcgacgacgtgtcggcaaacactcagtccatcccaagactcgcgaggcgatggtggacgcgtggtggcctctgctgggcgcggcgatcccggcgctggtggcgggtcagtttgtccgcatcaagcgccgccgcgacgaggagcagcgcctcaaggcggcgcgcgggcgggagaagagctccgacgaggtattcgtctgcgagcgcgtgtgcacctccaagcgtatgctcaagaaggtaggggccttctccaaggaccccataccggagacctgcgtcaccgtctgcggcgtctctgaactcgacgcctgcgccgacgcttgcgcgcgc

SEQ ID NO: 16061 - DNA, 430 bp, Zea mays
  Clone ID: LIB83-006-Q1-E1-E6
ctcgcccatgagcgagttccaagtgacctgaagaaaaatctcatgcaagcaaggctcgataagaagttgacccaggcacagcttgctcagatgatcaatgagaagccacaggtgatccaggagtatgagtcaggcaaggcaattcccaaccagcagatcattggcaagctcgagagggccctgggaacgaagctgcgtggcaagaaataaccaggagcatcatagcgaagacaaggcaaactgtctgcttattatttgctatgtttggtatctcaagtcatgcggactgtttgtgttggtacaagagtgaattaactgtgttctcctgaatgcttgctgcttgtcatatgagtatatgatctagctctaaaaaaattgtgatgaagatgtcaactgatatgacaacctcataaccagcgtgatcaagatg

SEQ ID NO: 16062 - DNA, 408 bp, Zea mays
  Clone ID: LIB83-006-Q1-E1-E7
acagaccagaccataccagaccagaccagaccaatggccctgcgcctaccaatctcatcgtcccacgggctggcctccacgccggcgccaatctccacgacgacgtgccggccggccgtcttggcgacggccgcggcccagaagaggagcctgctgctggcgacggcctccgagacgaggggagtcgcgccggtgaggtccagcgggatcgagacgagcacggtgggtctgggatgtgaggccgtcaccgggcaggtcacggaggtcaacaaggacaccttctggcccatcgtcgaggccgccggcgacaaggtcgtcgtcctcgacatgtacaccgaatggtgcgggccttgcaaagtgatggctccgaaattccaggagatgtctgagaagaacctggatgtggtg

SEQ ID NO: 16063 - DNA, 430 bp, Zea mays
  Clone ID: LIB83-006-Q1-E1-E8
cagccactactaggaattgccgagcgagcgagcttgcgccgtgcgcgatggagggtgacgagaagtcggcgggcggggcccctgcttactggggcctgggcgcgcggccctgcgacgcgtgcggcgccgaggcggcgcgcctctactgccgcgcggacgcggcgttcctgtgtgccgggtgcgatgcgcgggcgcacggcgccgggtcgcgccacgcgcgggtctggctctgcgaggtctgcgagcacgcgccggcggcggtcacgtgccgcgcggacgctgccgcgctctgcgcctcctgcgacgccgacatccactcggcgaacccgctcgcgcgccgccacgagcgcctccacgtggcacccttcttcggcgcgctggccgacgcgcccaagcccttcgcctcggcggcgccgcccaaagcaaccga

SEQ ID NO: 16064 - DNA, 418 bp, Zea mays
  Clone ID: LIB83-006-Q1-E1-E9
gccacgacgggcccttcggcgccaccggcgtcaagaggctccaggacatcggcatgatcagcgccgtgcccgggatgaaggcgctcgacatgaacgccgccgaggacgagatcgtgcgcctcacgcgcgaggtcgtgcccggcatgatcgtcaccgggatggaggtcgcagagatcgacggcgccccgaggatgggcccgacgttcggcgccatgatgatctccggccagaaggcggcgcacctggcgctgaaggcactgggcaggcccaacgccgtggacgggaccatcccagaggtgtcgccggcgctgcgcgaggagttcgtgattgcgtccaaggacgacgaggtcgtggacgcctgagcgagcatccacgcgccagcatgcaagcagcgtcttatctgggccggcgccatcac

SEQ ID NO: 16065 - DNA, 430 bp, Zea mays
  Clone ID: LIB83-006-Q1-E1-F1
cggacgcgtgggcagccattacccgcagctagcaaacaaatggccaccgtcctgagcagcccccgcgcgccggccttctccttctccctccgcgccgcgccagcgcccactaccgtggccatgacccgtggcggtggcgccagcagcaggctgcgcgcgcaggccacctacaacgtgaagctcatcacgccggagggggaggtggagctgcaggtgcccgacgacgtctacatcctggactacgccgaggaggaaggcatcgacctgccctactcctgccgcgcggggtcctgctcctcctgcgccggcaaggtcgtctccggctccctcgaccagtccgaccagagcttcctcgacgacagccaggtcgccgacggctgggtgctcacctgcgttgcgtacccacctccgacgtcgtcatcgagacgca

SEQ ID NO: 16066 - DNA, 417 bp, Zea mays
  Clone ID: LIB83-006-Q1-E1-F10
agagcgagtgcgagacaccggatcccgtccgcccccggaccaagaatcccaacctcacagcgatggcagcatcccgcagcgaggaacgtgatcagaatcagccagtggtgcttgtgacggggtgctcggagggcggcatcggccacgcgatggcacgcgccttcgctgcggccgggtgcgccgtcgtggccacggcgcggtcacgcggttccatgcgcggtctcgacggcgacccgcggttcctgctgctggagctcgacgtgcgctccgacgagagcgcgcgcgccgccgtggcggatgcgctgcgggagcacggccgcatcgacgtgctcgtcaacaacgctggggttcacctcgtcgcaccactcgccgaggtgcccatggagtccttccaccaggttttcgacaccaatgtct

SEQ ID NO: 16067 - DNA, 382 bp, Zea mays
  Clone ID: LIB83-006-Q1-E1-F11
aggatgttttgtttgccaaggatatatcactcgtcaagaagttctatatgctctatagcttcttctttgtgaggagagttgtagcgccgacggctgcctgtattctctacaatgtcatcatccccatctcagtcacaatcccggagctttacctaccagtgtggggtgttgcctatattcccatggtgcttaccgtggtcacagctataagacatccaaaaaatctacacatactgccattttggattttgtttgagagtgtgatgacattgcatcggatgagggctgcgatgactggactgctggagctagaaggattcaaccagtggattgtgacaaagaaggtggggaatgatctcgaggacactgaagttcctttgct

SEQ ID NO: 16068 - DNA, 413 bp, Zea mays
  Clone ID: LIB83-006-Q1-E1-F12
gaatggtgcaactatggtttggcggtgtgagcttatggttatggctgcttcactgatttgcagcagcaggacaggcgatgttccacttgaagcgactttgagcttctccggtgcttatgttatacgtggagaccatgaggaggtagttttatgtatactacatgaaggtcgcaatcgatcatagctgtattgcggccaggctgctgctgcgttgcggccggtctctaggatataaatttattgcctccatttatttagtcttaggcattgtgatgtcaatgagaacatggagggaaacctgtacaccgagtgcggtccgtcggcattcgcccgaccttttccacttgtagattgtaggttttttaaagtccgggcgggattagttctgtatctatacctgacagtctgttttt

SEQ ID NO: 16069 - DNA, 407 bp, Zea mays
  Clone ID: LIB83-006-Q1-E1-F3
cccacgcgtccgcggacgcgtgggttttttttttttttgcatgaacggatataattgacgttggtttcagtaggaataataataaggccggccggccggccggtgatgacagtgacagggatatccgatcgatccacggaaagagaagaagagaagaaactacatgactgtgcacgcgtctacgttgtcgtcgttgaacatgttcatgtacttgagctccggcgcgccggggtccgccatggcctgcggcgcgctgcggacgaatcccgcgggcgccttcttgtcgtaggcgccgccgacgtaggggtaggtggtgagcgcgtatggcacgtagggccacatctcggcgttcttgccggtggccttgacgcgctccagcaccttggcgggctccacgttgccggtca

SEQ ID NO: 16070 - DNA, 433 bp, Zea mays
  Clone ID: LIB83-006-Q1-E1-F4
accggcgcccgacatcaagtccatgcagatccaccacgaggcgcgccatcccaagctccctttcgagccggagaagctcgtcaacctgcactcctccacccccgccgccgccgaggccaccacctccaagcccaagcccggggtccgcggcagcctcaagaagtagctggctggcttgcctgcctgactgcctggggtaattcccttcgatttcaatcccatccaccgacccgatctacaatcaatcaaagtaccgcccgccctccggcctgcggtgtactgttagtctgctgctgctgcttcttatcgttgttatattgctgatacatgtctcgcgtgatagatgtgcaactatatatcagtctcgtcgccggcaacactggcatgcttaaacatgtgtcgctgctgctccgtgatgccggcgaccgctgct

SEQ ID NO: 16071 - DNA, 402 bp, Zea mays
  Clone ID: LIB83-006-Q1-E1-F5
atcgcaggagcagaaaagaaaccaatttttttttgttttctcttacagaagagaacaaacaaaggcttgagagcggtgtacagctagcgcctgcgtcttgacgatacgcgttagcaagtagcaagactcaagactcaagagggatcccttagcaaaaccggtctcgcaaagggacacaattccctaggaaccgcacaaaagcttcctgcaatccggcggctttggcgttgaacctccccccttgatcagtagtagaatcggctgctaaagatttctatttttatttttttctcggttcggaaggtgccgtgcggcgagcgaaataaatcgctgcggcgagaatcctgtggagatgagttgcgttaggtggcaggaccactcataaattctgcctgttcattc

SEQ ID NO: 16072 - DNA, 421 bp, Zea mays
  Clone ID: LIB83-006-Q1-E1-F6
cagcgactcagcgagcgagagcagcacacacgcagctagctaggagcagcagcagagcagcggcgatggcggcctccatgatctcctcgtcagctctggcggtggcgcctcagggcctgccgcccctcggccgccgcgcctcctccttcgccgtcgtctgctccaagaagaagatcaagaccgacaagccctacgggattgggggtggcctgaccgtcgacgtcgacgccaacgggagaaagggcaagggcaagggcgtgtaccagttcgtcgacaagtacggcgcgaacgtcgacggatacagcccaatctacaacgaggatgactggtctcccaccggcgacgtctacgtcggtggaaccactgggcttctgatctgggccgtcaccctcgctgggatcctcggcggcggcgccctcct

SEQ ID NO: 16073 - DNA, 411 bp, Zea mays
  unsure (1)..(411): unsure at all n locations; Clone ID: LIB83-006-Q1-E1-F7
gactacgtgtgggtgcagttctacaacaacccgccgtgccagtacagcgcgagcgccggcgtgggcagcctggcgaaagcgtgggcgcagtggacgtccatcagggcggggcgggtgttcctcggcctccccgccgcgccccaggccgctggcagcgggttcgtgccggcgagcgacctcgtggcgcaggtgctgccggtggtcaagaactccaccaagtacgggggcatcatgctctggtccaggtactacgacgggctcacggggtacagcgacgcggtcaagtcctacgtgtgagctagccagcctcgtgtcatgtcgggcgtgcaggagggagtangactgtangaggcacatgcttccatgtgcgtgcacgtgccgggcgttatcatacctatgggtatactgggt

SEQ ID NO: 16074 - DNA, 431 bp, Zea mays
  Clone ID: LIB83-006-Q1-E1-F8
ctcattccactccgacattcacgtgcagctgtcgggagcaggcaatggcgccggatctaagcgaactcgccgccgccgctccagcccgtggcgcctacctcgccggcgtcggtgtcgcggtcctcctcgctgcctccttcctcccagtagccgagtcgtcctgcgtgcgagataactcattggtgagagacataagccaaatgccgcaaagcagctatgggattgaaggattgtcacatataacagttgctggtgcgctcaatcatgggatgaaggaggtggaagtgtggcttcagacaataagtccaggtcaaaggacgccaatccacaggcattcctgtgaagaagttttcactgtcctcaaagggaagggtacgctcttgatgggatcaagctcactaaagtacccagggcagccacaggaaattcct

SEQ ID NO: 16075 - DNA, 418 bp, Zea mays
  Clone ID: LIB83-006-Q1-E1-F9
cccacgcgtccgcccacgcgtccgcccacgcgtccgagcgcttatagcttgtcagccatggccaccgccgccgcgtctagcctcctcaagtcctccttcgcgggctcccggctcccggccgccacgcggaccacaccggcgtccctcgtggtggccaccggcccgcgcggcgccggcgcggggcccatctgcgcgtccatgtccatgtcctcctccaacccgccctacgacctgacgtccttccggttcagccccatcaaggagtccatcgtgtcccgcgagatgacccgtcgctacatgacggacatgatcacctacgccgacaccgacgtcgtcatcgtgggcgccggctccgcggggctgtcctgcgcgtacgagctctccaaggaccccgccgtgagcatcgccatcgtggagc

SEQ ID NO: 16076 - DNA, 411 bp, Zea mays
  Clone ID: LIB83-006-Q1-E1-G1
cgctgcttcatcacctagccgtcgccacccatcgcctacagcgacagccgtcttccgtcacagcggagcgcccctcagatccaagggacgctgcacgagcgcaagagcaggttgttgagaaggggaatataatcatggatatcatgcagactagtgactcttcacatcatggaattgtagaaaatagcccgtacagaattccatatgacagacatgcagaaggtggtcaacttggtgcttcatggtattttagtagaaaagaaatagaggagaattccctttcgaggagagacggcattgatctgaagaaagagtcttatcttcgcaagtcatattgcacatttctgcaggatttggggatgagacttaaagtacctcaagtgacaattgctactgctatagtggtctgtc

SEQ ID NO: 16077 - DNA, 406 bp, Zea mays
  unsure (1)..(406): unsure at all n locations; Clone ID: LIB83-006-Q1-E1-G10
gaagacaaatcaatatagtatttaattgttgaaacagatccgtcatgtggcatgtgcatatatacatggatccacatccaaataaactgggatgtgtatgtgtggtgtcatgctgtcatcattactattccctgactgacagttaactaatacaagaggaaatccatcaggaacacctactaattaaagctacagctacagcaccagcagtaggcactatactaagcagaagcaacaccaaattaaacaagacatatatctcttgtttttgctactagaatcatatgcatgcgtggtgctccatcgtcctcacgcgacgccgctatcaattcattaattagcttgtgaaaaaacanagctaatgaattaaggggggaggggacangaatatatgcaatctagtgaa

SEQ ID NO: 16078 - DNA, 289 bp, Zea mays
  Clone ID: LIB83-006-Q1-E1-G11
cagcgacactgtccagtgcgcgcgtcaagcttgcttagctagccgccatggcctccctcgccgccgtctccgtgaagcccgtggccatcaagggtctcgccggcagctccatctccggaaggaagctcgccgtcgccaggccgtcggcccgctccatccgcaggccccgcgcagccgccgtggtggtcaagtacggcgacaagagcgtctactttgaactcgacgacatcggcaaacaccaccggacagtgggacctctactgttctgaagcgccttcgccctaaaacc

SEQ ID NO: 16079 - DNA, 390 bp, Zea mays
  Clone ID: LIB83-006-Q1-E1-G12
cagtcactcacacactcactatacactgctctgctgcagcaagaaggaagaagctagcgcctccctagctctcgttgtcagcaatggccaccaccgccgcgtccagcctcctcaagtcgtccttcgcgggctcccggctcccttcggccacgcgcaccaccaccccgtcgtccgtggccgtggccaccccgcgcgccggcggcggccccatccgcgcgtccatctcctcctcccccaccaccggcgtcaagaggctccaggacatcggcatgatcagcgccgtgcccgggatgaaggcgctcgacatgaacgccgccgaggacgagatcgtgcgcctcacgcgcgaggtcgtgcccggcatgatcgtcaccgggatggaggtcgcagaga

SEQ ID NO: 16080 - DNA, 434 bp, Zea mays
  Clone ID: LIB83-006-Q1-E1-G2
gacaaatctcaaaacctaaaaaaaaaagaaaatatttagttactgcttgacacaaatgattagatgccacataaaaatgtttctaaattgctagatagtttgattgaatatatatacaaattttagatgacataccctaccggaaaattctagatcagtgcttgcttcgtctttttttattgccatctactgtcacgggtaaccgtataatacatacctcatattaaccgctaaaactttgacaacaattttcctcggcgtagtacaaatccctcatatgacgcgttgggtaaagaggaggtagtggtttggtcgactcaagcaacccttttgacccttctagtccagtcgacagtaggtacgctgcattcaaccctttacccttttgataagccacaatggtatggtcaactttggggggctcatggcatgga

SEQ ID NO: 16081 - DNA, 412 bp, Zea mays
  unsure (1)..(412): unsure at all n locations; Clone ID: LIB83-006-Q1-E1-G4
cccacgcgtccgcccacgcgtccgcccacgcgtccgctccgttgcgcctcctccaccttccttttcagcacctgcaccaatccgttgcgctcgtgctcccctctcgtccgccgccagcacccccgcgccgccatgaccacggactcctcggccgcctcgttccagaagatccagatccagcgcgaggacaccacttttgatgcttatgttgttggcaaagaaaatgctcctggaattgtggttttgcaagagtggtggggagttgactatgagataaagaaccatgcgatccacatttcccaacttggtggaggatacaaagcactcattccagatttataccgtggaaaagttgctctggatgttgctgaggcacaacatctgatggagggtctcgactggcanggtgcag

SEQ ID NO: 16082 - DNA, 410 bp, Zea mays
  Clone ID: LIB83-006-Q1-E1-G5
gaaacaccgccgccgccgcgccttccattccagtactcgcggaggaaaggaacaccagccagcgccatggtcacgtcgacgaccgccgccgccgtgctgtccccgccgtccgtggccgggcttcgcctggcgccgtctccccgggcgcgcgtggcgttccgcgcggcgcgggcgcggcggtccgtggcggcgcgcgcggagctgagcccgtcgctggtgatcagcctgagcacgggcgtgtcgctcttcctgggccgcttcgtcttcttcaacttccagcgggagaacgtggcgaagcaggtgcccgagcagaacggcaagacgcacttcgacgccggcgacgagcgcgccaaggagttctcgggcctgctcaagtccaacgaccccgtgggcttcaacctcctcgacgt

SEQ ID NO: 16083 - DNA, 428 bp, Zea mays
  Clone ID: LIB83-006-Q1-E1-G6
ccgacgaccagtcggcactgatttacctcttgctctcgcaaaaggacaagtggatggacaaggtgttcattgagaattcctactacttgcatggcttctgggctgggttggtggataagtatgaggagatgatggagaatcaccacccaggcctcggcgacgagcggtggcctttcgtgactcactttgttgggtgcaagccatgtgggagctatggggattacccagtggagcgctgcctcaggagcatggagcgagcgtttaattttgccgacaaccaggtgcttcggctatatggtttctcacacaaggggctggaaagccccaagatcaagagattcagggatcagacaactagaccaattaatgatgtggagaacttagatatgaaggccaaaatatctacaatttcctgaaagttcagatga

SEQ ID NO: 16084 - DNA, 397 bp, Zea mays
  Clone ID: LIB83-006-Q1-E1-G7
cccacgcgtccgcggacgcgtgggtgccggtcaaagtgccataaaaacttcaagatgaagaggaaccctcgtaaggttaagtggacaaaagcatacaggcatttgcatggcaaggacatgacccaggatacaacctttgagtttgagaggaagaggaacaggcccgagcgctacgaccgcaatttgacggagcagaccctgaaggctatcccgcttattacaaagattaggcatgatcgtatggaaaaacacatctcaaacagacataaacctggtaaacgcaaggagatggaaaaggattccaaggagctggagcaggacatcgccatgctcccgaagaagcttattagcaaccatcttgcggctgagaaaacgaaggtcaaggttgaagttgttc

SEQ ID NO: 16085 - DNA, 382 bp, Zea mays
  Clone ID: LIB83-006-Q1-E1-H1
gtggctggttccttcggacttccctctgaacgacgacgagttcggccagagcagcgctgagagctacggcaacatgctgcagaacaaggctttcggtggtggtacggaccgatctttggttggcaacagactccctccctatgtgtacctccacctggacggcaactatggtttccacgacaaactcttcttctgcgaggacgaccagcagttcctgcgaggtgttccgtggctggtcatgaggacggacatgtacttcgtgccgtccctgttcctcgttccagctttccaggacgagctcggcaggctgtttcctgagaaagacaccgtcttccatcacttggcgcgctatcttttccatccgacaaatggcgtctggtat

SEQ ID NO: 16086 - DNA, 436 bp, Zea mays
  Clone ID: LIB83-006-Q1-E1-H10
gtaaggttcacgggtcgacgacgcgtccggcagcacacagccccatcccaatcctagtcgatcttcttcccctcctcaaggaagaaaagaagctgaaccatggggaagagaaagtcagctgctaagccacctcctaagaagcggatggacaagcttgacactgtcttttcctgcccattctgcaaccacgggagtagtgttgagtgccgaattgacatgaagaatctgattggcgaagcatcttgtagaatctgtcaggaaaacttcagcacaactgttaatgcactcactgagcctattgatatatatagtgaatggattgatgagtgtgagcgtgtcaacactgttgaaggcgacgatgatgcgtgagcttgccccatgcgatgaaactgttacctacaatcgtaatgtaatgtgctggtattctcgaatgcca

SEQ ID NO: 16087 - DNA, 416 bp, Zea mays
  Clone ID: LIB83-006-Q1-E1-H11
cccacgcgtccgcaaagacaacatctactgagcatgtgcagcctccaggacaaccagctgccaagagaagaaaaaggagcagagcctcaaacaaaaattcgacagatgagttctcacaaattcgtaaacgggttagatacattttgaaccgaatgaattatgagcaaagcctaattgaagcttatgctagtgaaggctggaaaaatcaaagtttggataagataagacctgagaaggagcttgaacgagccaaatcagaaatcttacgatgcaaattgagaatacgggaagtcttccaaaatattgattctcttctatccaaggggaaaattgacgaatctttatttgattctgaaggagaaatatcttgtgaagatatcttttgtgctacttgtggttcgaaaaatgctacattg

SEQ ID NO: 16088 - DNA, 423 bp, Zea mays
  Clone ID: LIB83-006-Q1-E1-H3
cacgtccaccgtgatgagccggctcctggcgcggcccaacgtgaagctgttcaacgccgtggcggtggaggacctgatcgtgcggcgggggcgcgtcggcggcgtggtcaccaactgggcgctcgtgtccatgaaccacgacacgcagtcgtgcatggaccccaacgtcatggaggccaaggtggtggtcagctcctgcggccacgacgggcccttcggcgccaccggcgtcaagaggctccaggacatcggcatgatcagcgccgtgcccgggatgaaggcgctcgacatgaacgccgccgaggacgagatcgtgcgcctcacgcgcgaggtcgtgcctggcatgatcgtcaccgggatggaggtcgcagagatcgacggcgccccgaggatgggcccgacgttcggcgccatgatgatctc

SEQ ID NO: 16089 - DNA, 403 bp, Zea mays
  Clone ID: LIB83-006-Q1-E1-H4
ctcctatcctatcatccgtcggccaccgcgccgctccgctcacgcgacgcgccgtcgcgccgaagcccggcggccttgacccttaagggcttgaggccgtgaccgccgtgagccccttccgtgattctgttccctccaggtaggctgccatccctccagcgttggcacaagcggtcaggctgccaggttggggcgttgagctgccacctgcacctgccaagctggggcgctgggctgccatccctccaggagccgacgctgccgacctatcgctggtcaggttagtgatctgaaattctgaagtccatccctccaagctccagtctgcctgtcacgtactcaggttagtgatctgaaattctgaagtcaactagatggagttcaacttacaagatgttgcata

SEQ ID NO: 16090 - DNA, 195 bp, Zea mays
  Clone ID: LIB83-006-Q1-E1-H5
gagaggaggaggaatcgtgtatgtaactattaatgcaaattcgggctgttggtttttaatttcagtttgggtttcttctttctttcttgtgtactccagtggactcccgtgtgcaaacacgaagagtggctgtttgacaccagagattaattgttacttcctccgtctcagattataatatattttgatcttttt

SEQ ID NO: 16091 - DNA, 426 bp, Zea mays
  Clone ID: LIB83-006-Q1-E1-H6
cggacgcgtgggcggacgcgtgggtgctgatgtaactgttatgtctgaagcgatttcaaacgaaagagagaagaacaatgctagtatgcctcttattcatggaaaggcattataccaacctaataaaataaaattaaggaaacctgcaaaactttggaaactccggtgggtccaatttccgacaatgcgaaggaactgcattccatggtaatgaagcttggacacctttcaagtcttcatgctgggaatcttcacaaggctctagaagttccaggagaaagggaatctatgagatcccaggatttgctctcaacacatcctgatcttttgcaaagtgattcatcaactgagaaggatagagcctctcttggcatggattctggctctccagatttggaattgaatactgacatttgtttgcaagat

SEQ ID NO: 16092 - DNA, 428 bp, Zea mays
  Clone ID: LIB83-006-Q1-E1-H7
gggaagctatcttactaaagcagataagtgggtacaaatcaaggccaagcaagacgaagacaaatttgcagcaaggctgcattctttcagtggcaattctgtgaagcccaaaggttcaaagtcatcatgtgagaaaattgaaatggcgagatctcttaatctaatcggtgcaccttggaagaacaaagctttaagatctgatgagcacagacctgtggtccgtccagaagtaattctctgtgttgaaatttatcagaagacatatgcctctgttaagtcccaggaacttcttttgctgggaagccaattccttactgatctgagggacaacatttattgtttgactgataaggtgatgaaggtggctgggcaacacgatcattctgggtattttcttattgaggacacgttctacaatgatacgagac

SEQ ID NO: 16093 - DNA, 338 bp, Zea mays
  Clone ID: LIB83-006-Q1-E1-H9
gcaagacaagcagcagcagccaccactgccatcacatggagtacgccgccgtcggctacggctacgggtacgggtacgacgagcgccaggagccggcggagtccgcggacggcggcggcggcggcgacgacgagtacgcgacggtgctgtcggcgccacccaagcggccggcggggcggaccaagttccgggagacgcggcaccccgtgtaccgcggcgtgcggcggcgcgggcccgcggggtgctgggtgtgccaggtccgcgagcccaacaagaagtcgcgcatctggctcgggaccttcgacactcccgaggccgccgcgcgcgcgcacgacgtg

SEQ ID NO: 16094 - DNA, 342 bp, Zea mays
  Clone ID: LIB83-007-Q1-E1-A10
aggacgcgtgggcggacgcgtgggcggacgcgtgggcaggggattatgtgagtttgcaaaaagccaaaaaagtctatacgcgtatagaatttgcttgcttgcttgacagccagccaactgttgtcgaatgatagttctggcgttgctaactgtcaggcttttgaaagcgagtcaaagacggtccagctcgcgaaaggtaccggcctgcctgcgcagcagaacaaacctagctacgaggcattaattcgtttgatgtgcctttttggactcaaatcgattctctctctctttttagaatataaaaaacaagtaaaagatgaaaggtaaggataagatcaatca

SEQ ID NO: 16095 - DNA, 415 bp, Zea mays
  Clone ID: LIB83-007-Q1-E1-A11
cactagcaatagaagcatttggaaaggttggctccattgaccaggcagaaaagatatggatccatataaaatcaacaaagaagttaagccttacagaacagtttaattctatgttatcagtttactgcaggcacggtgttgtcgataaagcatcatctgtattcaaggaaatgagagcaaatggatgccagcctaatgctattacttatcgccacttagcattgggttgcttgaaatcaggtcttgttaaagaagctttgaacacaatagatatgggaaagaaggaagtcgtcactaaaaaggtgaggagttcaacaccatggttggagaccacacatctgttgcttgagaactttgcagaaattggagacttggaaaatgcaaagagactgtacagtgaactgaatgaatccaa

SEQ ID NO: 16096 - DNA, 386 bp, Zea mays
  Clone ID: LIB83-007-Q1-E1-A12
atcctccttcccatcaaatctctcctctccatttgcatctcctcctcgtgcgccccgtgcccccatcaaatcgcctcgccccgtgccccctgctcaaaaccctagccctgccgcagccgtcctccatggctgcggatttccgcacccctgaccgcctcctgcccgccgcaactgaggagccgacgaccccgcagggccaccctcccaatccggtgctcagcacccccaccgtccccgacgccacccacgatggcctccgcttctggcagtacatgctcgccggctccgtcgccggcgtcgtcgagcacacggcgatgttccccgtcgacaccctcaagacccacatgcaggccagcacgccgccctgccgcccgacgctatctctg

SEQ ID NO: 16097 - DNA, 430 bp, Zea mays
  unsure (1)..(430): unsure at all n locations; Clone ID: LIB83-007-Q1-E1-A2
aaagcgtgtacatagatcccagcaacgtcgacgactacctggtcggctccatcacggcgccggcggcggaccccaacgccggcgaggtgtactacaggctgatgtcgcggttcatgtcgaaccagagccggtacacgctggaccggctgctggggaagatgtcgtgcccgctgctgctgctgtggggggacctggacccgtgggtcggcccggccaaggccgcgcggatccaggagttctacgccgacaccgccgtcgtgcacctgcaggccggccattgcccgcacgacgaggcgccggagcaggccaaccgcgcgctgctcgagtggctcgcggccctcgacgcccgcgccaagtcggccgagcccagcctacagaccgtctgatggatcgagcccaaagggcttagcgaatgctantccaagaatac

SEQ ID NO: 16098 - DNA, 436 bp, Zea mays
  Clone ID: LIB83-007-Q1-E1-A3
gcgtccgaatgtatgtcaccaagcgcaacatggcaaatgctgtttcaagcatgactaaacatttggagcaagtgcaaagttctcttgctgctgctaaaaggcatttgacacagcgcattgaaaagttggccgataaattggatcagcaaaaggctctatctggacaaataagaaataatgttactgatgcacgtctgaagcttgagaatattggttcagaaattaggaacatcaaagaattagtttggggtctggatgggaaaattgattcaatggaagctaaacaggacttctcatgtgctggtgtgatgtacctctgccaattcatacagcagaatggtggaaagcctccggatcgcctggaaggctccaaagtgactacaaagcgttttggaggtcaaaagttcttgcagggattgcaactggcaatagaatc

SEQ ID NO: 16099 - DNA, 394 bp, Zea mays
  Clone ID: LIB83-007-Q1-E1-A4
atcctgcggaagaagtttctaacgggctacatcccaccaccgcacgatgtcggcagcggcgcgagtgctgccgaaggcggtgaccttcgtgacgggcaacgccaagaagctggaggaggtccgcgccatcctcgggtcttccgtcccattccagtcgctcaagctcgacctgcctgaactgcaaggggagccagagtacatatccaaagagaaagcacgaatcgctgcatctcaggtgaatgggcctgtactggtggaggacacctgcctatgttttaatgcgctcaaaggcctaccaagaccctacataaagtggtttcttgagaagattgggcatgaaggtttaaataatctgttaaaagcttatgaagataaatcagcgtttgctatgtgc

SEQ ID NO: 16100 - DNA, 417 bp, Zea mays
  unsure (1)..(417): unsure at all n locations; Clone ID: LIB83-007-Q1-E1-A5
caccatcgcagaagcgcagtaggaagccggacaaagctacgcaaggagggagaaagcgtgtaaaccatggcgtcctccgcgttcctcaacgctctcgtcctccgatcgccatcaccgtcgctctcgtcctcgtctaaccgccgcagcaccggcgccttcgcgttcccgaacccaccgcgcttcccatgcctgcgttctgcgcgtcgactcgtccttgcgagggcggcggcagcgccggcgccgggcgatggccccgaggacgagtgggggccggagcccgagggcggttccgctgtcacgggggccgcngtggcggaggcgccggaggcgagagaggtcgcggagctcaaggcgcagctaaaggacncgctgtacggcacggagcggggcctgcgggcgtccagcgagtcacgagcc

SEQ ID NO: 16101 - DNA, 302 bp, Zea mays
  Clone ID: LIB83-007-Q1-E1-A6
ggagaaagaaggagaggaaggtagccccctttccatggaaggatccgccactgctgagggccgctcagggttacgacaaatggcgagtgtgagctctctcgtctctcctatataaagggaggacgcgccttggcgcaaaagcaagccccgcgcgccaatggccaaccgagcagaaggcgccgccgcgggtgaccgcgaggctctccagaacctcttccttgacgtcgcgcgcgtgctggtggtgttcggccggcgaacccgtgctggcgttcctcagcctcctgctctggctgctcggcgtg

SEQ ID NO: 16102 - DNA, 412 bp, Zea mays
  unsure (1)..(412): unsure at all n locations; Clone ID: LIB83-007-Q1-E1-A7
gggcagcataaattcacgcacttcagaaggctcatgccagggaagtccagcaaaccaaacatttgtttgtaagccaatcgcttcaatgttcgcagaacctcaacttaatcaagaggagttcaacaaagaaccttttcaagaaccacaactaccactttcaaggatgctgattgaagattctggtagctccaaagatttgaagaatctcttcacttcaacatcggaccaaccatttttggcccctcccaacaacttggtgtcaatgaagcattcagggactgtaacgataaaggcgagttttaaggaagatattgtgaggttccgtttcccatgctcaggtggtgttattgtattgaaagaggaggtancgaagaggctaaggatggatgttggcacgttcgatatcaagtat

SEQ ID NO: 16103 - DNA, 395 bp, Zea mays
  Clone ID: LIB83-007-Q1-E1-A8
ggcgggcgttcgcggtggaccgcctcgtgctcgactcctacccgctccggctgctcctggagacggcggcgcgcacggaggagcgcatggccgggggctgcgccatcttcgtggacgtcgactccatcctcttcgagcacatcctctggctcgcctgcgacgcccgctccgtctcccagatcctgcacctcgacctcaaggagatcatcgacttctacgcccatgacgcgtgactggtcgatgcatccgcagctcctcctccctggacacgtactctgcaccacctgcgcgtttcttccatggatggatattcttttttctttcattcttcctttcgtcctctcttgcgctaatgcgcgtgatactattggtaatacagttcagatactattagg

SEQ ID NO: 16104 - DNA, 283 bp, Zea mays
  Clone ID: LIB83-007-Q1-E1-A9
agaaaagttcaaccaagattatggcagtcatgtacatggctaaaggggagaagcttgttgtagggtttaatttgtatgctcatgcgtgggccaataggtgactactgaattcatcgacatgctgaggtatccttgtaaacactatgcttatccttgtatgctgtacactatcattcatttgatgagcaataagctgtttggtaactcagtctcacctggataaggagaaactacgattttccctgcatttggctcgatttatctattcctctggtgtcactct

SEQ ID NO: 16105 - DNA, 386 bp, Zea mays
  Clone ID: LIB83-007-Q1-E1-B1
tgatatatctgatgatgaccgaaagtacatgagtaaatgccacattgctgtatcatcctgcatctttggaaattctgatcgactgaggactccatttggcaaaacgattacaagcctctcaaagaagacagtttgctttgctatgtttttggatgaagtgacattgcacactttagaatctgaaggccagaaaatggacagcatgggtttcattggcatatggaagatcatattgattaagaacatgccttataatgacatgcgtagagtggggaaaataccaaagtttttggcacacaggctattcccatcaacgaagttctcaatctggttagacagcaaactgagactacaaactgattctatccttatcctggagtatttcc

SEQ ID NO: 16106 - DNA, 251 bp, Zea mays
  Clone ID: LIB83-007-Q1-E1-B10
atcaggcgtccgggaatacagtatcaacatggggttcatgaaactatcggccatgtaactcctgagtacattcagacaggaatgccatcaatgcagactgatatcgttggttaagacgtcatcctgttagaaatgctgaccgggaaccttgaaatgcaatccatcctggacgtatatgaaaagcaagccaaattcctgcaaatggtttagggcagccttcggatggaaaagggctaatactccaccttatg

SEQ ID NO: 16107 - DNA, 403 bp, Zea mays
  unsure (1)..(403): unsure at all n locations; Clone ID: LIB83-007-Q1-E1-B11
agtgactggaagtatctctggcctcaagccagggctccatgggttccatgtgcacgcgcttggcgacaccaccaacggctgcatgtcgactgggccacacttcaatcctgttggcaaggagcatggcgcaccggaagatgaggaccgccatgccggtgatcttgggaatgtgacagcgggagaagatggtgttgttaatgtcaatattactgacagccagatacctcttgctggaccccactcgatcattggccgagctgttgttgtccatgctgatccggatgaccttggcaaaggtggacatgagcttagcaagagcaccggaaatgctggcggacgtgttgcctgtggtatcattgggctccaaggctaaagcggttaacctccgaggcanacaccatag

SEQ ID NO: 16108 - DNA, 393 bp, Zea mays
  Clone ID: LIB83-007-Q1-E1-B12
acacccctccaccacctccatggggtcgtcggaggccgacgaggaccagctcctcaagagcttcctcgcggaggtcagcgaggccgagcgggacaacgaagtgctcaggatacttggttgcttcaagttaaaccccttcgagcatcttaagttgtcttttgattcatcaccagatgaagtgaaaaagcaatataagaagttgtcaatgctggtccaacctgataaatgcaagcatcctcaggcacaagaagcttttgcagctctggcgaaagcacaacagctcctgcttgatccacaggaaagaggctacattcttgaccaagttactgcggcaaaagaaaaattttggggacagcggaaaaaggagctgaagaaagacagtgcgtccaagat

SEQ ID NO: 16109 - DNA, 58 bp, Zea mays
  Clone ID: LIB83-007-Q1-E1-B2
tcgtggttcgatgtacccctggtcatgcctctgcatgttggtccggtctcgcttcttg

SEQ ID NO: 16110 - DNA, 409 bp, Zea mays
  unsure (1)..(409): unsure at all n locations; Clone ID: LIB83-007-Q1-E1-B3
attcttgaagtgagtgaaaggcagacatttgttgggccgcccgagaatgtgagggaccatgtaatggctgccacaagagccctcaacaagggtgatcaccaaaaggctttcagtgtcataaattcgttggagatttggaagcttttgaggaacagagagcatgtccttgagatgttgaagcttaagatcaaggaggaagctcttagaacctatctcttttcatactcgtcttcgtacgagtccttaagccttaaccagctcactaccatgtttgatctcagcgagcagcatgcccacagcattgttagcaagatgatgatgcatgaagagcttcatgctagctgggaccagccaacaaagtgcatcgtattccatagtgtggaccaaactaggcttcangggctactct

SEQ ID NO: 16111 - DNA, 385 bp, Zea mays
  unsure (1)..(385): unsure at all n locations; Clone ID: LIB83-007-Q1-E1-B4
caagaacgcagaaccgtgacccacgtgctcgcagcgtaccagcagccgtcgtcgccctcgcaactagctccctgctgaacacgctgctgcatcgtaagctcgctccgttcgctgggaagagctcacggccgtccgtggcgcacgtggcgcaccgggcgccgacggctcgtgtgtggcggccagggggtacattgttcagagtcaagtggacgataacgatcggggaggagtccatcttccgtacgttcaggcgggacgtgatgcgcgccggtgtgctgcaggatatcaagcgcgatccgaagtacgagagctagtcggaacgagaagtacgcactgctcgctacgcctgacgcagtanacgtcgcaggggtatgatgggcagagc

SEQ ID NO: 16112 - DNA, 377 bp, Zea mays
  Clone ID: LIB83-007-Q1-E1-B5
gttttgatctgtctaaagatgatgtgacacatactggcaaaatactaactactgatgatgcattaatggggttagattatgatcctggaaatggattaggagctactaatggagaaaatgactatgaatcgggtctgctggaatttgatcctgttaagcatcacaatacttactgcccatgggtgaacgggaatgttgcagcggcttgctgcaacaacattggctccagctcaagtagttcagcgccctctggttggcagctaacaatagatgcagtcgacacgtaccaatcacttggtcaagcccaaaatcaaataatgcaatctgattctgcagcttcattatatatgcaggatgaccaaataactcataaccgc

SEQ ID NO: 16113 - DNA, 333 bp, Zea mays
  Clone ID: LIB83-007-Q1-E1-B6
cccacgcgtccgcggacgcgtgggcgccagctcgtccgggtccagctgtcacttcgagatggcctccctcatgacgcagctcccgatcaagaggggcctatccaagttcttcgacggcaagtcgcagtcgttcgcgtcgctggcggcggtgggcggcctcgaggacctgcccaagccgccggcgaagcggctcaagacgtcgcggagctgcggcgtcggcctcgaggacgcgcaccgccgtggccctccctccgcgaccggcaggaagcaggcgtccagggctcggctgacgccgccggcgctcgcctcggcgccgagaaggctggtgcgagc

SEQ ID NO: 16114 - DNA, 411 bp, Zea mays
  Clone ID: LIB83-007-Q1-E1-B7
cccacgcgtccgcccacgcgtccgcccacgcgtccggaaagccctcgaagcagataaggcctaccggctgccgccgtgcccgtgccggtgcccgcgctcgaccaccgccggccatggtcggcgtcgccctcgcgccggcagtgtcccgcgtgccttgccttcccggcgcttccttccacgcctcgcgcccctcctcttcggcgcggctcccggccaggccgcgggcgcgggcgccgccggagaggctcgtggttgtcgcgcggtactcgtcctcgtacgaggtcgagggcgaggaggaggaggaagatgaggaagggctcgggggcggcggaggctgggggaggagggaccgcgggcccgaccccgactacgacccggcccttgacatcgaacgcatcgagtcctcgaccg

SEQ ID NO: 16115 - DNA, 60 bp, Zea mays
  Clone ID: LIB83-007-Q1-E1-B8
accacgcgtccgcaacattacatttgtatatggtatatgcaggaaatagtgtaatattac

SEQ ID NO: 16116 - DNA, 412 bp, Zea mays
  Clone ID: LIB83-007-Q1-E1-B9
accacgcgtccggctaagaacaggtcttcgtctcaataatggaaggcaaaacagggcagctcaggtgctgtttcgtcgccatcgtgctcgtcctgggtcttgtccttgagcagtcccagcaggctgaagctagaggcaaatggtgctgcgaaaccgccaccggaaaataccattttaatcgctgcgttgactcgggttgggtcgacaatattgggttctgtgcgagtaatgccggttgcatcattatggaggacagatgtggaggtcgttggccagtgcctgctcgtgatgcgctttctctggatgtcatttgattaattataagcaagtacgtgaagttaagaaacgagggccagacgactgtcgtccagcgattggttatttgtgaacttgtcgtttgtcttcttatttc

SEQ ID NO: 16117 - DNA, 186 bp, Zea mays
  unsure (1)..(186): unsure at all n locations; Clone ID: LIB83-007-Q1-E1-C1
ggtcacatcactagcaatgtgtccttcgctgctgttgcagtctcatttgctcacactatcaaagctctggagcccttcttcagcgcancggctactcagtttatccctggacaacaagttcccttccccccgggggtttcccctggccctgggggcaatgggggttccagtggaacccctaaggga

SEQ ID NO: 16118 - DNA, 414 bp, Zea mays
  Clone ID: LIB83-007-Q1-E1-C10
gacgcgtgggcggacgcgtgggcgggaatccgggataagaggaagagaaaccgcgcggcaaaaggaaaggagtacaggagcgagaaaagaatctctgaccggagtcctgccaggctgatagaatcctggcagccatggatatactgctaggttctgggagattcttggcgcgacggactcccctcatgctcgtccctcgctgctctcgaggctcccgggacagaagcggcagcgacaaaggtgaaacctctgctgactgggacaaggcatgggctaagttcaagaagaaagggaagaggaccctcttttctgatttctcaccagacaagtatgtgacctggaacccacggcgcagcgagtatccgttgtcagaagaggttgatccaatcaagagaactgaaagatctaacttga

SEQ ID NO: 16119 - DNA, 395 bp, Zea mays
  Clone ID: LIB83-007-Q1-E1-C12
ccgacagacaacatggccgcctccgcctccaccgtctccggcctcgccggcgcctccctggccagccgcccggcgttctccaccagcttcacgcggggcagccgggtgtcggcgaggaaccccctgatgagcaggaacctggagaggaatggcaggatcacctgcatgacgtttccccgggactggctgcggagggacctgagcgtcatcggcttcgggctcatcggctggatggggccgtccagcgtcccggccatcaacggcaacagcctcacggggctcttcttctccagcatcggccaggagctggcccacttccccacgcccccgcccgtcacctcccagttctggctgtggctagtgacgtggcacctgggcctgttcatcgtgctcac

SEQ ID NO: 16120 - DNA, 383 bp, Zea mays
  unsure (1)..(383): unsure at all n locations; Clone ID: LIB83-007-Q1-E1-C3
cggacgcgtgggcaatcatcagacatgagaacccaggcgctgttcttcctcgcactcgcacttctcggcgccgtgctcgcgcagtccagcaacaggcaccaccaccactaccaccacgcccatgtccaaggcaaagggcagggagccggaggaggaggaggggagctggcgagccgggcgaaggcggcggcgcgcgcgtggccgtgctgtgacagctgcggcgggtgcaccagatcggagccgccgcggtgccagtgcctggacgcggcgccccgcgggtgccacccggcctgcagggactgcgtcaagtccagcctcagcgccgnaccgccgggtgttacagttgcatggacgcgtccccaactttctgcagcgccgctgca

SEQ ID NO: 16121 - DNA, 418 bp, Zea mays
  unsure (1)..(418): unsure at all n locations; Clone ID: LIB83-007-Q1-E1-C4
gtagaattcacaagaatgtcaaacttgcggagaaagtanncagacaagtctttaagctggaacctgagaacacagggtactatgttcttcttgccaacatctatgctgaggctgagagatgggaggctgtcaagaagctcaagaacaagattggtggtcgagggctccgtgagaacactggctacagttggatcgaggtcagaggcaaggttcatgtctttattgcacataaccggaatcacccagactggaacaggattgcagagtttctggatgatgttgccagaaggatgcggcaagaaggccatgatcctaaganaaagtatgctctgatgggtgccgatgatgcagtgcatgacgaggcattatgtgggcacagctcaaagctccccgtcccattcggtgtgctgaatttacc

SEQ ID NO: 16122 - DNA, 251 bp, Zea mays
  Clone ID: LIB83-007-Q1-E1-C6
caggctcgccgccagcgccgtagagggtctccaagaacgagatcatccggttcgaggagaccctctacggctcgtccaggctcgccgccagcgccaccgccaccgcccgcgcccttatctgaattactagaatccgggctcgtagatgctggagtacacagtacagggaaattgcccacttttttcatcaacttaagtttttagattaaacttttttgaaacaatcagacaggagatctgtcttatatatt

SEQ ID NO: 16123 - DNA, 380 bp, Zea mays
  Clone ID: LIB83-007-Q1-E1-C7
gttaggaacgagttcaagaatgacatcgcttgttacgttgactacgtgtcgactgggtgtcatgttcggctgttgtccaaggtgtagaatggcattatcggtatgcgatcggttttcttcaccccgcgatagccagcggcttctgagtaccggacgttcctgtcagggattctcgctcaggcaccgcgcagctccttgcgcgactacctgtacgctctccatacgtcgggctgctgatctatatttctcctgccaacaatgtgcgctctagcctgatcgctttaacgagtctggttacctgtgctactagtacgacgtgacaggtgccaacacacatagcctcatatccgtgacctgcgctcggaacattctctccacgc

SEQ ID NO: 16124 - DNA, 410 bp, Zea mays
  Clone ID: LIB83-007-Q1-E1-C8
gtttctgctccaaaaaggatcttctcctgatatcatacattgtcatgactggtcaagtgctcccgttgcttggctatacaaggaacagtatgctcttaatgggatgggaaatggtcggattgtatttaccatccacaatcttgagtttggagcgcatcacattggcaaggcaatggcacattgtgacaaggctacaactgtctctgatacatattcaaaggaagtggctggacacggagctattgcacctcactactataaattccatggaattcgaaatggaattgatcctgacatttgggatccatatactgacagatttattccggttcattatacatcagagaatgttcttgagggcaagagtgctgcaaaaaaggcattgcagcagatgcttggattacaacaaa

SEQ ID NO: 16125 - DNA, 219 bp, Zea mays
  Clone ID: LIB83-007-Q1-E1-D1
aacgtgttcttggattaattaactacgatctctatgagcctggggatggatcaacccgtcgtgcgtggtctcgttttgtgatgagtgggagagagaggatgacaagatcgatcctttgttaatggagatctcgttaattaggagagctaccgctgggacttggtggtttgtaatatatgatccaaccagtgatgaatcaatgcattcacttgtgtacac

SEQ ID NO: 16126 - DNA, 412 bp, Zea mays
  Clone ID: LIB83-007-Q1-E1-D10
cggacgcgtgggcagataaggaagccagccggcaaggggagccactccggcgtcgagaaacctaaggcgaagcccctccaacactcctatcaacccaatggcggccttcccaacgggcaagcacaacaccccccgcaaccctggcatcgccaacttcttgccacccggccgcccgccgggcgccggcccgatggatgccgctgcgctgctcgccgccggccctgggcctcaggggaggagcgcgttctcggcggagcgccacgctacgggtggaagctaagaagcaaactttttcttcatttgatgagttgctggagaagtctgagaagccattgttagttgacttctatgcaacttggtgtggtccatgccaatacatggttcccatacttcaagaagtgagtgagaagtt

SEQ ID NO: 16127 - DNA, 126 bp, Zea mays
  Clone ID: LIB83-007-Q1-E1-D11
tctaaagtgactcgtgctaatatggacgtcatccggtagtgggagccactcctgcgtcaagggtcgtaggtcaagcacctcaaccactccaaccacaccatcggtcgacttcattaccttcatcaa

SEQ ID NO: 16128 - DNA, 413 bp, Zea mays
  Clone ID: LIB83-007-Q1-E1-D12
ggatgagcgggacgccaagatccgcggtgagctcggcgatgtcaagggcgcctccgaggaggtgaagcagctggaggaccaggcggcggccatcatgaaggcggcgcgcgccgagatcgcggcggcgcttaacaagatgaagaaggagaccaccgcggagctggaggccaagctggacgagggacgcagccgtgtggaggccgagctcgtagaggcgctcgccaacctcgaggcgcagaaggaggaggctgtcaaggcgctcgacgcccagatcgcctcgctcagtgatgagatcgtcaagaaggtgctcccatccgcgtgatgaaaccaaaccggccctgccttatcctacgactatagttacatgaacatcataaattaatgataattttgaagaaatttggcgatgactc

SEQ ID NO: 16129 - DNA, 310 bp, Zea mays
  unsure (1)..(310): unsure at all n locations; Clone ID: LIB83-007-Q1-E1-D2
caacggggcgcgcacacgcacactgccaacgaggcaccaagaaggcangaagggatggagtactgctaccagtacaacagcgtcagcaacgcggagaaggagaaaaggccgccgctgaggaggggcggcgtcaagctccagatcgtgaagaccctcagcaacctcgtcgtggcgcccagcaacggcagcgactccaagcaagcggaccgcaacagcttcacaagggagcgaagctacaactgaaacgaactgtaccttcagtatttggatacagatgtcaaccttgtgtctgaagaactccgctttggga

SEQ ID NO: 16130 - DNA, 415 bp, Zea mays
  Clone ID: LIB83-007-Q1-E1-D3
cattttctcaataccttaagcaaggaccaatgtctcaagcccagccccctcgttcccaagcccagtggaaacacgttaaatttcaggataaccaagctaatgccatgaaggaaccaggaaccggtgggtatggctatgggacgaaaaatgacaagaataaggatgtggatacaatagcttcggacttcatcaagctgaagcacaaggcttgggcactccagaagagcacaaccatgtaccaaccttctacctaaaggtgtcaatagttcaagaagttgatactatatacttatgcttgtctctgtatagtctataagtcctaattcaaataacaggtgctgcttgcagccttggatatttgcggatgcggagtgaagttaccatggcatccttgctaagaataagaaagtaatgt

SEQ ID NO: 16131 - DNA, 300 bp, Zea mays
  Clone ID: LIB83-007-Q1-E1-D4
gcagagcttccgggtcgtcctggtgaggaagaattcattgagaagcttgttcgtcaccagaggttctctatcgagaaacccaagtatggggatccacatgtgaaggccaatgctctgctgcaagcccatttttcaaggcacacagtggtcggaaatctggcagctgatcagcgcgagattctcctttctgctcataggttgctccaggcaatggttgatgttatatccagcaatggttggcttagtcttgctcttagtacaatggagctgagtcaaatggtgacacaaggcatgtgggat

SEQ ID NO: 16132 - DNA, 425 bp, Zea mays
  unsure (1)..(425): unsure at all n locations; Clone ID: LIB83-007-Q1-E1-D5
ctccctctcctctgccgccgtcaccgccccttccttcgccgcaccagcgccagcccgcgccgtggtcagaaggaggtccttcaccgtgcgcgcctctctccgcaaggccaccggcaccgccgccgtggcaatggctgccagcgccctgcttgccggcggtgccatggcccaggaggtgctgctgggcgcaggcgacggcgggctcgtcttcgagcccagccagttcaccgtcaaggccggcgacaccatcacattcaagaacaacgccggcttcccgcacaacgtcgtcttcgacgaagacgaggtgccgagcggcgtcgacgccaccaagatctcgcaggangagtaccttaacgcgccaggcgagacctactccgtcaccctcaacgtgccgggaacctacggcttctactgcgagccgcatc

SEQ ID NO: 16133 - DNA, 384 bp, Zea mays
  Clone ID: LIB83-007-Q1-E1-D6
cggacgcgtgggccgcggcgctgctcccttcgttgcagcccgccaggaggcacacgctgcagccgcccgccgcagccgccgagtccgcaggggaggccaagtctgtgggtttcctggagaagtacccggccctggtcaccggcttcttcttcttcatgtggtacttcctcaacgtcatattcaacatcctcaacaagaagatctacaactacttcccatatccatactttgtgtccttgatccatctagtagtgggtgtcgtatactgcctcatcagctggagtgtcggtctccccaagcgagcgcctatcaatggcacgctcctcaagcttctctttccagtcgccctgtgccatggtattggtcacatcactaacaatgtgt

SEQ ID NO: 16134 - DNA, 357 bp, Zea mays
  Clone ID: LIB83-007-Q1-E1-D7
accacgcgtccgcccacgcgtccgcccacgcgtccggatcttgaagcgcggcgaggaaccgcccgctccagctcccgcgccagcccctacgccggtgatagcagcgccccccgctgcgcaagccgcggcggttgaccagcgcgccctctgctccactggtcggatcgggccgcaggcgcccgccgtggtgccgacgaagaagatggtgtcgctccccgctgcatctccagccaacgcgcccgtgttcgcgcgccgggtgttttctgccgcggtgcccgccttggtgccgacgaggaggacggcaacggtcccggcccaatcttcagccaaagcccccgtgttacctggcctggcgtt

SEQ ID NO: 16135 - DNA, 327 bp, Zea mays
  Clone ID: LIB83-007-Q1-E1-D8
cagtcgtgagtttcgcgatggcacttcccatcaccaccttgtatgcagtttccctagcaccagtgggactcctcctcctttggcttcacaagcccgcagtcgtggggaaagccactgccagttcccggcgacgacggacgccttgtgccatggacccttccggtcatcagcagcatccacgacgtggtgcacggcctaagacagcgcaccatgatggagctgtctcgtcgggacggccccctcatgttcctccgccttggctacgtcccgacgctggttgtgtccaacgaccacgcaacggagctggtgatcaagatccacaacctc

SEQ ID NO: 16136 - DNA, 406 bp, Zea mays
  Clone ID: LIB83-007-Q1-E1-D9
cccaaccatgaccgtgctgagccgccctaccccgggcacggcccagtgcttcgggcggaagaagaccgccgtcgcggtcgcgtacacgaagccggggcgcggcctgatcaaggtgaacggcgtcccgattgagctgatccgaccggagatgctccgcctcaaggccttcgagcccatcctgctggcggggcggtcccggttcaaggacatcgacatgcggatccgcgtccgcggcggcgggaagacgtcgcagatctacgccatccgccaggccgtcgccaaggggctcgtcgcctactaccagaagtacgtcgacgaggccgccaagaaggagatcaaggacatctttacccgctacgatcgcaccctcctcgtcgctgacccccggcgctgcgagccgaagaag

SEQ ID NO: 16137 - DNA, 396 bp, Zea mays
  Clone ID: LIB83-007-Q1-E1-E1
ccgagacgctcaccttcgcggggggcgcccgcgtggcgcgcgtggcgctcgggtgcggccacgacaacgagggcctgttcgtggccgcggcggggctgctggggctcgggcgcggcgggctgtcgttcccgacccagatctcccgccgctacggccggagcttctcctactgcctcgtcgaccgcacctcctccggcgcgggcgccgcgccgggctcccaccggtcctcaaccgtcagcttcggggcgggctccgtcggcgcgtcgtcggcgtccttcaccccgatggtccgcaacccgcgcatggagacgttctactacgtgcagctggtgggcatcagcgtgggcggcgcgcgcgtcccgggcgtggccgagtccgacctccggctggacccgt

SEQ ID NO: 16138 - DNA, 396 bp, Zea mays
  Clone ID: LIB83-007-Q1-E1-E11
aggacgcgtgggctgaggtaccattcactgttgatggaccgaatggagttcttcgacatctcgaacacctgatagagaccaagggatttgctctggtttgcgttgctgaaggagcaggacaggaatactttcaaaagtcaaatgcaactgatgcatcagggaacatggttcttagtgacattggtgtgcaccttcagcagaagatcaagtcccattttaaggacataggagtccattctgatgtcaagtatattgatccaacatacatgctccgcgctgtgcgagccaatgcatccgatgccatcctgtgcaccgtgcttggtcagaatgctgttcatggtgcctttgcgggttttagcggcatcacaaccggggtgtgcaacacacacaatgtgt

SEQ ID NO: 16139 - DNA, 406 bp, Zea mays
  Clone ID: LIB83-007-Q1-E1-E12
gagcccgggaggttacttcgctgcctgaggagtccccggcaccggaggtcttgctaccggctggcggcttcttcttccgttcctccccaagtcctcttcccggaggaatcatgatcgtctgcgtcgccgttgtcggccaccagaacaatccgctgtacctgcagagcttcacggaggcggacgacgccctcaagctccaccacatcgtccactgctctctcgacgtcatcgacgagcgagtgagcaatcctaagaggagtgcacctacattgaatgagacatttttgggtcttctatacccaactgagaactacaaagtgtatggctatttgacaaacacaaaggtcaaatttatcatggtcacgactgatcttgatgtcaaagatgcagatgcccgaaatttttt

SEQ ID NO: 16140 - DNA, 331 bp, Zea mays
  Clone ID: LIB83-007-Q1-E1-E3
agaagcacaagcgtaaggtgttggcggggtagctagaaagaactgctgcaggttgttggcccctgctgtcgcggccgtgacatgggatgggaggaagcttcccttcggtgaggtaatcaagagacatgccattgaggagcattttacccggttcttgcattatgaattggatgcaattagaaaggcttttgcaaccttggaaaagggcaaccttccccaagttacatccatagtggtgcaaaagcgccatcacacagtgttttgccctagaattcatcgtacacacagacacccagatcgacgtggaaatattttgcagggatgatctata

SEQ ID NO: 16141 - DNA, 359 bp, Zea mays
  Clone ID: LIB83-007-Q1-E1-E4
gtcatgatgctgcggcagtcgtcggcggcatcctactactcgtcgtacgcagcggcagcggagacccagcagctgcagctggcgagggccaggtccacgtcgggggcggggggcatcctcctccactcggcgtcggagagggccgagcagctggcccgcgccaggtccacgggcatcttcgcggaggagatgctgacgccggcggagtcgttctcggagctgtcgaggatggggagcatcggcggcggaggaatgcaggcggtgaagatcagcctggaggagatggcgcggatcgaggaggagcagcggtttatcgagcgggagatggaaaagggggtggtgtacatcctcggggagag

SEQ ID NO: 16142 - DNA, 424 bp, Zea mays
  Clone ID: LIB83-007-Q1-E1-E5
accacgcgtccgagaaggctgtagaacaccggctggagggcacgcattatcccactgtgcagatgggcttccactactgaatgtcggtgagccaccagacggatggcgtagagggacagcaatctcttccaatgccagatcccagagaagcagttgggtatcctaagtgcaagcaaagtgaaaagatacaagagctgcaactcagcaagattggagtgggacagccaaaatacaatgaagctgtcacttcacatctaacacactatgttcgtcttcgctgatgcatgcactacaagttgtaagtcaagaacttagtatcttccatgcatatgggttatcgttacttttgtcagtatctcagaccgtgtccagcagctttttcatatgattatccaaaacactgttttacattgttttgcactgt

SEQ ID NO: 16143 - DNA, 355 bp, Zea mays
  Clone ID: LIB83-007-Q1-E1-E6
accacgcgtccgcggacgcgtgggcctcacttcgcagtggcagttgtgaagagatcatgattcaagtttggcatcgccaattctttacccttctcaatcttgatagtgatagcggatgattcttgttcacgtgttgctcacgtgtttattggttctccagagcgcaagcaacaccatgtgttttaggctgtacacaaacaccattagcaattttgtaggcaagataagaaaaaaaaaacatatgctggggaaaaaagtcctttcccctggcattattttgtaagcaaatttttttagctcactttgttatgcgaaacatgattatacagatgtgtaatttgagtcgtaattcgtt

SEQ ID NO: 16144 - DNA, 347 bp, Zea mays
  Clone ID: LIB83-007-Q1-E1-E7
attgctctgatagcttgctccaggacgtacgtacgtacgtagatcgatccatcgatcgctagctaacctgaacgaacaaggggttcctcccctccggcggcaataacggcccctcctttaagggcggccccggtcgcgcaattggcaacaagaagtccttcaacgttcgtggctctcttcggaagggcaatggcaacggcgccgttggcgtttgccgcaagcgtcgtgcttgccggcggcggcgccatggcccagaaggtgctgctgggcgcaggcgacggcgggctcgtcttcgagcacagccatttcaccgtcagcgccggagacaccatcactttcaagaacaa

SEQ ID NO: 16145 - DNA, 406 bp, Zea mays
  Clone ID: LIB83-007-Q1-E1-E8
acagtgggccttgtcgcctccaaggtcgatactggaggcgccgaaggtaaatacaatggacagagctcacatttctccaggcaccttccaatttctcttgactacaatgtgatgagggtgaaaggaggacgtatgggagccgtgaatggtatgcatccaaatgggaaggtagatgaaacctgtatgcagtcaagagaaatctggacaggagtaacacatagtttagcagcaacgatgctgctccatggaatggagcatcaggccttcactactgcagaaggcatttatactgcaggatggtctgaagagggctatgggtactggttccaaactccagaagcatggacaattgatggccattacaggtcactaatttatatgcgcccccttgcaatctgggcaatgc

SEQ ID NO: 16146 - DNA, 406 bp, Zea mays
  Clone ID: LIB83-007-Q1-E1-E9
acggaggactgagaccagaggaggagacgtcacgcctgcgcggctgcgcccaccatggacgaggatgagtttcggcgcatgctcgacctcttcccggtcgtccgctcccgagactactgctgctccgatcctggaacatccagcagaggaaccagacagcgatcacgagttcaggaggcaactacgggcgataataaggactcgtcctgtgcacaagatatgtttatgcagaaattgaagatggctgcggagaataagattggagcgacaaaggcagagttcttctgcaagacattcgaagaagttcatgagaaacttgttcacagagagctgaatttggatgctgctaagaagttcctgagcgcatatgagagctgatgatgaacaataggtagatgctgctaaa

SEQ ID NO: 16147 - DNA, 52 bp, Zea mays
  Clone ID: LIB83-007-Q1-E1-F1
ctcgaaatgtaagagaccattgttttatagagctaatggaaatcgtttgaac

SEQ ID NO: 16148 - DNA, 278 bp, Zea mays
  Clone ID: LIB83-007-Q1-E1-F10
cccacgcgtccgcagcaagaccatgtcgacggcgctggaggcgacgcggcccggcgggaaggtgtgcctggtcgggatgggccacaacgagatgacgctgccgctgacggcggcggcggcgcgggaggtggacgtggtgggcgtgttccggtacaaggacacctggccgctgtgcatcgacttcctgcgcagcggcaaggtggacgtcaagccgctcatcacccaccgcttcggcttctcgcagcgggacgtggaggaggccttcgaggtcagcgccc

SEQ ID NO: 16149 - DNA, 409 bp, Zea mays
  Clone ID: LIB83-007-Q1-E1-F11
gtgaggcaggaactgctccatgcaaatcaaattttcgcccaacatccaatgtggccagtcattgcggtcactggaagagctatagaggaaacagctgctgtcgttgtgaggattctccaagacaggatacagaagtactccatgccacgcatatcaaaacggtactaagggcacgtttggtttcattagtctctgtttggtttcagggactaaaagtgttaagaactcattaaattactcataagaatactaaaatgtcctttaccattcttccgccattactcttcttccactgcaatagaaataaataaggggcaaaatgtggaattaatatggtttagtcccttttagtcatcccttgagggactagatactaaagcagtttagtctctattttagtcctactgtt

SEQ ID NO: 16150 - DNA, 363 bp, Zea mays
  Clone ID: LIB83-007-Q1-E1-F12
gctgtgggttgactatgccagatggataggcgtccagaagtctcacgaagaggcctaaagttctagcagcttgcctgcatgttccgctgtcactgcctcactaggcacgttcacaataccatcgatggcttgcctgcctctatagaatgctgatctactcttcactggaggcccccttatatataggacaaaaatcccaattttgtttggaaaaccacaagtagggatatatctgtcgaattctcgtatgcaacggcaacgccgttctacccctcaactttttttttttcctttttctactttgcaacatgcaacaagggctgtcattgatcgaaattcaaatatatgttacattgggaattc

SEQ ID NO: 16151 - DNA, 391 bp, Zea mays
  unsure (1)..(391): unsure at all n locations; Clone ID: LIB83-007-Q1-E1-F2
gggtcgagcacgcgtccggatccaccaacccgatcgcctcgtcgtcaaaaaatccccattcgttccccttctcgcctccacgagccttcacaaattgccctctcagatcttctcctaatcttactcaagccctagccaaatcccagacccatcccagccctagcgacaccaaccagctcgccagcgaccatggggaacccggagaagctgatgaatcagatcttcgacctcaagttcacctccaagtcgctgcagcggcaggcgcgcaagtgcgagaaggaggagaaggagcagaagctcaaggtcaagaaggcgatcgagaagggcaacatggacggcgcccgcatccaagccgaggncgccatccgcaagcgcaccgagcacatgaact

SEQ ID NO: 16152 - DNA, 400 bp, Zea mays
  Clone ID: LIB83-007-Q1-E1-F3
atgttatacgcctccaaccatcagaagccatgtacatgaaactaactgttaagaagcctgggttagaaatggctactgaacaaagtgaacttgatctgtcatatgggatgcggtaccaaaatgtcaaaattcctgaggcatatgaacgccttatcttggatacaataagaggtgatcagcagcactttgttcgcagagatgagctacaggctgcttggaagatcttcactcctttgctgcatgacattgacgacggcaagctgaaggccctcccgtatgaacctggcagccggggacccaaggaagccgacgaattgagcgcgagagttggatacatgcagacccacggttacatatgggtaccgccgacccttgcatagaagacaatacgaattgtttg

SEQ ID NO: 16153 - DNA, 323 bp, Zea mays
  Clone ID: LIB83-007-Q1-E1-F4
accaacgaaagacggaaccacaccgctgcatcgtgcggtctgtgatggaaatgttcagatggttgagttgttgctggaacacggagctgacgtcgacaagcaggacagtaatggctggtcgccaagagatctagctgatcagcaaggccatgatgacattcaggctctcttcaaatcacgaaaagcacacaggaagcatgcctcaaatggcagagtggcacctatgctgatagggagattcaacagtgagccctcgatgccagatatgagccatgaaaacgccagagtacgcagcgaagttgttccgcagaagctcctccgaa

SEQ ID NO: 16154 - DNA, 314 bp, Zea mays
  unsure (1)..(314): unsure at all n locations; Clone ID: LIB83-007-Q1-E1-F5
gggaccagcagcgcaaaggtgagcgagctttccttcggaactcagaactctcgtgctcacctcatccgttcgacaaatccacacgaatcctctgattcagagcagggtgttggcattgatcagacgcctgccatggcggatcagttcgtggattcggcgaacaatgtgatcattgaggaggtgaacaagggcctgaacccaggaatggtggttctgcttgtggttgcaagcttcctgctgctcttctttgtggggaactatgcgatgtaggtgtatgcgcagaagacgctcccgccanagaagaagaagcggtg

SEQ ID NO: 16155 - DNA, 414 bp, Zea mays
  Clone ID: LIB83-007-Q1-E1-F6
cagctcattgcaaaatgcccgaacttactagttctcgcggtatcatctcctgctcatgtaaattatgaagatactgaattggcaatcttttcatggtaattgacagtatattttttccgataggtgaggaatgtgattggagatagaggattaggagttgttgcggatacgtgcaagaagctccaaaggctcagaatagagcgaggagatgatgaaggaggtgtgcaagaagagcagggaggggtctctcaagtgggcttgacggctatagccgtaggttgccgtgagctggaatatatagctgcctatgtgtctgatataaccaatggggccttggaatctatcgggacattctgcaaaaaactatacgacttccggcttgttctacttgatagagaagagaggataacagac

SEQ ID NO: 16156 - DNA, 430 bp, Zea mays
  Clone ID: LIB83-007-Q1-E1-F7
cctggtgaagcagcgggtgtgctccaagattgcgagcgccttaaggaattggtgttgtcccacgatgctatcttcttgttgaccgacacaagagaaagcaggtggcttccaactctcctatgcactaacgaaaacaagattgctatcactgcagcattagggtatgatagttaccttgtcatgcgacatggggctggccctggcataagctgtgaagcttccagtgtggtcactgccatagacaagatgtccacggaggatgcccttgggcgtcaaaggctggggtgttatttctgcaatgacgtcattgctcctgtcgactcagtttccaatcggacactggatcaacaatgtacagtgacacgaccggggttggcctctattgcatcaggacgcgctgcagacctcttcagaagaatgttacaccatc

SEQ ID NO: 16157 - DNA, 329 bp, Zea mays
  Clone ID: LIB83-007-Q1-E1-F9
cggacgcgtggggccgtgttagcgatgatgcctctggtttccaggaagcggcggccgtagtacgcgaaccacgtgtagtcgttcacgtccggtgacggcatagaggccaccggcaccggaggcatccctggcacgtcaacgacccctccctcctcccgcaacctggaagccagctcctcctgaatgcccggtaaacgcagcatgagcgcgagcatggcgccggtggacgcgaagtacacgtaggctggcacggcgaggtcgtgggcgacgtcgaggagcggggtcccgaagaagtcgacgacgaccgctgccaccggggccgccaaacc

SEQ ID NO: 16158 - DNA, 412 bp, Zea mays
  Clone ID: LIB83-007-Q1-E1-G1
ctggcccgttctcagtcccagtgagaggctccatgaagatcctggtcgcggtgaagcgggtggtggactacgctgtcaaagtgcgcgtgaggccggacgggaggggcgtggagacggccaacgtgaagatgtccatgaatccattctgcgagatcgccgttgaggaggcgctgcggctccgggaggccggcgtcgccgctgaggtcgtcgccgccaccgtaggccctgcccagtccgccgacacgctccgcaccgcactcgccatgggcgccgatcgcgccgtccacgtgctccacgacccggaccctgcgcggcccctcctccctctcgccgttgccaagatccttcgcgccgtcgcgctccaggagaagcccggcctcgtcatcctcggcaagcaggcaattgatgatga

SEQ ID NO: 16159 - DNA, 404 bp, Zea mays
  Clone ID: LIB83-007-Q1-E1-G10
ctcccccttgttgctcttggctccgcgatggcggtgggttgcttcaaccacgtgctctcgccgcttgttccttcgccgccgggtaggcgcgtccgagcggcgctgcggtgccggtggcatcgtcacccgctgaccgcggtctccctccggcggctcccgtgcggcgcggcagctggtcgtggcacgcggcggctcgcggcggcggcagagtcgcaggccgtgcaggagcagccggcgcgggccgaagaggccggcggggcgggtgccgctgaggcgtcctccaagctggttctggtcgttggcggaaccggcggcgtcgggcagttggttgtagcatcattgctgagcaggaacatcaagtcaaggttgctcctaagagattcagaaaaggcgtttgtccctgt

SEQ ID NO: 16160 - DNA, 361 bp, Zea mays
  Clone ID: LIB83-007-Q1-E1-G11
accagacctcatctcactccgctaccccctcatcctgccatccaccagaagcagtgcaagcatatggcgcgccgtgccagcctgctcctcgccgcggcgctgctcgtcgccgtcgctgccgcggcggtgccgccgacgtgcgagcgcatcgagtgcccggcgtacgaggtggtggacagcgccaacgggttcgagatccggcggtacacggacgccatgtggatcaccacggcgcccatcgaggacatctccttcgtcgccgccacgcgcaccggcttcctacagctgttcgactacatccagggcaagaacgcgtacaaccagacgatcgagatgacggcgccggtgctgacgcgggtgt

SEQ ID NO: 16161 - DNA, 136 bp, Zea mays
  unsure (1)..(136): unsure at all n locations; Clone ID: LIB83-007-Q1-E1-G2
gcagcaagctactagctagcctactacagcctcatcacttgttagcctagccatagtccacacgacaaactgatcgatggtgcccaccaagagccatgtcntcctcgccgctctcctcaccgtcgtcgccgccgtc

SEQ ID NO: 16162 - DNA, 418 bp, Zea mays
  unsure (1)..(418): unsure at all n locations; Clone ID: LIB83-007-Q1-E1-G3
ccccaacgaagtgcgagcgacccacgtccacacgacacgaaccaccaccaccaaccagcagccgcaccacgcacccagcgcaaagcgatggcgtcgctcaccatgatggcgtccttcgccgccgtggcggtggccgcgccctcgcgccgcggcaccttcgccgtggtcaggtccgccaaggtcgaccgctgccaggagcccgccacgctagcagcaaccgaggccaggcccgccgccgacggacgccgcgccgtcatgctcgcggctgctgcggcggccgtggcagccatcggcggcgccggcgccgccatggcgggccccaagaacgggaccccgatgcgaagaagaagtacgcggccatctgcgtcaccatgcgcaccgccaaggtctgccacanctgagcacgcccgcgttgcat

SEQ ID NO: 16163 - DNA, 398 bp, Zea mays
  unsure (1)..(398): unsure at all n locations; Clone ID: LIB83-007-Q1-E1-G4
cccacgcgtccgctcccatctctccccctctccctctcgtggccacgactgccgctgccgccctacgccaggtgtccaggtcatctccggcccattcgccggcgacgagcaccccactagatcgaccgagatatggacggcctgtggcatctgggggacgagctccgcgggcagcccaaggtggtggaggaccgccagtggtcgctcatgacgtccaagctggcagagatcaccaggtccaggggcgagaggacgaacgacctcgactacgccaggatgaacgccgcccccgacgccaagcagtggggcaaggccgcgtcctnacagcaccacgacgagggcaggatggaccaccacgtcggcctcagcctcaagatgaacgatctcaagatgaacga

SEQ ID NO: 16164 - DNA, 410 bp, Zea mays
  unsure (1)..(410): unsure at all n locations; Clone ID: LIB83-007-Q1-E1-G5
gcgccatgggaggcatcaagtctgccgaggaggtgcgctgccactatgaaaatcttgattacgacgtcaagatgattgagtcaggcaatgtgccgtaccccaagtacaagacacagggattctggacccgaggttaaaaaaatgttggaggctcaaagaggcagaaaacaaagctctacggatccaagaaggaaccaaaggaaatccagctctggttggagaataaaatgatgaaccagtgtgtatatgtcaatatgtgtatagtatagtttatgatcaagtttatgtctgtctacctgtggttgtaggatcctagtgtacataagattgataaccacatgtattcaattgtcccttgaactaaagttatgganggtgtaaagtctaaaagtcatgtatttatgcanact

SEQ ID NO: 16165 - DNA, 356 bp, Zea mays
  Clone ID: LIB83-007-Q1-E1-G6
accacgcgtccggtgtgcagcatcacggagacgaaggaggcgctcaagctcaaggaagaagcgaccgctgcaaacggtgaacatcaaggtgaagatggactgcaaaggttgcaagcgtcccgtgaaaaccgcggtgaagtcgatgcgcggcgtgacaagcgtgacggtgaacgcgaagcagagcaagtgcacggtgaccgggtacgtggagcccgccaaggtgctggagcgcgtcaaggccaccggcaagaacgccgagatgtggccctacgtgccctacacgctcaccacctacccctacgtcggcggcgcctacgacaagaaggctcccgcgggcttcgtccgcagcgcgccgc

SEQ ID NO: 16166 - DNA, 227 bp, Zea mays
  Clone ID: LIB83-007-Q1-E1-G7
accacacgtcaggtatccagtatcacggcgacgaacgatgcgctcatgctcatgaagaatagaccgctgcagaccgtgaacatcacagtgacgatggactgctatggttgccagcgtcacgtcaagagcggtgtcaactcgatgcacggggttccgagcgtgacggtgaacacgtcgcagagtacgtgcacggtgaacgggtaagtcaagtccgccagggtgctgga

SEQ ID NO: 16167 - DNA, 286 bp, Zea mays
  Clone ID: LIB83-007-Q1-E1-G8
cgcacgcatccgactacgcgtccagcactcagcctcacggtcacgtgtgcagcgctgacgcctgcggccctacgccaggtgtccagggcatctccggccgattcgccggccaccaacagtccagaacatcaaccgagatatgcactgactgtggtatccgggggacgaactctgccggcagcccaatgtggtggaggaccaccagtggtcgctcatgtcatccacgctggcagatatcaccacgtccacgggccagaggaccaaccagctcgacgacccaagtatg

SEQ ID NO: 16168 - DNA, 414 bp, Zea mays
  unsure (1)..(414): unsure at all n locations; Clone ID: LIB83-007-Q1-E1-G9
cccacgcgtccgcaaggagtccatcgtgtcccgcgagatgacccgtcgctacatgacggacatgatcacctacgccgacaccgacgtcgtcatcgtgggcgccggctccgcggggctgtcctgcgcgtacgagctctccaaggaccccgccgtgagcatcgccatcgtggagcagtcggtgtcgccgggcggcggcgcgtggctgggcgggcagctgttctcggccatggtggtgcgcaagccggcgcacctgttcctggacgagctgggcgtggcgtacgacgaggccgaggactacgtggtcatcaagcacgccgcgctcttcacgtccacggtcatgagcctgctcctggcgcgccccaacgtcaagctgttcaacgccgtggccgtggnaggactcatcgtcaggggagg

SEQ ID NO: 16169 - DNA, 248 bp, Zea mays
  unsure (1)..(248): unsure at all n locations; Clone ID: LIB83-007-Q1-E1-H1
agacaagctgctggtgctttctgccgaaggggccttgaatgaatggtgaaaaccgctggatggttagaggatctgcatcntcttgtgttcttctgtaaaatactgagacttgggcagcataaaaagcttggcaaatttctgttgtgtggcaaaaaaaaaaaaaaaaaaaaaaaaaaaaaaaaaaaaaaagaaaaaacaaaaacaaaaaaaaaaaaaaaaaaaaaaaaaaaaggggcggccgctcaaaa

SEQ ID NO: 16170 - DNA, 395 bp, Zea mays
  Clone ID: LIB83-007-Q1-E1-H10
cccacgcgtccggagagagaggcagagcgagcgagcgagagagcgctggtcatggcgtcactgtctgtcgccgccgtggcggccaccatagcgatgccaagcagcagcggtgggagagggcgccgtctcagggtcgcgtccatggccacccagaagggccagaagccgacgcccaagaccgtctccggcacgagaagatcgggcacgacgacggtgttcccggtgggcgagccgggcccgcggccggcgacgacgagcggcaaagcgccggttaagctgctgacgaacgtggagaagctgcggctgctgaccaaggcggagcgcgcgggcctgctgtcggcggcggagcgcgcggggctgtcgctgtcggcgatggagcggctgggcctactgtc

SEQ ID NO: 16171 - DNA, 403 bp, Zea mays
  Clone ID: LIB83-007-Q1-E1-H11
ctgggcgtggccgggatgctgatcccggaggtgctgaccaaggccgggctgatcaacgcgccgcagtggtacgacgccggcaagtcggagtacttcgcgtcgtcgtcgacgctgttcgtgatcgagttcatcctgtttcactacgtggagatccggcggtggcaggacatcaagaaccccggcagcgtcaaccaggaccccatcttcaagagctacagcctgccgccgcacgagtgcggctaccccggcagcgtcttcaacccgctcaacttcgcgcccaagctcgaaggcaaggagaaggagctcgccaacgggaagctggccatgctggcgttcctggccttcctgatccagcacaacgtcaccggcaaggggcccttcgacaacctgctgcagcacctgt

SEQ ID NO: 16172 - DNA, 117 bp, Zea mays
  Clone ID: LIB83-007-Q1-E1-H2
cccgacccacccatccgcccacgcgtccggcaccaaagccaaagccaaagaatcctcttgacttgctgccaccaagcaagatggtccttgatgactggaagaggctatactcaaaca

SEQ ID NO: 16173 - DNA, 406 bp, Zea mays
  unsure (1)..(406): unsure at all n locations; Clone ID: LIB83-007-Q1-E1-H3
agataagggacggcacgcgacgcaactatcctcgagagagagagagagagagaggaagcccgtcgttctggaagtttccacgctccgcgcctccgccccctggtctgagtggtctccgctccaatggcgccctcactcctcgccgccatgtccacctcgcccttcctagccagcagcggcagcagccgcaggccgctaggcgctgcccacacccgacgggctggactgcgcgtggccgcgcttaagtacgaccctgccaaggtggcgccgcagaacgaccgggttctcgtccgtcttgagcagatccctgagaaatctgctggcggtgtgttgctaccanaatctgctgttaagtttgagagatatctgatgggtgagattctatcgatcggtgctgaagtcagtg

SEQ ID NO: 16174 - DNA, 238 bp, Zea mays
  Clone ID: LIB83-007-Q1-E1-H4
ggaagagagaatcctaccaaacctagctaccaactcgatcgtcgtcatcacgctccaccgcggcaccgagtacgtgatcaacgcggcggcggaggccggcacggtgcggcgggtggtgttcacgtcgtccatcggcgccgtgaccatggaccccaagcgcgggcccgacgtcgtggtcgacgagtcgtgctggagcgacctcgagttctgcgagaaaaccaggaactggtactgctac

SEQ ID NO: 16175 - DNA, 345 bp, Zea mays
  unsure (1)..(345): unsure at all n locations; Clone ID: LIB83-007-Q1-E1-H5
cccacgcgtccgcggacgcgtgggcggcggaagagaaggaataacacgtctaagcagagggacctggacgcagtgctgagctagtgagtagtggcctagtgtgctgtattatgaaaatgcataggtgggcactgaccctgtgtaattgcggttaattcggcacacatttttttgttgtacataacgtttagtcccatgagggaagatatgttggtcgctcttgaaattggagtatgttgtcatacagggcccagaagaactcaggtcttgcaccggaggcctggagcccaggcatctttcagttgcaacacttgatgtanaaaaataagaaaaaacattttacct

SEQ ID NO: 16176 - DNA, 135 bp, Zea mays
  unsure (1)..(135): unsure at all n locations; Clone ID: LIB83-007-Q1-E1-H6
gcgaggaaggtcgacagctgcccaaaggcgattctgtggcttgctanattcaaggatttcaaaactgccctgttacaaaagcttgaagaagactccaagcaacaacaacaacaaaacctcccgcaactccttgaa

SEQ ID NO: 16177 - DNA, 224 bp, Zea mays
  unsure (1)..(224): unsure at all n locations; Clone ID: LIB83-007-Q1-E1-H7
cggacgcgtgggcggacgcgtgggccaaggatanggccgtctggtcccagcatgatcagcagcgccgggatagaggactcttcgcagaaaaaccggcgcggccggccgccgggcaccgccaagaagcatcagccttcgccttctcaaggcattgctttcgccggttaagctggaacaagcttcattcggaaaatcatcacggcttctccttcaaaggacttggc

SEQ ID NO: 16178 - DNA, 398 bp, Zea mays
  Clone ID: LIB83-007-Q1-E1-H8
cccacgcgtccgatcagaatacacaaagcgtgtttacacatctcaactacaacacttgaaggacataactggcacattggcaacggaggaggctgatgattctggacatgtaagtaaactccgctctgctctggagtctgtggatcacaaaaggagaaagatcatgcaacaaatgcgaactgacactgccttgttaacaaaagaagaaggtggctcaccaattcgcaatcctcctactgccgcggaggatgcacgattagcatctctcatatctctagataacatcttgaagcaagtcaaggaagtaattagacaaagctctacaggacctatgagaaaatcaaaaaggaaagctttgctagagtcattggatgacctcttgacacagatgccctctc

SEQ ID NO: 16179 - DNA, 417 bp, Zea mays
  Clone ID: LIB83-008-Q1-E1-A10
ggagctcagccgagaagtttgagttccaagctgaggtttccagactcatggacatcatcatcaactcactctacagcaacaaggatatcttcctgagggagctcatatctaatgcctctgatgctggataagattaggttcctttcccttactgataaggaagttctgggtgaaggggacactgcaaagcttgagattcagattaagttggacaaagagaagaaaatcctctccattcgggataggggtattggtatgaccaaggaagatcttattaagaaccttggaacgattgctaaatctggcacttcaggaacaggagctgctcgagtctcttgtcgaagctgatacgagaaggcaggaaagagctaaaaagatggaagaaaagaaagtgtatctgcaactataccaagcaat

SEQ ID NO: 16180 - DNA, 437 bp, Zea mays
  Clone ID: LIB83-008-Q1-E1-A11
cgcctgccggtacctgtccaagcttcgcgggtcgaagcacgcgtcggcccacgcgtccgcccacgcgtccgctttctcctcgaggctcgagcattcgtgctgctccgaccccaccgccacaggctcggcggtccggcgatctcgctcaccggcgggaacatgactacttcaaggcgcctcgctgacaggaagaccgcaaagttccagaagaacatcaccaggaggggttctgtgcctgaaaccactgtcgagagaggaaatgactaccctgttgggcctctagtgcttgggttcttcatctttgtcgtcattggatcatccttgtttcaaatcatcaagacgggaaccaacggcggggtggcttgagagagccggcccacatctaatccccagtatagagagttgcttgttatacatgcgtccagctaggattgggt

SEQ ID NO: 16181 - DNA, 447 bp, Zea mays
  Clone ID: LIB83-008-Q1-E1-A12
cgggtcgaagcacgcgtccgggcgtctcgaatggaaggagcccatccaacccaacgaagaagcaaaatccccaatctctgcgccgccgccgttctgtgtcgttcttcgcccgccgtcgttccgtgtcgttcttagcccgccgccgtttgtagtcgcggcttcatcgtcgcgtaccgatccccaccgcccccactgccaccagaggtgtcgacatgtctcagaacaacccctcccagcttctcccctcagagctgatcgaccggtgcatcgggtccaagatctgggtgatcatgaagggggacaaggagctcgttggcaccctctgcggctttgatgtctacgtcaatatggtgctggaggacgtcaccgagtatgaatacactgctgaagggcgccgtattacaaaacttgaccagatcctcctgaacggcaacaacatagccattt

SEQ ID NO: 16182 - DNA, 422 bp, Zea mays
  Clone ID: LIB83-008-Q1-E1-A4
cggacgcgtgggcggacgcgtgggctaccagcgactcacccgagcgagagcagcacacacgcagctagctaggagcagcagcagagcagcggcgatggcggcctccatgatctcctcgtcagctctggcggtggcgcctcagggcctgccgcccctcggccgccgcgcctcctccttcgccgtcgtctgctccaagaagaagatcaagaccgacaagccctacgggattgggggtggcctgaccgtcgacgtcgacgccaacgggagaaagggcaagggcaagggcgtgtaccagttcgtcgacaagtacggcgcgaacgtcgacggatacagcccaatctacaacgaggatgactggtctcccaccggcgacgtctacgtcggtggaaccactgggcttctgatctgggccgtcaccctcg

SEQ ID NO: 16183 - DNA, 405 bp, Zea mays
  Clone ID: LIB83-008-Q1-E1-A5
cccacgcgtccgcccacgcgtccggtccggaccccggaggagccaagccatggcgtccacctcctgctgcctcctccaccagtcaaccgcccgcctcggcgcgtcgccgcgcctggccgccgccccgccgcgcagcgcccagctgctcgtctgcaaggcccggaagcaggaagccgccgcggaccagagcgacgtctcgcgccgcgccgcgctcgcgctcctcgccggcgtcacggccgccgccggcgccaaggtgggtcctgccgccgcggcatacggagaagcagccaacgtgttcggcaagcccaacgcgagcacggagtacatcgcgtacaaggggcgacggcttcaagctgctgatcccgtccaggtgggaccccaacaaggagcgggagttcccccggc

SEQ ID NO: 16184 - DNA, 402 bp, Zea mays
  Clone ID: LIB83-008-Q1-E1-A6
aattatttgcctttttaagtagcagtttaattgctagcacacctttaaaaattcttcaaaatgaaattaaaaacagagcaaagttgaaatgagagcaaacaagcaccatagagggaaagtgaactatttgaagcaactctagcaagcacagtaacatacatacctcatcatgcattattttaaatgcttgtttaacaggaagctgagtgtccaaaactgttaactgaaatgttcatatgaagaatttttaaaggtgtgctagcaattatttgcctttttaagtagcagtttaatttgttttcctattatgttttgcagtttaaaaacacaacaaaatcgctcctagaagcaggcacttctttcatctgcactgcatacgtggcatcagtttaataatttaag

SEQ ID NO: 16185 - DNA, 407 bp, Zea mays
  Clone ID: LIB83-008-Q1-E1-A8
ccatcgtgctggccagcatatccacggcgtgcaagcagatcgcggcgctggtgcagcgcgcgcccatctccaacctcacgggcgttcagggcgccgtcaacgtgcagggcgaggaccagaagaagctcgatgtcgtctccaacgaggtgttctccaactgcctcaagtcgagcgggcgcaccggcgtgatcgcctcggaggaggaggacgtgcccgtagcggtggagcagagctactccggcaactacatcgtcgtgttcgaccctctcgatggctcctccaacatcgacgccgccgtctccactggctccatcttcggcatctacaaccccaacgatgagtgcctcgccgacgtcgacgacaatgacacccttgattcggtggagcagaggtgcatcgtgaacgtg

SEQ ID NO: 16186 - DNA, 375 bp, Zea mays
  Clone ID: LIB83-008-Q1-E1-A9
cacttggtgcagccaagtaacatgccagatggtcttaacttttggaggtcgaagttactatgggcctcacgtgtgctaccaatgccacttgttgggctactcgtcatcactgggctgtgtctgccagtggaaaagcaagatgggtttccagagctggaggcattgtccaggctagattttggagctgcactgaagattttcttggcaaagcaactgacatctgaattcacagctgtgcctacacccgttgaggagaaatcagttatcattggggagaggaacagagttgctgccgagaagatccgggaagcaataaacggtgggtacaagagaataacggtcctctacggcggcggacacatgccagacctggga

SEQ ID NO: 16187 - DNA, 220 bp, Zea mays
  Clone ID: LIB83-008-Q1-E1-B1
ggctgaagagtttttgacagattggactggtagcttccccagggtcagaaaaaagaatgtgactcactgactgtaggggaatgccatggaagtgtagatgtgatgtttcttctcaattgtatatgccattggattgatgtttggaaattttacgtgtagtatgtctaagataagtccttttatgtactggttccgtgaacctataaaaatgcttcagctg

SEQ ID NO: 16188 - DNA, 396 bp, Zea mays
  Clone ID: LIB83-008-Q1-E1-B11
ggactacctcttgttcaaggttcgtgacgtgaagctcgacccgaatcctgaagaggtggccgatgtcaagtacatgaaccggcatcagctgaaggagctgctcaagaaagccgatgccggggaagatggcgttaagctctccccttggttcaagctggtggtggacaactttctcatgggctggtgggatcatgtcgagcaagggactctgcagggggcagcagacatgaaaaccatccataaattgtaaatcttctagatcgcttaagcacgagtcttgccctgttgaggaataagcgcttgtcctgctgtttggtgctggaggaataatcgataaaattataacagagtgatcttaattctggaacgtaactattaacattgaaacccatcctc

SEQ ID NO: 16189 - DNA, 425 bp, Zea mays
  Clone ID: LIB83-008-Q1-E1-B12
gttcaagaaccgcccacgcagaacccctccgccctccgctccttccaacttgctctctacctgcaccagcctcgcccacccttcgctcgccgccgccatggggaggggaaagttcaagggaaagcccaccggccgccacagcgtctccacaccagaggagatcgctgctggtacttcaggtcgccctcgcacctttatgaagacatgcaattgacaaagagaattgatcttttttatgggcgaagtgtcgaagatggctttggtgaaggaaatgtcttgttagcatcaagtaaatggcgacatcacaacccctacaagcttgtgccttaaaacaagaggatacaagaagttggagtgcttttgtgaaggcttttgcgaatcacttgaagcgttagtacttttgtgaatgattttggtaagtgttt

SEQ ID NO: 16190 - DNA, 393 bp, Zea mays
  Clone ID: LIB83-008-Q1-E1-B2
gggaggtttgctctagaggttgccttgaagacattggtcctgtttaaggagtattttgctgtgccataccccctccccaaaatggacatggttgctattccagattttgcagctggagccatggagaactatggcttggttacataccgtgaaacagcattgctatttgatgagatgcactctgcagctgccaataagcaacgggttgcagttgttgtagctcatgaattagctcatcaatggtttggaaatcttgtcacaatggaatggtggacacatctgtggcttaatgagggctttgcgacttgggtgtcttacttagctgcagatcagttctttcctgaatggaatgtttggactcagtttctagaggaatctacaataggtttcaag

SEQ ID NO: 16191 - DNA, 398 bp, Zea mays
  Clone ID: LIB83-008-Q1-E1-B3
ctccacagcaaggtggtggaggtcctcaaccctctggcgagggagttcaagtccatcgggaccttgaggaaagagctcgccgagctacagcaggagctggaaaaagctcacaatcaggtccatctctcggaagccagagtctcatcggcgctcgacaagctagcgcatatggagaccctggtgagcgcaccatccacagccgagccgcccacttcttcctccctgtctgcaactgcaagcagcaccgcccgtgtccgagccaagaacaaacagccacgtcggaggcttgacgtgtccggcccagtgaagccttacaaccccagcctcaagaacttctggtacccagtcgccttctccagcgatctcaaggctcctgacaccatggtggcaatcgactg

SEQ ID NO: 16192 - DNA, 394 bp, Zea mays
  Clone ID: LIB83-008-Q1-E1-B4
agtgtgttaagaaaaataaatcctgactggaagcttgatattgcagtccctgattatgtggaagggactgcaaatctagctaactctatgtacaaccaggctcttggagtgcccacagggtcccatggtgctttccgtgattatcaagttgatgcggtttctttagaattttcaccaacatttcatgtcaaaaatgagaatgctaaatctttgtttcttctgaagggtggaaggttaattgaaggagtggcacgttctgtgaacaatctgcttgagaagttccatcagtcctttttcctgtacttccttacaggtccaagcaagttcatttcggttggtgtgtatatgattccgtttgcattgcttttggcacctctcccaatagttgctgctg

SEQ ID NO: 16193 - DNA, 62 bp, Zea mays
  Clone ID: LIB83-008-Q1-E1-B5
caaagttagtccctttttttacagataatctacatatgatatgaaattctagtgcaattaat

SEQ ID NO: 16194 - DNA, 179 bp, Zea mays
  Clone ID: LIB83-008-Q1-E1-B6
agaaaggaaaaagtatctctctctcccgcgcgcgcgggtgacccggggaccctcctacgtctcgccaccctgctggtataacccgccggtcgtccacgccatggccatccaatatgcacggctctccctgccatgccgcctgccctcaccgctccctccgccggtgtcgacgacgatcc

SEQ ID NO: 16195 - DNA, 66 bp, Zea mays
  Clone ID: LIB83-008-Q1-E1-B7
gtacgttggaaccttcctggttggactcagagacagcagctggcactatatcctttatatcactat

SEQ ID NO: 16196 - DNA, 415 bp, Zea mays
  Clone ID: LIB83-008-Q1-E1-B8
agttcttctcccttgcgtctccatctccctgccccagcgcctgctcccattgccgcgcgtctctcccatgacgcttgcccagtccggccgccggtgacagggccgctcgcagcatcttcctcatctacgccgatgtcgtatgaaaattgtcgcgctggcacgtcgatgtcgttgatcatcatcctcatctacgtcaagccccaaaccatgaagatgctcttgtgctggccacgcgccaccagctcgacaaaatgcatcccctgagtatctggtcaaaaacgagattatgtgcaccgctcgtcaggtgtgtgcgatcatagacgtcaagcaaaaaccattgtcgttcttccgactatcgtgtcagatcggtcatggtaagctgatctattattcctgctagctaaaatgttgaatg

SEQ ID NO: 16197 - DNA, 66 bp, Zea mays
  Clone ID: LIB83-008-Q1-E1-B9
ccttcggcttttttattgtatcggggctctatttcgtgaattaaacctactcaattcgccgctctt

SEQ ID NO: 16198 - DNA, 405 bp, Zea mays
  Clone ID: LIB83-008-Q1-E1-C1
gcttggcagaacaaatattttattttctttacatgtctgcgtacgaatttgtagctgttatatttttatgttattgtcatatcaccaaatgagatagcctcacctgacttttagattataataaataattttttcatagcactcttttgatttcagttatcggatcccgcatcgtggaatgcttgccaaagggaggaaggtagctggaaggcgtgaagaaatgtctgcaaattatgcgtttggaccacaggatgatgatgcgattattaaacacaggcttctgactaggacaacgaccaccaggggtgaaccgccactaaagaagcttcagaagaagttcatgtcctttgcaactgagatcgagaaggatgcagataacataagtgactgtgaaagactgtacaa

SEQ ID NO: 16199 - DNA, 126 bp, Zea mays
  Clone ID: LIB83-008-Q1-E1-C10
cagacgcgtgggtttcataatggatacaaaaggaaccatcgttgttgggcaggagagactggatgtggattctggctgagctgtttgtaaattttccatcttgtgaatccagagaggttaggctgt

SEQ ID NO: 16200 - DNA, 384 bp, Zea mays
  Clone ID: LIB83-008-Q1-E1-C11
cagacgcgtggggcagcatatatcaccgagcaccctctctctctctgttcccctccctcgctcgacatggaggtcgccgccgccacttgtacgctccttgctgccgtcgccctaccagtttcgtcctcagcagcagcagcacgctctgcgacgaaacagagctactcgaggaggaagacgacggccgtgcgagccgtcatgcgaagccgcatcaggtgccgccgcctgccaccgccaccgccaccacgtaccgcgacaactggttcgacaagctggccatcgggtacctgtcccgggaccttcaagaagcttctgggatgaagaacagagaggacggctacgacggcctgatagaggcggccctggccatctccgcgctgttca

SEQ ID NO: 16201 - DNA, 409 bp, Zea mays
  Clone ID: LIB83-008-Q1-E1-C3
aagatgttcgacagtctgctcaactccaagttctacaacaaatgcaagcacgcgatcaagtgcacccggacccggctggatctgctgcggcggaagaagcaagcgatggtcaagttcctcaagaaggacgtcgctgacctcctcaccagcggccttgaatcgcacgccttcgcacggatggaagggctgatcattgagatgaaccaagcatcgtgctatgatacaatagaagagtactgcgaatatattgtgaagcagctcaaccacatgcagaaagagaggtaactgttggttcttcaagtgatgcagtcttgtttggatagctataacattatttttcttgttcttttgtgctcaaggcatgccatactcctgttctcatgcatatgtcgcgtttaagattgaaaat

SEQ ID NO: 16202 - DNA, 413 bp, Zea mays
  Clone ID: LIB83-008-Q1-E1-C5
ataggaataggagcgggggagtccgaggataggcaactcattgcttctgaatctctctctcctcgtcgcgacgagatcctctgcatctctacttccccggggaagtagctgctggcgtgtgtatctgactctcctcatcccgagttcttcactttcaggcatggtcgccgtgaagcagctcaccggccctgccagacccgctcacacgtgcgctgctcatgctcaccagctgctcagtgctcgatacgatcaccgtggcgcgtctcaagctgaattaccggaccggatttcgccatccaacgcttccacgttctgcacgagcatgtactcgtcgtcggcggcggattcctccaagtcgtgccggcaggcaggcgctctgccgttcctggcccatcctcctaaacgtgagcagc

SEQ ID NO: 16203 - DNA, 412 bp, Zea mays
  Clone ID: LIB83-008-Q1-E1-C6
atttctgtttgtggtttgtttctcttaattccagttggtgcttatggtgcaaagcaacagtaagtttttctgcgtaagatttgttatttgatttggccgaataacttcgagaaccatacagactaatctgtgtatggtgtgcccgatgatgatagaagtcaaggcttgtttctctacattcgcagttgccgcctaagagctttcgccctgccaggcttgagagctaatgctgctaattccttccttggatgtctgagggcacaataatgccagataattttgctttgaaatctgtttaactgttgttaccctggttttatagttttaattattaaattttattttatttgaaggatttgtaagagtatgcaggctttgtgggaagattttataagaacatgcgaagttcgtt

SEQ ID NO: 16204 - DNA, 408 bp, Zea mays
  Clone ID: LIB83-008-Q1-E1-C7
caggaatggagagacacaagctgggcactggcaaaatggagttcttgatactttaagcacacagaacttcatccctggatcacctattgctgtgaaccattccaaggtcctcaatgcagtgcaggaagcgagaagagctgcagagaaggcctatgacatcccaagagttgatgataaggtgaacagggcggttgcagcagctaataaagcagccaatgcagccagggtggctgccgtgaaggctgcacaaaagcgcatccccagtaatggtgacgatctaccactgtcagtagtgtgacaatgaagccaatatatgttggcatggagctgcttcgcgatgccatcgcatcaccaattgcccgacataaccttcaacttcccagtaggtgaagccactgctcgtccatc

SEQ ID NO: 16205 - DNA, 412 bp, Zea mays
  Clone ID: LIB83-008-Q1-E1-C8
agccggtgctggtggagttctgggcgccgtggtgcgggccgtgccggatgatcgcgccggtgatcgacgagctggccaaggactacgccggcaagatcatgtgctgcaaggtgaacacggacgacagccccaacgtggcatccacctacggcatccgcagcatccccaccgtgctcatcttcaagggcggcgagaagaaggagagcgtcatcggcgccgtccccaagtccacgctcaccaccctcatcgacaagtacatcggtagtagctcatgagcgcgcgagagaggcagcccatgtctcgtgatgtgcccccgagctgcatctgcatgcatgggatactgggatcgatgatacatgtgcccagctcgcgcataaacaccatgtatctctagccttgcccttgcatatat

SEQ ID NO: 16206 - DNA, 392 bp, Zea mays
  Clone ID: LIB83-008-Q1-E1-C9
agcatttacaatggatcttcaaaggagtgatgtttccatagtatcgtggctatgctcccaggttgatttgcgggcattatgtgcaatggtcccagtacctcttaaccagggggtcctcctggccttattgcagcagctagcaattgacattcacaatgagacatcacgaaaggttcaatggatgacagatgttgccatggcaatcaacccagcagaccagatgatcgcggttcatgtgcggcctatctttgagcaagtctacaaccaactggcccaccagcggacactccctaccatgaccgcagcagatggcaccagcatccgtgtgatcatgcatgtaattaactcagttctgcttagctacaagtgattgtagctacgcaactgtggga

SEQ ID NO: 16207 - DNA, 399 bp, Zea mays
  Clone ID: LIB83-008-Q1-E1-D1
atggtgaagatgatgatgaagaagaggaatattcattgagtaccagtgaagatctagaggagccgcaacggcataaaaaattggaaactcgtggccggcgaggtaccaagctgagatcagttgatgaaatccaaacaggtctcagacgcagcaagcgttcttctcgtcctcgtattaactatcaccaatatgatttttctgactcggatacggggcctggaaaggcaaagaaatctgatgcatcagattctgaagctggttctgatgccgagaatgatatggagctctcgacatcgagtcaagagcaagaggaagaagaggatgatagtcatgatggagaaaatggtaataatgtgaatgataaaatggatgaggaccacaccgtggcaaaaaattaag

SEQ ID NO: 16208 - DNA, 230 bp, Zea mays
  Clone ID: LIB83-008-Q1-E1-D10
atcctttttgaacatggggtttactatgggtgcatatcgcactcggaatgatatcgagaaattgcgactcgtacatgcaattatgcaggctgcttgctctgttagtcatatgatctttccgtcagtgattttaaattttacgctgctccgaggaaatttgcaggctgctccgagcaattatgcacgctgcttgctcattcgatgcccatctactggtacctcgttttccg

SEQ ID NO: 16209 - DNA, 427 bp, Zea mays
  Clone ID: LIB83-008-Q1-E1-D11
ggtgacatcggcaaagaaccgatgtgtctaaacaatgaagaattaagaggaaacttcatatctgagcgtgagcatcagcatcatggagggaacacagctggaaaattggcaactcagcataatttagaactgaacatattggctgaagatacagacagaagccaagtacaattgaagggaggagtcttagattttatggcaggtccatcagacaacaagcaaattgtaccttatggcactatgtctaatgatgaatcaagtgttatttttggtgccttacataggcttcgcctgtcccgctcagatatcttaagatggctgagatcaccgatcatgcacactacgttagatggcttttttgtccgactgcgatttggtaaatgggatgaaacattgggtggcacacgataacatgttgcccgcctga

SEQ ID NO: 16210 - DNA, 374 bp, Zea mays
  Clone ID: LIB83-008-Q1-E1-D12
ccacgcgtccggcagaagatagcagagggccagaggcgcagaaggcagtcgcggacaggaggaagaggaagaagaagcggcagcgagcgaggatgccgtgcctgaacgtgtcgaccaacgtgaacctggagggggtggacacctccgccatcctcgccgaagcctccaagtccgtcgccaacatcatcggcaagcccgaggcctacgtgatggttgttctcaagggttcggtgcctatggcatttggaggtacccacgagccagcagcttacggtgagctggtttccatcggaggcctgaaccctgatgtgaacaagaagcttagtgctggcatcgcttctatcctggagtcaaagctgtctgttcccaagtca

SEQ ID NO: 16211 - DNA, 419 bp, Zea mays
  Clone ID: LIB83-008-Q1-E1-D3
ggctacggcgatggtttcaagtgggtctcccaatacatcaagtagggcccttgccggggcgcttgctcagcccagcgatttttttgccttgttatttgttctggttggtatttcgtcacgtgaacgatgatcatcatatcatgacagtatcatggaggggtatgaagaggaaaaaacagtgcttaacattggggaacatgttgaatctttagcgtgaaaacattttgttatgtcagtcaaactcctggaattcttttgcttttccgtaggacctttactaaggacttgcctgcgatgcattataagattattgattgcttaaattatgtgttataatatggtggtggattggtactgagtatcggtggttgcgttatcaatgcatgtattcatttgtttgcttaaaaaaaagagaaaaa

SEQ ID NO: 16212 - DNA, 419 bp, Zea mays
  Clone ID: LIB83-008-Q1-E1-D4
cgcgctcgctttgcttcctcgtcgaggtccaagttcctgcattgatggcgaccgaggtggctgagactcccgcgccgttggcggaggcggtccccgagacccccgcggaggcaccggcggcgcccgccgccgaggcgaagcctaccaaggccaagaaggcctctgcgcccaagaagcgtgccaacccgacccacccgccgtacgccgagatgatctcggaggctgtcacgtcgctcaaggagcggacggggtccagccagtacgcgatcgccaagttcgtcgaggacaagcacaaggacaagctcccgcccaacttccgcaagctcctgctcggccagctcaagaagctcgtcgccggcggcaagctcaccaaggtgaagaactcctacaagctgcccgcacgcgccccggccgccgcc

SEQ ID NO: 16213 - DNA, 174 bp, Zea mays
  Clone ID: LIB83-008-Q1-E1-D5
aggacgaagagcgttttggtgtctacgtgtgtatacgctgccggctgtcggatcacgagggagaggggtttcctactatatacatgtgtaaaaatttgtttcatgtaatcttgtatctgagtgaccagatcaggtgattatgcagatgagaagaacagagttttttttcggtct

SEQ ID NO: 16214 - DNA, 416 bp, Zea mays
  Clone ID: LIB83-008-Q1-E1-D6
gaagatcaagaccgacaagccctacgggattgggggtggcctgaccgtcgacgtcgacgccaacgggagaaagggcaagggcaagggcgtgtaccagttcgtcgacaagtacggcgcgaacgtcgacggatacagcccaatctacaacgaggatgactggtctcccaccggcgacgtctacgtcggtggaaccactgggcttctgatctgggccgtcaccctcgctgggatcctcggcggcggcgccctcctcgtctacaacaccagcgccctctccggctaaggatatccaatgcatgcgcttcttgcgattcgtcatgtaaaatcagggtgtctgtctataatctagcctccatggatgctcaaccttcgtcatgtaacaataatcagtgctactcttcattacataattttga

SEQ ID NO: 16215 - DNA, 411 bp, Zea mays
  Clone ID: LIB83-008-Q1-E1-D7
ggatttcgaggggaaggggcttcatgccaaggcagaagaggtcctcagcatgcttgtaaagaaaaccatttccccttctgatgctacgaacaccatgctacaattctttaaatatggtgtaacagactattctgttactggcagcaagtcaaaaggaatactggcggctcagacaagcaaatctacagatatgctccatcttcagaccccaaccatcactccaccaaagtcctcgttcaacttcaagcccagcacctccattcttgattcacagatcgatgtgctcaaggccagcccaaaaccactctccatagaaccccatttcagctccagctcgaaggacgacgactcatccagcctcgagaccattgtgaagtgcaaggaagccgaggcaaaactgttccagaaact

SEQ ID NO: 16216 - DNA, 355 bp, Zea mays
  Clone ID: LIB83-008-Q1-E1-D8
gtgacgaggaggagctccagaaggagaacatcaagaacgccgcctcctccaccggcaacatcacgttgagcgtcaccaagagcaacccggagaccggcgaggtcatcggcgtcttcgagagcgtgcagccgtccgacaccgacctcggggccaaggcgcccaaggatgtcaagatccagggggtctggtacgctcagctcgagtgattcgagtgtctaactgctaggtgtccgaccgccgtcatggatcttgggaaggtgtatgtataccatgggaaactttggagagcacaggaggaatcgtgtatgtaatgtgcctgttaatgcaaattcgggctgtcgcttttttactccgc

SEQ ID NO: 16217 - DNA, 397 bp, Zea mays
  Clone ID: LIB83-008-Q1-E1-D9
gaacagttgaagctactagcgtgtagctagggaagagaagcgcgcgagtagctagcagacgtacgtaggcagaagcctagctgggtttgaagggccccgatcgatgatcccctacgcgactgcggcggaggcggagggagcactggggcgcaccatgacgtgggctgagacagcatggtacgagtactcggcggtgatgccagattcctggctgcactgccacaccacatttatcctgttcgtcatctacagcatcgccccgctgcccctgctactcctagagcagttcgctccgtccgtcgtgctgccgtacaagctgcagccccgggtacggctgcccccggcagcctccctcagctgctacatggacgcggcctgcatctttccgctcgccgtt

SEQ ID NO: 16218 - DNA, 132 bp, Zea mays
  Clone ID: LIB83-008-Q1-E1-E1
aggacgcgtggggaaaatttaccgtaaggtgtgtaaaataacttctgcatactgatctgccccctctatcagttatatacccagctatagcaatgatctccatcctatccagtaatggatttggtatcgcga

SEQ ID NO: 16219 - DNA, 414 bp, Zea mays
  Clone ID: LIB83-008-Q1-E1-E10
accacgcgtccgcattccactccgacattcacgtgcagctgtcgggagcaggcaatggcgccggatctaagcgaactcgccgccgccgctccagcccgtggcgcctacctcgccggcgtcggtgtcgcggtcctcctcgctgcctccttcctcccagtagccgagtcgtcctgcgtgcgagataactcattggtgagagacataagccaaatgccgcaaagcagctatgggattgaaggattgtcgcatataacagttgctggtgcgctcaatcatgggatgaaggaggtggaagtgtggcttcagacaataagtccaggtcaaaggacgccaatccacaggcattcctgtgaagaagttttcactgtcctcaaagggaacggtacgctcttgatgggaataagctcactaaag

SEQ ID NO: 16220 - DNA, 453 bp, Zea mays
  Clone ID: LIB83-008-Q1-E1-E11
acgcctgcagtacctgtcctagactccgggtcaaccacgcgtccgaccacgcgtccgcggacgcgtgggtagcttagagatggctgtgatgtcaacgcctcagcattaatttggacttctaggccttccttgcgtatttatgctttatataagcatatggggtatggtcgatcttgtctattgcccttcggagttcctttcaacttcacttgagcctttgatgggacaattggagtcatgtgcctctgctcagaaaatcagtttttaactgaaacccttcccttttgcttgcttccttgcttcgtcaatggtgataccagctattttagcatcaatcttgacggtgtgaatcccaaatggctgtggttttaatcttcctgggtttttttggcactcatgatattgatatagctatgatgttattgatatagtatactcccttcaatcattttt

SEQ ID NO: 16221 - DNA, 396 bp, Zea mays
  Clone ID: LIB83-008-Q1-E1-E12
agaggagggtgccaagctatatacctcattactcgaagagaagggtggtttgcagactctcttgaaatatattaaggagaataaccctgacaaactttctatagcacttgcttcatcacttgacactgttgctgaattggagctgttacaggctcctggtctgtcctttctcctgcctcaacagtatatagaatatccaaggctgacaggaagacgagttgttgaattcacagttgaaaaaggtgatggttcaacattctttccaactggtggtggtgaaccgaaaagtgttgctacaattcaggtcgttattgatgggtactctgccccactgactgctggaaactttgcaaaattggtcttggatggggtatatgacggggtaacacttaaatg

SEQ ID NO: 16222 - DNA, 88 bp, Zea mays
  Clone ID: LIB83-008-Q1-E1-E2
aaaaaaaacaaaaaaacaaaaaacaaaaaaaaaaaaaaaaaaaaaaaaaaaaacaaaaaaaaaaaaaaaaaaaaaaaaaatcaacaac

SEQ ID NO: 16223 - DNA, 400 bp, Zea mays
  Clone ID: LIB83-008-Q1-E1-E3
ggaccacaccggcgtccctcgtggtggccaccggcccgcgcggcgccggcgcggggcccatctgcgcgtccatgtccatgtcctcctccaacccgccctacgacctgacgtccttccggttcagccccatcaaggagtccatcgtgtcccgcgagatgacccgtcgctacatgacggacatgatcacctacgccgacaccgacgtcgtcatcgtgggcgccggctccgcggggctgtcctgcgcgtacgagctctccaaggaccccgccgtgagcatcgccatcgtggagcagtcggtgtcgccgggcggcggcgcgtggctgggcgggcagctgttctcggccatggtggtgcgcaagccggggcacctgttcctggacgagctgggcgtggggtacga

SEQ ID NO: 16224 - DNA, 395 bp, Zea mays
  Clone ID: LIB83-008-Q1-E1-E5
gaaatagaaacgaactaatatatagataatcgaaatcgaaaagaactgtcttttctgtatactttccccgttctattgctaccgcgggtcttatgcaatcgatcggatcatatagatatcccttcaacacaacataggtcatcgaaaggatctcggacgactcaccaaagcacgaaagccagttagaaaatggattcctatttgaagagtgcctaaccgcatggataagctcacattaacccgtcaattttggatccaattcgggatttttcttgggaagtttcgggaagaaattggaataatatcgattcatacagaggaaaaagttctctattgatgcaaacgctgtacctagaggataaggatagaggaagagggaaaaatcgaaatgaaat

SEQ ID NO: 16225 - DNA, 417 bp, Zea mays
  Clone ID: LIB83-008-Q1-E1-E6
cggacgcgtgggcggacgcgtgggctcccgtcttcttcctcgaccgctaaccttaccggtccccaaatgtcgcctctcgtgctgctgctcctcgcgcacctactcgccacgggcactgcagcgggagcagcgcggaccaaggacgacgggcctcctgctccgtcgtcgtcgtccccgcgggtgccggcgacgacgccgccgtggccggaccagttccacgcggtggtggtgacgaacctgagcgcgcgcggcggcgggctgcagctgatcgacctgtactacgactggccgcgagggcgcgacctgaacatcgtccgcgaccagctgtccggcgagcggcgctggagctggaacgtggagtggagcaacgggaccgccttcctgttcgactccgcgtcctgccgcaccttccagttc

SEQ ID NO: 16226 - DNA, 313 bp, Zea mays
  Clone ID: LIB83-008-Q1-E1-E8
actgcctggatcagatgcagttacagggggagatgcgagcagcatccgacggcgaccgccatgggcactccgaggggtggcgtctcctgcctgtgccggccctgcaattgcccggcgtgcgggctcccgacctgcctgtggagcatgctcctttctcttcgtgttctcatgagagtcctctccactcatcgtcgagggtatcatcgaagcgaatattcattcggtcaccgtggactcgggctcgggctaccacttcatgcattcagggtcttcgattttctactactatctcaaggtgtccaggactgtgtgt

SEQ ID NO: 16227 - DNA, 282 bp, Zea mays
  Clone ID: LIB83-008-Q1-E1-E9
aggacgcgtgggcagataggcaaacaccaagaagctaagctagcgcgccatgcagacgccgaccatgtcgacgtccatggccaccacggcgccagcgaagccccccgcgccgccgcggcaatgctgcaggtacctcctcctcccctccaccggccaccgccggagcgtggcggcatggtctgccaaaaagaagaacccgtggctggacccgttcgacgatgggcccgacgaggagttcgattaccagggcatgttctccggcgggaagcaggaggaagaccc

SEQ ID NO: 16228 - DNA, 368 bp, Zea mays
  Clone ID: LIB83-008-Q1-E1-F1
ggacatcgacctcttccccgacatcgaccttgacgccctcctcgcctccttctccggcgaccccgccgccgtctccggcctcatcatcccgtccccgcctccgccggcgccggcgacggcgcacgatgcggaggcggggtcgccggagtcggtgacctcccggacgaacccgctcggggaggtggcgctctcggagatcgagaggctcctgatgcacgagggggaggcggaactgggcggggaggtcgatgggatcagcgtggaccagttcttcgacgcgctgtacgacggcgaggaggcgaaaggtgagcgggaggcgggggcaagcgcggatgtggactccggcagggacgatgtgctggaagtcg

SEQ ID NO: 16229 - DNA, 111 bp, Zea mays
  Clone ID: LIB83-008-Q1-E1-F10
agctcttccttctctctcctcacttccgccgcgtctcgctggtgcaaaggctgcgtggggcctgcatcgtcgccagatacgaacgcgctgtgcacaggcagctaggctcat

SEQ ID NO: 16230 - DNA, 427 bp, Zea mays
  Clone ID: LIB83-008-Q1-E1-F11
catcatgctgcagttcgttgacgtggggacgatggtatcgccaacggtgtacgcgaggcggagcctgtgccacctcatgtgtgaccagcctgacgccgccctccgcgacgcaatgcaggcgcagtgcgtgtacccggactggccaaccgcgttctacatgcaagctgtcgcgctcgcgaagctgaacatgcagagcgatgccacggacatgttgaacgaggcatcgcagctcgaagagaagcgggagaagaacacaaaaccctgatgatggcttgttcctggtccaggggttgggaatgtaactgggggagtgtgctgcagagtcctgcgattgtaactacctggtttcgcatttctgtcatgcattttttttgggcccgtgtacatgttacatcgacgaaagtcgaaacaggcaaaatgcaagggg

SEQ ID NO: 16231 - DNA, 217 bp, Zea mays
  Clone ID: LIB83-008-Q1-E1-F12
gcgggtcgaagcaagcctctagagaaaggagctgtaggagccagaagagattgtaccgctagtgtatttttgtatgcacgctgtggagtggagctgatcaatgaaatatgctgtaaatatattatgtcttcatttatgcatactgtacatgattgttctcacgatcatgttgtgagcaacgtcctaaatcaaactgttgacgctttttcggagcgcc

SEQ ID NO: 16232 - DNA, 101 bp, Zea mays
  Clone ID: LIB83-008-Q1-E1-F2
agttcgaaacaggactcatcaccctagtttctaatttgtatatatttagcacccatccatataggatgttggtgacagtttattttttccttttaattttt

SEQ ID NO: 16233 - DNA, 393 bp, Zea mays
  Clone ID: LIB83-008-Q1-E1-F3
agcttgcatcataaacaagtcaacgttcgattacatcgacagtaatgcagcgcgggctctggcttatgagtatctcaggttttcgcccagacaccctttcacatccgacatccgggcatggatgtcgttacttttcctgtgcaaaggggcgaacaccattgaggtgtttggtatcgagctagatttctgtgacgccgcgaagtcagagaaagaaatcttgtggctcctagacatgcttgattggaaatagaagttccttatcccctttggggtttgacacatgttaagcctgttcatggttagtcgttcctttcctgttggaccatgttcgctactactgaactacataatctcctgagaaaatgtaataaatgtcacctgctactccatttt

SEQ ID NO: 16234 - DNA, 415 bp, Zea mays
  Clone ID: LIB83-008-Q1-E1-F4
agatccatctcttcggctgcctgtgctacccttcccttcacctcacacaggaatatactacacattcctgccttagatacatatatacttttttactgaaaaaaaaagctgagccggtgcgagcgaagcttgagcaatggcgagcgcgtttagctcgagggcatgcgcgctgctggcgctgctcctggggctctgcaccgccggcgcggccgcgggcaaggtcgacgacgggctggaggtgacgtggggcgaccgccgccggagcgtctcgcccgacggccaagtgctgacactgtcgctcgaacgcacctccggctccgggttccgctccaaggacacgtacctcttcgcgcgcgccgacgtgcaaatcaagctcgtccccgacaactccgccggcacggtcaacaccttctac

SEQ ID NO: 16235 - DNA, 415 bp, Zea mays
  Clone ID: LIB83-008-Q1-E1-F6
acattttaatccaaacaatctgacgcacggtgcaccagaagacgaagtccgtcatgcgggtgacctgggaaacattgttgcaaatgctgagggcatagccgaggcaaccattgttgatacccagattcctttgactggcccaaattcagttgttgggagagcatttgtggttcatgagcttgaagatgatttggggaaagggggccatgagctcagcctctctactggaaatgctggtggaagactggcatgtggtgttgttggcctgactccattgtaagttgctcgccgggtgcccgggttgcagttgcagctacgctgttacatccttgccttggtggacttttgtcttcaatcgtgttattgggacagtgacctttttgtattacttggattcattccatgcatgtggtat

SEQ ID NO: 16236 - DNA, 406 bp, Zea mays
  Clone ID: LIB83-008-Q1-E1-F7
ggccgagggcaacagcagctccggcggcgacctgttctccagcggcaagctggtggcgggggccgccgtgtcggtgttccagcagaagagtgtggagaacgtcgacaagcaggaggtcgccggcgcggcggccgagctcctgcacgcggcgtccgcgtacggtaagctcgacgacaagccggccgggcagtacgtcgagaaggccgaggggtacctgaaggagttcagcgcgggacacgccaccgagcaggagcagcctgcggcggcagcaggcgacgacgcggcgcccaagccaccggcgccggaggcgcccaaggagccggcggcggtgcctgcgccggccgcggaggaaggcagcaagtcgtcggagggcttcggcctcggcgacgtcatgaagggcgccgag

SEQ ID NO: 16237 - DNA, 386 bp, Zea mays
  Clone ID: LIB83-008-Q1-E1-F8
aaaaaagagggaaagagggaggatgggttgttgaacgtctcttaaatcagttacttatagaacttgatggtgctgatcaaagacaaggtgtctatgtgataggagctacaaacaggattgatgtgatagatgatgctgttttacgtcccggtagatttggaaagaaacattatgtacctttacctggtgcagaccagagagtttcaatattaaaggcacatgctcgtagcaagcccatctcgactgatgttgatttggatgcacttggtcgtcgtgctgagtgcaacaatctcactggtgccgacctaacatcactggtcaatgaagcagccatggcagcactggaagagagactggaaatccgtgacaaggggacatcctcactg

SEQ ID NO: 16238 - DNA, 408 bp, Zea mays
  Clone ID: LIB83-008-Q1-E1-F9
accacgcgtccgcggacgcgtgggcggacgcgtgggcggcccgcgacggagaggtggaccgccgtgacgtgggcaagatgaagcacgggtgcgagcattaccggcggaggtgcaagatcgtggcaccgtgctgcaaccaggtgttcccctgccgccactgccacaacgaggctacagcttccggagatcggcatacaatatgtcgtcaggatgttgaaaaagtagtttgcctactctgtgaaacaaaacagccggtgtcacaagtgtgcataagctgtggagtcaatatgggagagtacttttgtgatatatgcaaattttatgatgatgatacagacaaagggcagtaccattgcatcgattgtggcatatgcagggttggtggcaaggaaaacttcttccactgtg

SEQ ID NO: 16239 - DNA, 418 bp, Zea mays
  Clone ID: LIB83-008-Q1-E1-G10
atagaatcaggcactttatgcctatgcttgtattcctttatcagattttagctcgagctatggcgctttccttgtacagcagtacactatagtttagtggcagctgtatgggcttcagatcaaacatggtgctggttagtagtcttcattactggatatcgatgcctgaatcttctctttaacaactaccaccgtttttttttactgcagggccttcatggaggcacatcttccagcctttaaggaaaagaatccacacttagaggtggtgacagagcttgtccgcggtcaacatcctaacttgaagggaatttacaactcattcaattggctttaatattctcggtgtcaacgtccgttgaaagggcattttcagcgatgaaaattattaagatctatttacgaaacaagatggctg

SEQ ID NO: 16240 - DNA, 365 bp, Zea mays
  Clone ID: LIB83-008-Q1-E1-G11
gaggggaaatgttttttttaatgaatctaagatatcatttgtgttacatatgaccatttgagctatcaagattgttattgatcatacatattcttcacagaagctattgttttcttctaggaaagggactcaaaaatctcatcttaaaacagtagtccagtgcaacagcagcaggcagaaatatgaaaatgttctcaaccacactgactgcagcatcaagagtaactgatattaaggtatcagtactcagctcgaaggttctaccagattccagcagagcaaggcctctaacaaaagcaaatgctgcaggagccccagtttttagttggatattatccagatctcttctaacagcgtaccggaat

SEQ ID NO: 16241 - DNA, 394 bp, Zea mays
  Clone ID: LIB83-008-Q1-E1-G12
gacgccaacgagaaggaaccagtcactaagtcggcctctgtacggtccatgaacacacatcaacggagcgtgatgtccgctccggttcagacttcacctccttgaatgtttccgacatgagcgccgagtcgataaggaggacacagtaccccagcttcactgaccgcccatctaacctgagggtgttctcctttgctgaattgaagagtgccacccgcaacttccgccggtctctcatggttggctagggtggctttggctgtgtgtacaggggtgtcatcaagacctccgacgatctgaacgaacgaatcgagatcgctgttaagcagttgaatcgtaaaggacttcagggtccaattttgtggaaggaatgcttttgctccccttgcctttt

SEQ ID NO: 16242 - DNA, 120 bp, Zea mays
  Clone ID: LIB83-008-Q1-E1-G2
accacgcgtccgaccacgcgtccgcggacgcgtgggtagaatggaagagataattcaatttattaagttttgaacttctacttttgtttagaatttaggcattatttttcccttgcttcc

SEQ ID NO: 16243 - DNA, 407 bp, Zea mays
  Clone ID: LIB83-008-Q1-E1-G3
agcacctggcgctgaaggcactgggcaggcccaacgccgtggacgggaccatccccgaggtgtcgccggcgctgcgcgaggagttcgtgattgcgtccaaggacgacgaggtcgtggacgcctgagcgagcatccacgcgccagcatgcaagcagcgtcttatctgggccggcgccatcacggggttttcttcttttaatctgggactttgttgttgttggacgaatgaattcccttcgatcggttagctttaatctgtctcgttagtgtgtcgtgttcgtgtagcaccatgccacaactacgccatgccgtgtgctctgtcacgtgggggccactcgtggggtctcctgctgctgtcagaacgaataagagaagatggaattgtggtgaaacaataaaaatgcatg

SEQ ID NO: 16244 - DNA, 399 bp, Zea mays
  Clone ID: LIB83-008-Q1-E1-G4
aattcggagcagttgggtgtgctggtgtgtgttggaacggttgtccctccggcctggggggtcctcttgcttgctgctatatgatccccacgcctcccgcgccactctaaccaccgcatccactctcgtcccgtcccgtatctacctacctgctctctcgtcttctgctcacacgctgacgcgcacgctccgagtccgagctaagctagctagctaactacttccggggcggcacagccacagctgtttaggtagtagctagacgtacgtacgtactcacaccacgatgacgaacgcgtggaggccgatgctggcgtcgggcaccaagtgctgccccgcggaggacgcggcggtgggccccgacggcctggcgcggtgccggccgcagcagtcggagct

SEQ ID NO: 16245 - DNA, 310 bp, Zea mays
  Clone ID: LIB83-008-Q1-E1-G5
aaacaacaacatcgtcgacaatcaagattatgccttgttttgtagtattcgtcttgagtcgctttgtttattaccaatctattatctggtgttgaacagcagcacattgcagaacagatgatcgtcgagtgaccttcatatacgcctgtaactctctctctctccctctctctcagctcagcagtttagatcgactatactcattggacatggacctatctatatatcttctttgtaaacaggacagagtcggactcctgctgcagtattatcaactcatctattttaaactctttaagttggatttaaa

SEQ ID NO: 16246 - DNA, 421 bp, Zea mays
  Clone ID: LIB83-008-Q1-E1-G6
acaatccaatccaatccagtcctaccccgccccttccaagatcttcaatcgtccaacaaaagcaggagtcgcatcccagaccaccccccccgcatcagagacaggcagggagggaactgagatccgtccgtccgagtcgatggagtcaacggtggagcggataagctcgtcagtgcagtcctgggtgaaggaccacgagctcgcagccatcggaggcgtgtgggctgcggcggtgggcgcttcggtggcgtacaaccggaggaaggcgccgcagcactcccgcacagagccagcgcgggatccgcagcgggggcgagatccggggcggaggcgacggcggacggtgcctgtgcggtcgtgggggacgggcacggtgggggctggtgggctgcttccatgtgcgcccgtgggaaggtgcggg

SEQ ID NO: 16247 - DNA, 416 bp, Zea mays
  Clone ID: LIB83-008-Q1-E1-G7
gtctctaaaggctggaggttgctattgttggttctttctgcacaacaaaggtattcagaagctgaagttgtaactgatgctgcattagatgagaccgcgaagtgggaacaagggccattgcttagaataagggctaaactgaaggttgctcaagcattgcctatggaagcagttgaagcatatcgcacccttcttgctcttgttcaggcacaacggaaggcttatggatctgtcaaaaatggcacagaggataatgaggataaagtgagggaagttgaagtttggcatggtcttgccaacctgtactctagtctttcctattggaggagatgcacaaatttgcttacaaaaaggcaaagccctcaaaacatactctgcgaacaaccttcatgtaaaagggaacaaacaacaactgc

SEQ ID NO: 16248 - DNA, 392 bp, Zea mays
  Clone ID: LIB83-008-Q1-E1-G8
aaccacgcgtccgacgccacagcttgcgcccgcaatggcactcgtctccgcctcctcgtcctccaccaccgccgtcacggcgctccccaggaatgggcagcgggcgtcgtcctccttcctcggcggcaagacgctgctgagacaagccgaggcgggccggccgtcgttcgccgtgcgcgccgcggcggaccccaacaggccgatctggttccccggcagcacccctccgccgtggctcgacgggagccttcccggcgagttcggctttgatccctggggcctccgatctgacccggagagcctgcggtggaacgtgcaggcggagctggtgcactgccggtgggcgatgctcggcgcggcgggcatcttcatcccggagttcctgaccaaga

SEQ ID NO: 16249 - DNA, 416 bp, Zea mays
  Clone ID: LIB83-008-Q1-E1-H1
cgtcgacccgctgtaccctggcggcagcttcgaccccctcgggctggccgacgaccccgaggccttcgccgagctcaaggtgaaggagctcaagaacggccgcctcgccatgttttccatgttcggcttcttcgtccaggccatcgtcaccggcaagggcccgctcgagaacctcgctgaccacatcgctgacccagtcaacaacaacgcatgggcctacgccaccaacttcgtccccggcaactaagctcaacggctatgctatgcaacttcattgtctttcggatcggagagggtgtacgtacgtggattgattgatgctgcgagatgcatgtgtgtcctttgtttcacgttgcattgcataggcaagtcgagatgatgagttggcgttgtacactaagatgaaccatgtttgt

SEQ ID NO: 16250 - DNA, 421 bp, Zea mays
  Clone ID: LIB83-008-Q1-E1-H10
ccgggtcgaacacgcgtccgaccacgcgtccgcccacgcgtccgcccacgcgtccgcaactccatggacatctgggagttgtagtcggcgatgagcttgtcgcgggccgacctctccatcatgtagatctccggctacaactccatggacatctgggacttcaacgagaagtacggcgagctctgggacttcaccgtcaacaccagggacgacatcgtcaagtcgacctagatgcattgcgtacaccgctcgctgcccttcagattgttgcctcacagcaaaaaaaaccctgtgaaaggaagctgtagctgctaggaaaatctcttgaataaaaacgaaagccatccttcctgtaagactggagagcctgaaaatctgttctatcctcgtgccatataatacacgacatgttctgcagact

SEQ ID NO: 16251 - DNA, 181 bp, Zea mays
  Clone ID: LIB83-008-Q1-E1-H11
acggcgaccctgcccctgccggcgaaccagtaccaaccccattgcaaggaccagcccagcgtcgcatctcaacatcccgcatctcccagatcgtgcgcacctacctagacctctccagttccaggaagcgccgttccgctcctaagaaccagcccaaggccggggacaaggaaagggatgc

SEQ ID NO: 16252 - DNA, 375 bp, Zea mays
  Clone ID: LIB83-008-Q1-E1-H12
caccatggagtttgtagtgtttggtttacaaggtaacttccgcgttcgagccccaccgtgacgatgaggtttgggatgaacttgggcggggaaacgagcaaaagaaaacagaatagaacaaacgaaccggcttcagcccatgcgaaccaggagaagcggtgggtgctgtctgatttcgaggttgggaaacctcttgggaggggcaagtttggccatgtttatcttgccagagaaaaaaggagtagtgagattgtggctttgaaagttcttttcaagagccagctcaagcaatcacaggttgagcatcagctgcgacgtgaagtggagattcagagtcatcttcgtcatcctaatattcttcgcctgtatgggtac

SEQ ID NO: 16253 - DNA, 262 bp, Zea mays
  Clone ID: LIB83-008-Q1-E1-H2
ccccgcgccaagaacacgccagctagcaagcgcgctcgatcgaataccgttaccgtgtcgccatggccgccaacgcgtctctatcaaccgtcggggcgccgctgtcggtgcccgggctcaggaagccgctcggcgtgtcgtcgctccgggccctgcagccgagggcggcgaagatgacgacgacggccgtgcgggcgtctgggtcgccctcgtccacgtccatcaaggagaaagctgcggccgggctgaccgcggcgggcct
